(19) United States
(12) Patent Application Publication
(10) Pub. No.: US 2007/0009916 A1
(43) Pub. Date: Jan. 11, 2007

(54) Guanosine triphosphate-binding protein coupled receptors

(75) Inventors: Makiko Suwa, Tokyo (JP); Kiyoshi Asai, Tokyo (JP); Yutaka Akiyama, Tokyo (JP); Hiroyuki Aburatani, Tokyo (JP)

Correspondence Address: FOLEY AND LARDNER LLP;SUITE 500, 3000 K STREET NW, WASHINGTON, DC, 20007, US

(73) Assignee: National Institute of Advanced Industrial Science and Technology

(21) Appl. No.: 11/214,063

(22) Filed: Aug. 30, 2005

Related U.S. Application Data
(62) Division of application No. 10/292,798, filed on Nov. 13, 2002, now abandoned.
Application No. 10/292,798 is a continuation-in-part of application No. 10/017,161, filed on Dec. 18, 2001, now abandoned.

(30) Foreign Application Priority Data
Jun. 18, 2001 (JP) 2001/246789

(51) Int. Cl. C12Q 1/68; C07H 21/04; C12P 21/06; C07K 14/705; C07K 16/28

(52) U.S. Cl. 435/6; 435/69.1; 435/320.1; 435/325; 530/350; 530/388.22; 536/23.5

(57) ABSTRACT

The object of the present invention is to provide a technique for efficiently extracting GPCR sequences from human genome sequences, thereby comprehensively identifying novel GPCRs. An original automatic system for identifying GPCR sequences is disclosed, and 1035 novel GPCRs are successfully identified from the entire human genome by utilizing the system.

### FIELD OF THE INVENTION

[0001] The present invention relates to novel polypeptides belonging to the guanosine triphosphate-binding protein coupled receptor (hereinafter, abbreviated as “GPCR”) family, polynucleotides encoding said polypeptides, as well as production and use of the same.

### BACKGROUND OF THE INVENTION

[0002] More than 90% of drugs developed by drug industries in the world so far, have targeted interactions in the extracellular spaces, and a majority of these drugs target the GPCRs that comprise seven transmembrane helices (Baldwin J. M., Curr. Opin. Cell Biol. 6: 180-190 (1994); Strader C. D. et al. , FASEB. J. 9: 745-754 (1995) Bockaert J., Pin J. P., EMBO. J. 18: 1723-1729 (1999)). Therefore, GPCRs are one of the most important targets in finding genes for designing drugs. The GPCRs are involved in the signal transduction induced by specific ligands, such as adrenaline and acetylcholine, and characteristics of the binding mechanisms thereof have been actively investigated by conducting experiments (Watson S. & Arkinstrall S., The G-protein Linked receptor Facts Book (Academic Press, London)).

[0003] However, despite the vast data sources, such as cDNAs, ESTs, and microarray analyses, that have been obtained, only a limited number of novel sequences of the family have been discovered (Lee D. K. et al. , Brain Res. Mol. Brain Res. 86: 13-22 (2001); Mizushima K. et al., Genomics. 69: 314-321 (2000); Matsumoto M. et al., Gene. 248: 183-189 (2000); Marchese A. et al., Trends Pharmacol. Sci. 20: 447 (1999); Lee D. K., FEBS. Lett. 446: 103-107 (1999); Yonger R. M. et al., Genome Research. 11: 519-530 (2001); Horn F. et al., Nucleic Acids Res. 29: 346-349 (2001)). Even the large-scale classification of known GPCR sequences, such as GPCRdb (Lee D. K. et al., Brain Res. Mol. Brain Res. 86: 13-22 (2001)) and collections by PSI-BLAST (Josefson L. G. , Gene. 239: 333-340 (1999)), have not led to a broadscale elucidation at the level of the entire qenome.

[0004] Therefore, it is important to elucidate the GPCR families as a whole by scanning human genomic sequences, wherein more than 90% of all the sequences thereof have been already determined (International Human Genome Sequencing Consortium. Initial sequencing and analysis of the human genome. Nature 409: 860-921 (2001); Venter J. C. et al., Science 291: 1304-1351 (2001)).

### SUMMARY OF THE INVENTION

[0005] This need in the art led to the present invention, and the object of the present invention is to develop an automated technique for efficiently extracting GPCR sequences from the human genome sequences and thereby inclusively identifying novel GPCRs.

[0006] Another object of the present invention is to provide a use for the newly identified GPCRs. As one preferred embodiment of the use of the novel GPCRs, this invention provides for the use of GPCRs to screen drug candidate compounds such as ligands, etc. Moreover, as another preferred embodiment for the use of the novel GPCRs, this invention provides a method for testing disorders based on mutations and expression aberrations of the novel GPCRs as an indicator.

[0007] Furthermore, this invention provides a use for the novel GPCRs or molecules that control the activities thereof, in the treatment of disorders.

[0008] To accomplish the objects described above, first, the present inventors carefully evaluated analytical methods for sequence search (Altschul S. F. et al., Nucleic Acids Res. 25: 3389-3402 (1997)), motif and domain attribution (Bateman A. et al., Nucleic Acids Res. 28: 263-266 (2000); Bairoch A., Nucleic Acids Res. 20 Suppl: 2013-2018 (1992)), and transmembrane helix prediction (Hirokawa T. et al., Bioinformatics, 14: 378-379 (1998)), and then, developed an automated system for identifying GPCR sequences from the whole human genome. This automated system comprises the following three steps.

[0009] The first step is to predict genes. More specifically, translation of the genomic sequences into amino acid sequences. The prediction of a gene can be achieved to a certain extent by resorting to 6-frame development of nucleotide sequences, since most of the known GPCR genes contain no introns. On the other hand, for sequences with multiple exons, it is necessary to predict the entire gene structure using a gene-finding program.

[0010] The second step consists of a three-fold analysis of the amino acid sequences. More specifically, this step comprises: (1) searching for corresponding sequences in known GPCR databases; (2) attributing the motif and domain; and (3) predicting the transmembrane helix (TMH). The former two procedures are used to find closely related GPCR homologues, while the TMH prediction is used to find remote GPCR homologues. Subsequently, candidate sequences are screened by taking the analysis results of the three analyses as a logical sum. In order to maximize the number of candidate sequences at this screening step, the present inventors have used the logical sum of the results of the analyses.

[0011] The third step is to further refine the quality of the candidate genes by eliminating overlapping sequences from the second step, and merging fragmented sequences separated by misprediction.

[0012] According to this automated system, GPCR sequences can be efficiently and inclusively identified. A further great advantage of the automated system is that it can identify even GPCR sequences consisting of multiple exons and remote homologous sequences, which have been difficult to find by conventional methods.

[0013] Using the automated system of the present invention, the inventors have successfully identified 1035 novel GPCR sequences from the whole human genome, such sequences guaranteed with a high confidence to be members of the GPCR family. The discovery of such novel GPCR sequences enables the screening of ligands, antagonists and agonists, which are expected to be useful as drugs. Additionally, GPCRs are thought to have important functions in vivo. Thus, aberrations in the expression and function thereof may be the cause of a variety of disorders. Therefore, it is possible to analyze and evaluate such disorders using as an indicator inappropriate functions or expressions of the identified GPCRs. The identified GPCRs, polynucleotides encoding them, and ligands, antagonists, or agonists of the identified GPCRs may function as preferred therapeutic agents for such disorders.

[0014] Accordingly, the present invention relates to novel GPCRs and genes encoding them, as well as methods for producing and using same. More specifically, the present invention provides the following:

[0015] (1) a polynucleotide encoding a guanosine triphosphate-binding protein coupled receptor selected from the group of:

[0016] (a) a polynucleotide encoding a polypeptide comprising an amino acid sequence of any even-numbered SEQ ID NOs from SEQ ID NO: 2 to SEQ ID NO: 2070;

[0017] (b) a polynucleotide comprising a coding region of the nucleotide sequence of any odd-numbered SEQ ID NOs from SEQ ID NO: 1 to SEQ ID NO: 2069;

[0018] (c) a polynucleotide encoding a polypeptide comprising an amino acid sequence of any even-numbered SEQ ID NOs from SEQ ID NO: 2 to SEQ ID NO: 2070 wherein one or more amino acid residues are substituted, deleted, added, and/or inserted; and

[0019] (d) a polynucleotide hybridizing under stringent conditions with a DNA consisting of a nucleotide sequence of any odd-numbered SEQ ID NOs from SEQ ID NO: 1 to SEQ ID NO: 2069;

[0020] (2) a polynucleotide encoding a fragment of a polypeptide comprising the amino acid sequence of any even-numbered SEQ ID NOs from SEQ ID NO: 2 to SEQ ID NO: 2070;

[0021] (3) a vector comprising the polynucleotide of (1) or (2);

[0022] (4) a host cell retaining the polynucleotide of (1) or (2) or the vector of (3);

[0023] (5) a polypeptide encoded by the polynucleotide of (1) or (2);

[0024] (6) a method for producing the polypeptide of (5), comprising the step of culturing the host cell of (4), and recovering the produced polypeptide from said host cell or culture supernatant thereof;

[0025] (7) an antibody binding to the polypeptide of (5);

[0026] (8) a method of identifying a ligand of the polypeptide of (5), comprising the steps of:

[0027] (a) contacting a candidate compound with the polypeptide of (5), cell expressing the polypeptide of (5), or cytoplasmic membrane of the cell; and

[0028] (b) detecting whether the candidate compound binds to the polypeptide of (5), cell expressing the polypeptide of (5), or cytoplasmic membrane thereof;

[0029] (9) a method for identifying an agonist of the polypeptide of (5), comprising the steps of:

[0030] (a) contacting a candidate compound with the cell expressing the polypeptide of (5); and

[0031] (b) detecting whether the candidate compound induces a signal that indicates the activation of the polypeptide of (5);

[0032] (10) a method for identifying an antagonist of the polypeptide of (5), comprising the steps of:

[0033] (a) contacting a cell expressing the polypeptide of (5) with an agonist of the polypeptide of (5) in the presence of a candidate compound; and

[0034] (b) detecting whether the intensity of the signal that indicates the activation of the polypeptide of (5) is reduced or not by comparing with the signal detected in the absence of the candidate compound;

[0035] (11) a ligand identified by the method of (8);

[0036] (12) an agonist identified by the method of (9);

[0037] (13) an antagonist identified-by the method of (10);

[0038] (14) a kit for use with the method of any one of (8) to (10), comprising at least one molecule selected from the group:

[0039] (a) the polypeptide of (5); and

[0040] (b) the host cell of (4) or cytoplasmic membrane thereof;

[0041] (15) a pharmaceutical composition for treating a patient, who is in need of increased activity or expression of the polypeptide of (5), comprising an effective amount of the molecule for the treatment selected from the group of:

[0042] (a) an agonist of the polypeptide of (5);

[0043] (b) the polynucleotide of (1) or (2); and

[0044] (c) the vector of (3);

[0045] (16) a pharmaceutical composition for treating a patient, whose activity or expression of the polypeptide of (5) needs to be suppressed, comprising an effective amount of the molecule for the treatment selected from the group of:

[0046] (a) an antagonist of the polypeptide of (5); and

[0047] (b) a polynucleotide suppressing the expression of a gene encoding the endogenous polypeptide of (5) in vivo;

[0048] (17) a method for testing a disorder associated with the aberration in the expression of a gene encoding the polypeptide of (5) or the aberration in the activity of the polypeptide of (5), comprising the step of detecting a mutation in the gene or in the expression control region thereof in the subject;

[0049] (18) the method of (17), comprising the steps of:

[0050] (a) preparing a DNA sample from a subject;

[0051] (b) isolating from the sample the DNA encoding the polypeptide of (5) or the expression control region thereof;

[0052] (c) determining the nucleotide sequence of the isolated DNA; and

[0053] (d) comparing the nucleotide sequence of DNA determined in step (c) with that of a control;

[0054] (19) the method of (17), comprising the steps of:

[0055] (a) preparing a DNA sample from a subject;

[0056] (b) cleaving the prepared DNA sample with a restriction enzyme;

[0057] (c) separating DNA fragments according to the sizes thereof, and

[0058] (d) comparing the detected sizes of the DNA fragments with those of a control;

[0059] (20) the method of (17), comprising the steps of:

[0060] (a) preparing a DNA sample from a subject;

[0061] (b) amplifying in the sample the DNA encoding the polypeptide of (5) or the expression control region thereof;

[0062] (c) cleaving the amplified DNAs with a restriction enzyme;

[0063] (d) separating the DNA fragments according to the sizes thereof; and

[0064] (e) comparing the detected sizes of the DNA fragments with those of a control;

[0065] (21) the method of (17), comprising the steps of:

[0066] (a) preparing a DNA sample from a subject;

[0067] (b) amplifying in the sample the DNA encoding the polypeptide of (5) or the expression control region thereof;

[0068] (c) dissociating the amplified DNA to single-stranded DNAs;

[0069] (d) separating the dissociated single-stranded DNAs on a non-denaturing gel; and

[0070] (e) comparing the mobility of the separated single-stranded DNAs with that of a control;

[0071] (22) the method of (17), comprising the steps of:

[0072] (a) preparing a DNA sample from a subject;

[0073] (b) amplifying in the sample the DNA encoding the polypeptide of (5) or the expression control region thereof;

[0074] (c) separating the amplified DNAs on a gel with increasing concentration gradient of a DNA denaturant; and

[0075] (d) comparing the mobilities of the separated DNAs with those of a control;

[0076] (23) a method for testing disorders associated with the aberration in the expression of a gene encoding the polypeptide of (5), comprising the step of detecting the expression level of the gene in the subject;

[0077] (24) the method of (23), comprising the steps of:

[0078] (a) preparing an RNA sample from a subject;

[0079] (b) measuring the amount of RNA encoding the polypeptide of (5) contained in said RNA sample; and

[0080] (c) comparing the amount of measured RNA with that of a control;

[0081] (25) the method of (23), comprising the steps of:

[0082] (a) providing a cDNA sample prepared from a subject, and a basal plate on which nucleotide probes hybridizing to the DNA encoding the polypeptide of (5) are immobilized;

[0083] (b) contacting said cDNA sample with said basal plate;

[0084] (c) measuring the expressed amount of the gene encoding the polypeptide of (5) contained in said cDNA sample by detecting the hybridization intensity between said cDNA sample and the nucleotide probe immobilized on the basal plate; and

[0085] (d) comparing the measured expression amount of the gene encoding the polypeptide of (5) with that of a control;

[0086] (26) the method of (23), comprising the steps of:

[0087] (a) preparing a protein sample from a subject;

[0088] (b) measuring the amount of the polypeptide of (5) contained in said protein sample; and

[0089] (c) comparing the amount of the measured polypeptide with that of a control;

[0090] (27) an oligonucleotide having a chain length of at least 15 nucleotides hybridizing to a DNA encoding the,polypeptide of (5) or the expression control region thereof;

[0091] (28) an assay reagent for testing disorders associated with aberration in the expression of the gene encoding the polypeptide of (5) or aberration in the activity of the polypeptide of (5), comprising the oligonucleotide of (27); and

[0092] (29) an assay reagent for testing disorders associated with aberration in the expression of a gene encoding the polypeptide of (5) or aberration in the activity of the polypeptide of (5), comprising the antibody of (7).

[0093] In the following, definitions of terms used herein are described to facilitate understanding of the terms used herein, but it should be understood that they are not described so as to limit the present invention in any way.

[0094] Herein, the term “guanosine triphosphate-binding protein coupled receptor (GPCR)” refers to a cytoplasmic membrane receptor that transmits signals into cells via activation of a GTP-binding protein.

[0095] The term “polynucleotide” as used herein refers to a ribonucleotide or deoxyribonucleotide or a polymer consisting of a plurality of bases or base pairs. Polynucleotides include single-stranded DNAs as well as double-stranded DNAs. Polynucleotides include both unmodified naturally occurring polynucleotides and modified polynucleotides. Tritylated bases and special bases such as inosine are examples of modified bases.

[0096] The term “polypeptide” used herein refers to a polymer comprising a plurality of amino acids. Therefore, oligopeptides and proteins are also included within the concept of polypeptides. Polypeptides include both unmodified naturally occurring polypeptides and modified polypeptides. Examples of polypeptide modifications include acetylation; acylation; ADP-ribosylation; amidation; covalent binding with flavin; covalent binding with heme moieties; covalent binding with nucleotides or nucleotide derivatives; covalent binding with lipids or lipid derivatives; covalent binding with phosphatidylinositols; cross-linkage; cyclization; disulfide bond formation; demethylation; covalent cross linkage formation; cystine formation pyroglutamate formation; formylation; γ-carboxylation; glycosylation; GPI-anchor formation; hydroxylation; iodination; methylation; myristoylation; oxidation; proteolytic treatment; phosphorylation; prenylation; racemization; selenoylation; sulfation; transfer RNA-mediated amino acid addition to a protein such as arginylation; ubiquitination; and such.

[0097] The term “isolation” as used herein refers to a substance (for example, polynucleotide or polypeptide) taken out from the original environment (for example, natural environment for a naturally occurring substance), and “artificially” changed from the natural state. “Isolated” compound refers to compounds comprising compounds present in samples substantially abundant in subject compound and/or those present in samples wherein the subject compound is partly or substantially purified. Herein, the term “substantially purified” refers to compounds (for example, polynucleotides or polypeptides) that are isolated from the natural environment and which do not contain at least 60%, preferably 75%, and post preferably 90% of the other components associated with the compound in nature.

[0098] The term “mutation” used herein refers to changes of amino acids in an amino acid sequence or changes of bases in a nucleotide sequence (that is, substitution, deletion, addition, or insertion of one or more amino acids or nucleotides). Therefore, the term “mutant” as used herein refers to amino acid sequences wherein one or more amino acid(s) is changed, or nucleotide sequences wherein one or more base(s) is changed. The nucleotide sequence changes in the mutant may either change the amino acid sequence of the polypeptide encoded by the standard polynucleotide or not. The mutant may be one existing in nature, such as an allelic mutant, or one not yet identified in nature. The mutant may be altered conservatively, wherein the substituted amino acid has similar structural or chemical characteristics as that of the original amino acid. Rarely, mutants may be substituted non-conservatively. Guidance to decide which or how many amino acid residues are to be substituted, inserted, or deleted without inhibiting biological or immunological activities can be found using computer programs known in the art, such as the DNA star STAR software.

[0099] “Deletion” is a change either in the amino acid sequence or nucleotide sequence, wherein one or more amino acid residues or nucleotide residues are absent, respectively, as compared with the amino acid sequence of a naturally occurring GPCR and GPCR-associated polypeptide, or the nucleotide sequences encoding same.

[0100] “Insertion” or “addition” is a change either in the amino acid sequence or nucleotide sequence, wherein one or more amino acid residues or nucleotide residues are added, respectively, as compared with the amino acid sequence of a naturally occurring GPCR and GPCR-associated polypeptide, or nucleotide sequences encoding same.

[0101] “Substitution” is a change either in the amino acid sequence or nucleotide sequence, wherein one or more amino acid residues or nucleotide residues are changed for different amino acid residues or nucleotide residues, respectively, as compared with the amino acid sequence of a naturally occurring GPCR and GPCR-associated polypeptide, or nucleotide sequences encoding same.

[0102] The term “hybridize” as used herein refers to a process wherein a nucleic acid chain binds to its complementary chain through the formation of base pairs.

[0103] In general, the term “treatment” as used herein means to achieve pharmacological and/or physiological effects. Such effects may be either a prophylactic effect, preventing disorders or symptoms completely or partially, or a therapeutic effect curing symptoms of disorders completely or partially. The term “treatment” used herein encompasses all treatments of disorders in mammals, in particular, humans. Moreover, this term also includes prophylaxis of the onset of the disease, suppression of progression of the disorder, and amelioration of the disease in subjects with diathesis of disease who have not been diagnosed as being ill.

[0104] The term “ligand” used herein refers to molecules that bind to a polypeptide of the present invention, including both natural and synthetic ligands. “Agonist” refers to molecules that bind and activate a polypeptide of the present invention. On the other hand, “antagonist” refers to molecules that inhibit the activation of a polypeptide of the present invention.

### BRIEF DESCRIPTION OF THE DRAWINGS

[0105] FIG. 1 is a graph showing the number of pairs between GPCR sequences and other GPCR sequences or non-GPCR sequences, which were plotted with respect to the E-value, detected during the search of known GPCR sequences in an evaluation database including 1,054 of GPCR sequences and 64,154 of non-GPCR sequences.

### DETAILED DESCRIPTION OF THE INVENTION

[0106] <Polypeptides>

[0107] The present invention provides novel polypeptides belonging to the GPCR family. Nucleotide sequences of 1035 polynucleotides derived from humans, whose sequences have been identified by the present inventors, are shown in the odd-numbered SEQ ID NOs from SEQ ID NO: 1 to SEQ ID NO: 2069. Amino acid sequences of polypeptides encoded by said polynucleotides are shown in the even-numbered SEQ ID NOs from SEQ ID NO: 2 to SEQ ID NO: 2070. In the nucleotide sequences shown in the odd-numbered SEQ ID NOs from SEQ ID NO: 1 to SEQ ID NO: 2069, n means a base selected from a, t, c, and g. In the amino acid sequences shown in the even-numbered SEQ ID NOs from SEQ ID NO: 2 to SEQ ID NO: 2070, Xaa means any one of amino acids. GPCRs have the activity to transmit signals into the cell through the activation of a G protein by the action of a ligand of GPCR, and are associated with genetic diseases and disorders in great many regions of the body, such as the cranial nervous system, the cardiovascular system, the alimentary system, the immune system, the locomotorial system, the urogenital system, etc. Therefore, the polypeptides of this invention can be used to screen for ligands, agonists, or antagonists that control the functions of the polypeptides, which serves as an important target in the development of drugs for above-described disorders.

[0108] This invention also provides polypeptides functionally equivalent to the polypeptides identified by the present inventors. Herein, the term “functionally equivalent” means that the subject polypeptide has a biological characteristic equivalent to that of a polypeptide identified by the present inventors. Examples of biological characteristics of GPCRs include: binding activity with a ligand; and the activity to transduce signals into cells through the activation of trimeric GTP-binding proteins. The trimeric GTP-binding proteins are classified into following three categories according to the types of the intracellular signal transduction systems activated thereby: (I) Gq type: elevating the Ca²⁺ level; (2) Gs type: increasing cAMP; and (3) Gi type: suppressing cAMP (Trends Pharmacol. Sci. (99) 20: 118-124). Therefore, it is possible to assess whether a subjective polypeptide has a biological characteristic equivalent to that of a polypeptide identified by the inventors or not, for example, by detecting the changes in intercellular concentrations of cAMP or calcium caused by the activation.

[0109] A method for introducing mutation(s) into the amino acid sequence of a protein can be mentioned as one embodiment of methods for preparing polypeptides functionally equivalent to the polypeptides identified by the inventors. Such a method includes, for example, the site-directed mutagenesis (Current Protocols in Molecular Biology, edit. Ausubel et al. (1987) Publish. John Wiley & Sons Section 8.1-8.5). Amino acid mutation in polypeptides may also occur in nature. The present invention includes mutant proteins, regardless whether artificially or naturally produced, comprising amino acid sequences identified by the inventors (i.e., the even-numbered SEQ ID NOs from SEQ ID No: 2 to SEQ ID NO: 2070), wherein one or more amino acid residues are altered by substitution, deletion, insertion, and/or addition, yet which are functionally equivalent to the polypeptides identified by present inventors.

[0110] As for the amino acid residue to be substituted, it is preferable that it be substituted with a different amino acid residue that allows the properties of the amino acid residue to be conserved. For example, Ala, Val, Leu, Ile, Pro, Met, Phe, and Trp are all classified as non-polar amino acids, and are considered to have similar properties to each other. Further, examples of uncharged amino acids are Gly, Ser, Thr, Cys, Tyr, Asn, and Gln. Moreover, examples of acidic amino acids are Asp and Glu, and those of basic amino acids are Lys, Arg, and His.

[0111] There is no limitation in the number and sites of the amino acid mutation in these polypeptides so long as the mutated polypeptide retains the functions of the original polypeptide. The number of mutations may be typically less than 10%, preferably less than 5%, and more preferably less than 1% of the total amino acid residues.

[0112] Other embodiments of the method for preparing polypeptides functionally equivalent to the polypeptides identified by the inventors include methods utilizing hybridization techniques or gene amplification techniques. More specifically, those skilled in the art can obtain polypeptides functionally equivalent to the polypeptides determined by the present inventors by isolating highly homologous DNAs from DNA samples derived from organisms of the same or different species using hybridization techniques (Current Protocols in Molecular Biology, edit. Ausubel et al. (1987) Publish. John Wiley & Sons Section 6.3-6.4) based on the DNA sequences encoding the polypeptides identified by the inventors (i.e., sequences of odd-numbered SEQ ID NOs from SEQ ID NO: 1 to SEQ ID NO: 2069). Thus, such polypeptides encoded by DNAs hybridizing to the DNAs encoding the polypeptides identified by the inventors, which polypeptides are functionally equivalent to the polypeptides identified by the inventors, are also included in the polypeptides of this invention.

[0113] Examples of organisms to be used for isolating such polypeptides are rats, mice, rabbits, chicken, pigs, cattle, etc., as well as humans, but the present invention is not limited to these organisms.

[0114] The hybridization stringency required to isolate a DNA encoding a functionally equivalent polypeptide to the polypeptides identified by the inventors is normally “1×SSC, 0.1% SDS, 37° C.” or so, a more stringent condition being “0.5×SSC, 0.1% SDS, 42° C.” or so, and a much more stringent condition being “0.2×SSC, 0.1% SDS, 65° C.” or so. As the stringency becomes higher, isolation of a DNA with higher homology to the probe sequence can be expected. However, above-mentioned combinations of conditions of SSC, SDS, and temperature are only an example, and those skilled in the art can achieve the same stringency as described above by appropriately combining above-mentioned factors or others parameters which determine the stringency of the hybridization (for example, probe concentration, probe length, reaction time of hybridization, etc.).

[0115] The polypeptides encoded by the DNA isolated using such hybridization techniques normally are highly homologous in their amino acid sequences to the polypeptides identified by the present inventors. Herein, high homology indicates a sequence identity of at least 40% or more, preferably 60% or more, more preferably 80% or more, still more preferably 90% or more, further still more preferably at least 95% or more, and yet more preferably at least 97% or more (for example, 98% to 99%). Homology of amino acid sequences can be determined, for example, by using the algorithm BLAST according to Karlin and Altschul (Proc. Natl. Acad. Sci. USA 87: 2264-2268 (1990); Proc. Natl. Acad. Sci. USA 90: 5873-5877 (1993)). Based on this algorithm, a program referred to as BLASTX has been developed (Altschul et al., J. Mol. Biol. 215: 403-410 (1990)). When amino acid sequences are analyzed using BLASTX, parameters are set, for example, score=50 and wordlength=3, while in the case of using BLAST and Gapped BLAST programs, default parameters of each program are used. Specific techniques of these analytical methods are well known in the field (See http://www.ncbi.nlm.nih.gov.).

[0116] The gene amplification technique (PCR) (Current Protocols in Molecular Biology, edit. Ausubel et al. (1987) Publish. John Wiley & Sons Section 6.1-6.4) can be utilized to obtain a polypeptide functionally equivalent to the polypeptides isolated by the present inventors, based on DNA fragments isolated as highly homologous DNAs to the DNA sequences encoding the polypeptides isolated by the present inventors, by designing primers based on a part of the DNA sequences encoding the polypeptides identified by the inventors (sequences of odd-numbered SEQ ID NOs from SEQ ID NO: 1 to SEQ ID NO: 2069).

[0117] Polypeptides of this invention may be in the form of a “mature” protein, or may be also a part of a larger protein, such as fusion proteins. Polypeptides of this invention may contain secretory sequences, namely leader sequences; prosequences; sequences useful for purification, such as multiple histidine residues and such; and additive sequences to secure the stability during recombinant production.

<Polypeptide Fragments>

[0118] The present invention also provides fragments of the polypeptides of this invention. These fragments are polypeptides having amino acid sequences which are partly, but not entirely, identical to the above polypeptides of this invention. The polypeptide fragments of this invention usually consist of 8 amino acid residues or more, and preferably 12 amino acid residues or more (for example, 15 amino acid residues or more). Examples of preferred fragments include truncation polypeptides, having amino acid sequences lacking a series of amino acid residues including either the amino terminus or carboxyl terminus, or two series of amino acid residues, one including the amino terminus and the other including the carboxyl terminus. Furthermore, fragments featured by structural or functional characteristics are also preferable, which include those having α-helix and α-helix forming regions, β-sheet and β-sheet forming regions, turn and turn forming regions, coil and coil forming regions, hydrophilic regions, hydrophobic regions, α-amphipathic regions, β-amphipathic regions, variable regions, surface forming regions, substrate-binding regions, and high antigenicity index region. Biologically active fragments are also preferred. Biologically active fragments mediate the activities of the polypeptides of this invention, which fragments include those having similar or improved activities, or reduced undesirable activities. For example, fragments having the activity to transduce signals into cells via binding of a ligand, and furthermore, fragments having antigenicity or immunogeniity in animals, especially humans are included. These polypeptide fragments preferably retain the biological activities of the polypeptides of this invention, which activity includes antigenicity. Mutants of specific sequences or fragments also constitute an aspect of this invention. Preferred mutants are those which are different from the subject polypeptide, due to replacement with conservative amino acids, namely, those in which residue(s) is (are) substituted with other residues) having similar properties. Typical substitutions are those between Ala, Val, Leu, and Ile; Ser and Thr; acidic residues Asp and Glu, Asn, and Gln; basic residues Lys and Arg; or aromatic residues Phe and Tyr.

[0119] Alternatively, fragments which bind to ligands without transducing signals into cells may be also useful as competitive inhibitors for the polypeptides of this invention and are included in the present invention.

<Production of Polypeptides>

[0120] Polypeptides of this invention may be produced by any appropriate method. Such polypeptides include isolated naturally-occurring polypeptides, and polypeptides which are produced by gene recombination, synthesis, or by a combination thereof. Procedures for producing these polypeptides are well known in the art. Recombinant polypeptides may be prepared, for example, by transferring a vector, wherein the polynucleotide of the present invention is inserted, into an appropriate host cell, and purifying the polypeptide expressed within the resulting transformant. On the other hand, naturally occurring polypeptides can be prepared, for example, using affinity columns, wherein antibodies against the polypeptide of this invention (described below) are immobilized (Current Protocols in Molecular Biology, edit. Ausubel et al. (1987) Publish. John Wiley & Sons Section 16.1-16.19). Antibodies for affinity purification may be either polyclonal or monoclonal antibodies. The polypeptides of this invention may be also prepared by the in vitro translation method (for example, see “On the fidelity of mRNA translation in the nuclease-treated rabbit reticulocyte lysate system.” Dasso, M. C. and Jackson, R. J. (1989) NAR 17: 3129-3144), and soon. Polypeptide fragments of this invention can be produced, for example, by cleaving the polypeptides of the present invention with appropriate peptidases.

<Polynucleotides>

[0121] The present invention also provides polynucleotides encoding the polypeptides of this invention. The polynucleotides of this invention include: those encoding polypeptides comprising the amino acid sequences of even-numbered SEQ ID NOs from SEQ ID NO: 2 to SEQ ID NO: 2070; those comprising the coding regions of the nucleotide sequences of odd-numbered SEQ ID NOs from SEQ ID NO: 1 to SEQ ID NO: 2069; and those comprising different nucleotide sequences from those of odd-numbered SEQ ID NOs from SEQ ID NO: 1 to SEQ ID NO: 2069 due to the degeneracy of genetic codes but still encoding polypeptides comprising amino acid sequences of even-numbered SEQ ID NOs from SEQ ID NO: 2 to SEQ ID NO: 2070. Furthermore, the polynucleotides of this invention include those encoding polypeptides functionally equivalent to the polypeptides of the present invention, comprising nucleotide sequences which are homologous to said polynucleotide sequences at least 40% or more, preferably 60% or more, more preferably 8.0% or more, further more preferably 90% or more, and still preferably 95% or more, and further still more preferably 97% or more (for example, 98% to 99%) in the entire length. Homology of the nucleotide sequences can be determined, for example, using the BLAST algorithm by Karlin and Altschul (Proc. Natl. Acad. Sci. USA 87: 2264-22,6.8 (1990); Proc. Natl. Acad. Sci. USA 90: 5873-5877 (1993)). Based on this algorithm, an algorithm called BLASTN has been developed (Altschul et al. J. Mol. Biol. 215: 403-410 (1990)). When analyzing a nucleotide sequence using the BLASTN program, parameters are set, for example, score=100 and wordlength=12. When using both BLAST and Gapped BLAST programs, default parameters of each program are used. Specific techniques of these analytical methods are well known in the art (http://www.ncbi.nlm.nih.gov.). The polynucleotides of this invention also include polynucleotides having a nucleotide sequences complementary to those of the above-described polynucleotides.

[0122] The polynucleotides of this invention can be obtained for example, from cDNA libraries induced from intracellular mRNAs by standard cloning and screening methods. Moreover, the polynucleotides of this invention can be obtained from natural sources, such as genomic libraries, and also can be synthesized using commercially available techniques known in the art.

[0123] Polynucleotides comprising nucleotide sequences significantly homologous to the polynucleotide sequences identified by the inventors (sequences of odd-numbered SEQ ID NOs from SEQ ID NO: 1 to SEQ ID NO: 2069) can be prepared using, for example, hybridization techniques (Current Protocols in Molecular Biology, edit. Ausubel et al. (1987) Publish. John Wiley & Sons Section 6.3-6.4) and the gene amplification technique (PCR) (Current Protocols in Molecular Biology, edit. Ausubel et al. (1987) Publish. John Wiley & Sons Section 6.1-6.4). That is, based on the polynucleotide sequences identified by the inventors (sequences of odd-numbered SEQ ID NOs from SEQ ID NO: 1 to SEQ ID NO: 2069) or portions thereof, using hybridization techniques, DNAs highly homologous to these polynucleotides can be isolated from DNA samples derived from the same or different species of organisms. Moreover, polynucleotides highly homologous to the sequences of said polynucleotides can be isolated using the gene amplification technique by designing primers based on portions of the polynucleotide sequences identified by the inventors (sequences of odd-numbered SEQ ID NOs from SEQ ID NO: 1 to SEQ ID NO: 20.69). Therefore, the present invention includes polynucleotides hybridizing under stringent conditions to the polynucleotides comprising the nucleotide sequences of odd-numbered SEQ ID NOs from SEQ ID NO: 1 to SEQ ID NO: 2069. The conditions for stringent hybridization are usually “1×SSC, 10.1% SDS, 37° C.” or so, with a more stringent condition being “0.5×SSC, 0.1% SDS, 42° C.” or so, and a furthermore stringent one being “0.2×SSC, 0.1% SDS, 65° C.” or so. The more stringent the hybridization conditions are, the more highly homologous DNAs to the probe sequence can be expected. However, the above-described combinations of conditions of SSC, SDS, and temperature are mere examples, and those skilled in the art may achieve similar stringency as described above by appropriately combining the aforementioned factors or others parameters that determine the hybridization stringency (for example, probe concentration, probe length, reaction time of hybridization, etc.).

[0124] Polynucleotides comprising nucleotide sequences significantly homologous to the sequences of the polynucleotides identified by the inventors can also be prepared by inducing mutations into the nucleotide sequences of odd-numbered SEQ ID NOs from SEQ ID NO: 1 to SEQ ID NO: 2069 (for example, the site-directed mutagenesis) (Current Protocols in Molecular Biology, edit. Ausubel, et al. (1987) Publish. John Wiley & Sons Section 8.1-8.5). Such polynucleotides may be also generated by mutation in nature. The present invention includes polynucleotides encoding polypeptides comprising amino acid sequences of even-numbered SEQ ID NOs from SEQ ID NO: 2 to SEQ ID NO: 2070 wherein one or more amino acid residues are substituted, deleted, inserted, and/or added, due to such mutations of the nucleotide sequences.

[0125] Polynucleotides used for recombinant production of the polypeptide of this invention include the coding sequences of the mature polypeptide or fragments thereof alone; and coding sequences of the mature polypeptide or fragments thereof in the same reading frame with other coding sequences (for example, leader or secretory sequences; pre-, pro-, or preproprotein sequences; or sequence encoding other fusion peptide portions). For example, a marker sequence that facilitates purification of the fusion polypeptide may be encoded in the same reading frame. A preferred embodiment of this invention includes specific marker sequences, such as the hexahistidine peptide or Myc tag provided by the pcDNA3.1/Myc-His vector (Invitrogen), which is described in the literature (Gentz et al., Proc. Natl. Acad. Sci. USA (1989) 86: 821-824). Further, this polynucleotide may comprise a 5′- and 3′-noncoding sequence, for example, transcribed but non-translated sequences; splicing and polyadenylation signals; ribosome-binding sites; and mRNA stabilization sequences.

<Probe, Primer, Antisense, Ribozyme>

[0126] The present invention provides nucleotides, having a chain length of at least 15 nucleotides, which are complementary to a polynucleotide isolated by the present inventors (a polynucleotide or a complementary strand thereof consisting of the nucleotide sequences of odd-numbered SEQ ID NOs from SEQ ID NO: 1 to SEQ ID NO: 2069). Herein, the term “complementary strand” is defined as one strand of a double strand nucleic acid composed of A:T (A:U in case of RNA) and G:C base pairs to the other strand. Also, “complementary” is defined as not only those completely matching within a continuous region of at least 15 sequential nucleotides, but also those having a homology of at least 70%, preferably at least 80%, more preferably 90%, and most preferably 95% or higher within that region. The homology may be determined using the algorithm described herein. Probe and primers for detection or amplification of the polynucleotides of the present invention are included in these polynucleotides. Typical polynucleotides used as primers have a chain length of 15 to 100 nucleotides, and preferably 15 to 35 nucleotides. Alternatively, polynucleotides used as probes are nucleotides having a chain length of at least 15 nucleotides, preferably at least 30 nucleotides, containing at least a portion or the whole sequence of a DNA of the present invention. Such nucleotides preferably hybridize specifically to a DNA encoding a polypeptide of the present invention. The term “hybridize specifically” defines that it hybridizes under a normal hybridization condition, preferably a stringent condition with a nucleotide identified by the present inventors (sequence shown as odd-numbered SEQ ID NOs from SEQ ID NO: 1 to SEQ ID NO: 209), but not with DNAs encoding other polypeptides.

[0127] These nucleotides can be used for detecting and diagnosing abnormal activities of the polypeptides of the present invention or abnormal expression of genes encoding the polypeptides.

[0128] Further, these nucleotides include polynucleotides that suppress the expression of genes encoding the polypeptides of the present invention. Such polynucleotides include antisense DNAs (DNAs encoding antisense RNAs, which are complementary to transcriptional products of the genes encoding the polypeptides of the present invention) and ribozymes (DNAs encoding RNAs having ribozyme activities to specifically cleave transcriptional products of the genes encoding the polypeptides of the present invention).

[0129] A plurality of factors, such as those described below, arise as a result of actions suppressing the expression of a target gene by an antisense DNA: inhibition of the transcription initiation by the formation of a triple strand; suppression of the transcription through hybridization with a local open loop conformation site formed by an RNA polymerase; inhibition of the transcription by hybridization with RNA, which is in course of synthesis; suppression of the splicing through hybridization at a junction, of intron and exon; suppression of the splicing through hybridization with a spliceosome forming site; suppression of the transfer from the nuclei to cytoplasm through hybridization with the mRNAs; suppression of the splicing through hybridization with capping sites or poly(A) addition sites; suppression of the translation initiation through hybridization with a translation initiation factor binding site; suppression of the translation through hybridization with the ribosome binding site near the initiation codon; inhibition of the elongation of the peptide chain through hybridization with the translation regions and polysome binding sites of the mRNAs; suppression of the expression of genes by hybridization with the interaction sites between nucleic acids and proteins; and such. These actions inhibit the processes of transcription, splicing, and/or translation to suppress the expression of a target gene (Hirajima and Inoue, “New Biochemistry Experimental Course No. 2, Nucleic Acid IV, Duplication and Expression of Genes”, Japan Biochemical Society ed., Tokyo Kagaku Doujin, pp. 319-347 (1993)).

[0130] The antisense DNA of the present invention may suppress the expression of the target gene through any of the above-mentioned actions. According to one embodiment, an antisense sequence designed to be complementary to a non-translated region near the 5′-terminus of mRNA of a gene may effectively inhibit the translation of the gene. Additionally, sequences which are complementary to the coding region or the 3′ non-translated region can be also used. As described above, DNA containing antisense sequences not only to the translation region of a gene, but also those to sequences of non-translated regions are included in the antisense DNA of the present invention. The anti-sense DNAs to be used in the present invention are linked to downstream of an appropriate promoter, and a sequence including a transcriptional termination signal is preferably linked to the 3′-side thereof. The sequence of the antisense DNA is preferably complementary to the target gene or a part thereof; however, so long as the expression of the gene can be effectively inhibited, it does not have to be a completely complementary DNA. The transcribed RNA is preferably 90% or more, more preferably 95% or more, complementary to the transcribed product of the target gene. In order to effectively inhibit the expression of the target gene using an antisense sequence, the antisense DNA has at least a chain length of 15 bp or more, preferably 100 bp, more preferably 500 bp, and usually has a chain length less than 3000 bp, preferably less than 2000 bp to cause an antisense effect.

[0131] Such antisense DNA can be also applied to gene therapy for diseases caused by abnormalities (functional abnormalities or expression abnormalities) of the polypeptides of the present invention, and such. The antisense DNA can be prepared by, for example, the phosphorothionate method (Stein, “Physicochemical properties of phosphorothionate oligodeoxynucleotides.” Nucleic Acids Res. 16, 3209-21 (1988)) and such based on the sequence information of a DNA (for example, sequences of odd-numbered SEQ ID NOs from SEQ ID NO: 1 to SEQ ID NO: 2069)) encoding a polypeptide of the present invention.

[0132] Further, suppression of the expression of endogenous genes can be also achieved utilizing DNAs encoding ribozymes. Ribozymes are RNA molecules having catalytic activity. There exist ribozymes having various activities, and the research of ribozymes as an enzyme for truncating RNA allowed for the design of ribozymes that cleave RNAs in a site-specific manner. There are ribozymes which are larger than 400 nucleotides, such as Group I intron type ribozymes, and M1RNA comprised in RNaseP, and those which have an active domain of about 40 nucleotides, called hammer-head type and a hairpin type ribozymes (Makoto Koizumi and Eiko Ohtsuka, (1990), Protein Nucleic Acid and Enzyme (PNE) 35:2191).

[0133] For example, the hammer head type ribozyme cleaves the 3′-side of C15 of G13U14C15 within its own sequence. A base pair formation of the U14 with the A at position 9 is important for the activity, and it is shown that the cleavage proceeds even if the C at position 15 is A or U (M. Koizumi et al., (1988) FEBS Lett. 228:225). Restriction enzymatic RNA-truncating ribozymes recognizing sequences of UC, UU, and UA in a target RNA may be generated by designing the substrate binding site of the ribozyme complementary with the RNA sequence near the target site (M. Koizumi, et al., (1988) FEBS Lett. 239:285; Makoto Koizumi and Eiko Ohtsuka, (1990), Protein Nucleic Acid and Enzyme (PNE) 35:2191); and M. Koizumi, et al. (1989), Nucleic Acids Res. 17:7059). A plurality of sites, which can be used as a target, exist among the polynucleotides (having sequence of odd-numbered SEQ ID NOs from SEQ ID NO: 1- to SEQ ID NO: 2069) identified by the present inventors.

[0134] Further, the hairpin type ribozymes are also useful in the context of the present invention. The hairpin type ribozymes are found on, for example, the minus chain of a satellite RNA of tobacco ringspot virus (J. M. Buzayan, Nature 323:349 (1986)). It is also demonstrated that the ribozyme can be designed to cause a target specific RNA truncation (Y. Kikuchi and N. Sasaki, (1991) Nucleic Acids Res. 19:6751; and Y. Kikuchi, (1992) Chemistry and Organism 30:112).

[0135] When the polynucleotides suppressing the expression of the genes encoding the polypeptides of the present invention are used in gene therapy, they may be administered to a patient by the ex vivo method, in vivo method, and such, using, for example, viral vectors such as retroviral vector, adenoviral vector, adeno-associated viral vectors, and such; and non-viral vectors such as liposome; and so on.

<Production of Vector, Host cell, and Polypeptide>

[0136] Further, the present invention provides methods for producing vectors containing a polynucleotide of the present invention, host cells retaining a polynucleotide of the present invention or said vector, and polypeptides of the present invention utilizing said host cells.

[0137] The vector of the present invention is not limited so long as the DNA inserted in the vector is retained stably. For example, pBluescript vector (Stratagene) is preferable as a cloning vector when using E. coli as the host. When the vector is used for producing a polypeptide of the present invention, an expression vector is particularly useful. The expression vector is not specifically limited so long as it expresses polypeptides in vitro, in E. coli, in cultured cells, and in vivo. However, preferable examples include the pBEST vector (ProMega) for in vitro expression, the pET vector (Invitrogen) for expression in E. coli, the pME18S-FL3 vector (GenBank Accession No. AB009864) for the expression in cultured cells, and the pME18S vector (Mol. Cell Biol. 8:466-472(1988)) for in vitro expression, and so on. The insertion of a DNA of the present invention into a vector can be carried out by conventional methods, for example, by the ligase reaction using restriction enzyme sites (Current Protocols in Molecular Biology, edit. Ausubel, et al., (1987) Publish. John Wiley & Sons, Section 11.4-11.11).

[0138] The host cell to which the vector of the present invention is introduced is not specifically limited, and various host cells can be used according to the objects of the present invention. For example, bacterial cells (e.g. Streptococcus, Staphylococcus, E. coli, Streptomyces, Bacillus subtilis), fungal cells (e.g. yeast, Aspergillus), insect cells (e.g. Drosophila S2, Spodoptera SF9) animal cells (e.g. CHO, COS, HeLa, C127, 3T3, BEK, HEK293, Bowes melanoma cell), and plant cells can be exemplified as cells to express polypeptides. The transfection of a vector to a host cell can be carried out by conventional methods, such as the calcium phosphate precipitation method, the electroporation method (Current protocols in Molecular Biology, edit., Ausubel et al., (1987). Publish. John Wiley & Sons, Section 9.1-9.9), the Lipofectamine method (GIBCO-BRL), the microinjection method, and so on.

[0139] Appropriate secretion signals can be incorporated into the polypeptide of interest in order to secrete polypeptides into the lumen of endoplasmic reticulum, into cavity around the cell, or into the extracellular environment by expressing them in a host cell. These signals may be endogenous signals or signals from a different species to the objective polypeptide.

[0140] When a polypeptide of the present invention is secreted into the culture media, the culture media is collected to collect the polypeptide of the present invention. When a polypeptide of the present invention is produced intracellularly, the cells are first lysed, and then, the polypeptides are collected.

[0141] In order to collect and purify a polypeptide of the present invention from a recombinant cell culture, methods known in the art including ammonium sulfate or ethanol precipitation, extraction by acid, anionic or cationic exchange chromatography, phosphocellulose chromatography, hydrophobic interaction chromatography, affinity chromatography, hydroxylapatite chromatography, and lectin chromatography can be used.

<Test Method>

[0142] The present invention provides a method for testing diseases related to abnormal expression of the genes encoding the polypeptides of the present invention, or abnormal activities of the polypeptides of the present invention. It is considered that GPCR has an important function in vivo, and thus, abnormal expression and function thereof may cause various diseases. Therefore, assay of diseases may be accomplished using inappropriate activities or expression of the polypeptides of the present invention as an index.

[0143] The term “assay of diseases” includes not only tests to draft therapeutic strategy for a subject who exhibits the symptom of a disease, but also tests for preventing diseases by determining whether the subject is susceptible to the disease.

[0144] One embodiment of the test methods of the present invention is a method comprising the step of detecting a mutation in a gene encoding a polypeptide of the present invention or in the expression control regions thereof in a subject.

[0145] More specifically, the test can be accomplished by directly determining the nucleotide sequence of a gene encoding a polypeptide of the present invention or its expression control region in a subject. According to this method, first, a DNA sample is prepared from a subject. The DNA sample can be prepared from chromosomal DNA or RNA extracted from cells of the subject, for example, the biopsy or autopsy specimen of blood, urine, saliva, and tissue. In order to prepare a DNA sample for the present method from a chromosomal DNA, a genomic library may be produced by, for example, digesting the chromosomal DNA with appropriate restriction enzymes, and then cloning the digested DNA to a vector. On the other hand, for example, a cDNA library may be prepared from RNA by using reverse transcriptase to prepare a DNA sample for the present method from RNA. Next, DNA containing a gene encoding a polypeptide of the present invention or the expression control region thereof is isolated according to the present method. The isolation of a DNA can be carried out by screening the genomic library or cDNA library using probes hybridizing with the DNA containing the gene encoding the polypeptide of the present invention or its expression control region. The isolation of a DNA can be also carried out by PCR using the genomic DNA library, cDNA library, and RNA as the template, and primers hybridizing to a DNA containing a gene encoding a polypeptide of the present invention or its expression control region. Then, the nucleotide sequence of the isolated DNA is determined according to the present method. The determination of the nucleotide sequence of selected DNAs can be carried out by methods known to those skilled in the art. According to the present method, the determined nucleotide sequence of the DNA is then compared with that of a control. The “control” herein refers to a nucleotide sequence of DNAs containing a gene encoding a normal (wild type) polypeptide of the present invention or its expression control region. When the nucleotide sequence of a DNA of a subject differs from those of the control as a result of a comparison above, the subject is judged to be afflicted with disease or in danger of the onset of disease.

[0146] According to the test method of the present invention, various methods can be used other than the method directly determining the nucleotide sequence of a DNA, which was derived from the subject, as described above.

[0147] In one embodiment of the method, a DNA sample is first prepared from a subject and is digested with restriction enzymes. Then, the DNA fragments are separated in accordance with their size, followed by comparison of the detected sizes of the DNA fragments with those of a control. Alternatively, in another embodiment, a DNA sample is first prepared from a subject. Then, DNA containing a gene encoding a polypeptide of the present invention or its expression control region is amplified from the sample, and the amplified DNAs are digested with restriction enzymes. After separating the DNA fragments according to their size, the detected sizes of the DNA fragments are compared with those of a control.

[0148] Such methods include, for example, a method utilizing the Restriction Fragment Length Polymorphism/RFLP, the PCR-RFLP method, and such. Specifically, when variations exist for the recognition sites of a restriction enzyme, or when insertion(s) or deletion(s) of base(s) exists in a DNA fragment generated by a restriction enzyme treatment, the sizes of fragments that are generated after the restriction enzyme treatment vary in comparison with those of a control. The portion containing the mutation is amplified by PCR, and then, is treated with respective restriction enzymes to detect these mutations as a difference of the mobility of bands after electrophoresis. Alternatively, the presence or absence of the mutations can be detected by carrying out the Southern blotting with a probe DNA of the present invention after treating the chromosomal DNA with respective restriction enzymes followed by electrophoresis. The restriction enzymes to be used can be appropriately selected in accordance with respective mutations. The Southern blotting can be conducted not only on the genomic DNA but also on cDNAs directly digested with restriction enzymes, wherein the cDNAs are converted by the use of a reverse transcriptase from RNAs prepared from subjects. Alternatively, after amplifying DNAs containing a gene encoding a polypeptide of the present invention or its expression control region by PCR using the cDNA as a template, the cDNAs are digested with restriction enzymes and the difference of mobility on an electrophoresis gel of DNA fragments generated by the digestion are examined.

[0149] In another embodiment of the present method, a DNA sample is first prepared from a subject. Then, a DNA containing a gene encoding a polypeptide of the present invention or its expression control region is amplified. Thereafter, the amplified DNA is dissociated into single strand DNAs, and the single strand DNAs are separated on a non-denaturing gel. The mobility of the separated single strand DNAs on the gel is compared with those of a control.

[0150] Such methods include, for example, the PCR-SSCP (single-strand conformation polymorphism) method (“Cloning and polymerase chain reaction-single-strand conformation polymorphism analysis of anonymous Alu repeats on chromosome 11.” Genomics. Jan. 1, 1992, 12(1): 139-146; “Detection of p53 gene mutations in human brain tumors by single-strand conformation polymorphism analysis of polymerase chain reaction products.” Oncogene. Aug. 1, 1991; 6(8): 1313-1318; “Multiple fluorescence-based PCR-SSCP analysis with post labelling.” PCR Methods Appl. Apr. 1, 1995; 4(5): 275-2,82) This method is particularly preferable for screening many DNA samples, since it has advantages such as: comparative simplicity of operation; small amount of a test sample-required; and so on. The principle of the method is as follows. A single strand DNA dissociated from a double-strand DNA fragment forms a unique higher conformation depending on respective nucleotide sequence. Complementary single-stranded DNAs having the same chain length of the dissociated DNA strand shift to different positions in accordance with the difference of the respective higher conformations after electrophoresis on a polyacrylamide gel without a denaturant. The higher conformation of a single-stranded DNA changes even by a substitution of one base, which change results in a different mobility by polyacrylamide gel electrophoresis. Accordingly, the presence of a mutation in a DNA fragment due to point mutation, deletion, insertion, and such can be detected by detecting the change of the mobility.

[0151] More specifically, DNA containing a gene encoding a polypeptide of the present invention (or its expression control region) is first amplified by PCR and such. Preferably, a DNA of a length of about 200 bp to 400 bp is amplified. Those skilled in the art can appropriately select the condition and such for the PCR. DNA products amplified by PCR can be labeled by primers, which are labeled with isotopes such as ³²P; fluorescent dyes; biotin; and so on. Alternatively, the amplified DNA products can be also labeled by conducting PCR in a reaction solution containing substrate bases, which are labeled with isotopes such as ³²P; fluorescent dyes; biotin; and so on. Further, the labeling can be also carried out by adding substrate bases, which are labeled with isotope such as ³²P; fluorescent dyes; biotin; and so on, to the amplified DNA fragment using Klenow enzyme and such, after the PCR reaction. Then, the obtained labeled DNA fragments are denatured by heating and such, and electrophoresis is carried out on a polyacrylamide gel without a denaturant such as urea. The condition for the separation of the DNA fragments by this electrophoresis can be improved by adding appropriate amounts (about 5% to 10%) of glycerol to the polyacrylamide gel. Further, although the condition for electrophoresis varies depending on the property of respective DNA fragments, it is usually carried out at room temperature (20° C. to 25° C.). When a preferable separation is not achieved at this temperature, a temperature at which optimum mobility can be achieved is searched from 4° C. to 30° C. The mobility of the DNA fragments is detected by autoradiography with X-ray films, scanner for detecting fluorescence, and such, after the electrophoresis to analyze the result. When a band with different mobility is detected, the presence of a mutation can be confirmed by directly excising the band from the gel, amplifying it again by PCR, and directly sequencing the amplified fragment. Further, the bands can be also detected by staining the gel after electrophoresis with ethidium bromide, silver, and such, without using labeled DNAs.

[0152] In still another method, a DNA sample is first prepared from a subject. DNA containing a gene encoding a polypeptide of the present invention or its expression control region is amplified, and then, the amplified DNAs are separated on a gel with gradient concentration of a DNA denaturant. The mobilities of the separated DNAs on the gel are compared with those of a control.

[0153] For example, the denaturant gradient gel electrophoresis method (DGGE method) and such can be exemplified as such methods. The DGGE method comprises the steps of: (1) electrophoresing the mixture of DNA fragments on a polyacrylamide gel with gradient concentration of denaturant; and (2) separating the DNA fragments in accordance with the difference of instabilities of respective fragments. Unstable DNA fragments containing mismatches dissociated partly to a single-strand near the mismatches because of the instability of the DNA sequence by shifting to a part with a certain concentration of the denaturant on the gel. The mobility of the partly-dissociated DNA fragment becomes remarkably slow, ending in a difference of the mobility with that of perfectly double-stranded DNAs without dissociated parts, which allows separation of these DNAs. Specifically, DNA containing a gene encoding a polypeptide of the present invention or its expression control region is (1) amplified by PCR and such with a primer of the present invention and such; (2) electrophoresed on a polyacrylamide gel with gradient concentration of denaturant such as urea; and (3) the result is compared with that of a control. The presence or absence of a mutation can be detected by detecting the difference of mobility of the DNA fragment due to the extreme slowing down of the mobility speed of the fragment by separation into single-stranded DNAs of a DNA fragment with mutations at parts of the gel where the concentration of the denaturant is lower.

[0154] In addition to the above-mentioned methods, the Allele Specific Oligonucleotide (ASO) hybridization method can be used to detect mutations at only specific sites. An oligonucleotide with a nucleotide sequences contained to have a mutation is prepared, and is subjected to hybridization with a DNA sample. The efficiency of hybridization is reduced by the existence of a mutation. The decrease can be detected by the Southern blotting method; methods which utilize a specific fluorescent reagent that have a characteristic to quench by intercalation into the gap of the hybrid; and such. Further, the detection may be also conducted by the ribonuclease A mismatch truncation method. Specifically, DNA containing a gene encoding a polypeptide of the present invention is amplified by PCR and such, and the amplified DNAs are hybridized with labeled RNAs, which were prepared from a control cDNA and such to incorporate them into a plasmid vector and such. The presence of a mutation can be detected with autoradiography and such, after cleaving those sites that form a single-stranded conformation due to the existence of a mutation with ribonuclease A.

[0155] Another embodiment of the test method of the present invention is a method comprising the step of detecting the expression level of a gene encoding a polypeptide of the present invention. Herein, transcription and translation are included in the meaning of the term “expression of a gene”. Accordingly, mRNAs and proteins are included in the term “expression product”.

[0156] First, an RNA sample is prepared from a subject according to the method for testing the transcription level of a gene encoding a polypeptide of the present invention. Then, the amount of RNA encoding the polypeptide of the present invention in the RNA sample is measured. Thereafter, the measured amount of the RNA encoding the polypeptide of the invention is compared with that of a control.

[0157] A Northern blotting method using a probe which hybridizes with the polynucleotide encoding a polypeptide of the present invention; an RT-PCR method using a primer which hybridizes with a polynucleotide encoding the polypeptide of the present invention; and such can be exemplified as such methods.

[0158] Further, a DNA array (Masami Muramatsu and Masashi Yamamoto, New Genetic Engineering Handbook pp. 280-284, YODOSHA Co., LTD.) can also be utilized in the test for the transcription level of the gene encoding the polypeptide of the present invention.

[0159] Specifically, first, a c-DNA sample prepared from a subject and a basal plate on which polynucleotide probes hybridizing with the polynucleotides encoding the polypeptides of the present invention are fixed are provided. Plural kinds of polynucleotide probes can be fixed on the basal plate in order to detect plural kinds of polynucleotides encoding the polypeptides of the present invention. Preparation of a cDNA sample from a subject can be carried out by methods well known to those skilled in the art. In a preferable embodiment for the preparation of the cDNA sample, first, total RNAs are extracted from a cell of a subject. Example of cells include cells of the biopsy or autopsy specimen, of blood, urine, saliva, tissue, and such. The extraction of total RNAs can be carried out, for example, as follows. So long as total RNAs with high purity can be prepared, known methods, kits, and such can be used. For example, total RNAs are extracted by using “Isogen” (Nippon Gene) following a pretreatment with “RNA later” (Ambion). Specific procedures of the method may be carried out according to the attached protocol. Then, the cDNA sample is prepared by synthesizing cDNAs with reverse transcriptase using extracted total RNAs as a template. The synthesis of cDNA from total RNAs can be carried out by conventional methods known in the art. The prepared cDNA sample is labeled for detection according to needs. The labeling substance is not specifically limited so long as it can be detected, and include, for example, fluorescent substances, radioactive elements, and so on. The labeling can be carried out by conventional methods (L. Luo et al., “Gene expression profiles of laser-captured adjacent neuronal subtypes”, (1999) Nat. Med. 5: 117-122).

[0160] The term “basal plate” herein refers to a board type material on which polynucleotides can be fixed. So long as polynucleotides can be immobilized on the plate, there is no restriction on the basal plate of the present invention. However, a basal plate that is generally used in the DNA array technique is preferred.

[0161] An advantage of the DNA array technique is that the amount of solution needed for hybridization is very small, and that extremely complicated targets containing cDNA derived from the total RNAs of a cell can be hybridized to the fixed nucleotide probes. In general, a DNA array comprises thousands of nucleotides which are printed on a basal plate at a high density. Usually, DNAs are printed on the surface layer of a non-porous basal plate. The surface layer of the basal plate is usually glass, but a porous film, for example, such as nitrocellulose membrane, can be also used. There are two types for fixation (array) of the nucleotides: one is the array based on polynucleotides developed by Affymetrix Co., Ltd.; and the other is the array of cDNA mainly developed by Stanford University. The polynucleotides are usually synthesized in situ for the array of the polynucleotide. For example, in situ synthesis method of polynucleotides such as the photolithographic technique (Affymetrix); and the ink-jet technique (Rosetta Inpharmatics) for fixing a chemical substance; and so on are already known in the art, and any of these techniques can be used for the production of basal plates of the present invention. There is no limitation on the polynucleotide probes to be fixed on the basal plates, so long as it specifically hybridizes with a gene encoding a polypeptide of the present invention. The polynucleotide probe of the present invention includes polynucleotides and cDNAs. Herein, the term “specifically hybridizes” means that a polynucleotide substantially hybridizes with a polynucleotide encoding a polypeptide of the present invention and substantially does not hybridize with other polynucleotides. So long as specific hybridization is possible, the polynucleotide probe does not have to be completely complementary to the nucleotide sequence to be detected. Generally, to immobilize a cDNA on a plate, the length of the polynucleotide probe to be fixed on the basal plate is usually 100 to 4000 bases, preferably 200 to 4000 bases, and more preferably 500 to 4000 bases. On the other hand, to immobilize synthetic polynucleotides, the length of the probes are usually 15 to 500 bases, preferably 30 to 200 bases, and more preferably 50 to 2,00 bases. The step for fixing of the polynucleotides on the basal plate is also called “printing” in general. Specifically, the printing can be, for example, conducted as follows, but is not limited thereto. Several kinds of polynucleotide probes are printed within an area of 4.5 mm×4.5 mm. According to this step, respective arrays can be printed using one pin. Accordingly, when a tool with 48 pins is used, 48 arrays can be printed repeatedly on one standard slide for microscopes.

[0162] Then, the cDNA sample is contacted with the basal plate according to the present method. The cDNA sample is hybridized with nucleotide probes on the basal plate, which can specifically hybridize with a DNA encoding a polypeptide of the present invention, in this step. Although the reaction solution and the reaction condition for hybridization varies depending on various factors, such as the length of the nucleotide probe fixed on the basal plate, they can be determined according to usual methods well known to those skilled in the art.

[0163] Next, the expression level of the gene encoding the polypeptide of the present invention contained in the cDNA sample is measured by detecting the hybridization intensity of the cDNA sample with the nucleotide probe fixed on the basal plate. Further, the measured expression level of the gene encoding the polypeptide of the present invention is compared with that of the control.

[0164] A cDNA in the cDNA sample hybridizes with the nucleotide probe fixed on the basal plate when such cDNA derived from the gene encoding the polypeptide of the present exists in the cDNA sample. Thus, the expression level of the gene encoding the polypeptide of the present invention can be measured by detecting the intensity of the hybridization of the polynucleotide probe with the cDNA. One skilled in the art can appropriately conduct the detection of the hybridization intensity of the polynucleotide probe with the cDNA depending on the kind of substances used for labeling the cDNA sample. For example, when the cDNA is labeled with a fluorescent substance, it can be detected by reading out the fluorescent signal with a scanner.

[0165] The expression level of the gene encoding the polypeptide of the present invention in cDNA samples derived from a subject and control (normal healthy subject) can be measured simultaneously in one measurement by labeling them with different fluorescent substances according to the method of the present invention. For example, one of the above-mentioned cDNA samples can be labeled with invention can be prepared, for example, by a commercially available oligonucleotide synthesizing machine. The probes can be also prepared as double-stranded DNA fragments which are obtained by restriction enzyme treatments and such. The oligonucleotides of the present invention are preferably appropriately labeled for the use as a probe. The method of labeling includes, for example, a labeling method using T4 poly-nucleotide kinase to phosphorylate the 5′-terminus of the oligonucleotide with ³²P; and a method of introducing substrate bases, which are labeled with isotopes such as ³²P, fluorescent dyes, biotin, and so on using random hexamer oligonucleotides and such as primers and DNA polymerase such as Klenow enzyme (the random prime method, etc.).

[0166] Another embodiment of the test drug of the present invention is a test drug containing antibodies which binds to a polypeptide of the present invention described below. The antibodies are used to detect the polypeptide of the present invention in the above-mentioned test method of the present invention. The forms of the antibodies are not limited so long as they can detect the polypeptides of the present invention. Polyclonal antibodies and monoclonal antibodies are included as the antibodies for the test. The antibodies may be labeled according to needs.

[0167] For example, sterilized water, physiological saline, vegetable oils, surfactants, lipids, solubilizers, buffers, protein stabilizers (such as BSA and gelatin), preservatives, and such may be mixed in the above-mentioned test drugs except the effective ingredient, oligonucleotide and antibody, if necessary.

<Antibody>

[0168] The present invention provides antibodies that bind to a polypeptide of the present invention. Herein, the term “antibodies” refers to polyclonal antibodies, monoclonal antibodies, chimeric antibodies, single-stranded antibodies, humanized antibodies, and Fab fragments including Fab or other products of the immunoglgobulin expression library.

[0169] A polypeptide of the present invention or its fragment, or analogs thereof, or a cell that expresses them can be used as an immunogen for producing antibodies binding to the polypeptide of the present invention. The antibodies are preferably immunospecific to a polypeptide of the present invention. The term “immunospecific” means that the antibody has substantially higher affinity to the polypeptide of the present invention than to other polypeptides.

[0170] The antibodies binding to a polypeptide of the present invention can be prepared by conventional methods. For example, a polyclonal antibody can be obtained as follows. A polypeptide of the present invention or a fusion protein thereof with GST is immunized to small animals such as rabbit to obtain serum. The polyclonal antibody is prepared by purifying the serum through ammonium sulfate precipitation; protein A or protein G column; DEAE ion exchange chromatography; affinity column wherein the polypeptide of the present invention are coupled; and so on. On the other hand, a monoclonal antibody, for example, can be prepared as follows. A polypeptide of the present invention is administered to small animals such as mouse and the spleen is subsequently extirpated from the mouse and ground down to separate cells. Then, the cells are fused with mouse myeloma cells using reagents such as polyethylene glycol, and clones that produce antibodies binding to the polypeptide of the present invention are selected from these fused cells (hybridoma). The obtained hybridoma is then transplanted into the peritoneal cavity of a mouse, and ascites is collected from the mouse. The monoclonal antibodies can be prepared by purifying the ascites using, for example, ammonium sulfate precipitation; protein A or protein G column; DEAE ion exchange chromatography; affinity column wherein the polypeptides of the present invention are coupled; and so on.

[0171] The antibodies of the present invention can be used for the isolation, identification, and purification of the polypeptides of the present invention and cells expressing them. The antibodies binding to a polypeptide of the present invention can be also used for determining the expression level of a polypeptide of the present invention to test for a disease related to abnormal expression of a polypeptide of the present invention.

<Identification of Ligand, Agonist, or Antagonist>

[0172] The polypeptides of the present invention can be also used to identify ligands, agonists, or antagonists thereof. These object molecules of the identification may be naturally-occurring molecules as well as structural or functional imitated molecules, which are artificially synthesized. The polypeptides of the present invention are related to various biological functions, including many pathologies. Thus, the detection of compounds that activate the polypeptides of the present invention, and compounds that inhibit the activation of the polypeptides of the present invention is expected.

[0173] To identify ligands against the polypeptide of the present invention, a polypeptide of the present invention is first contacted with a candidate compound, and then, it is detected whether or not the candidate compound binds to the polypeptide of the present invention.

[0174] There is no limitation on the sample to be tested and such samples include, for example, various known compounds and peptides whose ligand activity to GPCRs are unknown (for example, those registered in the Chemical File); and random peptide groups, which were produced by utilizing the phage-display method (J. Mol. Biol. (1991) 222, 301-310). Further, culture supernatant of microorganism; natural components derived from plants and marine organisms; and so on can be used as the object of the screening. Moreover, extract from biotic tissues such as brain; extracted solutions from cells; expression products of gene libraries; and so on can be also mentioned as samples to be tested, but is not limited thereto.

[0175] According to the present method, binding of the purified polypeptides of the present invention with candidate compounds can be detected. Conventional methods, such as methods purifying compounds binding to a protein of the present invention by contacting a test sample with an affinity column of the polypeptide of the present invention; and the West-Western blotting method, can be utilized to detect binding. Candidate compounds are appropriately labeled according to these methods, and the binding with the polypeptide of the present invention is detected utilizing the label. Further, a method detecting the surface plasmon resonance changes caused by the dissociation of a trimeric-type GTP binding protein due to the binding of a ligand, by preparing cell membranes in which the polypeptide of the present invention is expressed, fixing the membrane on a chip, and detecting the changes of surface plasmon resonance on the chip (Nature Biotechnology (99) 17:1105). Further, the binding activity of a candidate compound and the polypeptide of the present invention can be also detected using signals as an index of activation of the polypeptide of the present invention. Such signal includes, for example, changes of intracellular Ca²⁺ level, changes of intracellular cAMP level, changes of intracellular pH, and changes of intracellular adenylate cyclase level, but are not restricted to these examples.

[0176] As an example of the method, a procedure as follows can be conducted: (1) a cell membrane expressing the polypeptide of the present invention is mixed with 400 pM of GTPγS labeled with ³⁵S in a solution of 20 mM HEPES (pH 7.4), 100 mM NaCl, 10 mM MgCl₂, and 50 μM GDP; (2) the reaction solution is incubated in the presence and in the absence of a test sample; (3) the solution is filtrated; and (4) the radioactivity of bound GTPγS is compared.

[0177] Further, the GPCR share a system transmitting a signal into the cell through the activation of the trimeric-type GTP binding protein in common. The trimeric-type GTP binding protein is classified depending on the type of activated intracellular transmission system into 3 types: (1) Gq type, those increasing Ca²⁺; (2) Gs type, those increasing cAMP; and (3) Gi type, those suppressing cAMP. Positive signals of the ligand screening can be transduced to an increase of the Ca²⁺ level, which is the intracellular transmission pathway of Gq, by applying the system. More specifically, it can be transduced to an increase of the Ca²⁺ level by forming chimeras of Gq protein α subunit and other G protein α subunits, or by using promiscuous G α protein, G α15 and G α16. The increased Ca²⁺ level can be detected using changes of reporter gene systems, comprising TRE (TPA responsive element) or MRE (multiple responsive element) upstream in the system; staining indicators such as Fura-2, Fluo-3; and fluorescent protein, aequorin, and so on as an index. Similarly, the chimerizing the Gs protein α subunit and other G protein α subunit to transduce the positive signals to increased cAMP levels, which is the intracellular transmission pathway of Gs, the ligands, can be detected by using the changes in a reporter gene system including CRE (cAMP-responsive element) upstream as an index (Trends Pharmacol. Sci. (99) 20: 118-124).

[0178] Host cells to express the polypeptides of the present invention in the screening system are not specifically limited, and various host cells can be used in accordance with the object. For example, mammal cells such as COS cell, CHO cell, HE-K 293 cell; yeast; Drosophila-derived cell; and E. coli cell be mentioned. Vectors containing a promoter positioned upstream of the gene encoding the polypeptide of the present invention, a splice site of RNA, polyadenylation site, transcription termination sequence, origin of replication, and such can be preferably used as vectors for expressing the polypeptides of the present invention in vertebrate animal cells. For example, pSV2dhfr (Mol. Cell. Biol. (1981) 1, 854-864) containing the early promoter of SV40; pEF-BOS (Nucleic Acids Res. (1990) 18, 5322); pCDM8 (Nature (1987) 329, 840-842); pCEP4 (Invitrogen); and such are useful vectors for expressing GPCR. The insertion of a DNA encoding a polypeptide of the present invention to a vector can be carried out by a ordinary method utilizing the ligase reaction with restriction enzyme sites (Current protocols in Molecular Biology, edit. Ausubel et al., (1987) Publish. John Wiley & Sons, Section 11.4-11.11). Further, the introduction of a vector to the host cell can be carried out by known methods such as the calcium phosphate precipitation method, the electroporation method (Current protocols in Molecular Biology, edit., Ausubel et al., (1987) Publish. John Wiley & Sons. Section 9.1-9.9), the Lipofectamine method (GIBCO-BRL), the FuGENE6 reagent (Boehringer Mannheim), the microinjection method, and so on.

[0179] To identify agonists of a polypeptide of the present invention, a cell expressing the polypeptide of the present invention is contacted with candidate compounds to detect whether or not the candidate compounds generate a signal, which then works as an index of activation of the polypeptide of the present invention. Namely, compounds are identified which generate a signal indicative of activation of the present polypeptide in the above-described identification method for a ligand using, cells expressing the polypeptide of the present invention. Such compounds serve as agonist candidates of the polypeptide of the present invention.

[0180] To identify antagonists of a polypeptide of the present invention, a cell expressing the polypeptide of the present invention is contacted with an agonist for the polypeptide of the present invention in the presence of a candidate compound to detect whether or not the signal, which serves as an index of activation of the polypeptide of the present invention, is reduced in comparison with a case (control) where the detection is conducted in the absence of the candidate compound. Namely, compounds suppressing the generation of the signal, which serves as an index of the activation of the present polypeptide by the agonist excitation, are isolated by acting the agonist as well as the candidate compound in the above-mentioned identification method of a ligand using the cell expressing the polypeptide of the present invention. Such compounds serve as candidates of antagonist of the polypeptide of the present invention. Examples of potent antagonists of the polypeptide of the present invention includes antibodies; in some cases, polypeptides having close relation with the ligand (e.g., a ligand fragment); and small molecules which bind to a polypeptide of the present invention but does not induce response (therefore, the activity of the receptor is prevented).

[0181] Further, the present invention provides a kit to be used for the above-mentioned identification method. The kit includes a polypeptide of the present invention, or a cell expressing a polypeptide of the present invention, or cell membranes of the cells. The kit may include compounds serving as candidates for ligands, agonists, and antagonists of GPCR.

<Pharmaceutical Composition for Treatment of Disease>

[0182] The present invention provides pharmaceutical compositions for treating patients who are in need of an increase in or the suppression of the activity or expression of a polypeptide of the present invention.

[0183] An agonist of the polypeptide of the present invention, a polynucleotide of the present invention, and a vector wherein a polynucleotide of the present invention is inserted can be used as an effective ingredient of the pharmaceutical composition for increasing the activity or expression of the polypeptide of the present invention. On the other hand, an antagonist of a polypeptide of the present invention, a polynucleotide suppressing the expression of the gene encoding the endogenous polypeptide of the present invention in vivo can be used as an effective ingredient of the pharmaceutical composition for suppressing the activity or expression of the polypeptide of the present invention. Antagonists include polypeptides of the present invention in a soluble form, which have the ability to bind to a ligand under a competitive condition with the endogenous polypeptide of the present invention. A typical example of such competitive substance is a fragment of a polypeptide of the present invention. The antisense DNAs and ribozymes mentioned above are also included as polynucleotides suppressing the expression of a gene encoding a polypeptide of the present invention.

[0184] When a therapeutic compound is used as a pharmaceutical agent, it can be administered as a pharmaceutical composition prepared by known pharmaceutical methods, in addition to directly administering the compound itself to a patient. For example, it can be formulated into a form suitable for oral or parenteral administration, such as tablet, pill, powder, granule, capsule, troche, syrup, liquid, emulsion, suspension, injection (such as liquid, and suspension) suppository, inhalant, percutaneous absorbent, eye drop, eye ointment, obtained by mixing the active ingredient with a pharmacologically acceptable support (such as excipient, binder, disintegrator, flavor, corrigent, emulsifier, diluent, solubilizer).

[0185] Administration to a patient can be typically carried out by methods known to those skilled in the art, such as intra-arterial injection, intravenous injection, subcutaneous injection, and such. Although the dosage varies depending on the weight and age of the patient, administration methods, and such, one skilled in the art can appropriately select an appropriate dose. Further, if the compound can be encoded by DNA, gene therapy can be also carried out through introduction of the DNA to a vector for gene therapy.

[0186] The vectors for gene therapy include, for example, viral vectors such as retroviral vectors, adenoviral vectors, adeno-associated viral vectors; and non-viral vectors such as liposomes; and so on. The objective DNA can be administered to a patient by ex vivo methods and in vivo methods utilizing such vectors.

[0187] According to the present invention, novel GPCRs, polynucleotides encoding the polypeptides, vectors containing the polynucleotides, host cells containing the vectors, and methods or producing the polypeptides have been provided. Further, methods of identifying a compound which binds to a polypeptide or modifies its activity have been provided. The polypeptides, polynucleotides, and compounds which bind to a polypeptide of the present invention or modify its activity are expected to be useful in the development of novel preventive and therapeutic drugs for diseases associated with the polypeptides of the present invention. Furthermore, according to the present invention, test methods for diseases comprising the step of detecting mutations and expression of a gene encoding a polypeptide of the present invention have been provided. GPCR is one of the molecules which is most important and remarked in the fields of the development of pharmaceutical agents and medical treatments. Novel GPCRs comprehensively provided in the present invention are expected to make remarkable development in these fields. Thus, the present invention provides valuable information to the researchers of GPCR.

[0188] Any patents, patent applications, and publications cited herein are incorporated by reference.

[0189] The identification of the polypeptides of the present invention is illustrated below in detail by way of Examples.

### EXAMPLE 1

### Extraction of Amino Acid Sequences from Human Genome Data

[0190] In the first step for discovering novel GPCR genes (i.e., sequence extraction), the present inventors selected all candidates of the 6-frame translation sequences (6F development sequence), which exist between the initiation codon and termination codon in human genome sequences. When a plurality of initiation codons (ATG) are found on the same sequence, the initiation codon giving the longest sequence was selected. On the other hand, in order to detect sequences containing plural exons, protein-coding regions (GD sequence) were discovered using the gene discovery program (GeneDecoder) (Asai, K., et al., Pacific Symposium on Biocomputing 98, pp. 228-239 (PSB98, 1998)). Since a GPCR protein contains seven transmembrane helices with a length of about 20 residues, the condition for both sequences was set to comprise 150 residues or more (>20*7).

[0191] 375,412 sequences by 6-frame translation and 95,900 sequences by the GeneDecoder were predicted from human genome draft sequences at NCBI (February 2001). The sequences predicted by 6-frame translation correspond to sequences without introns, and those by the GeneDecoder are mainly constituted of sequences with plural exons.

[0192] The GeneDecoder is a gene discovery program using a hidden Markov Model (HMM), as well as information related to sequence homology and distribution of the length of exons. The program was evaluated by using Genset 98 (http://bioinformaticsweizmann.ac.il/databases/gensets/Human/), which contains 462 sequences comprising plural exons, and 2,843 exons, and resulted in 97.6% sensitivity and 40.4% selectivity at the nucleotide level. On the other hand, sensitivity and selectivity for detecting a correct exon boundary was 64.2% and 21.3%, respectively.

### EXAMPLE 2

### Triple Analysis

[0193] BLASTP (Altschul, S. F. et al., Nucleic Acids Res. 25, 3389-3402 (1997)) for searching sequences; PFAM database (Bateman, A., et al., Nucleic Acids Res. 2:8,-263-266-(2000)) and PROSITE databases (Bairoch, A., Nucleic Acids Res. 20, Suppl: 2013-2018 (1992)) for assigning domains and motifs; and TMWindows, which is a unique algorithm written by the present inventors, and further, Mitaku method (Hirokawa, T., et al., Bioinformatics. 14, 378-379 (1998)) for predicting TMH were used in the triple analysis. Specifically, the inventors carried out the triple analysis as follows:

[0194] (1) Amino acid sequences (6F development sequences, GD sequences) obtained in the sequence extraction step were searched in SWISSPROT database using BLASTP, and sequences which coincide with known GPCR sequences with an E-value of <10⁻¹⁰ or 10⁻⁵⁰ were selected.

[0195] (2) Sequences wherein a GPCR-specific domain in PFAM database could be assigned with an E-value of <1.0 or 10⁻¹⁰ were selected from the 6F development sequences and GD sequences using HMMER program. Simultaneously, sequences wherein a GPCR-specific motif pattern in PROSITE (Bairoch, A. Nucleic Acids Res. 20, Suppl: 2013-2018(1992)) database could be assigned with a P-value of <2×10⁻³ or <10⁻⁵ were selected.

[0196] (3) The number of transmembrane helices in 6F development sequences and GD sequences was predicted using the TMWindows, and Mitaku method. For example, describing the Logical sum of the result obtained by TMWindows as having 7 transmembrane helices and the result obtained by the Mitaku method as having 6 to 8 transmembrane helices as {TMWindows (7) or Mitaku (6-8)}, sequences which were coincided to respective conditions prepared as {TMWindows (7) or Mitaku (6-8) ), (TMWindows (7) or Mitaku (7)}, and {TMWindows (7) and Mitaku (7)} were selected.

[0197] The programs and databases which were used in the analysis above are described in detail. PFAM is a protein domain database which was described by the hidden Markov Model (HMM), HMMER (Bateman, A., et al., Nucleic Acids Res. 28, 263-266 (2000)) attributes them to the sequences, and the significance is scored by the E-value. On the other hand, PROSITE is a motif pattern which is described by normal representation. The present inventors used “P-value”, which was obtained by multiplying the appearance probability of respective residues, as an index in order to score the significance of attribution. For example, when the normal representation pattern is A-[T,S]-G, the P-value is P_{A}*{Pt+Ps}*P_{G}.

[0198] TMWindows is a unique program written by the present inventors and relates to TMH prediction. Herein, the hydrophobic index of Engelman-Staitz-Goldman (Engelman, D. M., et al., Annual Review of Biophysics and Biophysical Chemistry. 15, 321-353. (1986)) is allotted to every amino acid residue, and all sequences are scanned by nine different window widths (19- to 27 residues). The index was determined as the most suitable index for membrane protein analysis through the comparison of all indices contained in the AAindex database (Tomii, K. & Kanehisa, M. Protein Eng. 9, 27-36 (1996)). Continuous regions having an average hydrophobic index of >2.5 were predicted as transmembrane helices from each window width. The numbers which are predicted by each different window sets indicates a range of the numbers of the helices. On the other hand, the number of helices was predicted by the Mitaku method using physicochemical parameters.

[0199] The thresholds used in these analyses were obtained by the evaluation of respective methods by the present inventors. The reference data set used for evaluation is a sequence set obtained by excluding fragment sequences from SWISSPROT version 39 (Bairoch, A. & Apweiler, R., Nucleic Acids Res. 28, 45-48 (2000)), which contains 1,054 known GPCR sequences and 64,154 non-GPCR sequences. Specific evaluation procedures of the analytical method are shown below.

[0200] (1) 1,054 known GPCR sequences were searched in the data set for evaluation using BLASTP, and the sensitivity and selectivity related to the discrimination of accurate and inaccurate pairs were calculated for each E-value.

[0201] (2) A PFAM domain specific to GPCR was attributed to the sequences of the data set for evaluation using HMMER, and the sensitivity and selectivity of the E-values were calculated for the number of the accurate and inaccurate attribution. On the other hand, the sensitivity and selectivity of P-values were calculated for the number of the accurate and inaccurate attribution with respect to PROSITE pattern.

[0202] (3) In general, the TMH anticipation tool is not so accurate in predicting real number of helices. However, by establishing the number of helix to be predicted widely as 6 to 8, 5 to 9, or 4 to 10, and such, the sensitivity for detecting a real seven transmembrane helix type sequence can be significantly increased. We considered four ranges: 7, 6 to 8, 5 to 9, and 4 to 10, for both TMWindows and the Mitaku method, and calculated the sensitivity and selectivity to detect a real seven transmembrane helix for all of the combinations (16 combinations) for each of them.

[0203] During the evaluation, the present inventors laid emphasis on two thresholds, namely, the best sensitivity threshold and the best selectivity threshold. The former threshold is intended to minimize the false positive to obtain a sensitivity of almost 100%. On the other hand, the latter is intended to minimize the false negative to obtain a selectivity of almost 100%.

[0204] For example, the evaluation of the threshold of BLASTP is shown in FIG. 1. The arrow on the left represents the number of pairs between GPCRs, and the arrow on the right shows the pair between GPCR and non-GPCR sequence. In the region wherein the E-value is less than 10⁻⁵⁰, almost all of the pairs were formed between GPCR sequences, excluding some unrelated pairs near the boundary region. This corresponds to the best selectivity threshold. Interestingly, these false positives were caused by the correspondence with LDL receptor domains or EGF factor domains, which are characteristic in receptors having only one transmembrane helix. When the E-value is less than 10⁻¹⁰, the number of false positives was 115, but almost all of GPCRs were within the range. The boundary region corresponds to the best sensitivity threshold.

[0205] Similarly, as summarized in Table 1, the present inventors evaluated thresholds of respective tools and generated four levels of data sets based on them.

TABLE 1

| | Level A | | | Level D |
|---|---|---|---|---|
| | (Best Selectivity) | Level B | Level C | (Best Sensitivity) |
| BLASTP | E < 10⁻⁵⁰ | E < 10⁻¹⁰ | E < 10⁻¹⁰ | E < 10⁻¹⁰ |
| | (99%, 100%) | (100%, 90.1%) | (100%, 90.1%) | (1.00%, 90.1%) |
| PFAM | E < 10⁻¹⁰ | E < 1.0 | E < 1.0 | E < 1.0 |
| | (95%, 99.6%) | (100%, 84.3%) | (100%, 84.3%) | (100%, 84.3%) |
| PROSITE | P < 10⁻⁵ | P < 2 × 10⁻³ | P < 2 × 10⁻³ | P < 2 × 10⁻³ |
| | (90%, 100%) | (100%, 95.0%) | (100%, 95.0%) | (100%, 95.0%) |
| TMH | Not used | {TMWindows(7) | {TMWindows(7) | {TMWindows(7) or |
| Prediction | | and Mitaku(7)} | or Mitaku(7)} | Mitaku(6-8)} |
| | | (36.0%, 70.6%) | (86.8%, 44.6%) | (99.3%, 28.8%) |

[0206] Herein, the sensitivity (left) and selectivity (right) obtained by using each threshold are represented in the parentheses under the threshold of each program.

[0207] The most reliable data (level A, the best selectivity data, set) was obtained by the logical sum of sequences obtained from the best selectivity thresholds of BLASTP, PFAM, and PROSITE. In addition, in order to discover far-related GPCR sequences, the logical sum of results by three levels (Table 1) of TMH prediction threshold and results by the best sensitivity thresholds of BLASTP, PFAM, and PROSITE was obtained. Then, the most sensitive data set was prepared as the best sensitivity data set (level D). According to the evaluation method used by the present inventors, any of the sequences discovered by the best selectivity data set is a protein having seven transmembrane helices, and the possibility that they are a guanosine triphosphate binding protein-coupling type is extremely high.

### EXAMPLE 3

### Accurate Selection of the Number of Genes

[0208] GPCR candidate substances were screened from sequences generated in the first step, using the thresholds shown in Table 1. However, since these sequences contained following duplicated examples, it was required to finally select rigidly the number of candidates.

Case 1: Perfect Matching or Duplication at a Same Gene Locus.

[0209] These resulted from using two sequence preparation methods: namely, (1) 6-frame translation, and (2) prediction by the GeneDecoder. The present inventors regarded them as same genes.

Case 2: Many Copies on Different Chromosomes or at Different Positions on a Same Chromosome.

[0210] From a biological viewpoint, the present inventors regarded them as different genes. Duplicated genes were most frequently found between chromosome 2 and 11.

Case 3: Two or More Sequences Partially Corresponding to any Long Known Sequence.

[0211] These were considered to be generated by missplicing by the gene discovery program. The present inventors considered that they should be fused as generally one gene.

[0212] The present inventors first improved the precision of candidate genes by studying above-mentioned cases, respectively. Two sequences, i and j, were regarded as the same gene by using a specific algorithm: Cᵢ=Cⱼ, Fᵢ=Fⱼ, nᵢ=nⱼ, and eᵢ−tⱼ<0 (i<j); wherein 50 or more residues are aligned at 99% or more similarity (herein, “C” represents chromosome number; “F” frame number; “R” the position on a genomic sequence; and S(C,F,R) sequence), (Herein, when n is a contiguous number and t and e are relative positions at the N- and C-terminus on a contiguous sequences, the positions R is R (n, t, e)).

[0213] After the above screening, the present inventors finally obtained the best selectivity and the best sensitivity data sets containing 827 and 2109 sequences, respectively, and also obtained other levels of data sets by considering biological information, using NCBI human draft sequences (both 2001 and 2002 version). The number of GPCR candidates of every chromosome is summarized in Table 2 for each data set.

TABLE 2

| Chromosome | LEVEL-A | LEVEL-B | LEVEL-C | LEVEL-D |
|---|---|---|---|---|
| 1 | 85 | 122 | 141 | 180 |
| 2 | 41 | 75 | 88 | 120 |
| 3 | 52 | 76 | 91 | 142 |
| 4 | 13 | 34 | 38 | 62 |
| 5 | 24 | 51 | 69 | 98 |
| 6 | 50 | 66 | 79 | 111 |
| 7 | 39 | 71 | 79 | 98 |
| 8 | 19 | 26 | 34 | 53 |
| 9 | 31 | 44 | 50 | 66 |
| 10 | 12 | 25 | 39 | 64 |
| 11 | 234 | 316 | 326 | 360 |
| 12 | 28 | 65 | 79 | 127 |
| 13 | 10 | 21 | 31 | 56 |
| 14 | 40 | 54 | 59 | 76 |
| 15 | 15 | 23 | 34 | 73 |
| 16 | 13 | 28 | 45 | 74 |
| 17 | 32 | 43 | 49 | 67 |
| 18 | 8 | 21 | 25 | 39 |
| 19 | 54 | 78 | 81 | 107 |
| 20 | 7 | 19 | 25 | 41 |
| 21 | 0 | 4 | 6 | 9 |
| 22 | 5 | 9 | 11 | 18 |
| X | 14 | 24 | 26 | 51 |
| Y | 0 | 0 | 2 | 2 |
| Un | 1 | 5 | 7 | 15 |
| Total | 827 | 1300 | 1514 | 2109 |

The number of GPCR candidates of every chromosome Un means those whose chromosome number is unknown.

[0214] As shown in the table, it was found that chromosome 11 has the maximum number of GPCR candidates in all levels of data sets, and chromosomes 1, 6, and 19 also have many GPCR candidates. On the other hand, chromosomes 21 and Y have extremely few GPCR candidates. Further, this tendency does not have changed, even after updating the data monthly.

[0215] Further analysis concerning the best selectivity data set is summarized in Table 3.

TABLE 3

| | Data |
|---|---|
| Families | Total |
| Acetylchline (muscarinic) receptors | 9 |
| Adenosine and adenine nucleotide receptors | 18 |
| Adrenergic, Dopamine, Serotonine receptors | 37 |
| Angiotensin receptors | 5 |
| Bradykinin receptors | 3 |
| Cannabinoids receptors | 1 |
| Chemokines and chemotactic factors receptors | 31 |
| Cholecystokinin/gastrin receptors | 2 |
| Endothelin receptors | 2 |
| Family 2(B) receptors | 18 |
| Family 3(C) receptors | 28 |
| Family fz/smo receptors | 10 |
| Glycoprotein hormone receptors | 5 |
| Histamine receptors | 2 |
| Melanocortins receptors | 5 |
| Melanotonin receptors | 3 |
| Neuropeptide Y receptors | 6 |
| Neurotensin receptors | 4 |
| No swissprot 7TM | 17 |
| Odorant/olfactory and gustatory receptors | 507 |
| Opioid peptides receptors | 5 |
| Opsins | 5 |
| Orphan receptors | 68 |
| Other receptors | 4 |
| Platelet activating factor receptors | 3 |
| Prostanoids receptors | 8 |
| Proteinase-activated receptors | 5 |
| Releasing hormones receptors | 3 |
| Somatostatin receptors | 6 |
| Tachykinin receptors | 3 |
| Vasopressin/oxytocin receptors | 4 |
| Total | 827 |

[0216] The present inventors classified sequences by a sequence similarity of 30%, which is generally considered to be the threshold for an evolutionarily related family. The largest family is the olfactory receptor family, containing 507 members. Major families containing more than 20 members are: the adrenaline, dopamine, and serotonin receptor family (37); the 2B receptor family (18); the 3C receptor family (28); the chemokine and chemoatractant receptor family (31); and the orphan receptor family (68).

### EXAMPLE 4

### Extraction of Novel Sequence

[0217] Sequences were searched in UNIGENE (Schuler, G. D., J. Mol. Med. 75, 694-698 (1997)) and nr-aa (ftp://ncbi.nlm.nih.gov/blast/db/README) databases. When at least 100 or more residues in the sequences which were investigated were continuously aligned with known sequences, and when the amino acid identity of that region is 96% or more, the present inventors designated the sequence as a known sequence. Novel GPCR candidates were obtained using this standard. These data sets will be maintained and updated by routine recalculations to the future.

[0218] The present inventors classified the extracted novel sequences into groups A, B, and C (Table 4 to Table 6). The sequences in groups A, B, and C are newly identified sequences, selected based on the search method in UNIGENE and nr-aa database, after the numbers of the sequences were made precise based on the best selectivity data set (level A), the data set at level B, and the data set at level C, respectively, among sequence sets which were obtained by triple analysis.

[0219] Further, the nucleotide sequences and amino acid sequences of the novel gene described in group A are shown in SEQ ID NOs: 1 to 936; those described in group B are shown in SEQ ID NOs: 1 to 1684; and those described in C group are shown in SEQ ID NOs: 1 to 2070.

TABLE 4

| | | | Number | |
|---|---|---|---|---|
| | | | of novel | SEQ ID |
| | Assayed amino acids | Assay method | genes | NO: |
| A-1 | 6F development | Homology search | 241 | 1-482 |
| | sequence | | | |
| A-2 | GD sequence | Homology search | 113 | 483-708 |
| A-3 | 6F development | Motif search | 114 | 709-936 |
| | sequence + GD sequence | Domain search | | |

A-1 Sequence set obtained through the assay of 6F sequences by homology search (use of the most easy method).
A-2 The part of amino acid sequence comprising multi exon, increased by use of GD sequence.
A-3 Sequence set found for the first time by use of motif and domain attribution. Homologous with very little homology, which cannot be found through normal sequence searches, were detected.

[0220] TABLE 5

| | Assayed | | Number of | SEQ ID |
|---|---|---|---|---|
| | amino acids | Assay method | novel genes | NO: |
| B-1 | 6F development | Homology search | 378 | 1-482 |
| | sequence | | | 937-1210 |
| B-2 | GD sequence | Homology search | 180 | 483-708 |
| | | | | 1211-1344 |
| B-3 | 6F development | Motif search | 259 | 709-936 |
| | sequence + GD | Domain search | | 1345-1634 |
| | sequence | | | |
| B-4 | 6F development | Transmembrane | 25 | 1635-1684 |
| | sequence + GD | helix prediction | | |
| | sequence | | | |

B-1 Sequence set obtained through the assay of 6F sequences by homology search (use of the most easy method).
B-2 The part of amino acid sequence comprising multi exon, increased by use of GD sequence.
B-3 Sequence set found for the first time by use of motif and domain attribution. Homologous with very little homology, which cannot be found through normal sequence searches, were detected.
B-4 Sequence set found for the first time by use of the prediction method for the transmembrane helix. Sequences which cannot be found even through normal homology search, motif and domain attribution were also determined.

[0221] TABLE 6

| | Assayed | | Number of | SEQ ID |
|---|---|---|---|---|
| | amino acids | Assay method | novel genes | NO: |
| C-1 | 6F development | Homology search | 378 | 1-482 |
| | sequence | | | 937-1210 |
| C-2 | GD sequence | Homology search | 180 | 483-708 |
| | | | | 1211-1344 |
| C-3 | 6F development | Motif search | 259 | 709-936 |
| | sequence + GD | Domain search | | 1345-1634 |
| | sequence | | | |
| C-4 | 6F development | Transmembrane | 218 | 1635-2070 |
| | sequence + GD | helix prediction | | |
| | sequence | | | |

C-1 Sequence set obtained through the assay of 6F sequences by homology search (use of the most easy method).
C-2 The part of amino acid sequence comprising multi exon, increased by use of GD sequence.
C-3 Sequence set found for the first time by use of motif and domain attribution. Homologous with very little homology, which cannot be found through normal sequence searches, were detected.
C-4 Sequence set found for the first time by use of the prediction method for the transmembrane helix. Sequences which cannot be found even through normal homology search, motif and domain attribution were also determined.

1-29. (canceled)

30. A polynucleotide encoding a guanosine triphosphate-binding protein coupled receptor selected from:
(a) a polynucleotide encoding a polypeptide comprising an amino acid sequence of SEQ ID NO: 256;
(b) a polynucleotide comprising a coding region of the nucleotide sequence of SEQ ID NO: 255;
(c) a polynucleotide encoding a polypeptide comprising an amino acid sequence of SEQ ID NO: 256 wherein one or more amino acid residues are substituted, deleted, added and/or inserted; and
(d) a polynucleotide hybridizing under stringent conditions with a DNA consisting of a nucleotide sequence of SEQ ID NO: 255.

31. A polynucleotide encoding a fragment of a polypeptide comprising an amino acid sequence of SEQ ID NO: 256.

32. A vector comprising the polynucleotide of claim 30.

33. A host cell retaining the polynucleotide of claim 30.

34. A host cell retaining the vector of claim 32.

35. A polypeptide encoded by the polynucleotide of claim 30.

36. A method for producing the polypeptide of claim 35, comprising culturing a host cell comprising a polynucleotide encoding the polypeptide of claim 35 and recovering the produced polypeptide from said host cell or culture supernatant thereof.

37. An antibody binding to the polypeptide of claim 35.

38. A method for identifying a ligand of the polypeptide of claim 35, comprising:
(a) contacting a candidate compound with the polypeptide of claim 35, a cell expressing the polypeptide of claim 35, or a cytoplasmic membrane of the cell; and
(b) detecting whether the candidate compound binds to the polypeptide of claim 35, the cell expressing the polypeptide of claim 35, or the cytoplasmic membrane thereof, wherein the detection of binding implies that said candidate compound is a ligand of the polypeptide of claim 35.

39. A method for identifying an agonist of the polypeptide of claim 35, comprising:
(a) contacting a candidate compound with a cell expressing the polypeptide of claim 35; and
(b) detecting whether the candidate compound induces a signal that indicates the activation of the polypeptide of claim 35, wherein the detection of activation implies that said candidate compound is an agonist of the polypeptide of claim 35.

40. A method for identifying an antagonist of the polypeptide of claim 35, comprising:
(a) contacting a cell expressing the polypeptide of claim 35 with an agonist of the polypeptide of claim 35 in the presence of a candidate compound; and
(b) detecting whether the intensity of the signal that indicates the activation of the polypeptide of claim 35 is reduced or not by comparing with the signal detected in the absence of the candidate compound, wherein the detection of a reduction in intensity implies that said candidate compound is an antagonist of the polypeptide of claim 35.

41. A ligand identified by the method of claim 38.

42. An agonist identified by the method of claim 39.

43. An antagonist identified by the method of claim 40.

44. A kit used for the method of identifying a ligand of the polypeptide of claim 35, comprising at least one molecule selected from:
(a) a polypeptide of claim 35; and
(b) a host cell or cytoplasmic membrane thereof retaining a polynucleotide encoding a polypeptide of claim 35.

45. A kit used for the method of identifying an agonist of the polypeptide of claim 35, comprising at least one molecule selected from:
(a) a polypeptide of claim 35; and
(b) a host cell or cytoplasmic membrane thereof retaining a polynucleotide encoding a polypeptide of claim 35.

46. A kit used for the method of identifying an antagonist of the polypeptide of claim 35, comprising at least one molecule selected from:
(a) a polypeptide of claim 35; and
(b) a host cell or cytoplasmic membrane thereof retaining a polynucleotide encoding a polypeptide of claim 35.

47. A pharmaceutical composition for treating a patient, who is in need of increased activity or expression of the polypeptide of claim 35, comprising an effective amount of a molecule for the treatment selected from:
(a) an agonist of the polypeptide of claim 35; and
(b) the polynucleotide encoding the polypeptide of claim 35;
(c) the vector comprising a polynucleotide encoding the polypeptide of claim 35.

48. A pharmaceutical composition for treating a patient having an endogenous activity or expression of the polypeptide of claim 35 that needs to be suppressed, comprising an effective amount of a molecule for the treatment selected from:
(a) an antagonist of the polypeptide of claim 35; and
(b) a polynucleotide suppressing the expression of a gene encoding the endogenous polypeptide of claim 35 in vivo.

49. A method for testing a disorder associated with the aberration in the expression of a gene encoding the polypeptide of claim 35 or the aberration in the activity of the polypeptide of claim 35 in a subject, comprising detecting a mutation in the gene or in the expression control region thereof of the subject.

50. A method for testing a disorder associated with the aberration in the expression of a gene encoding the polypeptide of claim 35 or the aberration in the activity of the polypeptide of claim 35 in a subject, comprising:
(a) preparing a DNA sample from a subject;
(b) isolating the DNA encoding the polypeptide of claim 35 or the expression control region thereof;
(c) determining the nucleotide sequence of the isolated DNA;
(d) comparing the nucleotide sequence of DNA determined in step (c) with that determined in a control; and
(e) detecting a mutation in the gene or in the expression control region thereof of the subject.

51. The method for testing of claim 49, comprising:
(a) preparing a DNA sample from a subject;
(b) cleaving the prepared DNA sample with a restriction enzyme;
(c) separating DNA fragments according to the sizes thereof;
(d) comparing the detected sizes of the DNA fragments with those detected in a control; and
(e) detecting a mutation in the gene or in the expression control region thereof of the subject.

52. A method for testing a disorder associated with the aberration in the expression of a gene encoding the polypeptide of claim 35 or the aberration in the activity of the polypeptide of claim 35 in a subject, comprising:
(a) preparing a DNA sample from a subject;
(b) amplifying the DNA encoding the polypeptide of claim 35 or the expression control region thereof from the DNA sample;
(c) cleaving the amplified DNAs with a restriction enzyme;
(d) separating the DNA fragments according to the sizes thereof;
(e) comparing the detected sizes of the DNA fragments with those detected in a control; and
(f) detecting a mutation in the gene or in the expression control region thereof of the subject.

53. A method for testing a disorder associated with the aberration in the expression of a gene encoding the polypeptide of claim 35 or the aberration in the activity of the polypeptide of claim 35 in a subject, comprising:
(a) preparing a DNA sample from a subject;
(b) amplifying the DNA encoding the polypeptide of claim 35 or the expression control region thereof from the sample;
(c) dissociating the amplified DNA to single-stranded DNAs;
(d) separating the dissociated single-stranded DNAs on a non-denaturing gel;
(e) comparing the mobility of the separated single-stranded DNAs with that of a control; and
(f) detecting a mutation in the gene or in the expression control region thereof of the subject.

54. A method for testing a disorder associated with the aberration in the expression of a gene encoding the polypeptide of claim 35 or the aberration in the activity of the polypeptide of claim 35 in a subject, comprising
(a) preparing a DNA sample from a subject;
(b) amplifying the DNA encoding the polypeptide of claim 35 or the expression control region thereof from the sample;
(c) separating the amplified DNAs on a gel with increasing concentration gradient of a DNA denaturant;
(d) comparing the mobilities of the separated DNAs with those of a control; and
(e) detecting a mutation in the gene or in the expression control region thereof of the subject.

55. A method for testing a disorder associated with the aberration in the expression of a gene encoding the polypeptide of claim 35, comprising detecting the expression level of the gene in the subject.

56. A method for testing a disorder associated with the aberration in the expression of a gene encoding the polypeptide of claim 35 or the aberration in the activity of the polypeptide of claim 35 in a subject, comprising:
(a) preparing an RNA sample from a subject;
(b) measuring the amount of RNA encoding the polypeptide of claim 35 contained in said RNA sample;
(c) comparing the amount of measured RNA with that measured in a control; and
(d) detecting the expression level of the gene in the subject.

57. A method for testing a disorder associated with the aberration in the expression of a gene encoding the polypeptide of claim 35 or the aberration in the activity of the polypeptide of claim 35 in a subject, comprising
(a) providing a cDNA sample prepared from a subject and a basal plate on which nucleotide probes hybridizing to the DNA encoding the polypeptide of claim 35 are immobilized;
(b) contacting said cDNA sample with said basal plate;
(c) measuring the expressed amount of the gene encoding the polypeptide of claim 35 contained in said cDNA sample by detecting the hybridization intensity between said cDNA sample and the nucleotide probe immobilized on the basal plate;
(d) comparing the measured expression amount of the gene encoding the polypeptide of claim 35 with the expression measured for a control; and
(e) detecting the expression level of the gene in the subject.

58. A method for testing a disorder associated with the aberration in the expression of a gene encoding the polypeptide of claim 35 or the aberration in the activity of the polypeptide of claim 35 in a subject, comprising
(a) preparing a protein sample from a subject;
(b) measuring the amount of the polypeptide of claim 35 contained in said protein sample;
(c) comparing the amount of the measured polypeptide with that measured for a control; and
(d) detecting the expression level of the gene in the subject.

59. An oligonucleotide having a chain length of at least 15 nucleotides hybridizing to a DNA encoding the polypeptide of claim 35 or the expression control region thereof.

60. An assay reagent for testing disorders associated with aberration in the expression of the gene encoding the polypeptide of claim 35 or aberration in the activity of the polypeptide of claim 35, comprising an oligonucleotide having at least 15 nucleotides hybridizing to a DNA encoding the polypeptide of claim 35 or the expression control region thereof.

61. An assay reagent for testing disorders associated with aberration in the expression of a gene encoding the polypeptide of claim 35 or aberration in the activity of the polypeptide of claim 35, comprising an antibody binding to the polypeptide of claim 35.

The application's sequence listing, which the Patent Office published only in electronic form, follows.

SEQUENCE LISTING (2070 sequences)

SEQ ID NO: 1 - DNA, 1354 bp, Homo sapiens
  source
  (1)..(1354)
  CDS (201)..(1154)
caagaaaatccttaaatgaacaatgatggtataatgagatgtagcacaatcctgctcaggcagttctctcagggaaattatgagcttcaagaaataagatcgacttgaccttggtttgttcatgactacatcataatgttttatgtaaatcagatacctttccaactttgtcatatctcttttgtgtaccctacagagctatggagcagagcaattattccgtgtatgccgactttatccttctgggtttgttcagcaacgcccgtttcccctggcttctctttgccctcattctcctggtctttttgacctccatagccagcaacgtggtcaagatcattctcatccacatagactcccgcctccacacccccatgtacttcctgctcagccagctctccctcagggacatcctgtatatttccaccattgtgcccaaaatgctggtcgaccaggtgatgagccagagagccatttcctttgctggatgcactgcccaacacttcctctacttgaccttagcaggggctgagttcttcctcctaggactcatgtcctatgatcgctacgtagccatctgcaaccctctgcactatcctgtcctcatgagccgcaagatctgctggttgattgtggcggcagcctggctgggagggtctatcgatggtttcttgctcacccccgtcaccatgcagttccccttctgtgcctctcgggagatcaaccacttcttctgcgaggtgcctgcccttctgaagctctcctgcacggacacatcagcctacgagacagccatgtatgtctgctgtattatgatgctcctcatccctttctctgtcatctcgggctcttacacaagaattctcattactgtttataggatgagcgaggcagaggggaggggaaaggctgtggccacctgctcctcacacatggtggttgtcagcctcttctatggggctgccatgtacacatacgtgctgcctcattcttaccacacccctgagcaggacaaagctgtatctgccttctacaccatccttactcccatgctcaatccactcatttacagccttaggaacaaggatgtcacaggggccctacagaaggttgtggggaggtgtgtgtcctcaggaaaggtaaccactttctaaagaaatttcatatgctgctagagacttgaaatgaaggatacaagactttatcattgcccttgaatttaaatattctctgcctggaaacaagtgacccacatgccaccaactgtggggcatttatgggatttggaaagctgcctgggattttaaggatttcatttttttgaaaggtatgaaggctctgaacaatgaacagt

SEQ ID NO: 2 - protein, 317 aa, Homo sapiens
MEQSNYSVYADFILLGLFSNARFPWLLFALILLVFLTSIASNVVKIILIHIDSRLHTPMYFLLSQLSLRDILYISTIVPKMLVDQVMSQRAISFAGCTAQHFLYLTLAGAEFFLLGLMSYDRYVAICNPLHYPVLMSRKICWLIVAAAWLGGSIDGFLLTPVTMQFPFCASREINHFFCEVPALLKLSCTDTSAYETAMYVCCIMMLLIPFSVISGSYTRILITVYRMSEAEGRGKAVATCSSHMVVVSLFYGAAMYTYVLPHSYHTPEQDKAVSAFYTILTPMLNPLIYSLRNKDVTGALQKVVGRCVSSGKVTTF

SEQ ID NO: 3 - DNA, 1357 bp, Homo sapiens
  source
  (1)..(1357)
  CDS (201)..(1157)
  modified_base (1141)..(1240): a, t, c, g, unknown or other
tttcgtagttcactttagcttgtggccaagatacaacttgacctaagatttgaacttatgattttatgtcagtttaaatcaatatttagaaaaataattcaaagcacatgtcttaccagaaaaaggtcaggaaagccatgtacataggaaagatttaaaattaatgacttttttttcctcagggggaaactgagccagtcatgtgctcagggaatcagacttctcagaatcaaacagcaagcactgatttcaccctcacgggactctttgctgagagcaagcatgctgccctcctctacaccgtgaccttccttcttttcttgatggccctcactgggaatgccctcctcatcctcctcatccactcagagccccgcctccacacccccatgtacttcttcatcagccagctcgcgctcatggatctcatgtacctatgcgtgactgtgcccaagatgcttgtgggccaggtcactggagatgataccatttccccgtcaggctgtgggatccagatgttcttctacctgaccctggctggagctgaggttttcctcctggctgccatggcctatgaccgatatgctgctgtttgcagacctctccattacccactgctgatgaaccagagggtgtgccagctcctggtgtcagcctgctgggttttgggaatggttgatggtttgttgctcacccccattaccatgagcttccccttttgccagtctaggaaaatcctgagttttttctgtgagactcctgccctgctgaagctctcctgctctgacgtctccctctataagacgctcatgtacctgtgctgcatcctcatgcttctcgcccccatcatggtcatctccagctcatacaccctcatcctgcatctcatccacaggatgaattctgccgccggccacaggaaggccttggccacctgctcctcccacatgatcatagtgctgctgctcttcggtgcttccttctacacctacatgctcccgagttcctaccacacagctgagcaggacatgatggtgtctgccttttacaccatcttcactcctgtgctgaaccccctcatttacagtctccgcaacaaagatgtcaccagggctatgaggagcatgatgcagtcaagaannnnnnnnnnnnnnnnnnnnnnnnnnnnnnnnnnnnnnnnnnnnnnnnnnnnnnnnnnnnnnnnnnnnnnnnnnnnnnnnnnnnnnnnnnnnnnnnnnnngttttgatactatctatcatcttatggtgtgacccatctcattcacagggaagtccaaccacagctcatgtggtctatgcagtccattttatacgggattttgctacagtttctata

SEQ ID NO: 4 - protein, 319 aa, Homo sapiens
  MOD_RES (314)..(319): Variable amino acid
MCSGNQTSQNQTASTDFTLTGLFAESKHAALLYTVTFLLFLMALTGNALLILLIHSEPRLHTPMYFFISQLALMDLMYLCVTVPKMLVGQVTGDDTISPSGCGIQMFFYLTLAGAEVFLLAAMAYDRYAAVCRPLHYPLLMNQRVCQLLVSACWVLGMVDGLLLTPITMSFPFCQSRKILSFFCETPALLKLSCSDVSLYKTLMYLCCILMLLAPIMVISSSYTLILHLIHRMNSAAGHRKALATCSSHMIIVLLLFGASFYTYMLPSSYHTAEQDMMVSAFYTIFTPVLNPLIYSLRNKDVTRAMRSMMQSRXXXXXX

SEQ ID NO: 5 - DNA, 1330 bp, Homo sapiens
  source
  (1)..(1330)
  CDS (201)..(1130)
gtgaattcttagtttgttttgtgaatttgttatatgtcatttatatactcaaatccccagacccacgggactcaggttagcacaatgagcatacacaaatgtgagtactcactaaacactcattacaaagggacgcgttacactgactccaaaactctccttggtggcctaggtgaaacctcatggccaacatcaccaggatggccaaccacactggaaggttggatttcatcctcatgggactcttcagacaatccaaacatccagctctacttagtgtggtcatctttgtggttttcctgaaggcgttgtctggaaatgctgtcctgatccttctgatacactgtgacgcccacctccacagccccatgtactttttcatcagtcaattgtctctcatggacatggcgtacatttctgtcactgtgcccaagatgctcctggaccaggtcatgggtgtgaataaggtctcagcccctgagtgtgggatgcagatgttcctctatctgacactagcaggttcggaatttttccttctagccaccatggcctatgaccgctacgtggccatctgccatcctctccgttaccctgtcctcatgaaccatagggtctgtcttttcctggcatcgggctgctggttcctgggctcagtggatggcttcatgctcactcccatcaccatgagcttccccttctgcagatcctgggagattcatcatttcttctgtgaagtccctgctgtaacgatcctgtcctgctcagacacctcactctatgagaccctcatgtacctatgctgtgtcctcatgctcctcatccctgtgacgatcatttcaagctcctatttactcatcctcctcaccgtccacaggatgaactcagcagagggccggaaaaaggcctttgccacctgctcctcccacctgactgtggtcatcctcttctatggggctgccgtctacacctacatgctccccagctcctaccacacccctgagaaggacatgatggtatctgtcttctataccatcctcactccggtgctgaaccctttaatctatagtcttaggaataaggatgtcatgggggctctgaagaaaatgttaactgtgagattcgtcctttaggaaattataaagtaggaaatttggatataaagatttattttccttttctctacccatcagatacttaggattttatccctgttattccttagactctcatacaatgatgcctcatctcatattcatctcattttgaggaattctttcactgtgtggaaactctattttatagtctttgtccatccaaaattcttttacaa

SEQ ID NO: 6 - protein, 309 aa, Homo sapiens
MANHTGRLDFILMGLFRQSKHPALLSVVIFVVFLKALSGNAVLILLIHCDAHLHSPMYFFISQLSLMDMAYISVTVPKMLLDQVMGVNKVSAPECGMQMFLYLTLAGSEFFLLATMAYDRYVAICHPLRYPVLMNHRVCLFLASGCWFLGSVDGFMLTPITMSFPFCRSWEIHHFFCEVPAVTILSCSDTSLYETLMYLCCVLMLLIPVTIISSSYLLILLTVHRMNSAEGRKKAFATCSSHLTVVILFYGAAVYTYMLPSSYHTPEKDMMVSVFYTILTPVLNPLIYSLRNKDVMGALKKMLTVRFVL

SEQ ID NO: 7 - DNA, 1351 bp, Homo sapiens
  source
  (1)..(1351)
  CDS (201)..(1151)
tgcagccatggtttttgcttcatgatgtgcatgttggtctgcctgttcttctctagcctctagcctggaagcttcatcctgacggtaccctcagaagtgtcacctctactgcagacctttcccatcttgaccgtgttctcttgcctccttcctggtccttgtgtcttcccgttgccctgggacgctcgtgggccatatcaatgacgaacacatcatcctctgacttcaccctcctggggcttctggtgaacagtgaggctgccgggattgtatttacagtgatccttgctgttttcttgggggccgtgactgcaaatttggtcatgatattcttgattcaggtggactctcgcctccacacccccatgtactttctgctcagtcagctgtccatcatggacacccttttcatctgtaccactgtcccaaaactcctggcagacatggtttctaaagagaagatcatttcctttgtggcctgtggcatccagatcttcctctacctgaccatgattggttctgagttcttcctcctgggcctcatggcctatgactgctacgtggctgtctgtaaccctctgagatacccagtcctgatgaaccgcaagaagtgtcttttgctggctgctggtgcctggtttgggggctccctcgatggctttctgctcactcccatcaccatgaatgtcccttactgtggctcccgaagtatcaaccattttttctgtgagatcccagcagttctgaaactggcctgtgcagacacgtccttgtatgaaactctgatgtacatctgctgtgtcctcatgttgctcatccccatctctatcatctccacttcctactccctcatcttgttaaccatccaccgcatgccctctgctgaaggtcgcaaaaaggccttcaccacttgttcctcccacttgactgtagttagcatcttctatggggctgccttctacacatacgtgctgccccagtccttccacacccccgagcaggacaaagtagtgtcagccttctataccattgtcacgcccatgcttaatcctctcatctacagcctcagaaacaaggacgtcataggggcatttaaaaaggtatttgcatgttgctcatctgctcagaaagtagcaacaagtgatgcttagagagtcactgcccagaggataaggcttcctaaggacttcctccatttgccctgtttccctggagatgatctgctcagctatcaacctacacttactactggcagttaagatgattcaccctgtctggattcttgctcctcgggagcaagggaaagatgttttactgttatgcagagatctttcagtgaagtatcaaaaat

SEQ ID NO: 8 - protein, 316 aa, Homo sapiens
MTNTSSSDFTLLGLLVNSEAAGIVFTVILAVFLGAVTANLVMIFLIQVDSRLHTPMYFLLSQLSIMDTLFICTTVPKLLADMVSKEKIISFVACGIQIFLYLTMIGSEFFLLGLMAYDCYVAVCNPLRYPVLMNRKKCLLLAAGAWFGGSLDGFLLTPITMNVPYCGSRSINHFFCEIPAVLKLACADTSLYETLMYICCVLMLLIPISIISTSYSLILLTIHRMPSAEGRKKAFTTCSSHLTVVSIFYGAAFYTYVLPQSFHTPEQDKVVSAFYTIVTPMLNPLIYSLRNKDVIGAFKKVFACCSSAQKVATSDA

SEQ ID NO: 9 - DNA, 1339 bp, Homo sapiens
  source
  (1)..(1339)
  CDS (201)..(1139)
gcccaatttgaatataaagaatattatgtaggttcatagaggaccacttgagttgccttcaaaaatgtaaggaccaacaatgtagattacaactagaaagggatcaagactacgatatttaagaaccatctttccatcatttgattcttcgtgagtgttcaggatttctgtttcccaggtccaagcttcatcatccaccgatgcccaattcaaccaccgtgatggaatttctcctcatgaggttttctgatgtgtggacactacagattttacattctgcatccttctttatgttgtatttggtaactctaatgggaaacatcctcattgtgaccgtcaccacctgtgacagcagccttcacatgcccatgtacttcttcctcaggaatctgtctatcttggatgcctgctacatttctgttacagtccctacctcatgtgtcaattccctactggacagcaccaccatttctaaggcgggatgtgtagctcaggtcttcctcgtggttttttttgtatatgtggagcttctgtttctcaccattatggctcatgaccgctatgtggctgtctgccagccacttcactaccctgtgatcgtgaactctcgaatctgcatccagatgacactggcctccctactcagtggtcttgtctatgcaggcatgcacactggcagcacattccagctgcccttctgtcggtccaacgttattcatcaattcttctgtgacatcccctctctgctgaagctctcttgctctgacaccttcagcaatgaggtcatgattgttgtctctgctctgggggtaggtggcggctgtttcatctttatcatcaggtcttacattcacatcttttcgaccgtgctcgggtttccaagaggagcagacagaacaaaggccttttccacctgcatccctcacatcctggtggtgtcagtcttcctcagttcatgctcttctgtgtacctcaggccacctgcgatacctgcagccacccaggatctgatcctttctggtttttattccataatgcctcccctctttaaccctattatttacagtcttagaaataagcaaataaaggtggccatcaagaaaatcatgaagagaattttttattcagaaaatgtgtaagaaacccgagaggctcaccctaggctgttttgtgatattcatgttttcaggaataagttgtaataattgattgtggttattagataaaattggtgtaaatttaataaataaggctactaaaatgcatcatgtatcaaaatcgatatttcctttcaaaagtttttgaataattttaatatgccattgggtaaaaaaatctg

SEQ ID NO: 10 - protein, 312 aa, Homo sapiens
MPNSTTVMEFLLMRFSDVWTLQILHSASFFMLYLVTLMGNILIVTVTTCDSSLHMPMYFFLRNLSILDACYISVTVPTSCVNSLLDSTTISKAGCVAQVFLVVFFVYVELLFLTIMAHDRYVAVCQPLHYPVIVNSRICIQMTLASLLSGLVYAGMHTGSTFQLPFCRSNVIHQFFCDIPSLLKLSCSDTFSNEVMIVVSALGVGGGCFIFIIRSYIHIFSTVLGFPRGADRTKAFSTCIPHILVVSVFLSSCSSVYLRPPAIPAATQDLILSGFYSIMPPLFNPIIYSLRNKQIKVAIKKIMKRIFYSENV

SEQ ID NO: 11 - DNA, 1363 bp, Homo sapiens
  source
  (1)..(1363)
  CDS (201)..(1163)
atctacaggcccatgggcctttctttggttagaacacacacacacacacacaatttgtttcagaggctcaaattactttaaccccaagctttcctttgtggcctaggtgaaacctcatggacaacatcacctggatggccagccacactggatggtcggatttcatcctgatgggactcttcagacaatccaaacatccaatggccaatatcacctggatggccaaccacactggatggtcggatttcatcctgttgggactcttcagacaatccaaacatccagcactactttgtgtggtcatttttgtggttttcctgatggcgttgtctggaaatgctgtcctgatccttctgatacactgtgacgcccacctccacacccccatgtactttttcatcagtcaattgtctctcatggacatggcgtacatttctgtcactgtgcccaagatgctcctggaccaggtcatgggtgtgaataagatctcagcccctgagtgtgggatgcagatgttcttctacgtgacactagcaggttcagaatttttccttctagccaccatggcctatgaccgctacgtggccatctgccatcctctccgttaccctgtcctcatgaaccatagggtgtgtctcttcctgtcatcaggctgctggttcctgggctcagtggatggcttcacattcactcccatcaccatgaccttccccttccgtggatcccgggagattcatcatttcttctgtgaagttcctgctgtattgaatctctcctgctcagacacctcactctatgagattttcatgtacttgtgctgtgtcctcatgctcctcatccctgtggtgatcatttcaagctcctatttactcatcctcctcaccatccacgggatgaactcagcagagggccggaaaaaggcctttgccacctgctcctcccacctgactgtggtcatcctcttctatggggctgccatctacacctacatgctccccagctcctaccacacccctgagaaggacatgatggtatctgtcttctataccatcctcactccagtggtgaaccctttaatctatagtcttaggaataaggatgtcatgggggctctgaagaaaatgttaacagtggaacctgcctttcaaaaagctatggagtagaccattttgagagtaatttacttttccttctctctgcacttcacatatgagaatgttataccagtgttatttcccagactccaagactgccatggtgtttgatctcattttcacacctcttttagaaatcgctttcctgtactagaaacttttcaatttacactccgtctcacttcaaaatgcattattcagtcatatta

SEQ ID NO: 12 - protein, 320 aa, Homo sapiens
MANITWMANHTGWSDFILLGLFRQSKHPALLCVVIFVVFLMALSGNAVLILLIHCDAHLHTPMYFFISQLSLMDMAYISVTVPKMLLDQVMGVNKISAPECGMQMFFYVTLAGSEFFLLATMAYDRYVAICHPLRYPVLMNHRVCLFLSSGCWFLGSVDGFTFTPITMTFPFRGSREIHHFFCEVPAVLNLSCSDTSLYEIFMYLCCVLMLLIPVVIISSSYLLILLTIHGMNSAEGRKKAFATCSSHLTVVILFYGAAIYTYMLPSSYHTPEKDMMVSVFYTILTPVVNPLIYSLRNKDVMGALKKMLTVEPAFQKAME

SEQ ID NO: 13 - DNA, 1339 bp, Homo sapiens
  source
  (1)..(1339)
  CDS (201)..(1139)
atggggaatcagattcacaatctaatgtgctgtctctttttagtgcaaattcacagttcatgttggaaatacactctgattttcacattgatttttaaaaggtaaagtgaagcaaacatacttttacgtggtacacacatgattataaataaagtttacttttgtcctccaggtaaagccacttcagccgatcatacagcatgcggctggccaaccagaccctgggtggtgactttttcctgttgggaatcttcagccagatctcacaccctggccgcctctgcttgcttatcttcagtatatttttgatggctgtgtcttggaatattacattgatacttctgatccacattgactcctctctgcatactcccatgtacttctttataaaccagctctcactcatagacttgacatatatttctgtcactgtccccaaaatgctggtgaaccagctggccaaagacaagaccatctcggtccttgggtgtggcacccagatgtacttctacctgcagttgggaggtgcagagtgctgccttctagccgccatggcctatgaccgctatgtggctatctgccatcctctccgttactctgtgctcatgagccatagggtatgtctcctcctggcatcaggctgctggtttgtgggctcagtggatggcttcatgctcactcccatcgccatgagcttccccttctgcagatcccatgagattcagcacttcttctgtgaggtccctgctgttttgaagctctcttgctcagacacctcactttacaagattttcatgtacttgtgctgtgtcatcatgctcctgatacctgtgacggtcatttcagtgtcttactactatatcatcctcaccatccataagatgaactcagttgagggtcggaaaaaggccttcaccacctgctcctcccacattacagtggtcagcctcttctatggagctgctatttacaactacatgctccccagctcctaccaaactcctgagaaagatatgatgtcatcctttttctacactatccttacacctgtcttgaatcctatcatttacagtttcaggaataaggatgtcacaagggctttgaaaaaaatgctgagcgtgcagaaacctccatattaaagtgtgaaagaacttaagttggtcctctcttcttagagtctctcttcactttaggtgtccttccaccaaacaatcagcatattgtggtagtgtctgactccctgagttgtccttcagggggattcagcccagtgttcttccctcctataatcacacttgagatgatgttcacttatcccccccttccctcgtagcattga

SEQ ID NO: 14 - protein, 312 aa, Homo sapiens
MRLANQTLGGDFFLLGIFSQISHPGRLCLLIFSIFLMAVSWNITLILLIHIDSSLHTPMYFFINQLSLIDLTYISVTVPKMLVNQLAKDKTISVLGCGTQMYFYLQLGGAECCLLAAMAYDRYVAICHPLRYSVLMSHRVCLLLASGCWFVGSVDGFMLTPIAMSFPFCRSHEIQHFFCEVPAVLKLSCSDTSLYKIFMYLCCVIMLLIPVTVISVSYYYIILTIHKMNSVEGRKKAFTTCSSHITVVSLFYGAAIYNYMLPSSYQTPEKDMMSSFFYTILTPVLNPIIYSFRNKDVTRALKKMLSVQKPPY

SEQ ID NO: 15 - DNA, 1327 bp, Homo sapiens
  source
  (1)..(1327)
  CDS (201)..(1127)
actgtttcattaaaataactgatattaactatgcctccaaacacagagcaggcattcaatgaaagttacatcatatctccaataattacatttaattattggagctctttcatgaatccattctttttatctttctaggactgtgtgattgggttaaagggctcagtgcggggactctgttttctggtttcagtaccacaatggacacaggcaacaaaactctgccccaggactttctcttactgggctttcctggttctcaaactcttcagctctctctctttatgctttttctggtgatgtacatcctcacagttagtggtaatgtggctatcttgatgttggtgagcacctcccatcagttgcatacccccatgtacttctttctgagcaacctctccttcctggagatttggtataccacagcagcagtgcccaaagcactggccatcctactggggagaagtcagaccatatcatttacaagctgtcttttgcagatgtactttgttttctcattaggctgcacagagtacttcctcctggcagccatggcttatgaccgctgtcttgccatctgctatcctttacactacggagccatcatgagtagcctgctctcagcgcagctggccctgggctcctgggtgtgtggtttcgtggccattgcagtgcccacagccctcatcagtggcctgtccttctgtggcccccgtgccatcaaccacttcttctgtgacattgcaccctggattgccctggcctgcaccaacacacaggcagtagagcttgtggcctttgtgattgctgttgtggttatcctgagttcatgcctcatcacctttgtctcctatgtgtacatcatcagcaccatcctcaggatcccctctgccagtggccggagcaaagccttctccacgtgctcctcgcatctcaccgtggtgctcatttggtatgggtccacagttttccttcacgtccgcacctctatcaaagatgccttggatctgatcaaagctgtccacgtcctgaacactgtggtgactccagttttaaaccccttcatctatacgcttcgtaataaggaagtaagagagactctgctgaagaaatggaagggaaaataaatctcctctaccacaacagatgtcctgtaaatggtctctgcatctatacagaggttccaagtaagaatgtggaggaatagggcaaatctttcttggtacacagagaaaaaacaaacaaacaaaacaagcaatactgtattttctatacattatcatgtatgataaaaatgggagtttttgacataagcaaatgggatttt

SEQ ID NO: 16 - protein, 308 aa, Homo sapiens
MDTGNKTLPQDFLLLGFPGSQTLQLSLFMLFLVMYILTVSGNVAILMLVSTSHQLHTPMYFFLSNLSFLEIWYTTAAVPKALAILLGRSQTISFTSCLLQMYFVFSLGCTEYFLLAAMAYDRCLAICYPLHYGAIMSSLLSAQLALGSWVCGFVAIAVPTALISGLSFCGPRAINHFFCDIAPWIALACTNTQAVELVAFVIAVVVILSSCLITFVSYVYIISTILRIPSASGRSKAFSTCSSHLTVVLIWYGSTVFLHVRTSIKDALDLIKAVHVLNTVVTPVLNPFIYTLRNKEVRETLLKKWKGK

SEQ ID NO: 17 - DNA, 1330 bp, Homo sapiens
  source
  (1)..(1330)
  CDS (201)..(1130)
aactggaatgaagaaacatggattgatgttccaagtcagcagcacattagtgaaaaatgaatagtttagggtgaaaaatgaatagtttgggaaagttggtctccatgatcctctcagctcatgtgttctgttattctaaatttaattgttttggatgtacccattccattcctgccttaggtgcggatccccctggagggatgggattgggcaatgagagttccctaatggatttcatccttctaggcttctcagaccaccctcgtctggaggctgttctctttgtatttgtccttttcttctacctcctgacccttgtgggaaacttcaccataatcatcatctcatatctggatccccctcttcataccccaatgtacttttttctcagcaacctctctttactggacatctgcttcactactagccttgctcctcagaccttagttaacttgcaaagaccaaagaagacgatcacttacggtggttgtgtggcgcaactctatatttctctggcactgggctccactgaatgtatcctcttggctgacatggccttggatcggtacattgctgtctgcaaacccctccactatgtagtcatcatgaacccacggctttgccaacagctggcatctatctcctggctcagtggtttggctagttccctaatccatgcaacttttaccttgcaattgcctctctgtggcaaccataggctggaccattttatttgcgaagtaccagctcttctcaagttggcttgtgtggacaccactgtcaatgaattggtgctttttgttgttagtgttctgtttgttgtcattccaccagcactcatctccatctcctatggcttcataactcaagctgtgctgaggatcaaatcagtagaggcaaggcacaaagccttcagcacctgctcctcccaccttacagtggtgattatattctatggcaccataatctacgtgtacctgcaacctagtgacagctatgcccaggaccaagggaagtttatctccctcttctacaccatggtgacccccactttaaatcctatcatctatactttaaggaacaaggatatgaaagaggctctgaggaaacttctctcgggaaaattgtgattcctatggacatgatttgcaaggaattcattataagccaggtagcttattcagcttctatttagtcaaacccatagttctaaatttcacatgaactatattactgctcacttattttctcttcataagggactttttccttttttatgtgtaactaagtaaaatgtttatatgtttatttgagagcataaactattgaa

SEQ ID NO: 18 - protein, 309 aa, Homo sapiens
MGLGNESSLMDFILLGFSDHPRLEAVLFVFVLFFYLLTLVGNFTIIIISYLDPPLHTPMYFFLSNLSLLDICFTTSLAPQTLVNLQRPKKTITYGGCVAQLYISLALGSTECILLADMALDRYIAVCKPLHYVVIMNPRLCQQLASISWLSGLASSLIHATFTLQLPLCGNHRLDHFICEVPALLKLACVDTTVNELVLFVVSVLFVVIPPALISISYGFITQAVLRIKSVEARHKAFSTCSSHLTVVIIFYGTIIYVYLQPSDSYAQDQGKFISLFYTMVTPTLNPIIYTLRNKDMKEALRKLLSGKL

SEQ ID NO: 19 - DNA, 1881 bp, Homo sapiens
  source
  (1)..(1881)
  CDS (201)..(228)
  CDS (783)..(1681)
ccaatctcttttctcgatacatccactattaccctttctcaacatgcctgctattgtttataataccagattccacttagtattttacctccctacgttctctatttgattgtttaagttttgaattcaagaactgtttcttatgaaatcttttactataagagccaaccattgtgctttttacgtgaggtgtttaccaaatgtctcctgatacttttttgaaaggctgtgactataacctcactaaatagttatgacataaggagcctttttttcagattactaataccactttgattttattttcataaaactgaaaagaactatgacaaaccacttgcaatgctgttctttaacacataatgagcaaataaaatgcttcaaaataaatatgtatattcagttgatgggaataatactcattttttgtccaagtatgcacactttattcttttgttaatactatatattttctttgttgattatgtcagtgaggttattcattctccctttttattttgcattttggttgtcgtcttttatacacctcacatactatgatgtatttattgagaatatgctttgtataaagcactattctgtgtaattgagatttagggttagaacgatagtatccatgctgcatatgagtaaccttataattaattatcacaaattgaaatatcactgggggtagccatatttgatatttctataatccattttttttctctctttaggaagaaatggaacgaccacaagtgattttaaccaaactgaagttgctgaatttttcctcatgggattttcgaattcctgggatattcagattgtacatgctgctctattcttcctagtttacctggcagctgtcataggaaatctcctaatcatcatacttaccactctggatgttcacctccaaaccccaatgtatttctttttgagaaacttgtctttcttagatttttgttacatctctgtcacaattccaaaatctattgttagttccttgactcatgatacttccatttctttctttgggtgtgctctgcaagccttctttttcatggacttggcaactacggaggtagccatccttacagtgatgtcctatgaccgctatatggccatctgccggcctttacattatgaggtcatcataaaccaaggtgtctgtctgaggatgatggccatgtcgtggctcagtggggtgatctgtggattcatgcatgtgatagcaacattctcattaccattctgtgggcgcaatagaatacgtcaatttttctgtaatattccacagctcctaagcctcttagaccccaaagtaattaccattgagattggagtcatggtttttggtacaagtcttgtgataatctcctttgttgtaattactctctcctacatgtacattttttctgtcatcatgaggattccttctaaggagggtagatcaaaaacattttctacctgcattccacatcttgtggttgtaacactctttatgatatctggcagcattgcctatgtgaagccaatttcaaattctccccccgttctggatgttttcctgtctgcgttctacacagtcgtgcccccgaccctgaaccccgtcatctatagtctgaggaatagggacatgaaggcagccctgagaaggcagtgtggtccctgagaaggcagtgtggtatgctagatgaagaatttgattacggaccagactcttgaactcttgctctaatcaggcaatttgtaaactctctgggtttatattttcaattgattgctgagctctttcttgatttttaaattaaattcagctatagtttaccatactaaccatatttgggtgaattcaaccttagaatgcactaa

SEQ ID NO: 20 - protein, 308 aa, Homo sapiens [sequence omitted]

SEQ ID NO: 21 - DNA, 1324 bp, Homo sapiens
  source
  (1)..(1324)
  CDS (201)..(1124)
gattagtctggaaaacagagtatattgcctggaatacagaactccatcaaatgggaattcctgctgcaaagttgtgtccaatcaagaattaagtccctaagtacacacactcctcatgttatctcctaacaacacagggattctttccattttcagttgtttattctgtgcaattactgccattcaatcacccaagcaggatgaatcacagcgttgtaactgagttcattattctgggcctcaccaaaaagcctgaactccagggaattatcttcctcttttttctcattgtctatcttgtggcttttctcggcaacatgctcatcatcattgccaaaatctataacaacaccttgcatacgcccatgtatgttttccttctgacactggctgttgtggacatcatctgcacaacaagcatcataccgaagatgctggggaccatgctaacatcagaaaataccatttcatatgcaggctgcatgtcccagctcttcttgttcacatggtctctgggagctgagatggttctcttcaccaccatggcctatgaccgctatgtggccatttgtttccctcttcattacagtactattatgaaccaccatatgtgtgtagccttgctcagcatggtcatggctattgcagtcaccaattcctgggtgcacacagctcttatcatgaggttgactttctgtgggccaaacaccattgaccacttcttctgtgagatacccccattgctggctttgtcctgtagccctgtaagaatcaatgaggtgatggtgtatgttgctgatattaccctggccataggggactttattcttacctgcatctcctatggttttatcattgttgctattctccgtatccgcacagtagaaggcaagaggaaggccttctcaacatgctcatctcatctcacagtggtgaccctttactattctcctgtaatctacacctatatccgccctgcttccagctatacatttgaaagagacaaggtggtagctgcactctatactcttgtgactcccacattaaacccgatggtgtacagcttccagaatagggagatgcaggcaggaattaggaaggtgtttgcatttctgaaacactagtagtttcaacatgcaacatcacttctgtactccagaaccatcttctagagcatctcagattttactggtttttcatacttacctccactccaattttcccttccctcttattcctgccttcttcctagcagtctcattgtctccaaaattctgtactctttatgtgaagaatattcataaagcaatatgcacaataccct

SEQ ID NO: 22 - protein, 307 aa, Homo sapiens
MNHSVVTEFIILGLTKKPELQGIIFLFFLIVYLVAFLGNMLIIIAKIYNNTLHTPMYVFLLTLAVVDIICTTSIIPKMLGTMLTSENTISYAGCMSQLFLFTWSLGAEMVLFTTMAYDRYVAICFPLHYSTIMNHHMCVALLSMVMAIAVTNSWVHTALIMRLTFCGPNTIDHFFCEIPPLLALSCSPVRINEVMVYVADITLAIGDFILTCISYGFIIVAILRIRTVEGKRKAFSTCSSHLTVVTLYYSPVIYTYIRPASSYTFERDKVVAALYTLVTPTLNPMVYSFQNREMQAGIRKVFAFLKH

SEQ ID NO: 23 - DNA, 1348 bp, Homo sapiens
  source
  (1)..(1348)
  CDS (201)..(1148)
agtgttagactgatatacccacagttgttttacacctgagtccatgagaaatataaattgcttgatatttttaaactttttgtctaggccttgatgctacacataccttcattcaacaaatgaagaaacaaatgatactttttaatattagtatgacacttattttcctttactccatagggcgcttataattttgaactatgaccaatcagacacagatgatggaattcttgcttgtgagatttactgagaattgggtgctcctgaggctgcatgctttgctcttctcactgatctacctcacggctgtgctgatgaatttagtcatcattctcctcatgattctggaccatcgtctccacatggcaatgtactttttcctccgacatttgtccttcttagacctgtgtctcatttctgccacagtccccaaatccatcctcaactctgtcgcctccactgactccatctccttcctggggtgtgtgttgcagctcttcttggtggtactgctggctggatcagagattggcatccttactgccatgtcctatgaccgctatgctgccatctgctgccccctacactgtgaggctgtcatgagcagagggctctgtgtccagttgatggctctgtcctggctcaacagaggggccttgggactcttgtacacagctggaacattctctctgaatttttatggctctgatgagctacatcagttcttctgcgatgtccctgccctactaaagctcacttgttctaaagaacatgccatcattagtgtcagtgtggccattggggtctgttatgcattttcatgtttagtttgcattgtagtttcctatgtgtacattttctctgctgtgttaaggatatcacagagacagagacaatccaaagccttttccaactgtgtgcctcacctcattgttgtcactgtgtttcttgtaacaggtgctgttgcttatttaaagccagggtctgatgcaccttctattctagacttgctggtgtctgtgttctattctgtcgcacctccaaccttgaaccctgttatctactgtctgaagaacaaggacattaaatccgctctgagtaaagtcctgtggaatgttagaagcagtggggtaatgaaagatgactaaagttgaagatgggaagtactttttttgttgttgttgttctgcatccactagctgtttaaattatctctattttgggataaaatgtcatggagtctgctactgataatctcaagcagtcagtttaatagaaatagaaagcaactattttcctacaatttttgcactttttttttaaaaattttgagacggaatctctctct

SEQ ID NO: 24 - protein, 315 aa, Homo sapiens
MTNQTQMMEFLLVRFTENWVLLRLHALLFSLIYLTAVLMNLVIILLMILDHRLHMAMYFFLRHLSFLDLCLISATVPKSILNSVASTDSISFLGCVLQLFLVVLLAGSEIGILTAMSYDRYAAICCPLHCEAVMSRGLCVQLMALSWLNRGALGLLYTAGTFSLNFYGSDELHQFFCDVPALLKLTCSKEHAIISVSVAIGVCYAFSCLVCIVVSYVYIFSAVLRISQRQRQSKAFSNCVPHLIVVTVFLVTGAVAYLKPGSDAPSILDLLVSVFYSVAPPTLNPVIYCLKNKDIKSALSKVLWNVRSSGVMKDD

SEQ ID NO: 25 - DNA, 1345 bp, Homo sapiens
  source
  (1)..(1345)
  CDS (201)..(1145)
ctatgaagacagaatatcatgaacacaagatgtcattggaaagcattcaagcaagcaagtttggatgctacttacctgcgcacgcatgcacacacacacacacacacacacacacacactgtctctctctcatgaataagagacttaacactgctggcttttacaatttaataacttatttttctagatttgttgggaatatggaaaaaagaaatctaacagttgtcagggaattcgtccttctgggacttcctagctcagcagagcagcagcacctcctgtctgtgctctttctctgtatgtatttagccaccaccttggggaacatgctcatcattgcgacgattggctttgactctcacctccattcccctatgtacttcttccttagtaacttggcctttgttgacatctgctttacgtcgactacagtcccccaaatggtagtgaatatcttgactggcaccaagactatctcttttgcaggctgcctcacccagctcttcttcttcgtttcttttgtgaatatggacagcctccttctgtgtgtgatggcgtatgatagatatgtggcgatttgccaccccttacattacaccgccagaatgaacctgtgcctttgtgtccagctagtggctggactgtggcttgttacttacctccacgccctcctgcatactgtcctaatagcacagctgtccttctgtgcctccaatatcatccatcatttcttctgtgatctcaatcctctcctgcagctctcttgctctgacgtctccttcaatgtaatgatcatttttgcagtaggaggtctattggctctcacgccccttgtctgtatcctcgtatcttatggacttatcttctccactgttctgaagatcacctctactcagggcaagcagagagctgtttccacctgcagctgccacctgtcagtggtggtgttgttttacggcacagccatcgccgtctatttcagcccttcatccccccatatgcctgagagcgacactctgtcaaccatcatgtattcaatggtggctccgatgctgaatcctttcatctataccctaaggaacagggatatgaagaggggacttcagaaaatgcttctcaagtgcacagtctttcagcagcaataatgacctcagtgactgaattaaataatactaatgtggtgataagaaagtgtgactagatgctcacaataacagtgagaagagaaaccaactgctattaaatgtctcccttatgctggaaatcgtgttaagcactttatatgaattatcacattaaatcctctgagtaaatatataaaaaccatatagcattctttatacag

SEQ ID NO: 26 - protein, 314 aa, Homo sapiens
MEKRNLTVVREFVLLGLPSSAEQQHLLSVLFLCMYLATTLGNMLIIATIGFDSHLHSPMYFFLSNLAFVDICFTSTTVPQMVVNILTGTKTISFAGCLTQLFFFVSFVNMDSLLLCVMAYDRYVAICHPLHYTARMNLCLCVQLVAGLWLVTYLHALLHTVLIAQLSFCASNIIHHFFCDLNPLLQLSCSDVSFNVMIIFAVGGLLALTPLVCILVSYGLIFSTVLKITSTQGKQRAVSTCSCHLSVVVLFYGTAIAVYFSPSSPHMPESDTLSTIMYSMVAPMLNPFIYTLRNRDMKRGLQKMLLKCTVFQQQ

SEQ ID NO: 27 - DNA, 1330 bp, Homo sapiens
  source
  (1)..(1330)
  CDS (201)..(1130)
cttggtgatcaatgcactaaaaaagaactagatgaaagtattttttgtggcaaattggcatggaattaccatacgtgtggtacgtgtgtgtgtttcagtatgctaaataatatatgtgttatatatatttaatatttaaagagtggacattgatattttacttcagtcttctccttttcctgcagattactcctgcaataatggcaaatctcacaatcgtgactgaatttatccttatggggttttctaccaataaaaatatgtgcattttgcattcgattctcttcttgttgatttatttgtgtgccctgatggggaatgtcctcattatcatgatcacaactttggaccatcatctccacacccccgtgtatttcttcttgaagaatctatctttcttggatctctgccttatttcagtcacggctcccaaatctatcgccaattctttgatacacaacaactccatttcattccttggctgtgtttcccaggtctttttgttgctttcttcagcatctgcagagctgctcctcctcacggtgatgtcctttgaccgctatactgctatatgtcaccctctgcactatgatgtcatcatggacaggagcacctgtgtccaaagagccactgtgtcttggctgtatgggggtctgattgctgtgatgcacacagctggcaccttctccttatcctactgtgggtccaacatggtccatcagttcttctgtgacattccccagttattagctatttcttgctcagaaaatttaataagagaaattgcactcatccttattaatgtagttttggatttctgctgttttattgtcatcatcattacctatgtccacgtcttctctacagtcaagaagatcccttccacagaaggccagtcaaaagcctactctatttgccttccacacttgctggttgtgttatttctttccactggattcattgcttatctgaagccagcttcagagtctccttctattttggatgctgtaatttctgtgttctacactatgctgcccccaacctttaatcccattatatacagtttgagaaacaaggccataaaggtggctctggggatgttgataaagggaaagctcaccaaaaagtaaaagctgttgcttttcttctttcaataatagataccatttataatgtacacacattaattcttcatttttatctctaattcttaaaagtaaaaatttaaaaagacaaatgaaagcaattattttattagaaaatttccttgggcaattaattacatttttctattcttaagtaaaattctgaatttttacaatatggagcc

SEQ ID NO: 28 - protein, 309 aa, Homo sapiens
MANLTIVTEFILMGFSTNKNMCILHSILFLLIYLCALMGNVLIIMITTLDHHLHTPVYFFLKNLSFLDLCLISVTAPKSIANSLIHNNSISFLGCVSQVFLLLSSASAELLLLTVMSFDRYTAICHPLHYDVIMDRSTCVQRATVSWLYGGLIAVMHTAGTFSLSYCGSNMVHQFFCDIPQLLAISCSENLIREIALILINVVLDFCCFIVIIITYVHVFSTVKKIPSTEGQSKAYSICLPHLLVVLFLSTGFIAYLKPASESPSILDAVISVFYTMLPPTFNPIIYSLRNKAIKVALGMLIKGKLTKK

SEQ ID NO: 29 - DNA, 1387 bp, Homo sapiens
  source
  (1)..(1387)
  CDS (201)..(1187)
aagaaagaaatgcccagcttgtaaaacatgcccactccaaaaactggctaagagtattttgatgttgattacaaaacatgcatcactaactctcattttattatgcaggtatattattgttagattaagatttacactaatattttttctttattattaattcattatttctttttaggttaaaaaatagagaattcatgatgggccatcagaatcacactttcagcagtgatttcatacttttgggattgttctcttcttccccaacaagtgtggtcttcttcttagttttatttgtcattttcattatgagtgtaacagaaaatacgctcatgatcctcctcattcgcagtgactcccgactccacactccaatgtattttctgctcagccatctctccttaatggatatcttgcatgtttccaacatcgttcccaaaatggtcactaactttctgtcaggcagcagaactatttcatttgcaggttgtgggttccaggtatttctgtccctcaccctcctgggtggtgagtgccttctcctggctgcaatgtcctgtgatcgctatgtggctatctgtcacccgctgcgctatccgattcttatgaaggagtatgccagcgctctcatggctggaggctcctggctcattggggttttcaactccacagtccacacagcttatgcactgcagtttcccttctgtggctctagggcaattgatcacttcttctgtgaagtccctgccatgttgaagttgtcctgtgcagacacaacacgctatgaacgaggggtttgtgtaagtgctgtgatcttcctgctgatccctttctccttgatctctgcttcttatggccaaattattcttactgtcctccagatgaaatcatcagaggcaaggaaaaagtcattttccacttgttccttccacatgattgtggtcacgatgtactatgggccatttatttttacatatatgagacctaaatcataccacactccaggccaggataagttcctggcaatattctatacgatcctcacacccacactcaaccctttcatctacagctttaggaataaagatgttctggcggtgatgaaaaatatgctcaaaagtaactttctgcacaaaaaaatgaataggaaaattcctgaatgtgtgttctgtctatttctatgttaaatgcctgaaggatactcatgagaggtttcctagaaagaaatcaaagcttctatcttaccacatataagaagtgaatatttcagaaacattgttaataataaacaataatatgtgtttgtgttgtaaacacgtacctctaaaaatgtagtgttccttctgtggtaccaattataatcatgcaacagttacaggaagtagaa

SEQ ID NO: 30 - protein, 328 aa, Homo sapiens
MGHQNHTFSSDFILLGLFSSSPTSVVFFLVLFVIFIMSVTENTLMILLIRSDSRLHTPMYFLLSHLSLMDILHVSNIVPKMVTNFLSGSRTISFAGCGFQVFLSLTLLGGECLLLAAMSCDRYVAICHPLRYPILMKEYASALMAGGSWLIGVFNSTVHTAYALQFPFCGSRAIDHFFCEVPAMLKLSCADTTRYERGVCVSAVIFLLIPFSLISASYGQIILTVLQMKSSEARKKSFSTCSFHMIVVTMYYGPFIFTYMRPKSYHTPGQDKFLAIFYTILTPTLNPFIYSFRNKDVLAVMKNMLKSNFLHKKMNRKIPECVFCLFLC

SEQ ID NO: 31 - DNA, 1339 bp, Homo sapiens
  source
  (1)..(1339)
  CDS (201)..(1139)
tcttacttgtctaatttattaattaaactttatcagaagtatgtatagacaaaaataatagtgtatttagggttcagtatcaactgcagtttcaaacatccactgggggggcttggaatgcatcccctgcagataagggcgaattactgtacgtaaattactcttgtgtctcccttccgaatggattgtaggaatgctccatggaaaattacaatcaaacatcaactgatttcatcttattggggctgtttccaccatcaagaattgaccttttcttcttcattctcattgttttcattttcctgatggctctaattggaaacctgtccatgattcttctcatcttcttggacacccatctccacacacccatgtatttcctactgagtcagctctccctcattgacctaaattacatctccaccattgttcctaagatggcatctgattttctgcatggaaacaagtctatctccttcactgggtgtgggattcagagtttcttcttcttggcattaggaggtgcagaagcactacttttggcatctatggcctatgatcgttacattgctatttgctttcctctccactatctcatccgcatgagcaaaagagtgtgtgtgctgatgataacagggtcttggatcataggctcgatcaatgcttgtgctcacactgtatatgtactccatattccttattgccgatccagggccatcaatcatttcttctgtgatgtcccagcaatggtgactctggcctgcatggacacctgggtctatgagggcacagtgtttttgagtgccaccatctttctcgtgtttcccttcattggtatttcatgttcctatggccaggttctctttgctgtctaccacatgaaatctgcagaagggaggaagaaagcctatttgacctgcagcacccacctcactgtagtaactttctactatgcaccttttgtctacacttatctacgtccaagatccctgcgatctccaacagaggacaaggttctggctgtcttctacaccatcctcaccccaatgctcaaccccatcatctatagcctgaggaacaaggaggtgatgggggccctgacacgagtgagtcagagaatctgctctgtgaaaatgtagaaacactttctgcctaaggtctcaggactcagatacacatccattcagcagtgtatagtaattaaaatattatgtccttcctagagtgcaggactaaaactaaccaacggaagaagaaaatcactgatatatggacaaaattgttttacaaatatatatataattctaagaaaccttttttcttgatggcctttttccaa

SEQ ID NO: 32 - protein, 312 aa, Homo sapiens
MENYNQTSTDFILLGLFPPSRIDLFFFILIVFIFLMALIGNLSMILLIFLDTHLHTPMYFLLSQLSLIDLNYISTIVPKMASDFLHGNKSISFTGCGIQSFFFLALGGAEALLLASMAYDRYIAICFPLHYLIRMSKRVCVLMITGSWIIGSINACAHTVYVLHIPYCRSRAINHFFCDVPAMVTLACMDTWVYEGTVFLSATIFLVFPFIGISCSYGQVLFAVYHMKSAEGRKKAYLTCSTHLTVVTFYYAPFVYTYLRPRSLRSPTEDKVLAVFYTILTPMLNPIIYSLRNKEVMGALTRVSQRICSVKM

SEQ ID NO: 33 - DNA, 1330 bp, Homo sapiens
  source
  (1)..(1330)
  CDS (201)..(1130)
atgtataaagccccaaagaggcacaagtaggcttctctcttcatgtgcaaggaccctgcatgagcatcatgatcaaaaagaaggaaattggattcagtctcagtacaattatcatttttctttgttttaaagtccaattgctgttgagaatttactccttgttgactccatttgttgctttcagacactgatatagcagaatgaagagaaagaacttcacagaagtgtcagaattcattttcttgggattttctagctttggaaagcatcagataaccctctttgtggttttcctaactgtctacattttaactctggttgctaacatcatcattgtgactatcatctgcattgaccatcatctccacactcccatgtatttcttcctaagcatgctggctagttcagagacggtgtacacactggtcattgtgccacgaatgcttttgagcctcatttttcataaccaacctatctccttggcaggctgtgctacacaaatgttcttttttgttatcttggccactaataattgcttcctgcttactgcaatggggtatgaccgctatgtggccatctgcagacccctgagatacactgtcatcatgagcaagggactatgtgcccagctggtgtgtgggtcctttggcattggtctgactatggcagttctccatgtgacagccatgttcaatttgccgttctgtggcacagtggtagaccacttcttttgtgacatttacccagtcatgaaactttcttgcattgataccactatcaatgagataataaattatggtgtaagttcatttgtgatttttgtgcccataggcctgatatttatctcctatgtccttgtcatctcttccatccttcaaattgcctcagctgagggccggaagaagacctttgccacctgtgtctcccacctcactgtggttattgtccactgtggctgtgcctccattgcctacctcaagccgaagtcagaaagttcaatagaaaaagaccttgttctctcagtgacgtacaccatcatcactcccttgctgaaccctgttgtttacagtctgagaaacaaggaggtaaaggatgccctatgcagagttgtgggcagaaatatttcttaatggattggattatttcattaagagaccattagcccagtgtagtgtgtctactcacaaacatgccacaatacacaaattcatcaaatataatatttgttgagaatactgtcaaagaatagaaatgcttgtctgtttagtgttctaggcatggcagaaagcaggatttctgctctggtgaattttgttaccagatacaagaa

SEQ ID NO: 34 - protein, 309 aa, Homo sapiens
MKRKNFTEVSEFIFLGFSSFGKHQITLFVVFLTVYILTLVANIIIVTIICIDHHLHTPMYFFLSMLASSETVYTLVIVPRMLLSLIFHNQPISLAGCATQMFFFVILATNNCFLLTAMGYDRYVAICRPLRYTVIMSKGLCAQLVCGSFGIGLTMAVLHVTAMFNLPFCGTVVDHFFCDIYPVMKLSCIDTTINEIINYGVSSFVIFVPIGLIFISYVLVISSILQIASAEGRKKTFATCVSHLTVVIVHCGCASIAYLKPKSESSIEKDLVLSVTYTIITPLLNPVVYSLRNKEVKDALCRVVGRNIS

SEQ ID NO: 35 - DNA, 1231 bp, Homo sapiens
  source
  (1)..(1231)
  CDS (201)..(1031)
gcaaaaacagaaaagggagaagatggtgaagtagttatataacatgagcgagaatgctcctgattacaaagcagagaaattgactttttttcttagtgttttctatagtcattgctctatccctgttctagaattcaagtcatgataagaatttcttcacgttgacttcctgcattgctttcagacattgcaattaaagaatgcgaagaaagaacctcacagaggtaacagagtttgttttcctgggattctccagattccacaaacatcacatcactctctttgtggtttttctcatcctgtacacattaactgtggctggcaatgccatcatcatgaccatcatctgcattgaccgtcacctccacactcccatgtacttcttcctgagcatgctggctagctcaaagacagtgtacacactgttcatcattccacagatgctctccagcttcgtaacccagacccagccaatctccctagcaggttgtaccacccaaacgttcttctttgttaccttggccatcaacaattgcttcttgctcacagtgatgggctatgaccactatatggccatctgcaatcccttgagatacagggtcattacgagcaagaaggtgtgtgtccagctggtgtgtggagcctttagcattggcctggccatggcagctgtccaggtaacatccatatttaccttacctttttgtcacacggtggttggtcatttcttctgtgacatcctccctgtcatgaaactctcctgtattaataccactatcaatgagataatcaattttgttgtcaggttatttgtcatcctggtccccatgggtctggtcttcatctcctatgtcctcatcatctccactgtcctcaagattgcctcagctgagggttggaagaagacctttgccacctgtgccttccacctcactgtggtcattgtccattatggctgtgcttccattgcctacctcatgcccaagtcagaaaactctatagaacaagacctccttctctcagtgacctaaaccatcatcactcccctgctgaaccctgttgtttacagcctaaagaacaaggaggtcaaggatgccctatgcagggccatgggcagaaacatttcttaatgcattattcctctatataaatatacatttagtcatagaaatgtgtgtccttacttacattaaacaaccttacgactctgtcccatgcagtctatgctgca

SEQ ID NO: 36 - protein, 276 aa, Homo sapiens
MRRKNLTEVTEFVFLGFSRFHKHHITLFVVFLILYTLTVAGNAIIMTIICIDRHLHTPMYFFLSMLASSKTVYTLFIIPQMLSSFVTQTQPISLAGCTTQTFFFVTLAINNCFLLTVMGYDHYMAICNPLRYRVITSKKVCVQLVCGAFSIGLAMAAVQVTSIFTLPFCHTVVGHFFCDILPVMKLSCINTTINEIINFVVRLFVILVPMGLVFISYVLIISTVLKIASAEGWKKTFATCAFHLTVVIVHYGCASIAYLMPKSENSIEQDLLLSVT

SEQ ID NO: 37 - DNA, 994 bp, Homo sapiens
  source
  (1)..(994)
  CDS (201)..(794)
tcagacatcatctccacacccctatgtacttcctcctggtgaacttgtcctgtctggagatctggtatacctctaacatcatccccaaaatgttgctgattatcatagctgaatagaagactatctctgtggctggctggctggcacaattctacttcttcggatccctggctgccacggagtgcctcttgctcactgtgatgtcctatgatcgctacctagccatctgccagcctctttgctaccgtgtcctcatgactggccccctttgcatcaggctagctgctggctcttggttctgctgcttcctccttacagcaatcaccatggtcttgctatgtagactaaccttctgtggaccctatgaaactgatcacttcttttgtgacttcacccctctggttcatctctcctgcatggatacctcagtgactgagaccattgcctttgccacctcttctgcagtaactctgatcccatttctcctcattgtagcctcctactcctgcgtcctttctgctatcctaagaatcccatcttgcacaggccagaaaaaggccttctccacctgctcttcccacctcactgtggtcatagtgttttatgggacactgattgccacataccttgtgccctcagccaactcatcccaactcttgtgcaaagggtcctctctgctctacatcatcctgacacccatgtttaaccccatcatttatagcctgagaaatagagacatccatgaagctctgaagaagtgcttgaggaagaagtcaggtgtttgccttagataatacgaaaaggaaaaaagttgtatttgtctaaatgttgatgaactgggctgagtcatttaaattctacataaaaggcaattgcctaaatgaggagctacctaaaacagatgaccagatacctctactgagttatgacagccccaggtaaactgctgtcccaggatacgatctatgcaggtcagactgtgctccatcatctc

SEQ ID NO: 38 - protein, 197 aa, Homo sapiens
MSYDRYLAICQPLCYRVLMTGPLCIRLAAGSWFCCFLLTAITMVLLCRLTFCGPYETDHFFCDFTPLVHLSCMDTSVTETIAFATSSAVTLIPFLLIVASYSCVLSAILRIPSCTGQKKAFSTCSSHLTVVIVFYGTLIATYLVPSANSSQLLCKGSSLLYIILTPMFNPIIYSLRNRDIHEALKKCLRKKSGVCLR

SEQ ID NO: 39 - DNA, 1354 bp, Homo sapiens
  source
  (1)..(1354)
  CDS (201)..(1154)
taaaaatgatgaatagtaagtgctaataagagttagctattaatatttttacagtaatagtaatagtagtgagggcaacagtagtaatttcagtgctacttttaagttaaaaagagagagagagaaatgaagttttggcatggattcagcagtcatctcaatccaatgttttcttctttccttctttacctcagcctcccatggatcaatacaaccattcaagcctggctgaatttgtgttccttggctttgccagtgtgggctatgtcaggggctggctttttgtcctgctgctattggcatacctgttcaccatctgtggtaacatgctcatcttctcagtcatccgactggatgcagctctgcacacacctatgtaccactttgtcagtgttctttccttcttggagttgtggtatacagctaccactatccctaagatgttgtctaatattctcagtgagaagaaaaccatttcttttgcaggatgcctccttcagacctacttcttccactccttgggagcgtctgaatgctaccttcttacagccatggcctatgatagatacctggccatttgtcggcccctccactaccctataattatgaccaccacactctgtgccaagatggctgctgcttgttggacttgtggcttcctgtgtcccatttctgaggtcatccttgcctcccagctcccattttgtgcttacaatgaaatccaacacattttctgtgactttccacctttgctgagcttggcctgcaaggacacatctgctaacattctggtggactttgccattaatgctttcataattcttatcactttcttctttatcatgatttcttatgcaaggatcattggggctgtgctgaagataaaaacagcatcaggaagaaagaaggccttttctacctgtgcctcacatcttgctgtggtcctcatcttctttgggagcatcatcttcatgtatgtgcggctaaagaagagctattccctgacccttgaccgaacacttgctatagtttactccgtactaacaccaatggtcaatccaattatctacagtcttcgtaacaaggaaatcattaaagctatcaagaggaccatcttccagaagggagataaagctagtcttgctcatctttgactttcttcccatgtcctttctcacctcaatgttcaattcataaaagttccttgagtaatcttcccatcatcacacatgctctgaatttcatttcctttcacctcttcaaagacttcatttctttatgattttctcattttctacatctttatttctattttttactcgatcacttatgtcagcatttaagaatattttag

SEQ ID NO: 40 - protein, 317 aa, Homo sapiens
MDQYNHSSLAEFVFLGFASVGYVRGWLFVLLLLAYLFTICGNMLIFSVIRLDAALHTPMYHFVSVLSFLELWYTATTIPKMLSNILSEKKTISFAGCLLQTYFFHSLGASECYLLTAMAYDRYLAICRPLHYPIIMTTTLCAKMAAACWTCGFLCPISEVILASQLPFCAYNEIQHIFCDFPPLLSLACKDTSANILVDFAINAFIILITFFFIMISYARIIGAVLKIKTASGRKKAFSTCASHLAVVLIFFGSIIFMYVRLKKSYSLTLDRTLAIVYSVLTPMVNPIIYSLRNKEIIKAIKRTIFQKGDKASLAHL

SEQ ID NO: 41 - DNA, 1339 bp, Homo sapiens
  source
  (1)..(1339)
  CDS (201)..(1139)
gaggctgttgacaggaagggcagggagggatggaattgaaatgttgacctctcaaagcatttacttagagggctttactctggaggtgagagaagggagggcaatagtaatttgagggttgccttcttgttagaaccctatagttcaactttctttcctatccttccacacttcacatctagggacatgaatggtgagcaatggacacagggaactggagccaggtagcagaattcatcatcttgggcttcccccatctccagggtgtccagatttatctcttcctcttgttgcttctcatttacctcatgactgtgttgggaaacctgctgatattcctggtggtctgcctggactcccggcttcacacacccatgtaccactttgtcagcattctctccttctcagagcttggctatacagctgccaccatccctaagatgctggcaaacttgctcagtgagaaaaagaccatttcattctctgggtgtctcctgcagatctatttctttcactcccttggagcgactgagtgctatctcctgacagctatggcctacgataggtatttagccatctgccggcccctccactacccaaccctcatgaccccaacactttgtgcagagattgccattggctgttggttgggaggcttggctgggccagtagttgaaatttccttgatttcacgcctcccattctgtggccccaatcgcattcagcacgtcttttgtgacttccctcctgtgctgagtttggcttgcactgatacgtctataaatgtcctagtagattttgttataaattcctgcaagatcctagccaccttcctgctgatcctctgctcctatgtgcagatcatctgcacagtgctcagaattccctcagctgccggcaagaggaaggccatctccacgtgtgcctcccacttcactgtggttctcatcttctatgggagcatcctttccatgtatgtgcagctgaagaagagctactcactggactatgaccaggccctggcagtggtctactcagtgctcacacccttcctcaaccccttcatctacagcttgcgcaacaaggagatcaaggaggctgtgaggaggcagctaaagagaattgggatattggcatgagttggggctgagagtaggccaaggccgggcctgaggatatggtggccccagggatcaacagtggccagagacgagaaactaaaaattcagtgcttttctatgtggggtggtggagctgcagcaagtgctgactgacttccagtgttatagcgaccttcatactgtctgctggagccacatttggcttgagaccagagact

SEQ ID NO: 42 - protein, 312 aa, Homo sapiens
MDTGNWSQVAEFIILGFPHLQGVQIYLFLLLLLIYLMTVLGNLLIFLVVCLDSRLHTPMYHFVSILSFSELGYTAATIPKMLANLLSEKKTISFSGCLLQIYFFHSLGATECYLLTAMAYDRYLAICRPLHYPTLMTPTLCAEIAIGCWLGGLAGPVVEISLISRLPFCGPNRIQHVFCDFPPVLSLACTDTSINVLVDFVINSCKILATFLLILCSYVQIICTVLRIPSAAGKRKAISTCASHFTVVLIFYGSILSMYVQLKKSYSLDYDQALAVVYSVLTPFLNPFIYSLRNKEIKEAVRRQLKRIGILA

SEQ ID NO: 43 - DNA, 1348 bp, Homo sapiens
  source
  (1)..(1348)
  CDS (201)..(1148)
aaaaaaaatgtttgatatgaaaaaaatcaaacattggacaatatgtacatgagtttaaagtcaggaaaaaaaatgaaaccttcaaggtagttcttcttacttctcaaagatgtttagctgtacatcttatttatttttttctctaccctctcatgtgctggactatgccctctccatttacaggtagctctactagaaatatggagagcggaaaccaatcaacagtgactgaatttatcttcactggattccctcagcttcaggatggtagtctcctgtacttctttcctttacttttcatctatacttttattatcattgataacttattaatcttctctgctgtaaggctggacacccatctccacaaccccatgtataattttatcagtatattttcctttctggagatctggtacaccacagccaccattcccaagatgctctccaacctcatcagtgaaaagaaggccatctcaatgactggctgcatcttgcagatgtatttcttccactcacttgaaaactcagaggggatcttgctgaccaccatggccattgacagatacgttgccatctgcaaccctcttcgctatcaaatgatcatgaccccccggctctgtgctcaactctctgcaggttcctgcctcttcggtttccttatcctgcttcccgagattgtgatgatttccacactgcctttctgtgggcccaaccaaatccatcagatcttctgtgacttggtccctgtgctaagcctggcctgtacagacacgtccatgattctgattgaggatgtgattcatgctgtgaccatcatcattaccttcctaatcattgccctgtcctatgtaagaattgtcactgtgatattgaggattccctcttctgaagggaggcaaaaggctttttctacctgtgcaggccacctcatggtcttcccgatattctttggcagtgtatcactcatgtacttgcgtttcagcgacacttatccaccagttttggacacagccattgcactgatgtttactgtacttgctccattcttcaatcccatcatttatagcctgagaaacaaggacatgaacaatgcgattaaaaaactgttctgtcttcaaaaagtgttgaacaagcctggaggttaatacagagccacaggttcccttccgttgcttttgttttgttttgttttttgagatggagtttcactcttgttgcctgggctggagtgcaatggcatgatcttggctcactgcaacctccacctcctggttttgaacaattctcctgcctcagcctccctagtagccgcgattacaggcatgcaccaccacacccagctaat

SEQ ID NO: 44 - protein, 315 aa, Homo sapiens
MESGNQSTVTEFIFTGFPQLQDGSLLYFFPLLFIYTFIIIDNLLIFSAVRLDTHLHNPMYNFISIFSFLEIWYTTATIPKMLSNLISEKKAISMTGCILQMYFFHSLENSEGILLTTMAIDRYVAICNPLRYQMIMTPRLCAQLSAGSCLFGFLILLPEIVMISTLPFCGPNQIHQIFCDLVPVLSLACTDTSMILIEDVIHAVTIIITFLIIALSYVRIVTVILRIPSSEGRQKAFSTCAGHLMVFPIFFGSVSLMYLRFSDTYPPVLDTAIALMFTVLAPFFNPIIYSLRNKDMNNAIKKLFCLQKVLNKPGG

SEQ ID NO: 45 - DNA, 1375 bp, Homo sapiens
  source
  (1)..(1375)
  CDS (201)..(1175)
ttttttccacactacaacttaagtcgtaagcaactatagaatatggaccatgtccttcttccttgtcttcctctctatccccattacagggctctattcagacgctggcttcttgtaagtgtattcctttatccaatagtagatgcctcctagaaggcttgagtgcactggaaattgaaactctcactttcaacttggagatggagagccccaatcgaaccaccattcaggagtttatcttctccgctttcccttattcctgggttaagtctgttgtctgctttgttccactgctcttcatctatgctttcattgttgttggaaacctggtcatcatcacagtggtccagttgaatactcacctccacactcccatgtatacttttatcagtgctctttctttcctggagatttggtataccacagccacaatcccaaagatgctgtctagcctgcttagtgagaggagcatttccttcaatggttgtctcctgcagatgtatttcttccattccaccggcatctgtgaggtgtgtctcttgacagttatggcctttgaccactacctggccatatgcagccctcttcattatccctctatcatgacccccaagctatgtacccaactgactttaagttgctgtgtttgtggctttatcacaccccttcctgagattgcctggatctctacactgccattttgtggttcgaatcaccttgaacatatcttctgtgacttcctcccagtgctgcgtctggcctgcacagacacacgagccatcgtcatgattcaggtagtggatgtcattcatgcagtggagattattacagctgtgatgctcatcttcatgtcctacgatggtattgtggctgtaattctacgtattcattcagctggaggccgccgcacagcattttccacgtgtgtctctcacttcattgtcttttcgctcttctttggcagtgtgactctcatgtacctacgcttctctgccacctactctttgttctgggatatagccattgctctggcctttgcagttttgtctcccttcttcaaccccattatctatagcctgaggaataaagaaataaaagaagctataaaaaagcacataggtcaagctaagatatttttttccgtaagaccagggacctcaagtaagatattttagttgagattctgtatagttgctggttcctcttcaccttcagctctcagcaatctgtcttttcctatcaaccttctattcaaactggtctcccaaagctcaccaaaccaaaccaaaccaaaccaaacaaaaggaaacaaattcagcaatagctaacgtcaataacttctatttaatcattactcaattagacatatttttca

SEQ ID NO: 46 - protein, 324 aa, Homo sapiens
MESPNRTTIQEFIFSAFPYSWVKSVVCFVPLLFIYAFIVVGNLVIITVVQLNTHLHTPMYTFISALSFLEIWYTTATIPKMLSSLLSERSISFNGCLLQMYFFHSTGICEVCLLTVMAFDHYLAICSPLHYPSIMTPKLCTQLTLSCCVCGFITPLPEIAWISTLPFCGSNHLEHIFCDFLPVLRLACTDTRAIVMIQVVDVIHAVEIITAVMLIFMSYDGIVAVILRIHSAGGRRTAFSTCVSHFIVFSLFFGSVTLMYLRFSATYSLFWDIAIALAFAVLSPFFNPIIYSLRNKEIKEAIKKHIGQAKIFFSVRPGTSSKIF

SEQ ID NO: 47 - DNA, 1342 bp, Homo sapiens
  source
  (1)..(1342)
  CDS (201)..(1142)
tgggaatggacccatacatttgtgtctaatttaacaaatacttttttgaagtttgagtagagtctaaatcagagctgcctttttaagttgcaacaggaacaagagaaaaagaatccatatcatccaccttttaaagaagttaggcatctactggcaaggtggaagaaatcaacaaatctatcagggatatacctctcagaatggggcagaccaacgtaacctcctggagggattttgtcttcctgggcttctccagttctggggagttgcagctccttctctttgccttgttcctctctctgtatctagtcactctgaccagcaatgtcttcattatcatagccatcaggctggatagccatctgcacacccccatgtacctcttcctttccttcctatccttctctgagacctgctacactttgggcatcatccctagaatgctctctggcctggctgggggggaccaggctatctcctatgtgggctgtgctgcccagatgttcttttctgcctcatgggcctgtactaactgcttccttctggctgccatgggctttgacagatatgtggccatctgtgctccactccactatgccagccacatgaatcctaccctctgtgcccagctggtcattacttccttcctgactggatacctctttggactgggaatgacactagttattttccacctctcattctgcagctcccatgaaatccagcactttttttgtgacacgccacctgtgctgagcctagcctgtggagatacaggcccgagtgagctgaggatctttatcctcagtcttttggtcctcttggtctccttcttcttcatcaccatctcctacgcctacatcttggcagcaatactgaggatcccctctgctgaggggcagaagaaggccttctccacttgtgcctcgcaccttacagtggtcattattcattatggctgtgcttccttcgtgtacctgaggcccaaagccagctactctcttgagagagatcagcttattgccatgacctatactgtagtgacccccctccttaatcccattgtttatagtctaaggaatagggctatacagacagctctgaggaatgctttcagagggagattgctgggtaaaggatgaaggttaccccaataggacactttcttctgtgtaggctgggcatagaccaagaacccaagccaaagggccaggtattcaaggcctcaggccaaagctgtcctacccccaatcttctgggaaagccttatcctgcctcttgcccttccccctgactgcttggaatgcagaggcggggcttcctgctctgctcactgtgcaca

SEQ ID NO: 48 - protein, 313 aa, Homo sapiens
MGQTNVTSWRDFVFLGFSSSGELQLLLFALFLSLYLVTLTSNVFIIIAIRLDSHLHTPMYLFLSFLSFSETCYTLGIIPRMLSGLAGGDQAISYVGCAAQMFFSASWACTNCFLLAAMGFDRYVAICAPLHYASHMNPTLCAQLVITSFLTGYLFGLGMTLVIFHLSFCSSHEIQHFFCDTPPVLSLACGDTGPSELRIFILSLLVLLVSFFFITISYAYILAAILRIPSAEGQKKAFSTCASHLTVVIIHYGCASFVYLRPKASYSLERDQLIAMTYTVVTPLLNPIVYSLRNRAIQTALRNAFRGRLLGKG

SEQ ID NO: 49 - DNA, 1330 bp, Homo sapiens
  source
  (1)..(1330)
  CDS (201)..(1130)
aaggaaaaaatgaatggatgaaaaatgagaaaaacacattacctacatatacatagttttgctaaactacaagaaaaagcagttggtaattgtaattctgatgatttatcttagtcatcacaattttcctttgatggtatcaaaagataatggtgttgaatgtttattgttgtttctttcaaatttcagacattcaaacgatgaagatcaaccagacaatcctgaaggaattcattcttgttggcttttctgtgtacccacatgtacagacatttctttttgtggtcttcttttgtctctaccttctcacccttgcaggtaatctgatcatcatgggtctaacttgggtggacaggtccctccacacccctatgtatctcttccttagtgcactctccttctctgagacctgctatacgctgaccatcgtccccaagatgctggaagatctactggccaaggacagaagcatttcagtcacaggttgtagcttacagatgtgcttcttcttgggacttggtggcacaaactgtatcattctcactttgatgggatatgaccgcttcctggccatctgtaaccctctaagatatccactgcttatgaccaacattgtatgtggacaacttgtggcctctgcttgcactgcaggcttctttatctctcttacagagactgcactgatattcagggactctttctgcagacccaaccttgtcaaacacttcttctgccatatgctggcagttattaggctgtcttgtatagacagtaaccacacagaattcattataacactgatctcagtgtctggtttgctgggtacccttctgctcatcatcctgactgatgtcttcattatttctactgtcctcaggatcccttcagctgagggcaagcagaaggccttcaccacctgtgcctcccacctcaccgtggttataatccactttggttttgcatctattgtttatttgaagccagaagcctcaggagatgacacactcatagcagtcccttatactgtcattacccccttcctcagccccatcatattcagcctgaggaataaggacatgaaaaatgcttttagaagaatgatgggaaacacagttgccttgaaaaaataatcttgggttgttgctgcttgtttgaagaagggctcaatgtccccagaattcaataggggcatttatcctgtgacccctggagaaacttgtaccatttgccttgttccagaggttgggatgtaagaagcaagtgacacagactgggaactaagtagccacaggcatctacttagcttgttagagaagctgtccaacccttc

SEQ ID NO: 50 - protein, 309 aa, Homo sapiens
MKINQTILKEFILVGFSVYPHVQTFLFVVFFCLYLLTLAGNLIIMGLTWVDRSLHTPMYLFLSALSFSETCYTLTIVPKMLEDLLAKDRSISVTGCSLQMCFFLGLGGTNCIILTLMGYDRFLAICNPLRYPLLMTNIVCGQLVASACTAGFFISLTETALIFRDSFCRPNLVKHFFCHMLAVIRLSCIDSNHTEFIITLISVSGLLGTLLLIILTDVFIISTVLRIPSAEGKQKAFTTCASHLTVVIIHFGFASIVYLKPEASGDDTLIAVPYTVITPFLSPIIFSLRNKDMKNAFRRMMGNTVALKK

SEQ ID NO: 51 - DNA, 1378 bp, Homo sapiens
  source
  (1)..(1378)
  CDS (201)..(1178)
agttaaaatataagctccctaaattccatcttttctcaaaagctttggttctcttcataattcaagaggcagtaagataaaaaagcagaaacctcctattgtgataaatttgctggtggtgggctctatcaatacaaataaccatagactagtgcttgtgtcatggaaggaactgactttgtctgtgcccacagccagtcatgaccaccataattctggaagtagataatcatacagtgacaacacgtttcattcttctggggtttccaacacgaccagccttccagcttctctttttctccattttcctggcaacctatctgctgacactgctggagaatcttcttatcatcttagctatccacagtgatgggcagctgcataagcccatgtacttcttcttgagccacctctccttcctggagatgtggtatgtcacagtcatcagccccaagatgcttgttgacttcctcagtcatgacaagagtatttccttcaatggctgcatgactcaactttacttttttgtgacctttgtctgcactgagtacatccttcttgctatcatggcctttgaccgctatgtagccatttgtaatccactacgctacccagtcatcatgaccaaccagctctgtggcacactggctggaggatgctggttctgtggactcatgactgccatgattaagatggtttttatagcacaacttcactactgtggcatgcctcagatcaatcactacttttgtgatatctctccactccttaacgtctcctgtgaggatgcctcacaggctgagatggtggacttcttcttggccctcatggtcattgctattcctctttgtgttgtggtggcatcctacgctgctatccttgccaccatcctcaggatcccttctgctcagggccgccaaaaggcattctccacctgtgcctcccacctgaccgtcgtaattctcttctattccatgacacttttcacctatgcccgtcccaaactcatgtatgcctacaattccaacaaagtggtatctgttctctacactgtcattgttccactcctcaaccccatcatttactgtctgaggaaccatgaagtaaaggcagccctcagaaagaccatacattgcagaggaagtgggccccagggaaatggggctttcagtagttaaaaaatgtatagattcctttcaggcttgaactgagagatgatcactacacactttccccctcagtcttgtctttggttatcccccaatctccagtactgtaacactgctctcctctgtgtgtgtgtgcatgtgtgtgtgtgtgtatacacaatcatgactggagaaacatgttctcaagaagtaacctctggtatcaggct

SEQ ID NO: 52 - protein, 325 aa, Homo sapiens
MTTIILEVDNHTVTTRFILLGFPTRPAFQLLFFSIFLATYLLTLLENLLIILAIHSDGQLHKPMYFFLSHLSFLEMWYVTVISPKMLVDFLSHDKSISFNGCMTQLYFFVTFVCTEYILLAIMAFDRYVAICNPLRYPVIMTNQLCGTLAGGCWFCGLMTAMIKMVFIAQLHYCGMPQINHYFCDISPLLNVSCEDASQAEMVDFFLALMVIAIPLCVVVASYAAILATILRIPSAQGRQKAFSTCASHLTVVILFYSMTLFTYARPKLMYAYNSNKVVSVLYTVIVPLLNPIIYCLRNHEVKAALRKTIHCRGSGPQGNGAFSS

SEQ ID NO: 53 - DNA, 1156 bp, Homo sapiens
  source
  (1)..(1156)
  CDS (201)..(956)
aaaaataggagtttgaatgcataccaatttagaagaacttctggttaaatttacaattcttttttctctcccatgcttgttgtttctcatccaaacaagactggcatagctactttatgagggtaggtctccctgaattttaagttccaaagatctctggacctgatcatattgactttattccgtgggatcaactcttcatggccaattcttcctctgtcactgagttcttagtgctgggcttctctagccttggggaattgcagcttgtcctctttgcagtctttctctgcctctatttgattatcttgagtggaaacatcatcatcatctcagtcattcatttggatcacagcctccacacacccatgtacttctttctaggtattctttctatctctgaaatcttctacacaactgttattctgcccaagatgcttatcaacttattctctgtattcaggacactctcctttgtgagttgtgccacccaaatgttcttcttcctcggttttgctgtcactaactgtctgcttctgggagtgatgggttatgatcgttatgctgccatctgtcagcctttgcaatacgctgttctcatgagctggagagtatgtggacaactgatagcaacttgtattattagtggcttcctaatatctctggtgggaacaacttttgtctttagcctccctttctgtggctccaacaaggtcaaccactacttttgtgatatttcaccagttatccgtctcgcctgtgctgacagctacatcagtgaactggtcatcttcatcttcggggtcttggtgcttgttgtgcccttgatatttatctgcatttcctatggcttcattgtccgcaccatcctgaagatcccatcagctgaaggcaaacaaaaagccttctccacctgtgcttcccatctcattgtagtcattgtccattatggttgagcttcctttgtctacttgcgaccctcagccaaatatacatcgggcaaagataggctggtgacagtgacctataccatcatcaccccagtcttgaaccccatggtatacagcctcaggaacaacgatgtgcagatggctattcggaaactgattggaaagtctgggttttctcttaagactctatgagcagaatactttct

SEQ ID NO: 54 - protein, 251 aa, Homo sapiens
MANSSSVTEFLVLGFSSLGELQLVLFAVFLCLYLIILSGNIIIISVIHLDHSLHTPMYFFLGILSISEIFYTTVILPKMLINLFSVFRTLSFVSCATQMFFFLGFAVTNCLLLGVMGYDRYAAICQPLQYAVLMSWRVCGQLIATCIISGFLISLVGTTFVFSLPFCGSNKVNHYFCDISPVIRLACADSYISELVIFIFGVLVLVVPLIFICISYGFIVRTILKIPSAEGKQKAFSTCASHLIVVIVHYG

SEQ ID NO: 55 - DNA, 1408 bp, Homo sapiens
  source
  (1)..(1408)
  CDS (201)..(1208)
tgggcccaaagtaatcataagggttcttaaaattgggagagagaatcagaaagtcagagaaagagatgtaactttgttgactttgaagatggaagaagaggaccatgaaccaatgaacatgagaggtagttaggaaccggaaaaggtgaataaaaggcaagattcttctttgtcaccacctgaaaggaacaaaggagtgcatgccccaaattcttatattcacatacctgaatatgttttacttctttccccctttgcagatcttggcagaaaacctcaccatggtcaccgaattcctgttgctgggtttttccagccttggtgaaattcagctggccctctttgtagtttttctttttctgtatctagtcattcttagtggcaatgtcaccattatcagtgtcatccacctggataaaagcctccacacaccaatgtacttcttccttggcattctctcaacatctgagaccttctacacctttgtcattctacccaagatgctcatcaatctactttctgtggccaggacaatctccttcaactgttgtgctcttcaaatgttcttcttccttggttttgccattaccaactgcctgctattgggtgtgatgggttatgatcgctatgctgccatttgtcaccctctgcattaccccactcttatgagctggcaggtgtgtggaaaactggcagctgcctgtgcaattggtggcttcttggcctctcttacagtagtaaatttagttttcagcctccctttttgtagcgccaacaaagtcaatcattacttctgtgacatctcagcagtcattcttctggcttgtaccaacacagatgttaacgaatttgtgatattcatttgtggagttcttgtacttgtggttccctttctgtttatctgtgtttcttatctctgcattctgaggactatcctgaagattccctcagctgagggcagacggaaagcgttttccacctgcgcctctcacctcagtgttgttattgttcattatggctgtgcttccttcatctacctgaggcctacagcaaactatgtgtccaacaaagacaggctggtgacggtgacatacacgattgtcactccattactaaaccccatggtttatagcctcagaaacaaggatgtccaacttgctatcagaaaagtgttgggcaagaaaggttctctaaaactatataattgaaatattattacattttagatttcttaataaataatgcctttttatcacaagcatattataactgtaacaaattcattgaaataataggagtccttaagaggcatgtcataaaatatgtttttctccttacagtctctttaaatttaatccacaagctaatgtttttcatttcctcatatggaatctcagggaactcctca

SEQ ID NO: 56 - protein, 335 aa, Homo sapiens
MPQILIFTYLNMFYFFPPLQILAENLTMVTEFLLLGFSSLGEIQLALFVVFLFLYLVILSGNVTIISVIHLDKSLHTPMYFFLGILSTSETFYTFVILPKMLINLLSVARTISFNCCALQMFFFLGFAITNCLLLGVMGYDRYAAICHPLHYPTLMSWQVCGKLAAACAIGGFLASLTVVNLVFSLPFCSANKVNHYFCDISAVILLACTNTDVNEFVIFICGVLVLVVPFLFICVSYLCILRTILKIPSAEGRRKAFSTCASHLSVVIVHYGCASFIYLRPTANYVSNKDRLVTVTYTIVTPLLNPMVYSLRNKDVQLAIRKVLGKKGSLKLYN

SEQ ID NO: 57 - DNA, 1342 bp, Homo sapiens
  source
  (1)..(1342)
  CDS (201)..(1142)
ctatcagttattcttttgcatattttgcctaattcttcttttagcaggcattttaatgggggaatgaagaattccatcaaatatctggaaatgcctgccacctgcaaactttgtgtgaaatttcccgtacatttccactctcctttctggatcctggtttctacctctgtccctgactctcctttatagaagtgctctccatggagcaagtcaataagactgtggtgagagagttcgtcgtcctcggcttctcatccctggccaggctgcagcagctgctctttgttatcttcctgctcctctacctgttcactctgggcaccaatgcaatcatcatttccaccattgtgctggacagagcccttcatactcccatgtacttcttccttgccatcctttcttgctctgagatttgctatacctttgtcattgtacccaagatgctggttgacctgctgtcccagaagaagaccatttctttcctgggctgtgccatccaaatgttttccttcctcttctttggctcctctcactccttcctgctggcagccatgggctatgatcgctatatggccatctgtaacccactgcgctactcagtgctcatgggacatggggtgtgtatgggactaatggctgctgcctgtgcctgtggcttcactgtctccctggtcaccacctccctagtatttcatctgcccttccactcctccaaccagctccatcacttcttctgtgacatctcccctgtccttaaactggcatctcagcactccggcttcagtcagctggtcatattcatgcttggtgtatttgccttggtcattcctctgctacttatcctagtctcctacatccgcatcatctctgccattctaaaaatcccttcctccgttggaagatacaagaccttctccacctgtgcctcccatctcattgtggtaactgttcactacagttgtgcctctttcatctacttaaggcccaagactaattacacttcaagccaagacaccctaatatctgtgtcatacaccatccttaccccattgttcaatccaatgatttatagtctgagaaataaggaattcaaatcagccctacgaagaacaatcggccaaactttctatcctcttagttaaagagctattttttaaactactaatgcctagtacatgccaggcagaacgtgtgttttatacattttttttcatttaattgtccagctccactgtaacataagaacattttacatatgagaagaatgaggctcacagaagttaagacagtctggctttctactctccatgatactttaacaagactaatcagatatgggaac

SEQ ID NO: 58 - protein, 313 aa, Homo sapiens
MEQVNKTVVREFVVLGFSSLARLQQLLFVIFLLLYLFTLGTNAIIISTIVLDRALHTPMYFFLAILSCSEICYTFVIVPKMLVDLLSQKKTISFLGCAIQMFSFLFFGSSHSFLLAAMGYDRYMAICNPLRYSVLMGHGVCMGLMAAACACGFTVSLVTTSLVFHLPFHSSNQLHHFFCDISPVLKLASQHSGFSQLVIFMLGVFALVIPLLLILVSYIRIISAILKIPSSVGRYKTFSTCASHLIVVTVHYSCASFIYLRPKTNYTSSQDTLISVSYTILTPLFNPMIYSLRNKEFKSALRRTIGQTFYPLS

SEQ ID NO: 59 - DNA, 1345 bp, Homo sapiens
  source
  (1)..(1345)
  CDS (201)..(1145)
ttctctgttacttcagattaataattttttggaaaaatcattaaagaggcatctatatctagatagactaagagaaagagatgttaacattatgaatctgacaatatacttaaagtgaaggcgttgggaaaatgttcgtattacaaagatagttatcattttgtctctttcaaacacattcacagaaagaagttcttcagatgcgaggtttcaacaaaaccactgtggttacacagttcatcctggtgggtttctccagcctgggggagctccagctgctgctttttgtcatctttcttctcctatacttgacaatcctggtggccaatgtgaccatcatggccgttattcgcttcagctggactctccacactcccatgtatggctttctattcatcctttcattttctgagtcctgctacacttttgtcatcatccctcagctgctggtccacctgctctcagacaccaagaccatctccttcatggcctgtgccacccagctgttctttttccttggctttgcttgcaccaactgcctcctcattgctgtgatgggatatgatcgctatgtagcaatttgtcaccctctgaggtacacactcatcataaacaaaaggctggggttggagttgatttctctctcaggagccacaggtttctttattgctttggtggccaccaacctcatttgtgacatgcgtttttgtggccccaacagggttaaccactatttctgtgacatggcacctgttatcaagttagcctgcactgacacccatgtgaaagagctggctttatttagcctcagcatcctggtaattatggtgccttttctgttaattctcatatcctatggcttcatagttaacaccatcctgaagatcccctcagctgagggcaagaaggcctttgtcacctgtgcctcacatctcactgtggtctttgtccactatggctgtgcctctatcatctatctgcggcccaagtccaagtctgcctcagacaaggatcagttggtggcagtgacctacacagtggttactcccttacttaatcctcttgtctacagtctgaggaacaaagaggtaaaaactgcattgaaaagagttcttggaatgcctgtggcaaccaagatgagctaacaaaaaataataataaaattaactaggatagtcacagaagaaatcaaaggcataaaattttctgacctttaatgcatgtctcagacagtgtttccaaggattaagactactcttgcctttttattttctcctattccaaaaagaaaaaaaatgcaagtcaatctacactctatattgtccgatgtctagttaaaaaaaaa

SEQ ID NO: 60 - protein, 314 aa, Homo sapiens
MRGFNKTTVVTQFILVGFSSLGELQLLLFVIFLLLYLTILVANVTIMAVIRFSWTLHTPMYGFLFILSFSESCYTFVIIPQLLVHLLSDTKTISFMACATQLFFFLGFACTNCLLIAVMGYDRYVAICHPLRYTLIINKRLGLELISLSGATGFFIALVATNLICDMRFCGPNRVNHYFCDMAPVIKLACTDTHVKELALFSLSILVIMVPFLLILISYGFIVNTILKIPSAEGKKAFVTCASHLTVVFVHYGCASIIYLRPKSKSASDKDQLVAVTYTVVTPLLNPLVYSLRNKEVKTALKRVLGMPVATKMS

SEQ ID NO: 61 - DNA, 2167 bp, Homo sapiens
  source
  (1)..(2167)
  CDS (201)..(228)
  CDS (988)..(1967)
taggatattacaaataatatcacaaggtgtatgcccactctgatgtcaggagcaacatctccctaggatatcaaaactaatatcacagggtgtacaatctctgccttccaggttctaagggattctcctgcttcagcctcctgagtagctagggttacccgccaccacgcccagctaattttcttttgttttcactagagatggggtttcatcatgttggccaggctggtctggaactcctgacctcaggtgatccatcagactcggcctcccaaagtgctgggattacagatgtgatccatcgcactcggccaagagttatatattcaattaatttggaaacacagctcccatatttgagtgtgtatgtacttttatgaagaaatgatgtcagaaaacctaaggatggcaataaatatgaaaagtaactagcatgctaaaaggtcttccgattaagaagtataaggttcgatttcatttttagataatgcagtcctagctcttctatcgtccttttaaatactctacatcaaaggaatttgtgtcagaataaaataaagtgtatttcactgctgcttaatttttttcaattagactgagatctttttcttaaagagagaagaatatttttattgcatgttattgtttctgaaaagagtaggccgtattttactgagatcacggatgtgttaagtattacattttggtcttctaacattcttcagtggattttctctaaagtagtatgtacagaaagagttgaatagcaaaaaagtaaatcatgtaataattctgagatttttgggtttgtcacacctgagaaatattgctgacagtgtatggtcctcaagtgtgaaaatgttccttgtgaattgcttgcatccaaaatatacacacagcgttaagggctggtttttatcttttatttttccaatcctcttttcttcttaaggtgtccaagacacacagagccatggaatctcacaggtatctcagaattcctcctcctgggactctcagaggatccagaactgcagcccgtcctccctgggctgtccctgtccatgtacctggtcacggtgctgaggaacctgctcatcatcctggctgtcagctctgactcccacctccacacccccatgtgcttcttcctctccaacctgtgctgggctgacatcggtttcacctcggccatggttcccaagatgattgtggacatgcagtcgcatagcagagtcatctcttatgcgggctgcctgacacagatgtctttctttgtcctttttgcatgtatagaagacatgctcctgacagtgatggcctatgaccgatttgtggccatctgtcaccccctgcactacccagtcatcatgaatcctcaccttggtgtcttcttagttttggtgtcctttttcctcagcctgttggattcccagctgcacagttggattgtgttacaattcaccttcttcaagaatgtggaaatctccaattttgtctgtgacccatctcaacttctcaaccttgcctgttctgacagtgtcatcaatagcatattcatatatttagatagtattatgtttggttttcttcccatttcagggatccttttgtcttacgctaacaatgtcccctccattctaagaatttcatcatcagataggaagtctaaagccttctccacctgtggctctcacctggcagttgtttgcttattttatggaacaggcattggcgtgtacctgacttcagctgtgtcaccaccccccaggaatggtgtggtggcatcagtgatgtacgctgtggtcacccccatgctgaaccctttcatctacagcctgagaaatagggacattcaaagtgccctgtggaggctgcgcagcagaacagtcgaatctcatgatctgttatctcaagatctgctccatcctttttcttgtgtgggtgagaaaggtcaaccacattaaatctctacatctgcaaatcctgccccttagtcacattattgttgttgcttgatggcttttattcatttccacatttcctatgtgaatattcctttcttcattttgcctttaactggaatgggtgagtattctgggatcttttgtgtagcataaacctcatgctgtatcctctatacctaggtggcctcctttagtttctg

SEQ ID NO: 62 - protein, 335 aa, Homo sapiens
MGFHHVGQAGISEFLLLGLSEDPELQPVLPGLSLSMYLVTVLRNLLIILAVSSDSHLHTPMCFFLSNLCWADIGFTSAMVPKMIVDMQSHSRVISYAGCLTQMSFFVLFACIEDMLLTVMAYDRFVAICHPLHYPVIMNPHLGVFLVLVSFFLSLLDSQLHSWIVLQFTFFKNVEISNFVCDPSQLLNLACSDSVINSIFIYLDSIMFGFLPISGILLSYANNVPSILRISSSDRKSKAFSTCGSHLAVVCLFYGTGIGVYLTSAVSPPPRNGVVASVMYAVVTPMLNPFIYSLRNRDIQSALWRLRSRTVESHDLLSQDLLHPFSCVGEKGQPH

SEQ ID NO: 63 - DNA, 1351 bp, Homo sapiens
  source
  (1)..(1351)
  CDS (201)..(1151)
agaagaaagagtgtggcttcaggaccagggtgttggctatcatgaaatgaggaagcataaacagtagaagtgatttcttaggttgttgagatagatagaataatataaatgtggcataccttgtgtttagttcaagaactataatctagatgtaacacctgaaaataaactcttttattgatattctacaggcagaagaaatgaagatagcaaacaacacagtagtgacagaatttatcctccttggtctgactcagtctcaagatattcagctcttggtctttgtgctgatcttaattttctaccttatcatcctccctggaaattttctcattattttcaccataaggtcagaccctgggctcacagcccccctctatttctttctgggcaacttggccttcctggatgcatcctactccttcattgtggctcccaggatgttggtggacttcttctctgagaagaaggtaatctcctacagaggctgcatcactcagctctttttcttgcacttccttggaggaggggagggattactccttgttgtgatggcctttgaccgctacatcgccatctgccggcctctgcactgttcaactgtcatgaaccctagagcctgctatgcaatgatgttggctctgtggcttgggggttttgtccactccattatccaggtggtcctcatcctccgcttgcctttttgtggcccaaaccagctggacaacttcttctgtgatgtccgacaggtcatcaagctggcttgcaccgacatgtttgtggtggagcttctgatggtcttcaacagtggcctgatgacactcctgtgctttctggggcttctggcttcctatgcagtcatcctctgccatgttcgtagggcagcttctgaagggaagaacaaggccatgtccatgtgcaccactcgtgtcattattatacttcttatgtttggacctgctatcttcatctacatgtgccctttcagggccttaccagctgacaagatggtttctctctttcacacagtgatctttccattgatgaatcctatgatttatacccttcgcaaccaggaagtgaaaacttccatgaagaggttattgagtcgacatgtagtctgtcaagtggattttataataagaaactgagaaggaggaattctggctggaattcatatcattcatttaacaagtcctgtttttcactgagtacctcccatttgccaggtaccattgtaggcaatggaggagagttatgcataatgagagaataaacttattatatttaaagaatataaaggaaaccccagagtggttgaagtataatgagtaagtgtgagaaatttaag

SEQ ID NO: 64 - protein, 316 aa, Homo sapiens
MKIANNTVVTEFILLGLTQSQDIQLLVFVLILIFYLIILPGNFLIIFTIRSDPGLTAPLYFFLGNLAFLDASYSFIVAPRMLVDFFSEKKVISYRGCITQLFFLHFLGGGEGLLLVVMAFDRYIAICRPLHCSTVMNPRACYAMMLALWLGGFVHSIIQVVLILRLPFCGPNQLDNFFCDVRQVIKLACTDMFVVELLMVFNSGLMTLLCFLGLLASYAVILCHVRRAASEGKNKAMSMCTTRVIIILLMFGPAIFIYMCPFRALPADKMVSLFHTVIFPLMNPMIYTLRNQEVKTSMKRLLSRHVVCQVDFIIRN

SEQ ID NO: 65 - DNA, 1171 bp, Homo sapiens
  source
  (1)..(1171)
  CDS (201)..(971)
aattttaaatgcagccttaagctaagaccctaatatttttggttttttttttttttttcgattttttttcactcatggaattttttatggaataagtaaataaactgtgtttgaataaagtgttgaaattttctgattttataggtaagacaatcagagaagtcactaactcatatcacatggctaggtaggaattccaaatggtcttgatattgcggtatcattactctgaattaattccaatctccatatcattaacaggcatcaagaaacacaaatccatggctgatgttaattttacattggttactgagtttatccttttggaactgacagatcgtgctgaactgaagatggtcctcttcgtgttgttcctgctgatctacaccatttccctggtgggaaatataggaatgctctttctaatctatgtaactcccaaactccacacacccatgtattatttcctcagctgtctgtcatttgttgatgcctgctattcatcagtttttgcacccagaatgctgctgaacttctttgttgagcgggagacaatcttattctctgcatgtattgtgcagtattttttattcgtgtctctccttaccactgagggcttcttgctggccacaatggcttacgaccgttacatggccattgtgaaccctttactttatacagtagctatgactaaaatagtttgtattgtgctcgcatttgggtcatgtatgggaggtttaatcaactcattgacacatacaattggcttggtgaaactgtctttctgtgggccaaatgtcatcagtcacttcttctgtgatcttcccccactgttgaagctgtcatgttctgagacatctatgaatgaattgttgcttttgatcttctctggcattattgccacgctcacttttttgactgtggtgatctcctacatcttcattgttgctgctatcctgaggatccgctaagcagcaggtagacgtaaagccttctccacctgcacctctcacctgattaccgtgaccttattctatggatcgataagctttagttacattcagccaaactcccagtattccctagaacaagaaaaggtggtgtctgtattttataccctggtggttcctatgttaaacccattgatttacagcctaaggaacaaggaagt

SEQ ID NO: 66 - protein, 256 aa, Homo sapiens
MVLILRYHYSELIPISISLTGIKKHKSMADVNFTLVTEFILLELTDRAELKMVLFVLFLLIYTISLVGNIGMLFLIYVTPKLHTPMYYFLSCLSFVDACYSSVFAPRMLLNFFVERETILFSACIVQYFLFVSLLTTEGFLLATMAYDRYMAIVNPLLYTVAMTKIVCIVLAFGSCMGGLINSLTHTIGLVKLSFCGPNVISHFFCDLPPLLKLSCSETSMNELLLLIFSGIIATLTFLTVVISYIFIVAAILRIR

SEQ ID NO: 67 - DNA, 1165 bp, Homo sapiens
  source
  (1)..(1165)
  CDS (201)..(965)
aaggaattatatatacctgagtaaaaacgagaggctggaatcatacaggtgcaaaggaattcctcctggtagggttaactgaaaatcctaatttgcagatcccactctttttgcttgtcactctgatttatttcatcactttgttggataatttgggtataattattttaatctggttaaatgcccaacttcatactccaatgtacttcttccttggcaacctctccttttgtgatatctgctactctactgtctttgctcctaagatgctagtcaatttcctatcaaaacataagtccagtacattttctggctgtgttctacagagtttcccttttgcagtatatgtaaccacaaaggacattctcctgtccatgatggcttatgaccattacgtggccatagctaatcccttgttgtatacagtcattatggcccaaaaagtttgtattcagatggtccttgcttcttacttaggtgggctcattaattccctgacacacacaataggtttgctcaaattagacttctgtggtcctaatattgtgaatcattatttctgtgatgttcctcctcttctgaggctttcttgctctgatgctcatatcaatgaaatgctgcccttggtcttctctgggctcattgcaatgttcactttcattgtcattatggtgtcttatatctgcatcatcattgccatccagagaatccatgcagctgagggaaggtacaaagccttctccacttgtgtctcccacctaaccacggtgaccttattctatgggtctgtttcttttagttatatccagccaagttctcagtattccttggaacaggagaaggtcttggctgtgttttatacactggtgatccccatgctaaacccacttatttatagcctgagaaataaggatgtaaaagatgcagccaaaaggttgatatggtgggggaaaaaccccacttgactcagtcctgcatatagctttgctaacctaacatttacctgcaaatatatggcctatctttaaaatgatatcaaacaattataaataaaactatactccagatgctcttgtacagtttggatcaggaatgatgagtttgacttgaagactgaaaatcactttatttcacaatttattgtgttgatgacttaataaaatca

SEQ ID NO: 68 - protein, 254 aa, Homo sapiens
MYFFLGNLSFCDICYSTVFAPKMLVNFLSKHKSSTFSGCVLQSFPFAVYVTTKDILLSMMAYDHYVAIANPLLYTVIMAQKVCIQMVLASYLGGLINSLTHTIGLLKLDFCGPNIVNHYFCDVPPLLRLSCSDAHINEMLPLVFSGLIAMFTFIVIMVSYICIIIAIQRIHAAEGRYKAFSTCVSHLTTVTLFYGSVSFSYIQPSSQYSLEQEKVLAVFYTLVIPMLNPLIYSLRNKDVKDAAKRLIWWGKNPT

SEQ ID NO: 69 - DNA, 1333 bp, Homo sapiens
  source
  (1)..(1333)
  CDS (201)..(1133)
aagttttcagttttataaaaaataaaaattatccgtaaatctctagctaacttcaggtcattaaattttactttccatttgtaaaactttcatgattggagtctaagtcaaatttgattatagggcctttagatttgaatccttctctaactttccttattgttattcagcaggtaagtcaaaggcctgagttgatgtaaatggctggcaacaatttcactgaggttaccgtcttcatcctctctggatttgcaaatcaccctgaattacaagtcagtcttttcttgatgtttctcttcatttatctattcactgttttgggaaacctgggactgatcacgttaatcagaatggattctcagcttcacacccctatgtactttttcctgagcaatttagcatttattgacatattttactcctctactgtaacacctaaggcattggtgaatttccaatccaatcggagatccatctcctttgttggctgctttgttcaaatgtacttttttgttggattggtgtgttgtgagtgtttccttctgggatcaatggcctacaatcgctacatagcaatctgcaatcccttactgtattcagtagtcatgtcccaaaaagtgtccaactggctgggagtaatgccatatgtgataggcttcacaagctcgctgatatctgtctgggtgataagcagtttggcgttctgtgattccagcatcaatcattttttttgtgacaccacagctcttttagcactctcctgtgtagatacattcggcacagaaatggtgagctttgtcttagctggattcactcttcttagctctctccttatcatcacagtcacttatatcatcatcatctcagccatcctgaggatccagtcagcagcaggcaggcagaaggccttctccacctgcgcatcccacctcatggctgtaactatcttttatgggtctctgattttcacctatttgcaacctgataacacatcatcgctgacccaggcgcaggtggcatctgtattctatacgattgtcattcccatgctgaatccactcatctacagtctgaggaacaaagatgtgaaaaatgctcttctgagagtcatacatagaaaactttttccatgacaaatttatgtatgttacaattaaaacaaaggtggatggcttcaggaattcagttatgccaacaactaggaaaatagtagagtaacctcaaaaagcataacacaaactaaatgagaacttagagtcttgaagtttgtgaattgaattattatttcatttgtttatatggaccactaactcactgtatttggaggtcaatt

SEQ ID NO: 70 - protein, 310 aa, Homo sapiens
MAGNNFTEVTVFILSGFANHPELQVSLFLMFLFIYLFTVLGNLGLITLIRMDSQLHTPMYFFLSNLAFIDIFYSSTVTPKALVNFQSNRRSISFVGCFVQMYFFVGLVCCECFLLGSMAYNRYIAICNPLLYSVVMSQKVSNWLGVMPYVIGFTSSLISVWVISSLAFCDSSINHFFCDTTALLALSCVDTFGTEMVSFVLAGFTLLSSLLIITVTYIIIISAILRIQSAAGRQKAFSTCASHLMAVTIFYGSLIFTYLQPDNTSSLTQAQVASVFYTIVIPMLNPLIYSLRNKDVKNALLRVIHRKLFP

SEQ ID NO: 71 - DNA, 1339 bp, Homo sapiens
  source
  (1)..(1339)
  CDS (201)..(1139)
ttttgtttgttttttgttttttgagtcagagtctggcacagtcgccagggctggaatgcaatggtgcgatcccggctcactgcaacctccgcctcccgcgttcaagcaattctcctgcctcagcttctccagtagctgggattacaggcgcccctgctacgtatcagctttgatttctcagcagtttagagcaggtgaacatgatgggtagaaggaataacacaaatgtggctgacttcatccttatgggactgacactttctgaagagatccagatggctctgtttatgctatttctcctgatatacctaattactatgctggggaatgtggggatgatattgataatccgcctggacctccagcttcacactcccatgtattttttccttactcacctgtcatttattgacctcagttactcaactgtcgtcacacctaaaaccttagcgaacttactgacttccaactatatttcctttacgggctgctttgcccagatgttcttttttgccttcttgggtactgctgaatgttaccttctctcctcaatggcccatgatcgctatgcagcgatctgcagtcctctacactacacagttattatgtccaaaaggctctgcctcgctctcatcactgggccttatgtgattggctttatagactcctttgtcaacgtggtttccatgagcagattgcatttctacgactcaaacgtaattcatcactttttctgtgacacttccccaattttagctctgtcctgcactgatacatacaacaccgaaatcctgatattcattattgttggttccaccctgatggtgtcccttttcacaatatctgcatcctatgtgttcattctctttaccatcctgaaaattaattccacttcaggaaagcagaaagctttctctacttgcgtctctcatctcttgggagtcaccatcttttatagcactctgatttttacttatttaaaaccaagaaagtcttattccttgggaagagatcaagtggcttctgttttttatactattgtgattcccgtgctgaatccactcatttatagtcttagaaacaaagaggtgaaaaatgctgtcatcagagtcatgcagagaagacaggactccaggtaattaatatagcaggaatgctgaacatttaaactcatcttttctttcattcctgttgggtattttcttagtctctctataaaaacaattgaatcttttaatttgtttgcatttctgttgtgctaccctttgcttcactaaacatgattttaaacatttcaaggcatatgtttttagaaatccaaatggtaattagaaatcat

SEQ ID NO: 72 - protein, 312 aa, Homo sapiens
MMGRRNNTNVADFILMGLTLSEEIQMALFMLFLLIYLITMLGNVGMILIIRLDLQLHTPMYFFLTHLSFIDLSYSTVVTPKTLANLLTSNYISFTGCFAQMFFFAFLGTAECYLLSSMAHDRYAAICSPLHYTVIMSKRLCLALITGPYVIGFIDSFVNVVSMSRLHFYDSNVIHHFFCDTSPILALSCTDTYNTEILIFIIVGSTLMVSLFTISASYVFILFTILKINSTSGKQKAFSTCVSHLLGVTIFYSTLIFTYLKPRKSYSLGRDQVASVFYTIVIPVLNPLIYSLRNKEVKNAVIRVMQRRQDSR

SEQ ID NO: 73 - DNA, 1339 bp, Homo sapiens
  source
  (1)..(1339)
  CDS (201)..(1139)
tttttgagtcggagtctggcacagttgctggggctgcaatgcaatagtgtgatcccagctcactgcaacctctggctcactgcaacctccggctcccatgttcaagcgattctcctgcctcagcttctccagtagctgggagtacaggcgcccctgctacgtatcaactttgatttctcagcagtttagagcaggtgaacatgatgggtagaaggaatgacacaaatgtggctgacttcatccttacgggactgtcagactctgaagaggtccagatggctctgtttatgctatttctcctcatatacctaattactatgctggggaatgtggggatgctattgataatccgcctggacctccagcttcacactcccatgtattttttccttactcacctgtcatttattgacctcagttactcaactgtcgtcacacctaaaaccttagcgaacttactgacttccaactatatttccttcacgggctgctttgcccagatgttctgttttgtcttcttgggtactgctgaatgttatcttctctcctcaatggcctatgatcgctatgcagcgatctgcagtcctctacactacacagttattatgcccaaaaggctctgcctcgctctcatcactgggccttatgtgattggctttatggactcctttgtcaatgtggtttccatgagcagattgcatttctgtgactcaaacataattcatcactttttctgtgacacttccccaattttagctctgtcctgcactgacacagacaacactgaaatgctgatattcattatcgctggttccaccctgatggtgtcccttatcacaatatctgcatcctatgtgtccattctctctaccatcctgaaaattaattccacttcaggaaagcagaaagctttctctacttgcgtctctcatctcttgggagtcaccatcttctatggaactatgatttttacttacttaaagccaagaaagtcttattccttgggaagagatcaagtggctcctgtgttttatactattgtgattcccatgctgaatccactcatttatagtcttagaaacagagaagtgaaaaatgctctcattagagtcatgcagagaagacaggactccaggtagttaaaatagcagaaatggaacatttaatctcatcttttctttcattcctattgggtattttcttagtctctctataaaaacaattgaatcctttaatttatttgcatttctgttgtgctactctttgcttgactaaacatgatttaaaacatttcaaggcatatgtttttagaaatccaaatggtaattagaatcataat

SEQ ID NO: 74 - protein, 312 aa, Homo sapiens
MMGRRNDTNVADFILTGLSDSEEVQMALFMLFLLIYLITMLGNVGMLLIIRLDLQLHTPMYFFLTHLSFIDLSYSTVVTPKTLANLLTSNYISFTGCFAQMFCFVFLGTAECYLLSSMAYDRYAAICSPLHYTVIMPKRLCLALITGPYVIGFMDSFVNVVSMSRLHFCDSNIIHHFFCDTSPILALSCTDTDNTEMLIFIIAGSTLMVSLITISASYVSILSTILKINSTSGKQKAFSTCVSHLLGVTIFYGTMIFTYLKPRKSYSLGRDQVAPVFYTIVIPMLNPLIYSLRNREVKNALIRVMQRRQDSR

SEQ ID NO: 75 - DNA, 1375 bp, Homo sapiens
  source
  (1)..(1375)
  CDS (201)..(1175)
ctttaattattatacttcctttaatcaaatgacaaaatcaaaatcaaaatttacaaaaaatgacatctctgtgattttactgaccttctatttgattccttagaagagagaataaagatacttttggttcatccataactcaagttaactcacatctgctgatactacctaggtccagtgggaaaaacaagaaaactaagatgttggagagtaattacaccatgccaactgagttcctatttgttggattcacagattatctacctctcagagtcacactgttcttggtattccttctggtatatacattaactatggtcggaaatatactcttaataattctagttaatattaattcaagccttcaaattcccatgtattattttcttagcaacttatctttcttagacatcagctgttctacagcaatcactcctaaaatgctggcaaacttcttggcatccaggaaaagcatctctccttatgggtgtgcactacaaatgtttttcttcgcttcttttgctgatgctgagtgccttatcctggcagcaatggcttatgaccgctatgcagccatctgcaacccactgctctatactacactgatgtctaggagagtctgtgtctgcttcattgtgttggcatatttcagtggaagtacaacatcactggtccatgtgtgcctcacattcaggctgtcattttgtggctccaatatcgtcaatcattttttctgtgatatcccacctcttctggctttatcatgtacagacactcagatcaaccagcttctgctctttgctttgtgcagcttcatccagaccagcacttttgtggtaatatttatttcttacttctgcatcctcatcactgtgttgagcatcaagtcctcaggtggcagaagcaaaacattctccacttgtgcttcccacctcatagcagtcaccttattctatggagcgctcctgtttatgtacttacagcccaccactagctattccctagacactgataaggtggtggcagtgttttatactgttgtatttcccatgtttaatccaataatttatagtttcagaaacaaggatgtgaaaaatgctctcaaaaagctattagaaagaattggatattcaaatgaatggtatttaaatcgtttaagaatagtcaatatctaacttacccttccaatctcataaacagcaattatgccatgaacatcttatgtgttaactattttaaatttatcacattttcagaaataaagataacttgttatactcagtgcattaaaatgcttcatcctctcttccaaaaatgttctctccacaattctactctataaaacattacctaattaaacatagtcattatttat

SEQ ID NO: 76 - protein, 324 aa, Homo sapiens
MLESNYTMPTEFLFVGFTDYLPLRVTLFLVFLLVYTLTMVGNILLIILVNINSSLQIPMYYFLSNLSFLDISCSTAITPKMLANFLASRKSISPYGCALQMFFFASFADAECLILAAMAYDRYAAICNPLLYTTLMSRRVCVCFIVLAYFSGSTTSLVHVCLTFRLSFCGSNIVNHFFCDIPPLLALSCTDTQINQLLLFALCSFIQTSTFVVIFISYFCILITVLSIKSSGGRSKTFSTCASHLIAVTLFYGALLFMYLQPTTSYSLDTDKVVAVFYTVVFPMFNPIIYSFRNKDVKNALKKLLERIGYSNEWYLNRLRIVNI

SEQ ID NO: 77 - DNA, 1243 bp, Homo sapiens
  source
  (1)..(1243)
  CDS (201)..(1043)
agaccattgtttattaaattcacatgctcatccatttgtcttctaatcatccttcagtcactttaattactatgccatattatcctaggtttttccatatgtgaatatccttattaacatttctatttttttctataaactttcaaagggagaaacattttcatctcatataaagttcgcacaaaatatatttgtcacaaatgaccagaaaaaattatacctcactgactgagttcatcctattgggattagcagacacgctggagctacagattatcctctttctgttatttcttgtgatttacacacttaccgtactgggaaatatcgggatgatcctcttaatcaggatcgattcccggcttcacacacccatgtatttcttcctggttaacctgtcctttgtggacatttgttactcaaccaccatcaccccaaagatgctggcagatttattatcagagaagaaaaccatctcttttgctggctgcttcctacagatgtacttctttatcgccctggcgacaaccgaatgcatcctctttgggttaatggcctatgaccggtatgtgaccatatgtcgcccgctgctttactccttgatcatgtccaggacagtctgcctaaaaatggcagccggggcttttgctgcagggttgctgaactccatggtcaacactagctatgtcagcagcttgtcattctgtggctccaatgtcatccatcacttcttctgcaacagtcccccactttttaagctttcttgttctgacacacacttgaaggaaagcatattttccacttttgctggtgtgaataaggtcggggctctgcttgtcatcctctcctcctattcctacgttctcttctccattttttctatgcattcaggggaggggaggcacagagctttctccacgtgtgcctctcacctgacagccataatcctcttctacaccacctccatctatacctacctgagacctagttccagctactccctgatcaggacaaagtggtttctgtgttctacacagtggtgatccccatattgaatcctctgatctacagcctcaggaataaggaagtaaagaaggctttagcgaatgtaattagcaggaaaaggatcccttcatttctgtgatttttttgcctaaaaatctgagctaaagagcatattttagttactttcaaagtctagttcatgcctacaatttttgttagaatattttctcattaaaca

SEQ ID NO: 78 - protein, 280 aa, Homo sapiens
MTRKNYTSLTEFILLGLADTLELQIILFLLFLVIYTLTVLGNIGMILLIRIDSRLHTPMYFFLVNLSFVDICYSTTITPKMLADLLSEKKTISFAGCFLQMYFFIALATTECILFGLMAYDRYVTICRPLLYSLIMSRTVCLKMAAGAFAAGLLNSMVNTSYVSSLSFCGSNVIHHFFCNSPPLFKLSCSDTHLKESIFSTFAGVNKVGALLVILSSYSYVLFSIFSMHSGEGRHRAFSTCASHLTAIILFYTTSIYTYLRPSSSYSLIRTKWFLCSTQW

SEQ ID NO: 79 - DNA, 1051 bp, Homo sapiens
  source
  (1)..(1051)
  CDS (201)..(851)
gatgttccttgtgaatttcttgcatccagcattaagggctggtttttatcttttatttttccaatcctctttccttctcaaggtgtccaagacacacagagccacggaatctcacaggtgtctgagaattcctcctcctgggactctcagaggatccagaactgcagccggtcctcgctttgctgtccctgtccctgtccatgtatctggtcacggtgctgaggaacctgctgagcatcccggctgtcagctctgactccccgctccacacccccacgtacttcttcctctccatcctgtgctgggctgacatcggtttcacctcggccacggtttccaagacgattgtggacatgcagtcacatagcagagtcatctctcatgcgggctgcctgacacagatgtctttcttggtcctttttgcatgtatagaaggcatgctcctgactgtgatggcctatgactgctttgtaggcatctgtcgccctctgcactacccagtcatcgtgaatcctcatctctgtgtcttctttgttttggtgtcctttttccttagcctgttggattcccagctgcacagttggattgtgttacaattcaccatcatcaagaatgtggaaatctctaattttgtctgtgacccctctcaacttctcaaacttgcctgttctgacagcgtcatcaatagcatcttcatatattttggtagtactatgtttggttttcttcccatttcagggatccttttgtcttactataaaatcgtcccctccattctaaggatttcatcgtcagatgggaagtataaagccttctccacctatggctctcacctagcagttttttgctgatttgatggaacaggcattggcgtgtacctgacttcagctgtggcaccacccctcaggaatggtgtggtggtgtcagtgatgtaagctgtggtcacccccatgctgaaccttttcatctacagcctgagaaacagggacatacaaagtgccctgcggaggctgcgcagcagaacagtcgaatctcatgatctgttccatcc

SEQ ID NO: 80 - protein, 216 aa, Homo sapiens [sequence omitted]

SEQ ID NO: 81 - DNA, 1351 bp, Homo sapiens
  source
  (1)..(1351)
  CDS (201)..(1151)
tgttcaaccaatagccacaaaagtagtagcctcaggagactcattctcgcagtgaattgggcatgcaccaaattccaggcaagatgaggagacattgtggaagatgctctccttcttttaagccaaagagacgtcaataattgtggcatattattaattagtgccttattcctctacaatttttttcagagaggtcaggaatggttgaagaaaatcataccatgaaaaatgagtttatcctcacaggatttacagatcaccctgagctgaagactctgctgtttgtggtgttctttgccatctatctgatcaccgtggtggggaatattagtttggtggcactgatatttacacactgtcggcttcacacaccaatgtacatctttctgggaaatctggctcttgtggattcttgctgtgcctgtgctattacccccaaaatgttagagaacttcttttctgagggcaaaaggatttccctctatgaatgtgcagtacagttttattttctttgcactgtggaaactgcagactgctttcttctggcagcagtggcctatgaccgctatgtggccatctgcaacccactgcagtaccacatcatgatgtccaagaaactctgcattcagatgaccacaggcgccttcatagctggaaatctgcattccatgattcatgtagggcttgtatttaggttagttttctgtggattgaatcacatcaaccacttttactgtgatactcttcccttgtatagactctcctgtgttgaccctttcatcaatgaactggttctattcatcttctcaggttcagttcaagtctttaccataggtagtgtcttaatatcttatctctatattcttcttactattttcagaatgaaatccaaggagggaagggccaaagccttttctacttgtgcatcccacttttcatcagtttcattattctatggatctatttttttcctatacattagaccaaatttgcttgaagaaggaggtaatgatataccagctgctattttatttacaatagtagttcccttactaaatcctttcatttatagtctgagaaacaaggaagtaataagtgtcttaagaaaaattctgctgaaaataaaatctcaaggaagtgtgaacaaatgacatctatcctagcttaatggtttaatgctcaaaaaacttctaaataaaattacacagaggaagtgtactaattgtatacaaaatattaaaacatatcaaaatacaatcaaattaagcagaaatatgtgacagggaaaattcatggaaaggagtgaactgtgctaaatatttactcagaatttaaaagcacatgcagacat

SEQ ID NO: 82 - protein, 316 aa, Homo sapiens
MVEENHTMKNEFILTGFTDHPELKTLLFVVFFAIYLITVVGNISLVALIFTHCRLHTPMYIFLGNLALVDSCCACAITPKMLENFFSEGKRISLYECAVQFYFLCTVETADCFLLAAVAYDRYVAICNPLQYHIMMSKKLCIQMTTGAFIAGNLHSMIHVGLVFRLVFCGLNHINHFYCDTLPLYRLSCVDPFINELVLFIFSGSVQVFTIGSVLISYLYILLTIFRMKSKEGRAKAFSTCASHFSSVSLFYGSIFFLYIRPNLLEEGGNDIPAAILFTIVVPLLNPFIYSLRNKEVISVLRKILLKIKSQGSVNK

SEQ ID NO: 83 - DNA, 1351 bp, Homo sapiens
  source
  (1)..(1351)
  CDS (201)..(1151)
tttcatcactagccaaagaggtaattcctttatggaaattcattctccccatgaatggggcatgcaccaaagtccaggcaacatgaggaaacattgtggaagatgctctccttcctttaagccaaagagacctaaataactgtggcatattataaattagtgccttctttctccacaattttttttcagacaagtcaggaatggctgaagaaaatcataccatgaaaaatgagtttatcctcacaggatttacagatcaccctgagctgaagactctgctgtttgtggtgttctttgccatctatctgatcaccgtggtggggaatattagtttggtggcactgatatttacacaccgtcggcttcacacaccaatgtacatctttctgggaaatctggctcttgtggattcttgctgtgcctgtgctattacccccaaaatgttagagaacttcttttctgagaacaaaaggatttccctctatgaatgtgcagtacagttttattttctttgcactgtggaaactgcagactgctttcttctggcagcaatggcctatgaccgctatgtggccatatgcaacccactgcagtaccacatcatgatgtccaagaaactctgcattcagatgaccacaggggccttcatagctggaaacctgcattccatgattcatgtagggcttgtatttaggttagttttctgtggatcgaatcacatcaaccacttttactgtgatattcttcccttgtatagactctcttgtgttgatccttatatcaatgaactggttctattcatcttctcaggttcagttcaagtctttaccataggtagtgtcttaatatcttatctctatattcttcttactattttcaaaatgaaatccaaagagggaagggccaaagctttttctacctgtgcatcccactttttgtcagtttcattattctatggatctcttttcttcatgtacgttagaccaaatttgcttgaagaaggggataaagatataccagctgcaattttatttacaatagtagttcccttactaaatcctttcatttatagcctgagaaatagggaagtaataagtgtcttaagaaaaattctgatgaaagaaataatctcaagaagatggaaacagtgacatctactatagcttaatgacttaaatgcagcataaacttccatgtgaaattacacaggggaaagcataaattataagtaaaattttaatatataagaatacattcaaattaagtggcaagaggtaagggtagaatatacaaaaaagagtaaactgtggtaaatcttaattcaaaataacaaaaatgaaattctaatttt

SEQ ID NO: 84 - protein, 316 aa, Homo sapiens
MAEENHTMKNEFILTGFTDHPELKTLLFVVFFAIYLITVVGNISLVALIFTHRRLHTPMYIFLGNLALVDSCCACAITPKMLENFFSENKRISLYECAVQFYFLCTVETADCFLLAAMAYDRYVAICNPLQYHIMMSKKLCIQMTTGAFIAGNLHSMIHVGLVFRLVFCGSNHINHFYCDILPLYRLSCVDPYINELVLFIFSGSVQVFTIGSVLISYLYILLTIFKMKSKEGRAKAFSTCASHFLSVSLFYGSLFFMYVRPNLLEEGDKDIPAAILFTIVVPLLNPFIYSLRNREVISVLRKILMKEIISRRWKQ

SEQ ID NO: 85 - DNA, 1213 bp, Homo sapiens
  source
  (1)..(1213)
  CDS (201)..(1013)
tttatccccagtttcaactcacaactccattccaagtgttcctttacatttatttcattttttagaggacatgcagtgaggacatggaggaggaaaatacaacattgctgacagagtttgttctcacaggatttttatatcaaccacagtggaaaatacccctgttcctggcattcttggtaatatagctcatcaccatcatggggaatcttggtctaattgttctcatctggaaagaccctcaccttcatatcccaatgtatttattccgtgggagtttggcctttgtggatgcttggttatcatccacagtgactccaaagatgctgatcaacttcttagctaagagtaagatgatatctctctctgaatgcatggtacaatttttttcctttgtaatcagtgtaaccacagaatgttttatctcggcatcaatggcatatgatcgctatgtagccatttgcaaagctttactttatccagtcattatgaccaacggactatgcatccagctattagtcttgtcatttataggtggccttcttcatgctttaatccatgaaatttttttattcagattaaccttctgtaattccaacataatacaacacttttactgtgacattatcccattgttaaagatttcctgtactgattcttttattaactttctaatggtttttattttcgcagattcaattcaagtttttaccattggaactattcttatatcttatacacttgtcctccttataatcttaaaaaataagtctgtcaaagggatacaaaaagctgtctccacctgtggagctcatctcttatctgtatctttatactatgggccccttgtcttcatgtatgtgggctctgcatccccgcaagcagatgaccaagatatgatggagtctctattttacactgtcatcgttcctttattaaattccatgatctacagcctgagaaacaagcaagtaatagcttcattcacaaaaatgttcaaaagaaatgtttagatctcatacaatctctgttctctgtttactaaaattttcccaagattgttcaagttaaaggtatctgtgttttgctagcattcaaagattttgcaaagtcctagcactttaaggacctaaggtgttaatatctagtaaactaataaatacactcctaatgttattcaacggcatttaaaaatttttagtcatgttcatat

SEQ ID NO: 86 - protein, 270 aa, Homo sapiens
MGNLGLIVLIWKDPHLHIPMYLFRGSLAFVDAWLSSTVTPKMLINFLAKSKMISLSECMVQFFSFVISVTTECFISASMAYDRYVAICKALLYPVIMTNGLCIQLLVLSFIGGLLHALIHEIFLFRLTFCNSNIIQHFYCDIIPLLKISCTDSFINFLMVFIFADSIQVFTIGTILISYTLVLLIILKNKSVKGIQKAVSTCGAHLLSVSLYYGPLVFMYVGSASPQADDQDMMESLFYTVIVPLLNSMIYSLRNKQVIASFTKMFKRNV

SEQ ID NO: 87 - DNA, 1345 bp, Homo sapiens
  source
  (1)..(1345)
  CDS (201)..(1145)
catttttagaattaaaataattgcatttattttgatttcttatatttcccaaaacagtttccatctattacaggaatatgaaagaaaattaaaagggtattgtaataagagtatgtttttctatcaacttccctcccccagtatttgctgtataagtcttagtgaatgctcttttacatttactgcatttcatttcagggatgtcgaatgaggacatggaacaggataatacaacattgctgacagagtttgttctcacaggacttacatatcagccagagtggaaaatgcccctgttcttggtgttcttggtgatctatctcatcactattgtgtggaaccttggtctgattgctcttatctggaatgacccacaacttcacatccccatgtacttttttcttgggagtttagcctttgttgatgcttggatatcttccacagtaactcccaaaatgttggttaatttcttggccaaaaacaggatgatatctctgtctgaatgcatgattcaatttttttcctttgcatttggtggaactacagaatgttttctcttggcaacaatggcatatgatcgctatgtagccatatgcaaacctttactatatccagtgattatgaacaattcactatgcatacggctgttagccttctcatttttaggtggcttcctccatgccttaattcatgaagtccttatattcagattaaccttctgcaattctaacataatacatcatttttactgtgatattataccactgtttatgatttcctgtactgacccttctattaattttctaatggtttttattttgtctggctcaattcaggtattcaccattgtgacagttcttaattcttacacatttgctcttttcacaatcctaaaaaagaagtctgttagaggcgtaaggaaagccttttccacctgtggagcccatctcttatctgtctctttatattatggcccacttatcttcatgtatttgcgccctgcatctccacaagcagatgaccaagatatgatagactctgtcttttatacaatcataattcctttgctaaatcccattatctacagtctgagaaataaacaagtaatagattcattcacaaaaatggtaaaaagaaatgtttagatttcatagtgatatctctcattttcagtaaaaagaattttgcagttagataaggtgttttgctaagtgttcaaagttattgtaaatataattgttttagcattttaatgacttagggttttatacctaataaactccttaaaatatttatatatgttattcaaaagcatccaaggaattttaacctggtgttcatgtta

SEQ ID NO: 88 - protein, 314 aa, Homo sapiens
MSNEDMEQDNTTLLTEFVLTGLTYQPEWKMPLFLVFLVIYLITIVWNLGLIALIWNDPQLHIPMYFFLGSLAFVDAWISSTVTPKMLVNFLAKNRMISLSECMIQFFSFAFGGTTECFLLATMAYDRYVAICKPLLYPVIMNNSLCIRLLAFSFLGGFLHALIHEVLIFRLTFCNSNIIHHFYCDIIPLFMISCTDPSINFLMVFILSGSIQVFTIVTVLNSYTFALFTILKKKSVRGVRKAFSTCGAHLLSVSLYYGPLIFMYLRPASPQADDQDMIDSVFYTIIIPLLNPIIYSLRNKQVIDSFTKMVKRNV

SEQ ID NO: 89 - DNA, 1330 bp, Homo sapiens
  source
  (1)..(1330)
  CDS (201)..(1130)
aaaccaaattcattattatttccatgtatttaaatcctcaaatatagggttcatcaattatagcactgatcaaaaaaaattaagagggctcgataattacatagtttatttcaacacctcttccccaatttcaactcacaattccattgcaaatgttcctttacctttgcttcatttttcagaggacatgcagtgaggagatggaagaggaaaatgcaacattgctgacagagtttgttctcacaggatttttacatcaacctgactgtaaaataccgctcttcctggcattcttggtaatatatctcatcaccatcatggggaatcttggtctaattgttctcatctggaaagaccctcaccttcatatcccaatgtacttattccttgggagtttagcctttgtggatgcttcgttatcatccacagtgactccgaagatgctgatcaacttcttagctaagagtaagatgatatctctctctgaatgcatggtacaatttttttcccttgtaaccactgtaaccacagaatgttttctcttggcaacaatggcatatgatcgctatgtagccatttgcaaagctttactttatccagtcattatgaccaatgaactatgcattcagctattagtcttgtcatttataggtggccttcttcatgctttaatccatgaagctttttcattcagattaaccttctgtaattccaacataatacaacacttttactgtgacattatcccattgttaaagatttcctgtactgattcctctattaactttctaatggtttttattttcgcaggttctgttcaagtttttaccattggaactattcttatatcttatacaattatcctctttacaatcttagaaaagaagtctatcaaagggatacgaaaagctgtctccacctgtggggctcatctcttatctgtatctttatactatggccccctcaccttcaaatatctgggctctgcatctccgcaagcagatgaccaagatatgatggagtctctattttacactgtcatagttcctttattaaatcccatgatctacagcctgagaaacaagcaagtaatagcttcattcacaaaaatgttcaaaagcaatgtttagatctcatacaatctctcttctctatttactaaaattgtcccaagattgtgcaagttagaggtgtctatgtcttgccagcattcaaagatgatgcaaagtcctagcactttaatggcctaaggttttagtacctattaaactaataaatatatccctaatgttattcaatagcacttaagaaattttaatcatgttcatat

SEQ ID NO: 90 - protein, 309 aa, Homo sapiens
MEEENATLLTEFVLTGFLHQPDCKIPLFLAFLVIYLITIMGNLGLIVLIWKDPHLHIPMYLFLGSLAFVDASLSSTVTPKMLINFLAKSKMISLSECMVQFFSLVTTVTTECFLLATMAYDRYVAICKALLYPVIMTNELCIQLLVLSFIGGLLHALIHEAFSFRLTFCNSNIIQHFYCDIIPLLKISCTDSSINFLMVFIFAGSVQVFTIGTILISYTIILFTILEKKSIKGIRKAVSTCGAHLLSVSLYYGPLTFKYLGSASPQADDQDMMESLFYTVIVPLLNPMIYSLRNKQVIASFTKMFKSNV

SEQ ID NO: 91 - DNA, 2487 bp, Homo sapiens
  source
  (1)..(2487)
  CDS (201)..(240)
  CDS (845)..(1684)
  CDS (2253)..(2287)
tctattttcactagagaccgggtttcaccacgttggccagggtggtctggaacccctgacctcaggtgataaatcagcctcagcctcccaaagtgctgggattacaggtgtgagccatcatgctcggacaagagttacatattcaattcatttagaaacacagctcccatatttgagtgtgcatgtacctttatgaagaaatgatgtcagaaaacctaaggatgataataaatatgaaaagtaactggaatgttaaagggtcttccaattaagaactctaaggtttgatttcatttttagataatgcggtcctagctcttgtatcgtccttttaaatattctacatcaaaggaatttgtagcatcgtgtcagaatgaaatagagtatattccactgcttcttaatttctttcaattagactgagatctttttcttgaagagagaagaatatgtttattgcattttattttctctgaaaagagtaggccatgttttactgagatcatggatttgttatatgttacgttttggtcttctaacattcttcagtggattttctctaaagtagtatgtacagaaagagttgaagagcaaaaaggtaaatcatgtaataattctgagatttttgggtttgtcacaactgagaaatattgctgatggtgtatggccctcaagtgtgaaaatgttccttgtgaattgcttgcatccaaaatatacacacagcattaagcgctggtttttatcttttatttttccaatcctcttttcttctcaaggcgtccaagtcacacagagccacggaatctcacgggtgtctgagaattcctcctcctgggaatctcagaggatccagaactgcagcccgtcctcgctgggctgaccctgtccatgtacctggtcacggtgctgaggaacctgctcatcatcctggctgtcagctctgactcccacctccacacctccatgtacttcgtcctctccaacctgcgctgggttgacatcggtttcacctcggccacggttcccaagatgattgtggacatgcagtcgcatagcagagtcatctcttatgcgggctgcctgacacagatgtctttcttggtcttttttgcatgtatagaagacatgctcctgactgtgatgtcctatgaccaatttttggccatctgtcaccccctgcactacccagtcatcgtgaatcctcacttctgtgtcttcttagttttggtgtcctttttccttagcctgttggattcccagctgcatagatggattgtgttacaattcaccttcttcaagaatgtggaaatctctaattttgtctgtgagccatctcaacttctcaaccttgcctgttctgacagcgtcatcaatatcatattcatatatttagatagtactatgtttggttttcttcccatttcagggatccttttgtcttactataaaattgtcccctccattctaaggatgtcattgtcagatgtgaagtataaagccttctccacctgtggctctcacctggcagttttttgcttattttacggagcaggcattggcgtgtacctgacttcagctgtgtcaccaccttccggcaatggtgtggtggcttcagtgatgtacactgtggtcacccccatgctgaaccctttcatctacagcctgagaaacagggacattcaaagtgccccgtggaggctgcgcagcacaacagttgaatctcatgatctcttccatcctttttcttgtgtctgtaagaaagggcaaccacattaaatccctacatctgcaaatcctgccccttagtcacattttttttgttgcttgatggcttttattcctttccacatttgctatgtgaatattgctttcttcgttatgcctttaactggaatgggtgagtattctggaatcctttgtttagcagaaacctcttgactgagtcctctatacctaggcggcctcctttagtttctgagcaataagcctgtcatctaggtggaatcacaaccatcacttatatacacgaagtcctcacttcactttggaattccctgaaaactgactttatggaaacaatgcacagcaggtcctccaacaccattggtgcgttcaaagttgtctagttataatgttgatgaggaataagtggtttcactatccataactttgcttaaaggtgaagattccaagagactttcaaagatgttaagtgaggacatactgtacatcaaattcatatcctcttccagagttcatgtggaatttctttataaactgcttctagagaatctatttaggcaggctatgtgtagagatccatgttacccatcctcaatcttggctttgagtcaaatcacctggtgagcttacaaatgatgagccctgggtctcattagctgagattctgatctacttgggcctgtgtgggtatgtggcttttttttttttttttaaagcactagaggtggttccaatgtttttaga

SEQ ID NO: 92 - protein, 304 aa, Homo sapiens [sequence omitted]

SEQ ID NO: 93 - DNA, 1441 bp, Homo sapiens
  source
  (1)..(1441)
  CDS (201)..(1241)
ttgacacttcccagaataattctggcagtattggtagctttgaatgtgctgctgtgtagtcctaagatatattgggtttctcaatgtctcaattttcataatcaataaaactagtacaatatccatactgttttgcttactgagagtattctaagaatcaaacacaatatcggaagcaaatttgtattgaaaatttgtagatgtacagatttacagattttgatgtatcaaacatttcaatttacctgaatcatgtccttttctatactacccagcaggcaggtgacctagaacacatggagacaagaaattactctgccatgactgaattctttctggtggggctttcccaatatccagagctccagctttttctgttcctgctctgcctcatcatgtacatgataatcctcctgggaaatagcctcctcattatcatcaccatcttggattctcgcctccatactcccatgtatttctttcttggaaacctctcattcttggacatctgttacacatcctcatccattcctccaatgcttattatatttatgtctgagagaaaatccatctccttcattggctgtgctctgcagatggttgtgtcccttggcttgggctccactgagtgtgtcctcctggctgtgatggcctatgaccactatgtggccatctgcaacccactgaggtactccatcatcatgaacggagtgctgtatgtgcaaatggctgcatggtcctggatcataggctgtctgacctccctattgcaaacagttctgacaatgatgttgcctttctgtgggaataatgtcattgatcatattacctgtgaaattttggcccttctaaaacttgtttgttcagatatcaccatcaatgtgcttatcatgacagtgacaaatattgtttcactggtgattcttctactgttaattttcatctcctatgtgtttattctctcttccatcctgagaattaattgtgctgagggaagaaagaaagccttctctacctgttcagcgcactcgattgtggtcatcttattctacggttcagccctttttatgtacatgaaacccaagtcaaagaacactaatacatctgatgagattattgggctgtcttatggagtggtaagcccaatgttaaatcccatcatctatagcctcaggaataaagaggtcaaagaggctgtaaagaaagtcctgagcagacatctgcatttattgaaaatgtgaaaaaccttgggcatgcgatatcctcaatggggcaagagagcttgtcttttgtatttagatactgcaaaacctactgtcacgagagcttgtgtgtttgcaaaaccaactattagattcccattcttttcaacgtagaattttcatgctcatgtaaccttcttaatagtgccttgtctgctgggtttgtagctgtaagcagt

SEQ ID NO: 94 - protein, 346 aa, Homo sapiens
MYRFTDFDVSNISIYLNHVLFYTTQQAGDLEHMETRNYSAMTEFFLVGLSQYPELQLFLFLLCLIMYMIILLGNSLLIIITILDSRLHTPMYFFLGNLSFLDICYTSSSIPPMLIIFMSERKSISFIGCALQMVVSLGLGSTECVLLAVMAYDHYVAICNPLRYSIIMNGVLYVQMAAWSWIIGCLTSLLQTVLTMMLPFCGNNVIDHITCEILALLKLVCSDITINVLIMTVTNIVSLVILLLLIFISYVFILSSILRINCAEGRKKAFSTCSAHSIVVILFYGSALFMYMKPKSKNTNTSDEIIGLSYGVVSPMLNPIIYSLRNKEVKEAVKKVLSRHLHLLKM

SEQ ID NO: 95 - DNA, 1347 bp, Homo sapiens
  source
  (1)..(1347)
  CDS (201)..(781)
  CDS (877)..(1147)
agatcataacagatatatatatatatatctttaatatttagccatctaaaagccaaaaatgtaaaacttgtgaggttgaatcatgcaaaacaacaatactctccctccagatattcttggcttggtaagaaaattctgagctggaaggattctgattgtgattagtgttccatacattattttgtcttttgtctgaagcaatgctgaatacaacctcagtcactgaatttctccttttgggagtgacagacattcaagaactgcagccttttctcttcgttgttttccttaccatctacttcatcagtgtggctgggaatggagccattctgatgattgtcatctctgatcctagactccattcccctatgtatttcttcctgggaaacctgtcctgcctggacatctgctactccagcgtaacactgccaaaaatgctgcagaacttcctctctgcacacaaagcaatttctttcttgggatgcataagccaactccatttcttccacttcctgggcagcacagaggccatgttgttggccgtgatggcatttgaccgctttgtggctatttgcaagccacttcgctacactgtcattatgaaccctcagctctgtacccagatggccatcacaatctggatgattggttttttccatgccctgctgcactccctaatgacctctcgcttgaacttctgtggttctaaccgtatctatcacttcttctgtgatgtgaagccattgctaaagctgagcttaatcagtggctgctcagtactgtcacagggacaatcgccatgggccccttctttctcacattactctcctatttctacattatcacccatctcttcttcaagactcattcttttagcatgctccgcaaagcactgtccacttgtgcctcccacttcatggtagttattcttttgtatgcacctgttctcttcacctatattcatcatgcctcagggacctccatggaccaggaccggatcactgccatcatgtatactgtggtcactccagtactaaacccactgatctacactttgaggaacaaggaagtgaaaggggcctttaatagagcaatgaaaaggtggctttggcctaaagaaatcttgaagaactcttctgaagcataaataaacaattaaaaagatgagtttgtaattacattgtttcttaaattatttagaaatgtacaacagagggaactggataaaacaaaaatatatggaaaaatatgctgtagttgtatttaacaatgctttcctggattatataagggacatttgaatgaatgggatactagccatggaactctactgctgactatgttttg

SEQ ID NO: 96 - protein, 283 aa, Homo sapiens
MLNTTSVTEFLLLGVTDIQELQPFLFVVFLTIYFISVAGNGAILMIVISDPRLHSPMYFFLGNLSCLDICYSSVTLPKMLQNFLSAHKAISFLGCISQLHFFHFLGSTEAMLLAVMAFDRFVAICKPLRYTVIMNPQLCTQMAITIWMIGFFHALLHSLMTSRLNFCGSNRIYHFFCDVKPLLKLSLISGCSVLMLRKALSTCASHFMVVILLYAPVLFTYIHHASGTSMDQDRITAIMYTVVTPVLNPLIYTLRNKEVKGAFNRAMKRWLWPKEILKNSSEA

SEQ ID NO: 97 - DNA, 1777 bp, Homo sapiens
  source
  (1)..(1777)
  CDS (201)..(788)
  CDS (1287)..(1577)
attttacacttagttggataaacagataaaacattagaacaatggtgaaatataaaatacttatattttctttcaatcccattatgtacttttcctagctatatatactgctaatattatatctaaatatattcattatggcttccaaaatgttgactattttttaaattttcacagctgatattcagaaaatagcaaaaatgatcaatgatagttactttggttggcttatgctccttgggttccctgggaagcctcagctggagatgatcatctctggggttgtctttttcttctatgcaatttctttgatgggaaatatggtccttatcctgctgccattactggataaacatctccaaacccccatatatttctttcttagaaatctggctatcttggatctttgttacaccacaaatatagtcccacagatgttggtcaatgcctggggtaaagacaagaaaatcacttttggtggctgtgcttttcaacttttcactaatgtgacgctatgcacggttgaatgtatgcttctggctgtgatgtcatatgacccattcaatgctgtctgcaagcctctggactatatgaccataatgaacccccaactctgtcaaggcctggtggccatgacctggttaattggtgtcactaattgcatgatactttccccctgtcctgtgagtcttcctcgatgcggagaccaccacctggatcactatttttgtgaaatatctgcaatggtcaaaattgcatgtggggctaccacagtcatggaggaaactgtaagagttaaagaaagaagaaagaaacacgaaacgtggctggcagttaaagacaggttttccttaattaaaacctgacagcactcctggctgatttcatatattggttttagggtgagggggctaagaacatatattggttttagggtgagggggcttattacaagcttggaatgtttatgtgtgtggagaagtttatggcggggttggaatctctctgggaagaggggaggttatcttggggcagacatctttctggcctggaggggggttatctctgggctagcatcttcccagcttgagagggcttatctagaggctagcatgactctggtcggggaggagtttggaaggtttctggttgggatgttatttgtggtttatggtcgtgctgaccttagccattaggctgaggccctttggattaggtggttttttattaaaatgaactatagaataaggggcttgtccaagatggtgatgctcctgctctgtcagaaaccttatttgcattgtgttgttgttgttgttttcattttccttgcatcacttcttctcattcttgtgtcatatggcttcattgctgtggctgtactcaagatcaagtctgcagcaggaagacaaaaagcatttgggacctgtttctcccatctcattgtggtatccatcttctatgggactgttagatatatgtatatagagccaggaaacagtccatctcaggatgagggcaaacttctccatatattttactccattgttactcccaccttgaacccatcccactaaggaataaggagttcaagtgggccatgaaaaggcttattggaaaagaaaaaggttctggagacacaataggtcactaacatctttttacaagaaattcctggccgggcacggtggctaacgcctgtaatcccagcactgtgggaggccgaggcagggggatcacaaggtcaggagatcgagaccctcctggctaacatggt

SEQ ID NO: 98 - protein, 292 aa, Homo sapiens [sequence omitted]

SEQ ID NO: 99 - DNA, 967 bp, Homo sapiens
  source
  (1)..(967)
  CDS (201)..(767)
actttttatatcagtacgagctttataattcttcttttgttaagttcattactactaatggttaaattgtcctacaattaaatgatggcaagcccttcaaactggattttattttttttacgtatcctgatgttttttggagcatttgtttactgctttttgagtttacctgattttttttttctctcaggtaataggaaatgaatgatgatggaaaagtcaatgctagctctgaggggtactttattttagttggattttctaattggccttatctggaagtagttctctttgtggttattttgatcttctgcttgatgacactgataggaaacctgttcatcatcatcctgacgtacctggactcccatctccatactcccttgtatttcttcctttcaaatctctcatttctggatctctgctacaccaccagctctatccctcagttgctggtcagtctctggggtgtggaaaagaccatttcttatgctggttgcatggttcaactttacttttttctcacactgggaaccacagagtgtgtcctactggtggtgatgtcctatgaccgttatgcagctgtgtgtagacctttgcattacactgtcctcatgcactctcgtttctgccacttgttggctgtggcttcttgggtaagtggttttacaaacccagcacttcattcctccttcaccttctgggtacctctgtgtggacaccgccaaatagatcactttttctgtgaagttccggcacttttatgattatcatttgtcaatacccgtgaaaataaactgaccctcatgatcacaagctccatttttgttctgctacttctcaccctcattttcacttcctatggtgctattgcccaggctgtactgaggatgcagtcaaccactgggcttcagaaagtatttggaacatgtggagctcatcatatggttgtatctctctttttcat

SEQ ID NO: 100 - protein, 188 aa, Homo sapiens
MNDDGKVNASSEGYFILVGFSNWPYLEVVLFVVILIFCLMTLIGNLFIIILTYLDSHLHTPLYFFLSNLSFLDLCYTTSSIPQLLVSLWGVEKTISYAGCMVQLYFFLTLGTTECVLLVVMSYDRYAAVCRPLHYTVLMHSRFCHLLAVASWVSGFTNPALHSSFTFWVPLCGHRQIDHFFCEVPALL

SEQ ID NO: 101 - DNA, 1207 bp, Homo sapiens
  source
  (1)..(1207)
  CDS (201)..(1007)
tcattttcagataaaaactcaaattttctgacctttctatcacacttcagtccttgacagacttccattaaggaatgggagtcaaccaatcatgggtcacagaattcatcctggtgggattccagctcagtgccgagatggaagtgctcctcttttagatcttctccctgttatacatcttcagcctgctggcaaatggcatgatcttgggactcatctgtctggaccacattctgcctacccccatgtacttcttcctctcacacctggccatcattgacatgtcctatgcttccaacaatgttcccaagatgttggcaaatctgatgaacaagaaaagaaccatctcctttcttccatgcataatgcagacctatttgcatttctcttttgctgctacagagtgtctgattttggtggtgatgtcctatgataggtatgtggccatttgccaccctctccagtacactgtcatcatgagctggagagtgtgcacgatcctggctctcacatcctggtcatgtgggtttgccctgtccctggtacatgcaattcttcttctaaggttgccgttctgtgggccccgggatgtgaaccacctcttctgtgaaattctgtctgtcctcaagctggcctgttctgacacctgggttaaccaagtggtcatatttgctacctgtgtgtttgtcttagttggacctctttgtttgatgcttgtctcctacatgcacatcctctgggccatcctaaagatccagacaaaggaaggccgcataaaggccttctcgacctgctcctcccacctgtgtgtggttggactcttctttggcatagccatggtggtttacatagtcccagactctaatcaacgagaggagcaggagaaaatgctgtccctgtttcacagtgtcttgaacccaattctgaaccccctgatctacagtctgaggaatgctcaggtgaagggcgccctccacagagcactgcagaggacgctgtctatgtaaggagtggacagagtgttagttggataggactttgcttttaaacaagtggtttgctaaagcaaaaactgataaatttttttcagttagaagtttgatataaatatgggaatttttcgaattctggctctgaaaatacgacaagattacagtgaaaaaaacagcacattatattttacactacctttcccactgaaaactct

SEQ ID NO: 102 - protein, 268 aa, Homo sapiens
MILGLICLDHILPTPMYFFLSHLAIIDMSYASNNVPKMLANLMNKKRTISFLPCIMQTYLHFSFAATECLILVVMSYDRYVAICHPLQYTVIMSWRVCTILALTSWSCGFALSLVHAILLLRLPFCGPRDVNHLFCEILSVLKLACSDTWVNQVVIFATCVFVLVGPLCLMLVSYMHILWAILKIQTKEGRIKAFSTCSSHLCVVGLFFGIAMVVYIVPDSNQREEQEKMLSLFHSVLNPILNPLIYSLRNAQVKGALHRALQRTLSM

SEQ ID NO: 103 - DNA, 985 bp, Homo sapiens
  source
  (1)..(985)
  CDS (201)..(785)
tggactccagactccacacccccatgtacttcttcctctcacacctggccgtcgtcaacatcgcctatgcctgcaacacagtgccccagatgctggtgaacctcctgcatccagccaagcccatctcctttgctggctgcatgacatagacctttctctttttgagttttgcacatactgaatgcctcctgttggtgctgatgtcctacgatcggtacgtggccatctgccaccctctccgatatttcatcatcatgacctggaaagtctgcatcactctggccatcacttcctggacatgtggctccctcctggctatggtccatgtgagcctcatcctaagactgcccttttgtgggcctcgtgaaatcaaccacttcttctgtgaaatcctgtctgtcctcaggctggcctgtgctgatacctggctcaaccaggtggtcatctttgcagcctgcatgttcatcctggtgggaccactctgcctggtgctggtctcctactcacacatcctggcggccatcctgaggatccagtctggggagggccgcagaaaggccttctccacctgctcctcccacctctgcgtagtgggactcttctttggcagcgccatcgtcatgtacatggcccctaagtcccgccatcctgaggagcagcagaaggtcctttttctattttacagttctttcaacccgatgctaaaccccctgatttacaacctgaggaatgtagaggtcaagggtgccctgaggagagcactgtgcaaggaaagtcattcctaagaggtgtgacatttgaactgccagcctcagttgtcacgtggactcttgatgcccaattattgcctcaatccagaaaagtttacttctctttatctgtgctttactgacagaagggcaagtcttctctcgttttttgcagataaaattttagatgtgttgcattcattgggtttctatgagatgtggttttatcagacaat

SEQ ID NO: 104 - protein, 194 aa, Homo sapiens
MSYDRYVAICHPLRYFIIMTWKVCITLAITSWTCGSLLAMVHVSLILRLPFCGPREINHFFCEILSVLRLACADTWLNQVVIFAACMFILVGPLCLVLVSYSHILAAILRIQSGEGRRKAFSTCSSHLCVVGLFFGSAIVMYMAPKSRHPEEQQKVLFLFYSSFNPMLNPLIYNLRNVEVKGALRRALCKESHS

SEQ ID NO: 105 - DNA, 1333 bp, Homo sapiens
  source
  (1)..(1333)
  CDS (201)..(1133)
tacatgtatgtattcttattattccattgatacaatgcgattttttctcatttttatgagcacacttggttagttttggcaacatatctgagaataaattctagaaaattcattcaaagttataatttctaagtgctccctctgtgcatctttgactggcccacagctctgaccttcctgtcctagatgtccacaagagcatggaaggcaacaagacatggatcacagacatcaccttgccgcgattccaggttggtccagcactggagattctcctctgtggacttttctctgccttctatacactcaccctgctggggaatggggtcatctttgggattatctgcctggactgtaagcttcacacacccatgtacttcttcctctcacacctggccattgttgacatatcctatgcttccaactatgtccccaagatgctgacgaatcttatgaaccaggaaagcaccatctccttttttccatgcataatgcagacattcttgtatttggcttttgctcacgtagagtgtctgattttggtggtgatgtcctatgatcgctatgcggacatctgccaccccttacgttacaatagcctcatgagctggagagtgtgcactgtcctggctgtggcttcctgggtgttcagcttcctcctggctctggtccctttagttctcatcctgagcctgcccttctgcgggcctcatgaaatcaaccacttcttctgtgaaatcctgtctgtcctcaagttggcctgtgctgacacctggctcaaccaggtggtcatctttgcagcctgcgtgttcatcctggtggggccactctgcctggtgctggtctcctacttgcgcatcctggccgccatcttgaggatccagtctggggagggccgcagaaaggccttctccacctgctcctcccacctttgcgtggtgggactcttctttggcagcgccattgtcacgtacatggcccccaagtcccgccatcctgaggagcagcagaaagttctttccctgttttacagccttttcaatccaatgctgaaccccctgatatatagcctaaggaatgcagaggtcaagggcgccctgaggagggcactgaggaaggagaggctgacgtgagacatctcaaagggaaccatggggagggagccttgctccctgcaaaatatagaagttggctttttttttttgtcttctgctagaataaatgctaccttaaactggaatactatagacctatacatataaactgaagacacaaatcttttagaaaagataggtaaatgcatttataatactggataggcataaattcataa

SEQ ID NO: 106 - protein, 310 aa, Homo sapiens
MEGNKTWITDITLPRFQVGPALEILLCGLFSAFYTLTLLGNGVIFGIICLDCKLHTPMYFFLSHLAIVDISYASNYVPKMLTNLMNQESTISFFPCIMQTFLYLAFAHVECLILVVMSYDRYADICHPLRYNSLMSWRVCTVLAVASWVFSFLLALVPLVLILSLPFCGPHEINHFFCEILSVLKLACADTWLNQVVIFAACVFILVGPLCLVLVSYLRILAAILRIQSGEGRRKAFSTCSSHLCVVGLFFGSAIVTYMAPKSRHPEEQQKVLSLFYSLFNPMLNPLIYSLRNAEVKGALRRALRKERLT

SEQ ID NO: 107 - DNA, 1333 bp, Homo sapiens
  source
  (1)..(1333)
  CDS (201)..(1133)
aactacagattttaaatatctctaaaagccaaatttgtaagtcaacatcataggactttgggctggatgtacccatgaaatactgatttgtggcctctggcataaaattcatgctctataatgaaatgttttttattttctcccattagctgtgaaatttctgtcttaagtacatcacaagatttttctgtcacgagaacatggaaagcaatcagacctggatcacagaagtcatcctgttgggattccaggtggacccagctctggagttgttcctctttgggtttttcttgctattctacagcttaaccctgatgggaaatgggattatcctggggctcatctacttggactctagactgcacacacccatgtatgtcttcctgtcacacctggccattgtggacatgtcctatgcctcgagtactgtccctaagatgctagcaaatcttgtgatgcacaaaaaagtcatctcctttgctccttgcatacttcagacttttttgtatttggcgtttgctattacagagtgtctgattttggtgatgatgtgctatgatcggtatgtggcaatctgtcaccccttgcaatacaccctcattatgaactggagagtgtgcactgtcctggcctcaacttgctggatatttagctttctcttggctctggtccatattactcttattctgaggctgcctttttgtggcccacaaaagatcaaccactttttctgtcaaatcatgtccgtattcaaattggcctgtgctgacactaggctcaaccaggtggtcctatttgcgggttctgcgttcatcttagtggggccgctctgcctggtgctggtctcctacttgcacatcctggtggccatcttgaggatccagtctggggagggccgcagaaaggccttctctacctgctcctcccacctctgcgtggtggggcttttctttggcagcgccattgtcatgtacatggcccccaagtcaagccattctcaagaacggaggaagatcctttccctgttttacagccttttcaacccgatcctgaaccccctcatctacagccttaggaatgcagaggtgaaaggggctctaaagagagtcctttggaaacagagatcaatgtgaagaatcatttgagatatcctgagtgtgtaagcatggttctcatgaccctgggtcctgaaatttcctttttaattctttaatttaccacacccaatactgtttatctttagacttcttataaaaagagaaactggcctggcgtggtggctgaagcctgtaatcccaacactttgggaggctgacctgggcggattacctga

SEQ ID NO: 108 - protein, 310 aa, Homo sapiens
MESNQTWITEVILLGFQVDPALELFLFGFFLLFYSLTLMGNGIILGLIYLDSRLHTPMYVFLSHLAIVDMSYASSTVPKMLANLVMHKKVISFAPCILQTFLYLAFAITECLILVMMCYDRYVAICHPLQYTLIMNWRVCTVLASTCWIFSFLLALVHITLILRLPFCGPQKINHFFCQIMSVFKLACADTRLNQVVLFAGSAFILVGPLCLVLVSYLHILVAILRIQSGEGRRKAFSTCSSHLCVVGLFFGSAIVMYMAPKSSHSQERRKILSLFYSLFNPILNPLIYSLRNAEVKGALKRVLWKQRSM

SEQ ID NO: 109 - DNA, 1357 bp, Homo sapiens
  source
  (1)..(1357)
  CDS (201)..(1157)
agaggatttttttaatttcatgagcataattgagttggttccagtaacatatttgaaaacaaattcaacaaagaatccattcaaaataatacatttcttaatgctccctctgaaacactcagcaaatattgtgcatctttgacccacagctctgaccttcctgtcctagatgagggtttgtctttctctgccacaagagcatggaaggcaaccagacatggatcacagacatcaccctgctgggattccaggttggtccagcactggcgattctcctctgtggactcttctctgtcttctatacactcaccctgctggggaatggggtcatctttgggattatctgcctggactctaagcttcacacacccatgtacttcttcctctcacacctggccatcattgacatgtcctatgcttccaacaatgttcccaagatgttggcaaacctaatgaaccagaaaagaaccatctcctttgttccatgcataatgcagacttttttgtatttggcttttgctgttacagagtgcctgattttggtggtgatgtcctatgataggtatgtggccatctgccaccctttccagtacactgtcatcatgagctggagagtgtgcacgatcctggttctcacgtcctggtcatgtgggtttgccctgtccctggtacatgaaattctccttctaaggttgcccttctgtgggccccgggatgtgaaccacctcttctgtgaaattctgtctgtcctcaagctggcctgtgctgacacctgggttaaccaagtggtcatatttgctacctgtgtgtttgtcttagtcgggcctctttccttgattctggtctcctacatgcacatcctcggggccatcctgaagatccagacaaaggagggccgcataaaggccttctccacctgctcctcccacctgtgtgtggttggactattctttggcatagccatggtggtttacatggtcccagactctaatcaacgagaggagcaggagaaaatgctgtccctgtttcacagtgtctttaatccaatgctgaaccccctgatctacagcctgaggaatgctcagttgaagggcgccctccacagagcactccagaggaagaggtccatgagaacggtgtatgggctttgcctttaaaacatgtggtttgctgaagcaagaattttgaatatattttgtagaagaagtttaatataaaaatggtgagtgattgaattcaagctttgaaaatagggcaatattcaatggaatgtatgttctctaaaatcgaggaatcatctcagtagataggagagcaaaattatcagaatatttagcctttcctttaaaagtgttag

SEQ ID NO: 110 - protein, 318 aa, Homo sapiens
MEGNQTWITDITLLGFQVGPALAILLCGLFSVFYTLTLLGNGVIFGIICLDSKLHTPMYFFLSHLAIIDMSYASNNVPKMLANLMNQKRTISFVPCIMQTFLYLAFAVTECLILVVMSYDRYVAICHPFQYTVIMSWRVCTILVLTSWSCGFALSLVHEILLLRLPFCGPRDVNHLFCEILSVLKLACADTWVNQVVIFATCVFVLVGPLSLILVSYMHILGAILKIQTKEGRIKAFSTCSSHLCVVGLFFGIAMVVYMVPDSNQREEQEKMLSLFHSVFNPMLNPLIYSLRNAQLKGALHRALQRKRSMRTVYGLCL

SEQ ID NO: 111 - DNA, 1051 bp, Homo sapiens
  source
  (1)..(1051)
  CDS (201)..(851)
gacgttccttgtgaattgcttgcatctagcattaacggctggtttttatcttttatttttccaatcctctttccttctcaaggtgtccaagacacacagagccacggaatctcacaggtgtctgagaattcctcctcctgggactctcagaggatccagaactgcagccggtcctcgctttgctgtccctgtccctgtccatgtatctggtcacggtgctgaggaacctcctcagtatcctggctgtcagctctgactcccccctccacacccccatgtacttcttcctctccaacctgtgctgggctgacatcggtttcacctcggccatggttcccaagatgattgtggacatgcagtcgcatagcagagtcatctctcatgagggctgcctgacacagatgtttttcttggtcctttttgcatgtatagaaggcatgatcctgactgtgatggcctatgactgctttgtagccatctgtcgccctctgaattacccagtcatcgtgaatcctcacctctgtgtcttcttcattttgatgtcctttttccttagcctgttggattcccagctgcacagttggattgtgttacaattcacaatcatcaagaatgtggaaatctctaattttgtctgtgacccctctcaacttctcaaacttgcctgttctgacagcgtcatcaatagcatattcacatatttccatagtactatgtttgcttttcttcccatttcagcaatccttttatcttactataaaatcgtcacctccattctcaggatttcatcttcagatgggaagtataaagccttctccacctgtgactctcacctagcagttgtttgctgattttatggaacagacattgggatgtacctgacttcagctgtgtcaccacctcccaggaatggtgtagtggcgtcaatgatgtacgctgtggtcacccccatgctgaaccttttcatctacagcctgagaaacagggacatacaaagtgccttgcggaggctgcgcagcagaacagtcgaatctcatgatctgttccatcc

SEQ ID NO: 112 - protein, 216 aa, Homo sapiens
MYLVTVLRNLLSILAVSSDSPLHTPMYFFLSNLCWADIGFTSAMVPKMIVDMQSHSRVISHEGCLTQMFFLVLFACIEGMILTVMAYDCFVAICRPLNYPVIVNPHLCVFFILMSFFLSLLDSQLHSWIVLQFTIIKNVEISNFVCDPSQLLKLACSDSVINSIFTYFHSTMFAFLPISAILLSYYKIVTSILRISSSDGKYKAFSTCDSHLAVVC

SEQ ID NO: 113 - DNA, 2027 bp, Homo sapiens
  source
  (1)..(2027)
  CDS (201)..(348)
  CDS (1022)..(1827)
ggaaggatggattcagttaccagataggagagtagctgtgccacagctgctaggagctgcagttgtactggctgtgcaagaaaacacccatcgaggtcaggagtcactggaaaagttgttaggccggtatttctacatctcgcctttgtcaacccttgccaaaacggtgaggcagcggtgtgttacctgctgacagcaagatgggagtcaaggtccagccgttccgcccggcatacgagcttgtggagcagccccctttgaaggtctccaggtggacttcaccttcacggagatgccaaagtgtggaggtaacaagcatgtactggttcttgggcgtacctactctgggtgggtggaggcctatccaacacgaactgagaaagctggtgaagtaatccctgtgcttcttcgagatgtgattcctagatttcgaccgcccttatggatcggctcagacaacgggcctgcgtttttggctgccttggtacagaaaacggcaaaggtattggggatcgcacggaaactacatgccgcctcccggcctcagagttccggaaaggtggagaggatgaatcggactatcaaaaatagtactactgtcttccccgctggatatttaaaacaacagcacaaggggcgtcaaaccacctgctaaattggaggcaatgttatcctctcccctcctcccccggccccggatattagagacaacaacacagaggtgatgtacacccactgctttattgtgagtaatatcatcctctcccttcttggatagtaggaacagtatcacactgtgcatgtaggcctgtcgcgaaattcaatggaatgtcatcctgcgcctccctggatatgacgaacaatatcacgggggatgtacaacttctgagatattgggagtgatgtcatcctctcccctctggaagttagggacaatatcacaggggtagtgtacaccctctgggatgttgggactaatatctcacaggtgtctgagaattcctcctcctgggactctcagaggatccacaactgcagccggccctcgctttgctgtccctgtccctgtccatgtatctggtcacggtgctgaggaacctgttcagcatcctggctgtcagctctgactgccccctccacacccccatgtacttcttcctctccaacctgtgctggcctgacatcggtttcacctcggccatggttcccaagatgattgtggacacgcagtcgcatagcagagtcatctctcatgcgggctgcctgacacagatgtctttcctgctccttgttgcatgtatagaaggcatgctcctgactgtgatggcctatgactgctttgtagccatctgtcgccctctgcactacccagtcatcgtgaatcctcacctctgtgtctttttcgttttggtgtcctttttccttagcctgttggattcccagctgcacagttggattgtgttacaattaaccatcatcaagaatgtggaaatctctaatttggtctgtgacccctctcaacttctcaatcttgcctgttctgacagcgtcatcaataacatattcatatatttcgatagtactatgtttggttttcttcccatttcagggatctttttgtcttactataaaattgtcccctccattctaaggatttcatcgtcagatgggaagtataaagccttctccacctgtggctgtcatctagcagttgtttgctggttttatggaacaggcattggcatgtacctgacttcagctgtgtcaccaccccccaggaatggtgtggtggcttcagtgatgtacgctgtggtcaccccatgctgaaccttttcatctgcagcctgagaaacagggacatacaaagtgccctgcggaggctgggcagcagagcattcgaatctcatgatctgttccatcctttttcttgtgtgggtgagaaagggcaatcacattaaatctctttatctgcaaatcctgcccctcagtcacattctttttgtggcttgatggcttttattcctttc

SEQ ID NO: 114 - protein, 317 aa, Homo sapiens [sequence omitted]

SEQ ID NO: 115 - DNA, 2021 bp, Homo sapiens
  source
  (1)..(2021)
  CDS (201)..(342)
  CDS (1016)..(1821)
ggaaggatggattcagttaccagataggagagtagctgtgccacagctgctaggagctgcagttgtactggctgtgcaagaaaacacccatcgaggtcaggagtcactggaaaagttgttaggccggtatttctacatctcgcctttgtcaacccttgccaaaacggtgaggcagcggtgtgttacctgctgacagcaagatgggagtcaaggtccagccgttccgcccggcatacgagcttgtggagcagccccctttgaaggtctccaggtggacttcacggagatgccaaagtgtggaggtaacaagcatgtactggttcttgggcgtacctactctgggtgggtggaggcctatccaacacgaactgagaaagctggtgaagtaatccctgtgcttcttcgagatgtgattcctagatttcgaccgcccttatggatcggctcagacaacgggcctgcgtttttggctgccttggtacagaaaacggcaaaggtattggggatcgcacggaaactacatgccgcctcccggcctcagagttccggaaaggtggagaggatgaatcggactatcaaaaatagtactactgtcttccccgctggatatttaaaacaacagcacaaggggcgtcaaaccacctgctaaattggaggcaatgttatcctctcccctcctcccccggccccggatattagagacaacaacacagaggtgatgtacacccactgctttattgtgagtaatatcatcctctcccttcttggatagtaggaacagtatcacactgtgcgtgtaggcctgtcgcgaaattcaatggaatgtcatcctgcgcctccctggatatgacgaacaatatcacgggggatgtacaacttctgagatattgggagtgatgtcatcctctcccctctggaagttagggacaatatcacaggggtagtgtacaccctctgggatgttgggactaatatctcacaggtgtctgagaattcctcctcctgggactctcagaggatccagaactgcagccggccctcgctttgctgtccctgtccctgtccatgtatctggtcacggtgctgaggaacctgttcagcatcctggctgtcagctctgactgccccctccacacccccatgtacttcttcctctccaacctgtgctggcctgacatcggtttcacctcggccatggttcccaagatgattgtggacacgcagtcgcatagcagagtcatctctcatgcgggctgcctgacacagatgtctttcctgctccttgttgcatgtatagaaggcatgctcctgactgtgatggcctatgactgctttgtagccatctgtcgccctctgcactacccagtcatcgtgaatcctcacctctgtgtcttcttcgttttggtgtcctttttccttagcctgttggattcccagctgcacagttggattgtgttacaattaaccatcatcaagaatgtggaaatctctaatttggtctgtgacccctctcaacttctcaaacttgcctgttctgacagtgtcatcaataacatattcatatatttcgatagtactatgtttggttttcttcccatttcagggatctttttgtcttactataaaattgtcccctccattctaaggatttcatcgtcagatgggaagtataaagccttctccacctgtggctgtcatctagcagttgtttgctggttttatggaacaggcattggcatgtacctgacttcagctgtgtcaccaccccccaggaatggtgtggtggcatcagtgatgtacgctgtggtcaccccatgctgaaccttttcatctgcagcctgagaaacagggacatacaaagtgccctgcggaggctgggcagcagagcattcgaatctcatgatctgttccatcctttttcttgtgtgggtgagaaagggcaatcacattaaatctctttatctgcaaatcctgccccttagtcacattctttttgtggcttgatggtttttattcctttc

SEQ ID NO: 116 - protein, 315 aa, Homo sapiens
MGVKVQPFRPAYELVEQPPLKVSRWTSRRCQSVEVTSMYWFLGVPTLEDPELQPALALLSLSLSMYLVTVLRNLFSILAVSSDCPLHTPMYFFLSNLCWPDIGFTSAMVPKMIVDTQSHSRVISHAGCLTQMSFLLLVACIEGMLLTVMAYDCFVAICRPLHYPVIVNPHLCVFFVLVSFFLSLLDSQLHSWIVLQLTIIKNVEISNLVCDPSQLLKLACSDSVINNIFIYFDSTMFGFLPISGIFLSYYKIVPSILRISSSDGKYKAFSTCGCHLAVVCWFYGTGIGMYLTSAVSPPPRNGVVASVMYAVVTPC

SEQ ID NO: 117 - DNA, 1318 bp, Homo sapiens
  source
  (1)..(1318)
  CDS (201)..(1118)
cttgtgaattgcttgcatccaaaatatacacacagcattaagggctggtttttatcttttatttttccaatcctcttttcttcccaaggtgtccaagacacacagagccacggaatctcacaggtgtctgagaattcctccttctgggactctcagaggatccagaactgcagaccatccttgctgggctgtccctgtccatgtatctggtcacggtgctgaggaacctgctcagcatcctggctgtcagctctgactcccacccccacacacccatgtacttcttcctctccaacctgtgctgggctgacatcggtttcaccttggccacggttcccaaaatgattgtggacatggggtcgcatagcaaagtcatctcttatgggggctgcctgacacagatgtctttcttggtactttttgcatgtatagtagacatgttcctgactgtgatggcttatgactgctttgtagccatctgtcgccctctgcactacccagtcatcgtgaatcctcacctctgtgtcttcttcgttttggtgtcctttttccttagcctgttggattcccagctgcacagttggattgtgttacaattcaccttcttcaagaatgtggaaatctctaattttgtctgtgagccatctcaacttctcaagcttgcctcttatgacagcgtcatcaatagcatattcatatattttgataatactatgtttggttttcttcccatttcagggatccttttgtcttactataaaattgtcccctccattctaaggatttcatcatcagatgggaagtacaaagccttctcagcctgtggctgtcacctggcagttgtttgcttattttatggaacaggcattggcgtgtacctgacttcagctgtggcaccacccctcaggaatggtatggtggcgtcagtgatgtacgctgtggtcacccccatgctgaaccctttcatctacagcctgagaaacagggacattcaaagtgccctgtggagggtgtgcaacaaaacagtcgaatctcatgatctgttccatcctttttcttgtgtggttgagaaagggcaaccacattcaatccctacatctgcaaatcctgccccttagtcacattatttttgtggcttgatggcttttattcctttccgcatttcctttgtgaatgttgctttcttcgttatgcctttaactggaatgggtgaggattctgggatcctttgtttagcaaaaacctcatgacagaatcctctctacctaggcggcctcctttagtttctgagcaataaccctgtcatccaggtgaaatc

SEQ ID NO: 118 - protein, 305 aa, Homo sapiens [sequence omitted]

SEQ ID NO: 119 - DNA, 1816 bp, Homo sapiens
  source
  (1)..(1816)
  CDS (201)..(240)
  CDS (832)..(1616)
tttattttcactggagacggggtttcaccacgttggccaggctggtctggaactcctgacctcaggtgatccatcagcctcggctgcccaaagtgctgggattacaggtgtgggccatggtgctgggccaagagttatatattcaattcatttggaaacacagctcccatttttgagtgtgcatgtacttttatgaagaaatgatgtcagaaaaccaaaggatgataataaatatgaaaagtaacaggcatgtgaaaaggtcttccgattgagaactctaaggttcgatttcgttttcagataatggggtcttagctcttgcttcgtccttttacatattctacatcaatggaagttgtagcacggtgtcagaataaagtagagtgtatttcacggcttcttaatttctttcaattagactgagatctttttctaaaagagagaaggacattttcattgcattatatttttcctgaaaagagtaggctgtattttactgagatcagggatttgttatatataacgttttggtcttctaatattcttccgtggattttctctaaagtagtatgtacagaaagccttgtatagcaaaaaagcaaatcacgtaataattctgagatttttggaattgtcacaactgagaaacattgctggcgatgtatggtccggaagtgtgaagatgttccttgtaaattgcttgcatccagcattaagggctggtttttatcttttatttttccaatcctctttccttctcaaggtgtccaagacacacagagccacggaatctcacaggtgtctgagaattcctcctcctgggactctcagaggatccagaactgcagtcggtcctcgctttgctgtccctgtccctgtccctgaatctggtcacggtgctgaggaacctgctcagcatcctggctgtcagctctgactcccccctccacacccccatgtacttcttcctctccaacctgtgctgggctgacatcggtctcacctcggccacggttcccaaggtgattctggatatgcagtcgcatagcagagtcatctctcatgtgggctgcctgacacagatgtctttcttggtcctttttgcatgtatagaaggcatgctcctgactgtgatggcctatggctgctttgtagccatctgtcgccctctgcactacccagtcatagtgaatcctcacctctgtgtcttcttcgttttggtgtcctttttccttaacctgttggattcccagctgcacagttggattgtgttacaattcaccatcatcaagaatgtggaaatctctaattttttctgtgacccctctcagcttctcaaccttgcctgttctgacagcgtcatcaatagcatattcatatatttcgatagtactatgtttggttttcttcccatttcagggatccttttgtcttactataaaattgtcccctccattctaaggatgtcatcgtcagatgggaagtataaagccttctccacctatggctctcacctaggagttgtttgctggttttatggaacagtcattggcatgtacctggcttcagccgtgtcaccaccccccaggaatggtgtggtggcatcagtgatgtaggctgtggtcacccccatgctgaaccttttcatctacagcctgagaaacagggacatacaaagtgccctgcggaggctgcgcagcagaacagtcgaatctcatgatctgttccatcctttttcttgtgtgcgtgagaaagggcaaccacattaaatctctgcatctgcaaatcctgccccttagtcacattatttttgtgg

SEQ ID NO: 120 - protein, 274 aa, Homo sapiens [sequence omitted]

SEQ ID NO: 121 - DNA, 1051 bp, Homo sapiens
  source
  (1)..(1051)
  CDS (201)..(851)
gatgttccttgtgaattgcttgcatccagcattaagggctggtttttatcttttatttttccaatcctctttccttctcaaggtgtccaagacacacagagccacggaatctcacaagtgtctgagaattcctcctcctgggactctcagaggatccagaactgcagccgctcctcgctttgctgtccctgtccctgtccatgcatctggtcatggtgctgaggaacctgctcaacatcctggctgtcagctctgactcccccctccacacccccacgtacttcttcctctccaacctgtgctgggctgacatcggtttcacctcggccacggttcccaatatgattgtggacatgcagtcgcatagcagagtcatctctcatgcggactgcctgacacagatttccttcttgctcctttttgcatgtatagaaggcatgctcctgactgtgatgacctatgactgctttgtagccatctgttgccctctgcactacccagtcatcgtgaatcctcacctctgtgtcttcttcgttttggtgtcctttttccttagcctgttggattcccagctgcacagttggattgtgttacaattcaccatcatcaagaatgtggaaatctctaattctgtctgtgacccctctcaacttctcaaacttgcttgttctgacagcgtcatcaatagcatattcatgcatttccataatactatgtttggttttcttcccatttcagggatccttgtgtcttactataaaatcgtcccctccattcttaggatttcatcgtcagatgggaagtataaagccttctccacctgtggctctcacctagcagttgtttgctgattttatggaacaggcattggcgtgtacttgacttcagctctgtcaccaccccccaggaatggtgtggtggcgtcagtgatgtacgctgtggtcacccccatgctgaaccttttcatctacagcctgagaaacagggacatacaaagtgccctgtggaggctgctcagcagaacagtcgaatctcatgatctgttccatcc

SEQ ID NO: 122 - protein, 216 aa, Homo sapiens [sequence omitted]

SEQ ID NO: 123 - DNA, 1249 bp, Homo sapiens
  source
  (1)..(1249)
  CDS (201)..(1049)
taggccatattttactgagatcacggatttgttatatatgacgttttggtcttctaatattcttcagtggattttctctaaagtagtatgtacagaaagccttgtacagcaaaaaagtaaatcacgtaataattctgagatttttggaattgtcacagctgagaaacattgctggcggtgtatgctccgcaagtgtgaagatgttccttgtgaattgcttgcatccagcattaagggctggtttttatcttttatttttccaatcctctttccttctcaaggtgtccaagacacagagagccacggaatctcacaggtgtctgagaattcctcctcctgggactctcagaggatccagaactgcagccgtcctcgctttgctgtccctgtccctgtccatgtatctggtcacggtgctgaggaacctgctcagcatcctggctgtccgctctgactcccccctccacacccccatatacttcttcctctccaacctgtgctgggctgacatcggtttcacctcggccacagttcccaagatgattgtggacatgcagtcgcatagcagagtcatctctcatgcaggctgcctgacgcagatgtctttcttggtcctttttgcatgtatagaaggcatgctcctgactgtgatggcctatgactgctttgtagccatctgtcaccctctgcactacccagtcatcgtgaatcctcacctctgtgtcttcttcgttttggtgtcctttttccttagcctgttggattcccagctgcacagttggattgtgttacaattcaccatcatcaagaatgtggaaatctctaattttgtctgtgacccctctcaacttctcaaatttgcctgttctgacagcatcatcaatagcatattcatatatttccatagtactatgtttggttttcttcccatttcagggatccttttgtcttactataaaatcatcccctccattctaaggatttcatcatcagatgggaagtataaagccttctccacctgtggctctcacctagcagttgtttgctgattttatggaacagacattggcatgtacctgacttcagctgtgtcaccaccccccaggaatggtgtggtggcatcagtgatgtacgctgtggtcacccccatgttgaaccttttcatctacagcctgagaaacagggacatacaaagtgccctgtgggggctgcacagcagaacagtcgaatctcatgatctgttccatcc

SEQ ID NO: 124 - protein, 282 aa, Homo sapiens
MFLVNCLHPALRAGFYLLFFQSSFLLKVSKTQRATESHRCLRIPPPGTLRGSRTAAVLALLSLSLSMYLVTVLRNLLSILAVRSDSPLHTPIYFFLSNLCWADIGFTSATVPKMIVDMQSHSRVISHAGCLTQMSFLVLFACIEGMLLTVMAYDCFVAICHPLHYPVIVNPHLCVFFVLVSFFLSLLDSQLHSWIVLQFTIIKNVEISNFVCDPSQLLKFACSDSIINSIFIYFHSTMFGFLPISGILLSYYKIIPSILRISSSDGKYKAFSTCGSHLAVVC

SEQ ID NO: 125 - DNA, 12932 bp, Homo sapiens
  source
  (1)..(12932)
  CDS (201)..(492)
  CDS (12062)..(12732)
ggtgtcctgtggccccaaaataattttttattttgttgtctcttttttcttggaaataaatattgtggactttcaaaactgttttctaatgtcttagccagactggaaccccagaccagatgcactggtcctatgcaaggcaaagaatgttgagtttggacctcttaagtatttccttcagttgacagaggagatacactatggtaagtgccaatcagacagcctctgtgaccgagtttattctcctgggcctctctgcccacccaaagctggagaaaacgttctttgtgctcatcctgctgatgtacctggtgatcctactgggcaatggggtcctcatcctgatgactgtgtccaactcccacctgcacatgcccatgtacttcttcctggggaacctctccttcctggacatctgctatacaacatcctcagtccccctcatccttgacagcttcttgacccccaggaaaaccatctccttctcagcctgtgcagtgcagatgttcctctcctttgccatgggagccacagagtgtgttctcctgagcatgatggcgtttgatcgctacgtggccatctgcaacccccttaggtaccctgtggtcatgagcaaggctgcctacatgcccataaggctgccggctcctgggtagctggaagcactgcttccatggtgcagacatcccttgcaatgaggctgcccttctgtggagacaacatcatcaaccacttcacctgtgagattctggctgtcctgaagttggcctgtgctgatatctctgtcaatgtgatcagtatgggagtgaccaatgtgatcttcctgggggtcccggttctgttcatctctttctcctatgtcttcatcattgccaccatcctgaggatcccctcagctgaggggaggaaaaaggccttctccacctgctctgcccacctcacagtcgtggtcatcttctatgggaccatcctcttcatgtatgggaagcccaagtctaaggacccgctgggggcagacaagcaagaccttgcagacaaactcatttcccttttctatggggtggtgacccccatgctcaaccccatcatctacagcctgaggaacaaggatgtaaaggctgctgtgagggacttgatatttcagaaatgctttgcctagtgatgtttgggggaacagatgtcctcatagctctttgcctcttggttgctttcacccacaaatctcagaagagcatgctccctaaagaagatacatgtgaagaatgactaccagaaaattgaaatactcatgtaatagagcactttagctgtgattggacccaattaaaatgttgaaacctagaacccagggggagtgtgtcttgaggggatggaagcagaatgctgctggatacacaaggaatgacttttctgtttctccactgttcaagtctgaattcacctttgtgagcagatggttcctctgtttcgggaaaaacaccctcgggtacctttctgttacaaaaatgtaaagccaagattctactcttgaaaggaggcactgaagacaccatgggacagaacttcatgaccctgcccacctccctagcacagtgcttcccaacctgtgtcttgccatggagcacgtagaaaaccatgggatgtgtaggcaccctggggtgagtggatgagtcttttcatggctgaaggcaattcacctgggggcttaggtcactacaggttctgcttagtaatcccaggaggactctgagcttggtacatctgtaccctgtggcacattagctgaaatgttctgcctgaagcagaatgtgtcttcccttagcccctgctgaaaggacagtcatgctctctcctttggctatagataattggcgagttgacccaaactgggcaaaccatattttctgtccaaggaatttggaatttggacgtagagacacctcatagttggcacaaagctcttgaactcatagaccacgtaaagggggcacaaatgtggccctgtgtctagcaaggaagagaaagctggtctgcagagagaaaggataaagcaaatgcagaaagaagaccagacctacatgaaacagaaataaagcctgcaatatttaggctaggtattggagaaggttttttcttttattttatgggaaaatttaatcttgtagaaagaataataggtattcatcttccagatccaaagatgatctgctcatggctggtgtgtgtgtgtgtgtgtgtgtgtgtgtgtgtgtgtgtgtaatttttaattttttaaattttcctgggtacatagtagctatatatatttatggagtatatgggatatttaaatacaggcatgcaacgtgtaataatcacatcagggtaaatggggtatccatcacctcaagcatttatcctttgtgttacaaacaatccaattatactcttttaattattttaaaatgtacaattaaattatttttgactataatcatcctgctgtgctatcaaatactagttcttatttattctattttttgtacccataagccatctccatttcccctctaccctctcatcactgttcccagcctctgataaccatcattctactctccatctccatgggttcaattgttttaacttttagcttccacaaataagtgagaacatgcaaagtttgtctttctgtgctgcttatggccaatcttgttcttccatagccctgtggattatttctccttctccttaattattctaaagcaaatcccagatggtaataacattccatcttgaaatattttagtatttatatccaaaaaagattagtactcttggaaaaatataaagtaccatttaacatttaacatataaatcacctaaaactaattccttgatataatcaattatccagcatttatatttccagaaatgtcttatacattatttatttcaatttttaaattgaaccaggatccaaataacggcatacattgtgatttgtctctgatatggtttggctgtgtccccacccaaatctcaccttgaactgtagttcccataatctccacgtgttgtgggatgtcatgggagggacctggtgggaggtaatttaatcatggaggtggttaccctcatgctgttctgatgatagtgaatgagttctcatgagatctgatggttttttaagggccttttccccctttttcttggcacttctccttgttgctgccatgtgaagaagagtatgtttgcttccccttctgccatgattgtaagtttcctgaagcctccccagccatgctgaactgtgagtcaattaaacctctttcctttataaatcacccagtctcaggtatgtctttattagcagtgtgagaatggaccagtacagtctctttcaatctacatttccccctccctttttctatctttccctctacctctgttcctgccgccaccaccctgcttttaggctagattttttttttggaaggaatagtttctcaatatggaaaactataaagtttaccacagtctgattttgctgattgcaattctgtggtgtctgtctttgtgtttcccatacattgatgcctagatctagttacttaatttttttttttttactggagttatgagctcatggctcctgagaccttttgcatgacgctagtatctttgatgacttcctgctatctgatatgtcaagatattacaagctcaatattcactcttccttcccagacctgaaacaactattttgtctaacgagctcttttttcgtttaatggggaatggtatttagaagtcataatctgggtgctaggtttactattgagtttcccatggtttctaaatgtttcagtggaaagagctatgaaaaaatatatataattgaattatatgtatgtatgatatataaatatatatttagatttagatcaaatatataaatcatacatacagacagacaattcaaattaagagctatggattttttacctaatctcattgattttatacctgtatctccttcttctatgtactgtctcctcattccagaaatgtttggagatggcttgaagttatacacacataatgatgtcaggagttaacattgagcacaccttctgtaaagagcagaattcaatcaagtcatccagtggtgtgtgtctgggagtactggggctgaccataacagttgaggtgatgatgtgggctgtaggcccttttctctcgcttgttcctgagcttcctgcaggagatctgagtctgggagtgaggcattgggtggcagtgggctaggaaagagttgcaagataaattcaagcctggaaagaaagattccagactggaacctcagggcatcttgcagcttgggaatgattttcctaaatcttgatgagggcagtcacaagcccctgctcaccagggcactttggcaaagaaggggacatgatgcagacaagaaggaagctggcagatcacctctaaatggcgtccaaattcctgaattctgcatgcctgctctgttcaaaatagatgtttccaatatgtaagagccacttagaaaaaagaggtttgttaaatatttggaaggatggagtcacagtcaaaaactacatatctggggtccatggttgccaacattttaatatcatgcttccttacaatttaaactgtatttgtttattgatttataatatatacctatatacttataggtatatattatatacttataggtatatattataatacctatatacttatattataataatatattatatatataatatatattatataaatatatatatataatatatataataggtatatattataatacctatatatttataggtattctactgtaccaatatgttatggacatttacaatgtttacaaaaatagaagttcaaaaagataggacaaagataaaattttttttaaaaaaagagcaaacatgggacaaaatcagaagaaaatgagggtaggccacagattcattcattcatttattcagcatctatgtattgagagtcagttgtgagtgaagccctatttttatactaaggaaacatctgtgaacaatacagaaaaaaacttacctctgtgaaacttgtattctaacaggagagaaataagcaataaacaattacaaaaataaataggatgttagaaattttatggaatcaagactgcataaaggataactgaacacatgcatctaatttcattcctcctaaaacccatgaaaactatagtctttctttctttccaataaaatctacaaggttaagcagaagaagtaagatatcaacagcaagaacattgtgaaagttaggaagcagatgaactagtgctaattgccatagcagatctgacagagccaaatcccaagccagaaacttggaaaagtaagtgtcttactccattttctgctgctttaacagaatatttgagactgggtaatttataaataatagacatttatttggctcacagttctggaggctgtgaagtccaagagcatgacactggcatctagtgaaggccttcgtgttgcatcatccatggcagaaggtgaaagagcaagcaagtacatgaaacaaggagagaaaggaggccaaactcctgcaataactcactcctgcaataatggcattaaccccttcatgaaggctgagccctcttggcttaatcacctcttaaaggtcccatctctcagcactgttaccatggcagttaaatttcaccatgagtttttgaggggatattcaaaccacagtaattgataacaactagatttgtagcacagagaaactcactgtaccaagtacctctaggaccggggtgaaggaagtactactaaaaaaggaagactaggtgacaaatgtataagaaacagagtccctacaccccttcattcattccatgacattagtcaactatctcttgcctaccccaacaaaacttttattctctggagggtaaaatcatggctctctggactggcagacaacagccacagttgagagtatgggtactttactctttcatggagtaaaaaaacaattagcataaaagatcaggaatcaaaatggcttctgattgcaccagaattaccttcaaattcagagggaagatgatttccaataagttcctagaattccacacactactgtgttgattaactttatgtgtcaacttgactgggtcatggggtgcccagatattgggtcaaatattattctggatatgtctgtgagggagaacctggatgagattaatatttgaatgcatagatggagtaaagcagattatcctccctaatgtactaagcctcattcaatcagtgaaagtcttgaatagaacaaaaaggatgagtaagagggaacttctcctgcctttgagctgggacattagttttttcatcagctctcctgggccaccagcctgctgactgcaaatcttgggacttgtcagcctccataatcagataagccagttccttataacacgtacacacacacacacacacacacacacacacacacacactattagtactgtttctctcaagaaccctggctaatacacccaccaaattatcactcaggaggttaaataaaaatatgttcagacacataagatctcaaaaatgtgtatataatacactttttctcaagaagttattcaaggctgagtgaatggcttatgcctgtaatcccagcactttgggaagctgaggtgggtggatcatctgaggtcaggagttcaggaccagcctggtgcccatggcaaaaccccacctctactaaaaatacaaaagttagctgggtgtggtggcatgcgcctgtaatcccagctgctcagaaggctgaggcaggagaatcacttgaaccatggaggcggaggttgcagtgagccaagattgcgccattgcactccagcctgggtgacggaatgagattccatctcaaaaaaaaaaaagaagttattcaagaaagtgctctatcaaaataagagaataaaccaagaaatagaaagaaactgacaaaagaaacagaagttccaacccataagagaggtgtaaggagtccccaggacagtaaaaggagatcctggcatgacagttgtacaccctgcagagaagacagccagcccagagggcagccctatgactccagagacaggcatgtcaagggctcttattcatagacccctgctgcctatggtgattaacttgaggacagaatgccccagacagcctggcccacattctttcctgcactggccttatcttggccatgcatgtataaaatgccctcttctctctccatgtcttgctgactgggttagtagaggacactcattccactccagagagtattctgctttgatctattcccaagagtgggaagagggccatactcagagcttagaagcagaaaacataaaacaatccactctctctgatgatatttctgccagatgtctggtacctggccacactgcagcactgtctgacttacccggaagggactattgaaactgagagcttagattctcaggagagtcttccccaaaacagtgacaatatttttttttcatcaaaaagctagatttgccagtcagaatgactattattaaaaagtcaaaaaataacagatgttagtgagggtgagaaaaaagggaaacatttgtacattgttggtgggaaggcaagtcagtgcaacctcaatggaaaacaggattgagatttctcaaagaactaaaaatagaactaccactcaatctacttttttacagaattaattcttttttttttttctgagacagaattttgcttgtattgcccaggctggagtgcaatggcgcaatctctactcactgcaacctccacctcctgggttcaagtgattctcctgtcttagcctcccgagtagctgggattacaggcatgcgccaccacgcttggctaatttttgtgtttttagtagagatggggtttcaccattacataattaattcttttcctttatgtagataccactactgggtatctacataaaggaaaagaattaattacgtaaaaaaagatacccacactggtacatttattgcagcattattcacaacagcaaagatggaataaatctaagcatctatagatagatgattggataaagaaaatgtcatctacgtacacaatggagtactctttggacatagaaacgaaggcaaccatgtattttgcagcaacatggatggaactggccatgttggatgtccagtctcttaagttatgcagcccggaaacagaaagtcaaataccagtgtgtccacatggacataaagtgtggaataattgacattggatactaggaagtgtgggatggtgaggggggctgagggaggagaagttacttaattggcataatgtacattattttgggtgatggttgcactaaaaacccagacttcaccacaactcagtatatctgtgtaacaaaacttcacttgtaccccttaaatgtattgttttaaaaagctaggtttgtaattgtcactccatttttcaaaatggaacaattcattgtacaccaatacattgtagaaggtaaaactgtgaaggaaataaagggaatatatattagctttctcttgttgcataataaaccaccccaatatcagcagcttaaaacacctaattattagctcacagttctggaagtgagaaggttgggtgagttaggctgggctctgagaaaaagtcaagttcattggtattggtggcagaattcaattccttgtgttttttagactatggtcccagtttccttgctggctgtcaccagggctcatgcttagctccttgtggcagctctctggttcttgtttgcggctccctccatcttataatcaagaaacagcatgtggaattcttcccacactttgaatctggcttctccttctgctactaaccagagaaaactgtttttaaagggctcacttgattagttaggtcagacctcgctggataatcttctaatcttaaagacaactgatttggagctttagttacattgacaaaatcccttcacagcagtacctaggttaatgtttgatcaccacacgaagggaattatgtgatcatatggggatcatgaagattctgcctaccacaaaatgatttccatagaagtcaaaatagtggtcacttctggaagggagggaataaggaaatttaattggatagggaaataagaggggcttctaaggttctggaacatcctaattttaacctgggttggggggggggacatggtagtatactttcttatttttccttaaatggtatacatatgctttttacattcttttgtgtgtgtaatatatctcacaaaaagaaaaaaattcaatgcaagacaaaatggcttatgactacgaatgtggcatgtatttgattctaggatttttagagctagtgtatgtataaggcaggcatgttcctttgtgaaagaggtggttaggattgcccaagtgtttttgctaacactgggcaggctcttcttgcacaccaagaacatctgtggaatgagagctcatcatatgtgccacctaccatctccggtattcaaattaaatgggaaagggaaaactggaatgtgattaagaaactatagtgtatcagaaaacagtggtccacattgaagatgcttctggctgctgcttgggcagtcacagctctcagctttggatcttagaagtggaggttaccagatcccagtggtaaatcagcgatgctctcacaaatgcacagatatagtatactcatgcacacacacacaggaaaagactgagctgttcgcaacaggacaccacttccgtgatcaactgttcttttttaagtccacagctgccttgcctctgaaactctctggtagaagccatgaccagattcacttatgaccctttaaaggtctggtctgggtagggtatgcctagcagaacctatttggtgggatgcagacaagagatcttctgggtcactggctttcatacaaacctgagatcctgaaccctttgaatttgtaaatggccaaggggactaacccacaaggattcgtcctgtgtggtttcctattcccccagatctatcatggactctggtgacagttctcatggactgggggttcttgttaatttggggagggccaggatgatccttccgctctaatactttccaatagcccagcaaaatgggtaggaagagagggaaggagagaagaaagtatttctggagagacttcagagtaattggatcatggggacacaatcccagatgtataagaagtttcttgacttggtaacttgaatttccaaactttaaatgactttggggactagaatactccaaatagcaggatgggatttaagtggctttgtatgagcaatgattagtcttttgtggattttaccaaaacacagaacaaagacaagaaaacgtccacccatttcaggcactaactcatctggctgctgctttctgaccagattggctatttttggcttctggactactcccagatcccagagaagtaatttgaatcaacacatttgttgaaaaggtaagcgagcacttttaaaagaatatagaaactcttgtgggcccagctccatccccggtagcatacctggtgactaagtggcatgggggaattttgaaggaaatagaaaaggatgtctccatggtgcaacagtccaagaatgagaaattcatgagatcatttagtccctgggatggaatatctctgataataatctattccaaagtaagcatccaggaaatgaagttcagagaagaaaaaggacttcacgatgcccatgcattgattggttggcaaatgccagtcctgtaaatatgtgctccagaagagtctggcaagtgagtgagtgaatgaatgggtggacaaatagcccagggttctgtagatcttggaagtgctagtaaagaggaggcagagagcatctgaaattgctcacaggccgggtgccatggctcacgcctgtaatcccagcattttgggaggccagggtggtaggattgcttgagcccaggaatttaagcccagcctgggcaacaaagtgagacctcgtctccagaaaaaattaaaaattagccaggtgtagtggcatacgcatgtggtcccagctacctgggagactgaggcaggaggattgcttgagcctggagtttgagtctgcaacgagctgtatttgccctactgcactccagcctaggtaatggagtaagactctgtctcaaataataataataataatttttaaaagtgctcacagagcagaatggtcagggattgaggatgaggagtaccagttttttctaccagtcctaggtcccaaggggaaaaaacatacaaatggaatataacatttcttgccaaaattgaaccaaatgaatcatccacacatgtaacttgaagtaaatgtgtgatgcctgtcttaaatgtgatgaggaaaattaaatctaatcaggtgacatttgaaacctctctatggggtggccaaataccaccaagtagattttgatcaaatttcctgcattttacttaaagcaatatcgagaaacctttgaattgtcagagctgttctccaattgctcagcaagtctgggcttcctcactggctgtctgggcactttaggcatcagagaatcatggagctggccctctgagtttgtacaagtgacatagaaacaccatggtcagttccaatcagacctcccctgtgctggggttccttctcctggggctctctgcccatccaaagctggagaagacattcttcgtgctcatcctgctgatgtacctggtgatcctactgggcaatggggtcctcatcctggtgaccatccttgactcccgcctggacacacccatgtacttcttcctggggaacctctccttcctggacatctgctatacaacctcctcatccttgacagcttcctgacccccaggaaaaccatctccttctcagcctgtgcagtacagatgttcctctcccttgccatgggagccacagagtgtgttctcctgagcatgatggcgtttgatcgctacgtggccatctgcaaccccctttggtaccctgaagtcatgaacaaagctacttatgtgcccatggctgctggctcctgggtagctggaagcctcactgccatggtgcagacaccccttgcattgaggctgcccttctgtggagacaacatcatcaatcacttcacctgtgagattctggctgtcctgaagttggcctgtgctgatatctctgtcaatgtgatcagtatgggagtggccaatgtgatcttcctgggggtccctgttctgttcatctctttctcctatgtcttcatcattgccaccatcctgaggatcccctcagctgaggggaggaaaaaggccttctccacctgctctgcccacctcactgtcgtgatcgtcttctacgggaccatcctcttcatgtacgggaagcccaagtctaaggacccactgggagcagacaaacaggaccttgcagacaaactcatttcccttttctatggggtggtgacccccatgctcaaccccatcatctacagcctgaggaacaaggaagtgaaggctgctgtgaggaacctggtatttcagaaacgcttcctgcagtgatggtggaggggtcctgatggctctgtgcttcctgactgctcccacctgagagtcccagaggacaagatgaaagaccaagttgatcaaaggttacatgggtaaatctcattacacagaatctcattacatagaagggctctgtaggaacaggacacatttaatgcaactccaccaaagtatgttcttgtttgtctagcctc

SEQ ID NO: 126 - protein, 320 aa, Homo sapiens [sequence omitted]

SEQ ID NO: 127 - DNA, 1354 bp, Homo sapiens
  source
  (1)..(1354)
  CDS (201)..(1154)
taggtgcttccatcattcccaatttcattgtattctagtcacacacattactgaagataactggatgtcagaacttcaagcaagcactccttctaatatgtgtcaaaagaatgattgttcagttaatttgtactgtttgtttcttggcagtaaatacatttcatgttagatcttcttttgatttcctgaaagcagatgacatgggtgagattaaccagacacttgtgtcagaatttcttcttctgggtctttctggatacccaaagattgagattgtttactttgctctcattctagttatgtacctagtgattctaattggcaatggtgttctaatcatagccagcatctttgattctcattttcacacaccaatgtacttcttcctgggcaacctctctttcctggatatctgctatacatcctcctctgttccctcaacattggtgagcttaatctcaaagaaaagaaacatttccttctctggatgtgcagtgcagatgttctttgggtttgcaatggggtcaacagaatgtctgcttcttggcatgatggcatttgatcgttatgtggccatctgcaacccactgagataccccatcatcctgagcaaggtggcgtatgtattgatggcttctgtgtcctggctgtccggtggaataaattcagctgtgcaaacattacttgccatgagactgcctttctgtgggaataatattatcaatcatttcgcatgtgaaatattagctgtcctcaagctggcctgtgctgatatatccctcaatattatcaccatggtgatatcaaatatggccttcctggttcttccactgatggtcatttttttctcctatatgttcatcctctacaccatcttgcaaatgaattcagccacaggaagacgcaaggcattttccacgtgctcagctcacctgactgtggtgatcatattttacggtaccatcttctttatgtatgcgaaaccgaagtctcaagacctgattggggaagaaaaattgcaagcattagacaagctcatttctctgttttatggggtagtgacacccatgctgaatcctatactctatagcttgagaaataaggatgtaaaagctgctgtaaaatatttgctgaacaaaaaaccaattcactaatgaaaccaggacatgtaggtctttgtttaacagtcacaaagatggactcttaggtaaatcagcctgaaccttttttggagaaaccatggttagagagacagatttttatcctttgcctttactagccctgctcatctagaatcactgataactatagtttgctacaaactccagcatgccctgatccacgtttcacaaac

SEQ ID NO: 128 - protein, 317 aa, Homo sapiens
MGEINQTLVSEFLLLGLSGYPKIEIVYFALILVMYLVILIGNGVLIIASIFDSHFHTPMYFFLGNLSFLDICYTSSSVPSTLVSLISKKRNISFSGCAVQMFFGFAMGSTECLLLGMMAFDRYVAICNPLRYPIILSKVAYVLMASVSWLSGGINSAVQTLLAMRLPFCGNNIINHFACEILAVLKLACADISLNIITMVISNMAFLVLPLMVIFFSYMFILYTILQMNSATGRRKAFSTCSAHLTVVIIFYGTIFFMYAKPKSQDLIGEEKLQALDKLISLFYGVVTPMLNPILYSLRNKDVKAAVKYLLNKKPIH

SEQ ID NO: 129 - DNA, 1357 bp, Homo sapiens
  source
  (1)..(1357)
  CDS (201)..(1157)
gcatagaaactctaaacatcctagtgtggctgtattctaggcacaaatactattgaagataactcaatggcagagctttaaaacaaacagtctctatttcaccctagagtaatgtttattcaagttattttttacatttgttgcttggctgtgaaaatattatacattgggtcttcctttggcatcctgaaagctgggacatggacaagataaaccagacatttgtgagagaattcattcttctgggactctctggttaccccaaacttgagatcattttctttgctctgattctagttatgtacgtagtgattctaattggcaatggtgttctgatcatagcaagcatcttggattctcgtcttcacatgcccatgtacttcttcctgggcaacctctctttcctggatatctgctatacaacctcctccattccctcaacactggtgagcttaatctcaaagaaaagaaacatttccttctctggatgtgcagtgcagatgttctttgggtttgcaatggggtcaacagaatgtttcctccttggcatgatggcatttgatcgttatgtggccatctgtaaccctctgagataccccatcatcatgaacaaggtggtgtatgtactgctgacttctgtatcatggctttctggtggaatcaattcaactgtgcaaacatcacttgccatgcgatggcctttctgtgggaacaatattattaatcatttcttatgcgagatcttagctgtcctaaaattagcttgttctgatatatctgtcaatattgttaccctagcagtgtcaaatattgctttcctagttcttcctctgctcgtgatttttttctcctatatgttcatcctctacaccatcttgcgaacgaactcggccacaggaagacacaaggcattttctacatgctcagctcacctgactgtggtgatcatattttatggtaccatcttctttatgtatgcaaaacctaagtcccaggacctccttgggaaagacaacttgcaagctacagaggggcttgtttccatgttttatggggttgtgacccccatgttaaaccccataatctatagcttgagaaataaagatgtaaaagctgctataaaatatttgctgagcaggaaagctattaaccagtaagatcaaagggatatatgggtcttttatgtataattagcttgccttagccatttgacaatgtacatatgatatggtttggctgtgtccccatccaattcttgaattgtagctcctatagtccccatatgttgtaggattgacctggtgggaggtaactgaaccatgggagtgggtttttcacatgctgctctcgtgatagt

SEQ ID NO: 130 - protein, 318 aa, Homo sapiens
MDKINQTFVREFILLGLSGYPKLEIIFFALILVMYVVILIGNGVLIIASILDSRLHMPMYFFLGNLSFLDICYTTSSIPSTLVSLISKKRNISFSGCAVQMFFGFAMGSTECFLLGMMAFDRYVAICNPLRYPIIMNKVVYVLLTSVSWLSGGINSTVQTSLAMRWPFCGNNIINHFLCEILAVLKLACSDISVNIVTLAVSNIAFLVLPLLVIFFSYMFILYTILRTNSATGRHKAFSTCSAHLTVVIIFYGTIFFMYAKPKSQDLLGKDNLQATEGLVSMFYGVVTPMLNPIIYSLRNKDVKAAIKYLLSRKAINQ

SEQ ID NO: 131 - DNA, 1360 bp, Homo sapiens
  source
  (1)..(1360)
  CDS (201)..(1160)
acttcctgcttaaatttttcttattagtgacaaatttcttcaatatatattactatcactaacctagagaaccattgaagaacagaacacaagttcatataaataaaacatgccagatatgtgaaggagggggttatgttttatatatgtgtgacgttaatccttctatgcatacgtacaggtgaacataacataaaaaaatgttcccggcaaattggacatctgtaaaagtatttttcttcctgggattttttcactaccccaaagttcaggtcatcatatttgcggtgtgcttgctgatgtacctgatcaccttgctgggcaacatttttctgatctccatcaccattctagattcccacctgcacacccctatgtacctcttcctcagcaatctctcctttctggacatctggtactcctcttctgccctctctccaatgctggcaaactttgtttcagggagaaacactatttcattctcagggtgcgccactcagatgtacctctcccttgccatgggctccactgagtgtgtgctcctgcccatgatggcatatgaccggtatgtggccatctgcaaccccctgagataccctgtcatcatgaataggagaacctgtgtgcagattgcagctggctcctggatgacaggctgtctcactgccatggtggaaatgatgtctgtgctgccactgtctctctgtggtaatagcatcatcaatcatttcacttgtgaaattctggccatcttgaaattggtttgtgtggacacctccctggtgcagttaatcatgctggtgatcagtgtacttcttctccccatgccaatgctactcatttgtatctcttatgcatttatcctcgccagtatcctgagaatcagctcagtggaaggtcgaagtaaagccttttcaacgtgcacagcccacctgatggtggtagttttgttctatgggacggctctctccatgcacctgaagccctccgctgtagattcacaggaaatagacaaatttatggctttggtgtatgccggacaaacccccatgttgaatcctatcatctatagtctacggaacaaagaggtgaaagtggccttgaaaaaattgctgattagaaatcattttaatactgccttcatttccatcctcaaataacaatcacactcatatagataatcaacattacccagaaaactgcataatagtttacttaaaccaaccctggaaactacttattttcaatagaagtttactattatatcctctattctgatttgtcttataagtaaaacttttcatattaacaaatcatttatgaagaataaattaagtttccaagaaagcaattagcattt

SEQ ID NO: 132 - protein, 319 aa, Homo sapiens
MFPANWTSVKVFFFLGFFHYPKVQVIIFAVCLLMYLITLLGNIFLISITILDSHLHTPMYLFLSNLSFLDIWYSSSALSPMLANFVSGRNTISFSGCATQMYLSLAMGSTECVLLPMMAYDRYVAICNPLRYPVIMNRRTCVQIAAGSWMTGCLTAMVEMMSVLPLSLCGNSIINHFTCEILAILKLVCVDTSLVQLIMLVISVLLLPMPMLLICISYAFILASILRISSVEGRSKAFSTCTAHLMVVVLFYGTALSMHLKPSAVDSQEIDKFMALVYAGQTPMLNPIIYSLRNKEVKVALKKLLIRNHFNTAFISILK

SEQ ID NO: 133 - DNA, 1369 bp, Homo sapiens
  source
  (1)..(1369)
  CDS (201)..(1169)
aagtagctatatcgactaaaccttcatttctttttcagcacatttgcagcaaaatatgtggcaaatgtaagaaaatatgaagacattctctaagtcaaaagaacatctctattatactatgccacagttatcatttcttattccaagacataccatttttttccttcaaatttccctagtgccctccagctgatataaacatgagccctgagaaccagagcagcgtgtccgagttcctcctcctgggcctccccatccggccagagcagcaggccgtgttcttcgccctgttcctgggcatgtacctgaccacggtgctggggaacctgctcatcatgctgctcatccagctagactctcaccttcacacccccatgtacttcttccttagccacttggccctcactgacatctccttttcatctgtcactgtccctaagatgctgatgaacatgcagactcagcacctagccgtcttttacaagggatgcatttcacagacatattttttcatattttttgctgacttagacagtttccttatcacttcaatggcatatgacaggtatgtggccatctgtcatcctctacattatgccaccatcatgactcagagccagtgtgtcatgctggtggctgggtcctgggtcatcgcttgtgcgtgtgctcttttgcataccctcctcctggcccagctttccttctgtgctgaccacatcatccctcactacttctgtgaccttggtgccctgctcaagttgtcctgctcagacacctccctcaatcagttagcaatctttacagcagcattgacagccattatgcttccattcctgtgcatcctggtttcttatggtcacattggggtcaccatcctccagattccctctaccaagggcatatgcaaagccttgtccacttgtggatcccacctctcagtggtgactatctattatcggacaattattggtctctattttcttcccccatccagcaacaccaatgacaagaacataattgcttcagtgatatacacagcagtcactcccatgttgaacccattcatttacagtctgagaaataaagacattaagggagccctaagaaaactcttgagtaggtcaggcgcagtggctcatgcctgtaatctcaacactttgggaggctgaggcagacggatcacctgagatcaggagttcgagaccagcctggccaacatggcgaaacccagtctctactaaaaatacaaaaaaattagccgggcatggtggtgcatgcctatagtcccagctactcgggagactgaggcagaagaatcacttgaacccaggaggcggaggttgcagtgagccaagatcgtgccactgca

SEQ ID NO: 134 - protein, 322 aa, Homo sapiens
MSPENQSSVSEFLLLGLPIRPEQQAVFFALFLGMYLTTVLGNLLIMLLIQLDSHLHTPMYFFLSHLALTDISFSSVTVPKMLMNMQTQHLAVFYKGCISQTYFFIFFADLDSFLITSMAYDRYVAICHPLHYATIMTQSQCVMLVAGSWVIACACALLHTLLLAQLSFCADHIIPHYFCDLGALLKLSCSDTSLNQLAIFTAALTAIMLPFLCILVSYGHIGVTILQIPSTKGICKALSTCGSHLSVVTIYYRTIIGLYFLPPSSNTNDKNIIASVIYTAVTPMLNPFIYSLRNKDIKGALRKLLSRSGAVAHACNLNTLGG

SEQ ID NO: 135 - DNA, 1342 bp, Homo sapiens
  source
  (1)..(1342)
  CDS (201)..(1142)
ggcattaagcccagaatgcattatatattttttctgatgctcttcctccccacagacccccgataggccccagtgtgtgttgttcctctccctgtgtctatgttaaaacgtacatcttttaatatgactgctaaaaatgataatttcagagcctctaatattctcaagcattcttcatctccatcagagggcaaaggagtatgagccctgagaaccagagcagcgtgtccgagttcctccttctgggcctccccatccggccagagcagcaggctgtgttcttcaccctgttcctgggcatgtacctgaccacggtgctggggaacctgctcatcatgctgctcatccagctggactctcaccttcacacccccatgtacttcttcctcagccacttggctctcactgacatctccttttcatctgtcactgtccctaagatgctgatggacatgcggactaagtacaaatcgatcctctatgaggaatgcatttctcagatgtatttttttatattttttactgacctggacagcttccttattacatcaatggcatatgaccgatatgttgccatatgtcaccctctccactacactgtcatcatgagggaagagctctgtgtcttcttagtggctgtatcttggattctgtcttgtgccagctccctctctcacacccttctcctgacccggctgtctttctgtgctgcgaacaccatcccccatgtcttctgtgaccttgctgccctgctcaagctgtcctgctcagatatcttcctcaatgagctggtcatgttcacagtaggggtggtggtcattaccctgccattcatgtgtatcctggtatcatatggctacattggggccaccatcctgagggtcccttcaaccaaagggatccacaaagcattgtccacatgtggctcccatctctctgtggtgtctctctattatgggtcaatatttggccagtaccttttcccgactgtaagcagttctattgacaaggatgtcattgtggctctcatgtacacggtggtcacacccatgttgaacccctttatctacagccttaggaacagggacatgaaagaggcccttgggaaactcttcagtagagcaacatttttctcttggtgacatctgactttttaaaaaattagaatctcattttggtttatctcatgtatttgattttccatttgaatatgtctcaaaacatgttatgtcctgaagccctaagacaaatgttaacatgttgaatgtaattggtaaatatttgttggccagaattccattctcttattaacaatgttattctttatagtttttggtcagtg

SEQ ID NO: 136 - protein, 313 aa, Homo sapiens
MSPENQSSVSEFLLLGLPIRPEQQAVFFTLFLGMYLTTVLGNLLIMLLIQLDSHLHTPMYFFLSHLALTDISFSSVTVPKMLMDMRTKYKSILYEECISQMYFFIFFTDLDSFLITSMAYDRYVAICHPLHYTVIMREELCVFLVAVSWILSCASSLSHTLLLTRLSFCAANTIPHVFCDLAALLKLSCSDIFLNELVMFTVGVVVITLPFMCILVSYGYIGATILRVPSTKGIHKALSTCGSHLSVVSLYYGSIFGQYLFPTVSSSIDKDVIVALMYTVVTPMLNPFIYSLRNRDMKEALGKLFSRATFFSW

SEQ ID NO: 137 - DNA, 1342 bp, Homo sapiens
  source
  (1)..(1342)
  CDS (201)..(1142)
ctcttggcgaattatcccattttgagtgataaaaccatctacttgaaatgattttttgtagggacatagcaatgtagacagacattggcatattcatcagtagcaaggatcttattcttatctgctgctgtaaatcaacatttgtttgtttctgcctttttcaatgtccctctatttccagcagagagaagactgtcagcatgaagagggagaatcagagcagtgtgtctgagttcctcctcctggacctccccatctggccagagcagcaggctgtgttcttcaccctgttcttgggcatgtacctgatcacggtgctggggaacctgctcatcatcctgctcatccggctggactctcaccttcacacccccatgttcttcttcctcagccacttggctctcactgacatctccctttcatctgtcactgtcccaaagatgttattaagcatgcaaactcaggatcaatccattctttatgcagggtgtgtaactcagatgtattttttcatatttttcactgatctagacaatttccttctcacttcaatggcatacgatcggtatgtggccatctgtcaccccctccgctacaccactatcatgaaagagggactgtgtaacttactagtcactgtgtcctggatcctctcctgtaccaatgccctgtctcacactctcctcctggcccagctgtccttttgtgctgacaacaccatcccccatttcttctgtgatcttgttgccctactcaagctctcatgctcagacatctccctcaatgagctggtcattttcacagtgggacaggcagtcattactctaccactaatatgcatcttgatctcttatggccacattggggtcaccatcctcaaggctccatctactaagggcatcttcaaagctttgtccacctgtggctctcacctctctgtggtgtctctgtattatggcacaattattggactgtattttctcccctcatccagtgcctccagtgacaaggacgtaattgcctctgtgatgtacacggtgatcaccccattgctgaatcccttcatttatagcctaaggaacagggacataaagggagccctggagagactcttcaacagggcaacagtcttatctcaatgacatttactcttctttataacagacatatgtactgacctatttccagatcatagatccttacttctgatcccagcaagggataagtgctcagtaactctctgatgacttgaattgcatcctgttacagttattctcccttttcctctttagtgcaaattgtgaattctgagtttacataattgtttatttatcttgcctat

SEQ ID NO: 138 - protein, 313 aa, Homo sapiens
MKRENQSSVSEFLLLDLPIWPEQQAVFFTLFLGMYLITVLGNLLIILLIRLDSHLHTPMFFFLSHLALTDISLSSVTVPKMLLSMQTQDQSILYAGCVTQMYFFIFFTDLDNFLLTSMAYDRYVAICHPLRYTTIMKEGLCNLLVTVSWILSCTNALSHTLLLAQLSFCADNTIPHFFCDLVALLKLSCSDISLNELVIFTVGQAVITLPLICILISYGHIGVTILKAPSTKGIFKALSTCGSHLSVVSLYYGTIIGLYFLPSSSASSDKDVIASVMYTVITPLLNPFIYSLRNRDIKGALERLFNRATVLSQ

SEQ ID NO: 139 - DNA, 1336 bp, Homo sapiens
  source
  (1)..(1336)
  CDS (201)..(1136)
gattaaatagtggtaaagagaggagaaagggggaaaatgagactctgatgaagagagaaaagaagcaggatcagaatgaagataaagtcaggattaggaatataatgaacttaaagggagatttgggagtcagcccacacagttgtagatgaaatctagcattctaactgtcttccctcagctccagatgctgcagagtcatggaaaaccaatccagcatttctgaatttttcctccgaggaatatcagcgcctccagagcaacagcagtccctcttcggaattttcctgtgtatgtatcttgtcaccttgactgggaacctgctcatcatcctggccattggctctgacctgcacctccacacccccatgtactttttcttggccaacctgtcttttgttgacatgggtttaacgtcctccacagttaccaagatgctggtgaatatacagactcggcatcacaccatctcctatacgggttgcctcacgcaaatgtatttctttctgatgtttggtgatctagacagcttcttcctggctgccatggcgtatgaccgctatgtggccatttgccaccccctctgctactccacagtcatgaggccccaagtctgtgccctaatgcttgcattgtgctgggtcctcaccaatatcgttgccctgactcacacgttcctcatggctcggttgtccttctgtgtgactggggaaattgctcactttttctgtgacatcactcctgtcctgaagctgtcatgttctgacacccacatcaacgagatgatggtttttgtcttgggaggcaccgtactcatcgtcccctttttatgcattgtcacctcctacatccacattgtgccagctatcctgagggtccgaacccgtggtggggtgggcaaggccttttccacctgcagttcccacctctgcgttgtttgtgtgttctatgggaccctcttcagtgcctacctgtgtcctccctccattgcctctgaagagaaggacattgcagcagctgcaatgtacaccatagtgactcccatgttgaacccctttatctatagcctaaggaacaaggacatgaagggggccctaaagaggctcttcagtcacaggagtattgtttcctcttagatgtggtgacagcaacatttaatgaaaagacataggcttggagtcagacaaacgggcttcattttggggtctaccacacactagccataagattgtagtctggttacttagcctctctgagccttggttttctcatttataaaatggagataacagtttctatctaataatgtaacttggaggattaactgaaataaact

SEQ ID NO: 140 - protein, 311 aa, Homo sapiens
MENQSSISEFFLRGISAPPEQQQSLFGIFLCMYLVTLTGNLLIILAIGSDLHLHTPMYFFLANLSFVDMGLTSSTVTKMLVNIQTRHHTISYTGCLTQMYFFLMFGDLDSFFLAAMAYDRYVAICHPLCYSTVMRPQVCALMLALCWVLTNIVALTHTFLMARLSFCVTGEIAHFFCDITPVLKLSCSDTHINEMMVFVLGGTVLIVPFLCIVTSYIHIVPAILRVRTRGGVGKAFSTCSSHLCVVCVFYGTLFSAYLCPPSIASEEKDIAAAAMYTIVTPMLNPFIYSLRNKDMKGALKRLFSHRSIVSS

SEQ ID NO: 141 - DNA, 1330 bp, Homo sapiens
  source
  (1)..(1330)
  CDS (201)..(1130)
tgcccttatggagcccatagatttgggaagggaggaccccatcaaggaccatgaggtgaacaagccatcccacaattagcacagtagctaattgtgaccaaacagaagaaacaaagacttgctaggttctcatgattggtgttatgaaatcagagcatgttaaatgacaaaacttcttgtttataactgagcccaagtcaatggaaagaatcaaccacaccagcagtgtctccgagtttatcctcctgggactctcctcccggcctgaggaccaaaagacactctttgttctcttcctcatcgtgtacctggtcaccataacagggaacctgctcatcatcctggccattcgcttcaacccccatcttcagacccctatgtatttcttcttgagttttctgtctctcactgatatttgctttacaacaagcgttgtccccaagatgctgatgaacttcctgtcagaaaagaagaccatctcctatgctgggtgtctgacacagatgtattttctctatgccttgggcaacagtgacagctgccttctggcagtcatggcctttgaccgctatgtggccgtctgtgaccctttccactatgtcaccaccatgagccaccaccactgtgtcctgctggtggccttctcctgctcatttcctcacctccactcactcctgcacacacttctgctgaatcgtctcaccttctgtgactccaatgttatccaccactttctctgtgacctcagccctgtgctgaaattgtcctgctcttccatatttgtcaatgaaattgtgcagatgacagaagcacctattgttttggtgactcgttttctctgcattgctttctcttatatacgaatcctcactacagttctcaagattccctctacttctgggaaacgcaaagccttctccacctgtggtttttacctcaccgtggtgacgctcttttatggaagcatcttctgtgtctatttacagcccccatccacctacgctgtcaaggaccacgtggcaacaattgtttacacagttttgtcatccatgctcaatccttttatctacagcctgagaaacaaagacctgaaacagggcctgaggaagcttatgagcaagagatcctaggaagcaccctcttgaaaaactcgtaagtggaatctgctcaacttggacgtgttttctactggtttctggtgaacagtcaaagctgttggaagctagcacttctgacccatgtgagacaaggctattgtgggcacttacatccattgatgatgacccaacaattcggcctgtatctcttaaatcacaatcgtttcctgtct

SEQ ID NO: 142 - protein, 309 aa, Homo sapiens
MERINHTSSVSEFILLGLSSRPEDQKTLFVLFLIVYLVTITGNLLIILAIRFNPHLQTPMYFFLSFLSLTDICFTTSVVPKMLMNFLSEKKTISYAGCLTQMYFLYALGNSDSCLLAVMAFDRYVAVCDPFHYVTTMSHHHCVLLVAFSCSFPHLHSLLHTLLLNRLTFCDSNVIHHFLCDLSPVLKLSCSSIFVNEIVQMTEAPIVLVTRFLCIAFSYIRILTTVLKIPSTSGKRKAFSTCGFYLTVVTLFYGSIFCVYLQPPSTYAVKDHVATIVYTVLSSMLNPFIYSLRNKDLKQGLRKLMSKRS

SEQ ID NO: 143 - DNA, 1354 bp, Homo sapiens
  source
  (1)..(1354)
  CDS (201)..(1154)
aggagaaaataaatacatattaaggaagcgaaatcctagaccttagggagggagagtagatggtcaagttcgaatctaggtctttaacgatctttagtaacgtaatataattaactagaaatgctatgatccctaacatcagacccatgactttctttttgacttaaactgtctttcaggcaggctgactgtcactcatgatgagctttgcccctaatgcttcacactctccggtttttttgctccttgggttctcgagagctaacatctcctacactctcctcttcttcctgttcctggctatttacctgaccaccatactggggaatgtgacactggtgctgctcatctcctgggactccagactgcactcacccatgtattatctgcttcgtggcctctctgtgatagacatggggctatccacagttacactgccccagttgctggcccatttggtctctcattacccaaccattcctgctgcccgctgcttggctcagttctttttcttctatgcatttggggttacagatacacttgtcattgctgtcatggctctggatcgctatgtggccatctgtgaccccctgcactatgctttggtaatgaatcaccaacggtgtgcctgcttactagccttgagctgggtggtgtccatactgcacaccatgttgcgtgtgggactcgtcctgcctctttgctggactggggatgctgggggcaacgttaaccttcctcacttcttttgtgaccaccggccacttctgcgagcctcttgttctgacatacattctaatgagctggccatattctttgagggtggcttccttatgctgggcccctgtgccctcattgtactctcttatgtccgaattggggccgctattctacgtttgccttcagctgctggtcgccgccgagcagtctccacctgtggatcccacctcaccatggttggtttcctctacggcaccatcatttgtgtctacttccagcctcccttccagaactctcagtatcaggacatggtggcttcagtaatgtatactgccattacacctttggccaacccatttgtgtatagcctccacaataaggatgtcaagggtgcactctgcaggctgcttgaatgggtgaaggtagacccctgattagcctgctgtgggccatattgaataggtgagaaaagtcatgggcatattctgagcagagttggttttggggagatcagaggggtggagggcctagataacttaaggaactccagatttggctcttgtcaatgttgtgctttgatggagccatgaacattccacattcatagacacataagatcagggctcccttatca

SEQ ID NO: 144 - protein, 317 aa, Homo sapiens
MSFAPNASHSPVFLLLGFSRANISYTLLFFLFLAIYLTTILGNVTLVLLISWDSRLHSPMYYLLRGLSVIDMGLSTVTLPQLLAHLVSHYPTIPAARCLAQFFFFYAFGVTDTLVIAVMALDRYVAICDPLHYALVMNHQRCACLLALSWVVSILHTMLRVGLVLPLCWTGDAGGNVNLPHFFCDHRPLLRASCSDIHSNELAIFFEGGFLMLGPCALIVLSYVRIGAAILRLPSAAGRRRAVSTCGSHLTMVGFLYGTIICVYFQPPFQNSQYQDMVASVMYTAITPLANPFVYSLHNKDVKGALCRLLEWVKVDP

SEQ ID NO: 145 - DNA, 1375 bp, Homo sapiens
  source
  (1)..(1375)
  CDS (201)..(1175)
acctcaaagatcttttaaaaagtgaaaacacactttcagttctgattctccatgctcaggaagaaaaataaactacagagtaaatgctctattaataactactcagtgtaagaacaacgtggaaagatgcatgttgtagatgacataagaattatgtcattaattgacagtgttgcttatctttaggtgagtacaagtccatgggaatgtccaacctgacaagactctctgaatttattctcttgggactctcctctcggtctgaagaccagaggccactctttgccctctttcttatcatatacctggtcactttgatgggaaatctgctcatcatcttggctatccactctgatcctcgacttcaaaaccctatgtattttttcctaagcatcttgtcctttgctgatatttgctacacaacagtcatagtcccaaagatgctcgtgaacttcttatcagagaaaaagaccatttcctatgctgaatgtctggcacagatgtatttcttcctggtttttggaaacatagatagttatctcctggcggctatggccatcaaccgctgtgtagccatttgtaacccattccattatgtcactgttatgaaccgcagatgctgtgtgttgctactagcattccccatcactttctcctatttccactctctcctacatgtcctcctggtgaatcggctcaccttttgtacatcaaatgttatccatcattttttttgtgatgtcaaccctgtgctgaaactgtcctgctcctccacctttgtcaatgaaattgtggccatgacagaagggctggcctctgtgatggctccatttgtctgtatcatcatctcttatctaagaattctcatcgctgttctcaagattccctcagcagctggaaaacacaaagccttctccacctgcagctcccatctcactgtggtgattctgttttatgggagtattagctatgtctatttgcagcctttgtccagctatactgtcaaggaccgaatagcaacaatcaactacactgtgttgacatcagtgttgaacccatttatctacagtttaagaaacaaagacatgaaacggggcttacagaaattgataaacaagattaagtctcaaatgagtaggttctctacaaagaccaataaaatctgtggaccctgattacaaggtgtgtgtgtgtgtgtgtgtgtgtgtgttagcacctgatgccactcttttcttgaaaaaacgttccttcatcttcaccatttgtagcttcacctcgtggttttccaccctgtggtctctgtcatcgtatgattgaacaattaggatgtcttggtatcaatgccccaatcacagactcacctcataatatatct

SEQ ID NO: 146 - protein, 324 aa, Homo sapiens
MGMSNLTRLSEFILLGLSSRSEDQRPLFALFLIIYLVTLMGNLLIILAIHSDPRLQNPMYFFLSILSFADICYTTVIVPKMLVNFLSEKKTISYAECLAQMYFFLVFGNIDSYLLAAMAINRCVAICNPFHYVTVMNRRCCVLLLAFPITFSYFHSLLHVLLVNRLTFCTSNVIHHFFCDVNPVLKLSCSSTFVNEIVAMTEGLASVMAPFVCIIISYLRILIAVLKIPSAAGKHKAFSTCSSHLTVVILFYGSISYVYLQPLSSYTVKDRIATINYTVLTSVLNPFIYSLRNKDMKRGLQKLINKIKSQMSRFSTKTNKICGP

SEQ ID NO: 147 - DNA, 1336 bp, Homo sapiens
  source
  (1)..(1336)
  CDS (201)..(1136)
agcttggcatcctttaacttttcttttgttgaattttactatctgtttctatgtagtttcagaattaaatgttctttcgaagtataatagcagtaagatttttaaaatagatttgaggtggggaagaagctgtcttggtcaaactgtcctttacatctctcccattgcttctctaaaccctatccaggaagtccagagacatggagacaaagaattatagcagcagcacctcaggcttcatcctcctgggcctctcttccaaccctaagctgcagaaacctctctttgccatcttcctcatcatgtacctactcactgcggtggggaatgtgctcatcatcctggccatctactctgaccccaggctccacacccctatgtacttttttctcagcaacttgtctttcatggatatctgcttcacaacagtcatagtgcctaagatgctggtgaattttctatcagagacaaagattatctcttatgtgggctgcctgatccagatgtacttcttcatggcatttgggaacactgacagctacctgctggcctctatggccatcgaccggctggtggccatctgcaaccccttacactatgatgtggttatgaaaccatggcattgcctactcatgctattgggttcttgcagcatctcccacctacattccctgttccgcgtgctacttatgtctcgcttgtctttctgtgcctctcacatcattaagcactttttctgtgacacccagcctgtgctaaagctctcctgctctgacacatcctccagccagatggtggtgatgactgagaccttagctgtcattgtgacccccttcctgtgtaccatcttctcctacctgcaaatcatcgtcactgtgctcagaatcccctctgcagccgggaagtggaaggccttctctacctgtggctcccacctcactgtagtggtcctgttctatgggagtgtcatctatgtctattttaggcctctgtccatgtactcagtgatgaagggccgggtagccacagttatgtacacagtagtgacacccatgctgaaccctttcatctacagcctgaggaacaaagatatgaaaaggggtttgaagaaattaagacacagaatttactcatagaaagaacaaaatgttggcatgtcaaaatcaggacatgacctaaaagattattatcagtttatcctcccttcctaacccttttccacatggcattcaaagaggtcatgaaaagtggtgttggatatcagtaagagaattaacctgggagcaaaacactcagtttctttatatatatatatatatatatgtatacacacaca

SEQ ID NO: 148 - protein, 311 aa, Homo sapiens
METKNYSSSTSGFILLGLSSNPKLQKPLFAIFLIMYLLTAVGNVLIILAIYSDPRLHTPMYFFLSNLSFMDICFTTVIVPKMLVNFLSETKIISYVGCLIQMYFFMAFGNTDSYLLASMAIDRLVAICNPLHYDVVMKPWHCLLMLLGSCSISHLHSLFRVLLMSRLSFCASHIIKHFFCDTQPVLKLSCSDTSSSQMVVMTETLAVIVTPFLCTIFSYLQIIVTVLRIPSAAGKWKAFSTCGSHLTVVVLFYGSVIYVYFRPLSMYSVMKGRVATVMYTVVTPMLNPFIYSLRNKDMKRGLKKLRHRIYS

SEQ ID NO: 149 - DNA, 1363 bp, Homo sapiens
  source
  (1)..(1363)
  CDS (201)..(1163)
caatgacttctaagagttagaaacaggttttgagaggttacgtggcttgctcaaggtcacagcaattttgttgcacaggtgagctgaaacccaagcctacctaactcccagtacaggatgctttcttctccctggccatggccttgccattgctcttatctccctcctgctttgcctcttctcagtctctgtccagtaggatgaactcagagaacctcacccgggccgcggttgcccctgctgaattcgtcctcctgggcatcacaaatcgctgggacctgcgtgtggccctcttcctgacctgcctgcctgtctacctggtgagcctgctgggaaacatgggcatggcgctgctgatccgcatggatgcccggctccacacacctatgtacttcttcctggccaacctctccctgctggatgcctgctattcctccgccatcggccccaagatgctagtggacctgctgctgccccgagccaccatcccttacacagcctgtgccctccagatgtttgtctttgcaggtctggctgatactgagtgttgcttgctggcagccatggcctatgaccgctacgtggccatcagaaacccacttctctatacaacagctatgtcgcagcgtctatgcctggccttgctgggagcatcaggcctgggtggggcagtgagtgcctttgttcacacaaccctcaccttccgcctgagcttctgccgctcccggaagatcaatagcttcttctgcgatatccctccactgctggccatctcgtgcagtgacaccagtctcaatgaactccttctcttcgccatctgtggcttcatccagacagccacggtgttagctatcacggtgtcttatggcttcatcgctggggctgtgatccacatgcgctcggtcgagggcagtcggcgagcagcctccaccggtggttcccacctcacagccgtggccatgatgtacgggacactcattttcatgtacctgcgccccagctccagctatgccctggacactgacaagatggcctctgtgttctataccctggtcatcccgtctctcaacccactcatctacagcctccgcaataaggaggtcaaggaggccctcaggcagacctggagccgattccactgtccagggcaggggtcccagtgattggtccagggaggctgggtaggtctgactatgaggggatgaggaaggtcggggcctctttctggccccgtcactgtcggtaaagatgggatgttcctctggcttggatgtctcatgtcattgtttaagggacagtaaagagggaaatgaaagcttatagcagggagaaaaagatttggggttcatctagggctagacct

SEQ ID NO: 150 - protein, 320 aa, Homo sapiens
MNSENLTRAAVAPAEFVLLGITNRWDLRVALFLTCLPVYLVSLLGNMGMALLIRMDARLHTPMYFFLANLSLLDACYSSAIGPKMLVDLLLPRATIPYTACALQMFVFAGLADTECCLLAAMAYDRYVAIRNPLLYTTAMSQRLCLALLGASGLGGAVSAFVHTTLTFRLSFCRSRKINSFFCDIPPLLAISCSDTSLNELLLFAICGFIQTATVLAITVSYGFIAGAVIHMRSVEGSRRAASTGGSHLTAVAMMYGTLIFMYLRPSSSYALDTDKMASVFYTLVIPSLNPLIYSLRNKEVKEALRQTWSRFHCPGQGSQ

SEQ ID NO: 151 - DNA, 1351 bp, Homo sapiens
  source
  (1)..(1351)
  CDS (201)..(1151)
aggttcagggaggtgaaatgacttgcccatagtcatacctgtgcctagggccagggctacctgactctaaactcttgatattttcccatggccaggaagccttgaacaatttatcccctcaccttttccgttagacatcggggaggtgacccatcaatagaaaggagcccttcaggttccaggcgaataaccagcctgccatggaggctgccaatgagtcttcagagggaatctcattcgttttattgggactgacaacaagtcctggacagcagcggcctctctttgtgctgttcttgctcttgtatgtggccagcctcctgggtaatggactcattgtggctgccatccaggccagtccagcccttcatgcacccatgtacttcctgctggcccacctgtcctttgctgacctctgcttcgcctccgtcactgtgcccaagatgttggccaacttgttggcccatgaccactccatctcgctggctggctgcctgacccaaatgtacttcttctttgccctgggggtaactgatagctgtcttctggcggccatggcctatgactgctacgtggccatccggcaccccctcccctatgccacgaggatgtcccgggccatgtgcgcagccctggtgggaatggcatggctggtgtcccacgtccactccctcctgtatatcctgctcatggctcgcttgtccttctgtgcttcccaccaagtgccccacttcttctgtgaccaccagcctctcttaaggctctcgtgctctgacacccaccacatccagctgctcatcttcaccgagggcgccgcagtggtggtcactcccttcctgctcatcctcgcctcctatggggccatcgcagctgccgtgctccagctgccctcagcctctgggaggctccgggctgtgtccacctgtggctcccacctggctgtggtgagcctcttctatgggacagtcattgcagtctacttccaggccacatcccgacgcgaggcagagtggggccgtgtggccactgtcatgtacactgtagtcacccccatgctgaaccccatcatctacagcctctggaatcgcgatgtacagggggcactccgagcccttctcattgggcgaaggatctcagctagtgactcctgagggcaggaccccactgaggacagactgcatcacccacactggcaactgttgaacgtgaccctctgtcctctgctatgctcaaaaatcataacagctgtcatttcctgagcacctgcccggaagcagatccttgcctgatctcattttattcccacagccacccaggatgcagatattatgatccggttttacacacaaga

SEQ ID NO: 152 - protein, 316 aa, Homo sapiens
MEAANESSEGISFVLLGLTTSPGQQRPLFVLFLLLYVASLLGNGLIVAAIQASPALHAPMYFLLAHLSFADLCFASVTVPKMLANLLAHDHSISLAGCLTQMYFFFALGVTDSCLLAAMAYDCYVAIRHPLPYATRMSRAMCAALVGMAWLVSHVHSLLYILLMARLSFCASHQVPHFFCDHQPLLRLSCSDTHHIQLLIFTEGAAVVVTPFLLILASYGAIAAAVLQLPSASGRLRAVSTCGSHLAVVSLFYGTVIAVYFQATSRREAEWGRVATVMYTVVTPMLNPIIYSLWNRDVQGALRALLIGRRISASDS

SEQ ID NO: 153 - DNA, 1102 bp, Homo sapiens
  source
  (1)..(1102)
  CDS (201)..(902)
atttcaggtgggatgcagagagagataaaagctctccatagtaactgccagttgtggactcaagatggtaaatactttttttctctctgagcagaggctgggacatttacttaacatctgacgctgaagaaagcaaagacctttagttctggaatctcaatttcattatcttcttcaggtgaaccagctatattgagcctatggccaaaagaaatctcagcactgtgacagagttcattcttgtagtcttcacagatcaccctgaactggcagttccactcttcctagtgtttctcagtttctatcttgtcacttttctggggaatggggggatgatcattctaatccaagtggatgcccaactccacacccccgtgtacttcttcctgagccaccttgctttcctggatgcctgctgtgcctcagtaatcacccctcagattctggccacactggccacagacaagacagttatctcctatggctgccgtgctgtgcagttctctttcttcaccatatgtgcaggcacagagtgttacctgctgtcagtgatggcctatgaccgctttgttgccattagcaatccactgcactgtaacatgaccatgactccaggtacctgcagggtctttttggccagtgccttcatctgtggggtgtcaggggccattctgcataccacgtgcaccttcaccctctccttctgttgtgacaatcagatcaacttcttcttctgtgacctcccacccctgctgaagctcgcctgcagcagcatgacacaaactgagattgtcattctcctttgtgcaaaatgcatgttcctagccaatgtcatggttatcctgatctgctacatgctcattatcagagccattttgagggtgaagtcggcaggtgggtaagccaagaccttctccacctgcacctcccatctcaccactgttgtcctcttctttgggacacttgccttcatgtaccagagaagtaactccgccaaatcctcagaggaagacaagatagtgtctgtcttttacactgtaatcatccctatgttgaaccccttgatctacagtctgaggaacaaagatgtaaaagctgcatt

SEQ ID NO: 154 - protein, 233 aa, Homo sapiens
MAKRNLSTVTEFILVVFTDHPELAVPLFLVFLSFYLVTFLGNGGMIILIQVDAQLHTPVYFFLSHLAFLDACCASVITPQILATLATDKTVISYGCRAVQFSFFTICAGTECYLLSVMAYDRFVAISNPLHCNMTMTPGTCRVFLASAFICGVSGAILHTTCTFTLSFCCDNQINFFFCDLPPLLKLACSSMTQTEIVILLCAKCMFLANVMVILICYMLIIRAILRVKSAGG

SEQ ID NO: 155 - DNA, 1345 bp, Homo sapiens
  source
  (1)..(1345)
  CDS (201)..(1145)
agcttaaggctcagttccataaaatgcaagagatgcccaaggaaaatcagccagtttcagaatttcttaaaaacaaactctacaaatagacccagaattaaaaccaaaacttccaccatagagggaaagattctgtccttcaattctgagattctttttatttcattatcatcctcagaccaacagtccacattgtctccatggccaagaataatctcaccagagtaaccgaattcattctcatgggctttatggaccaccccaaattggagattcccctctttctggtgtttctgagtttctacctagtcacccttcttgggaatgtggggatgattatgttaatccaagtagatgtcaaactctacaccccaatgtacttcttcctgagccacctctccctgctggatgcctgttacacctcagtcatcacccctcagatcctagccacattggccacaggcaaaacggtcatctcctacggccactgtgctgcccagttctttttattcaccatctgtgcaggcacagagtgctttctgctggcagtgatggcctatgatcgctatgctgccattcgcaacccactgctctataccgtggccatgaatcccaggctctgctggagcctggtggtaggagcctatgtctgtggggtgtcaggagccatcctgcgtaccacttgcaccttcaccctctccttctgtaaggacaatcaaataaacttcttcttctgtgacctcccacccctgctgaagcttgcctgcagtgacacagcaaacatcgagattgtcatcatcttctttggcaattttgtgattttggccaatgcctccgtcatcctgatttcctatctgctcatcatcaagaccattttgaaagtgaagtcttcaggtggcagggccaagactttctccacatgtgcctctcacatcactgctgtggcccttttctttggagcccttatcttcatgtatctgcaaagtggctcaggcaaatctctggaggaagacaaagtcgtgtctgtcttctatacagtggtcatccccatgctgaaccctctgatctacagcttaagaaacaaagatgtaaaagacgccttcagaaaggtcgctaggagactccaggtgtccctgagcatgtagatctaagtaagaggaattcttgttttagtccactttcttcccatatgaatatatcctaataggcaccattactatatgcaacctatacccacaaacagagaagacagaagataggtaccaccaggcacacaggaaaaactacaattgtggtgaaattagtttccagcaattccatgttctttcttcttatccccttcttc

SEQ ID NO: 156 - protein, 314 aa, Homo sapiens
MAKNNLTRVTEFILMGFMDHPKLEIPLFLVFLSFYLVTLLGNVGMIMLIQVDVKLYTPMYFFLSHLSLLDACYTSVITPQILATLATGKTVISYGHCAAQFFLFTICAGTECFLLAVMAYDRYAAIRNPLLYTVAMNPRLCWSLVVGAYVCGVSGAILRTTCTFTLSFCKDNQINFFFCDLPPLLKLACSDTANIEIVIIFFGNFVILANASVILISYLLIIKTILKVKSSGGRAKTFSTCASHITAVALFFGALIFMYLQSGSGKSLEEDKVVSVFYTVVIPMLNPLIYSLRNKDVKDAFRKVARRLQVSLSM

SEQ ID NO: 157 - DNA, 1333 bp, Homo sapiens
  source
  (1)..(1333)
  CDS (201)..(1133)
cgaactcctgggctcaagtgatcccactgcctcgcttccaaagtgctgatattacaggtgtgagccacagcacctggcacacctggcatattttgtccacagtacattttcaataaatgtgaactacaaatacaggtaaatcctatttgcaccttcctaacttgcttcccattctacatgtctcagggaccactggtgtcatggcagagatgaacctcaccttggtgaccgagttcctccttattgcattcactgaatatcctgaatgggcactccctctcttcctcttgtttttatttatgtatctcatcaccgtattggggaacttagagatgattattctgatcctcatggatcaccagctccacgctccaatgtatttccttctgagtcacctcgctttcatggacgtctgctactcatctatcactgtcccccagatgctggcagtgctgctggagcatggggcagctttatcttacacacgctgtgctgctcagttctttctgttcaccttctttggttccatcgactgctacctcttggccctcatggcctatgaccgctacttggctgtgtgccagcccctgctttatgtcaccatcctgacacagcaggcccgcttgagtcttgtggctggggcttacgttgctggtctcatcagtgccttggtgcggacagtctcagccttcactctctccttctgtggaaccagtgagattgactttattttctgtgacctccctcctctgttaaagttgacctgtggggagagctacactcaagaagtgctgattattatgtttgccatttttgtcatccctgcttccatggtggtgatcttggtgtcctacctgtttatcatcgtggccatcatggggatccctgctggaagccaggccaagaccttctccacctgcacctcccacctcactgctgtgtcactcttctttggtaccctcatcttcatgtacttgagaggtaactcagatcagtcttcggagaagaatcgggtagtgtctgtgctttacacagaggtcatccccatgttgaatcccctcatctacagcctgaggaacaaggaagtgaaggaggccctgagaaaaattctcaatagagccaagttgtcctaaccatctccaaacttggaaaatcccgagaaccacctactctgtagtgtcagaattctggacgctcattatttatagcatgctcaatgtttaaatgaatatattatggtactaggtataaaaaagaaccagaacttttagctccagggagaggaaggaagacaaggaaaagtcaacctgaaaagagattggagtgggagttt

SEQ ID NO: 158 - protein, 310 aa, Homo sapiens
MAEMNLTLVTEFLLIAFTEYPEWALPLFLLFLFMYLITVLGNLEMIILILMDHQLHAPMYFLLSHLAFMDVCYSSITVPQMLAVLLEHGAALSYTRCAAQFFLFTFFGSIDCYLLALMAYDRYLAVCQPLLYVTILTQQARLSLVAGAYVAGLISALVRTVSAFTLSFCGTSEIDFIFCDLPPLLKLTCGESYTQEVLIIMFAIFVIPASMVVILVSYLFIIVAIMGIPAGSQAKTFSTCTSHLTAVSLFFGTLIFMYLRGNSDQSSEKNRVVSVLYTEVIPMLNPLIYSLRNKEVKEALRKILNRAKLS

SEQ ID NO: 159 - DNA, 1360 bp, Homo sapiens
  source
  (1)..(1360)
  CDS (201)..(1160)
gcgcctgtagtcccagctacttgggaggctgaggcaggagaatggcgtgaacccgggaggcggagcttgcagtgagccgagatcccgccactgcactccagcctgggcgacagagcgagactccgtctcaaaaagaaaaaaaagaaataaagcaactcagccaagaagagctcagcgcgtcctattcttttgcataagacatgcctgtggggaaacttgtcttcaaccagtctgagcccactgagtttgtgttccgtgcgttcaccacagccactgaattccaggttcttctcttccttctcttcctcctcctctacttgatgatcctctgtggcaacacagccatcatctgggtggtgtgcacacacagcaccctccgcaccccgatgtatttcttcctgtccaacctgtctttcctggaactctgctacaccaccgtggtagtacccttgatgctttccaacattttgggggcccagaagcccatttcgttggctggatgtggggcccaaatgttcttctttgtcaccctcggcagcacggactgtttcctcttggcgatcatggcctatgaccgctatgtggctatctgccacccgctgcactacaccctcatcatgacccgcgagctgtgcacgcagatgctgggtggggccctgggcctggccctcttcccctccctgcagctcaccgccttaatcttcaccctgcccttttgcggccaccaccaggaaatcaaccacttcctctgcgatgtgcctcccgtcctgcgcctggcctgcgctgacatccgcgtgcaccaggctgtcctctatgtcgtgagcatcctcgtgctgaccatccccttcctgctcatctgcgtctcctacgtgttcatcacctgtgccatcctgagcatccgttctgccgagggccgccgccgggccttctccacctgctccttccacctcaccgtggtcctgctgcagtatggctgctgcagcctcgtgtacctgcgtcctcggtccagcacctcagaggatgaggacagccaaatcgcgttggtctacacctttgtcacccccttactcaaccctttgctttacagccttaggaacaaggatgtcaaaggtgctctgaggagtgccattatccgtaaagcagcctctgacgccaactgaaggcttaggggcactgggctgggtgtctgtctgttgctgtgtcaaagaactctaaatgacacagaactgtagtactttctcacactgtgcacttgatgtttcttttttgccatatttgccccaagttcacaattcatgctcatttttctgaagtgctttgactaagatatgaaaatttggacagaacttacagcgtagga

SEQ ID NO: 160 - protein, 319 aa, Homo sapiens
MPVGKLVFNQSEPTEFVFRAFTTATEFQVLLFLLFLLLYLMILCGNTAIIWVVCTHSTLRTPMYFFLSNLSFLELCYTTVVVPLMLSNILGAQKPISLAGCGAQMFFFVTLGSTDCFLLAIMAYDRYVAICHPLHYTLIMTRELCTQMLGGALGLALFPSLQLTALIFTLPFCGHHQEINHFLCDVPPVLRLACADIRVHQAVLYVVSILVLTIPFLLICVSYVFITCAILSIRSAEGRRRAFSTCSFHLTVVLLQYGCCSLVYLRPRSSTSEDEDSQIALVYTFVTPLLNPLLYSLRNKDVKGALRSAIIRKAASDAN

SEQ ID NO: 161 - DNA, 1354 bp, Homo sapiens
  source
  (1)..(1354)
  CDS (201)..(1154)
ttcattttgtactaatattatttgttttctcatgtccctcatgaactgtgaattctttgagggtaagaacagtgtgttgacatcatgtttctcttctgaagtgaaaggcattttagtacaacatcctccaacctcacaggttctctttgagctctcattgtctatgaggctatgagtttgctgagctctcactgccacatatgcaaccatataccaaaaactggacccaggtaactgaatttgtcatgatgggctttgctggcatccatgaagcacacctcctcttcttcatactcttcctcaccatgtacctgttcaccttggtggagaatttggccatcattttagtggtgggtttggaccaccgactacggagacccatgtatttcttcctgacacacttgtcctgccttgaaatctggtacacttctgttacagtgcccaagatgctggctggttttattggggtggatggtggcaagaatatctcttatgctggttgcctatcccagctcttcatcttcacctttcttggggcaactgagtgtttcctactggctgccatggcctatgatcgttatgtggccatttgtatgcctctccactatggggcttttgtgtcctggggcacctgcatccgtctggcagctgcctgttggctggtaggtttcctcacacccatcttgccaatctacctcttgtctcagctaacattttgtggcccaaatgtcattgaccatttctcctgtgatgcctcacccttgctagccttgtcgtgctcagatgtcacttggaaggagactgtggatttcctggtgtctctggctgtgctactggcctcctctatggtcattgctgtgtcctatggcaacatcgtctggacactgctgcacatccgctcagctgctgagcgctggaaggccttctctacctgtgcagctcacctgactgtggtgagcctcttctatggcactcttttctttatgtatgtccagaccaaggtgacctcctccatcaacttcaacaaggtggtatctgtcttctactctgttgtcacgcccatgctcaatcctctcatctacagtcttaggaacaaggaagtgaagggagctctgggtcgagtcttttctctcaacttttggaagggacagtgaggaggcaggtgggaacccagtttccttgccttggatatttaaaaacaggttagtcaataacatttaagctgagaccaaatcaagaatgcagttccatttataacagccacaaaaaatacaatacctaggaatacaactaaccaaggaagtgaaagatatttataaggggaaccacaaaacactgctaaaagaaatcagag

SEQ ID NO: 162 - protein, 317 aa, Homo sapiens
MQPYTKNWTQVTEFVMMGFAGIHEAHLLFFILFLTMYLFTLVENLAIILVVGLDHRLRRPMYFFLTHLSCLEIWYTSVTVPKMLAGFIGVDGGKNISYAGCLSQLFIFTFLGATECFLLAAMAYDRYVAICMPLHYGAFVSWGTCIRLAAACWLVGFLTPILPIYLLSQLTFCGPNVIDHFSCDASPLLALSCSDVTWKETVDFLVSLAVLLASSMVIAVSYGNIVWTLLHIRSAAERWKAFSTCAAHLTVVSLFYGTLFFMYVQTKVTSSINFNKVVSVFYSVVTPMLNPLIYSLRNKEVKGALGRVFSLNFWKGQ

SEQ ID NO: 163 - DNA, 1360 bp, Homo sapiens
  source
  (1)..(1360)
  CDS (201)..(1160)
aacagatgctgatgccatgcttgcacagcctgcagaaccaggagccaaataaatctcttttctttataaatttacccagtttcagatattccttaatagcaacacaaaacagattgaaattcttcctcattgtaccttgcacagatgtagacgtgctcaagtaatactgtttgagtgattgccaactgtaacctctgcagatgacacctggagaactagcccttgccagtggcaaccacaccccagtcaccaagttcatcttgcagggattctccaattatccagacctccaggagcttctcttcggagccatcctgctcatctatgccataacagtggtgggcaacttgggaatgatggcactcatcttcacagactcccatctccaaagcccaatgtatttcttcctcaatgtcctctcgtttcttgatatttgttactcttctgtggtcacacctaagctcttggtcaacttcctggtctctgacaagtccatctcttttgagggctgtgtggtccagctcgccttctttgtagtgcatgtgacagctgagagcttcctgctggcctccatggcctatgaccgcttcctagccatctgtcaacccctccattatggttctatcatgaccagggggacctgtctccagctggtagctgtgtcctatgcatttggtggagccaactccgctatccagactggaaatgtctttgccctgcctttctgtgggcccaaccagctaacacactactactgtgacataccaccccttctccacctggcttgtgccaacacagccacagcaagagtggtcctctatgtcttttctgctctggtcacccttctgcctgctgcagtcattctcacctcctactgcttggtcttggtggccattgggaggatgcgctcagtagcagggagggagaaggacctctccacttgtgcctcccactttctggccattgccattttctatggcaccgtggttttcacctatgttcagccccatggatctactaacaataccaatggccaagtagtgtccgtcttctacaccatcataattcccatgctcaatcccttcatctatagcctccgcaacaaggaggtgaagggcgctctgcagaggaagcttcaggtcaacatctttcccggctgagccctgcaaggtgacttgttggaatgaggaaggtataacatcttccaaagcacactatgaattaacgtaaccaatcaagagcagccctggttttggaggagatagaaaaagtaaatgagaaacagcaaatatatcttgtacagaccattacagtttataaagcatcttcttacccattatcatatcaaattctcaccacc

SEQ ID NO: 164 - protein, 319 aa, Homo sapiens
MTPGELALASGNHTPVTKFILQGFSNYPDLQELLFGAILLIYAITVVGNLGMMALIFTDSHLQSPMYFFLNVLSFLDICYSSVVTPKLLVNFLVSDKSISFEGCVVQLAFFVVHVTAESFLLASMAYDRFLAICQPLHYGSIMTRGTCLQLVAVSYAFGGANSAIQTGNVFALPFCGPNQLTHYYCDIPPLLHLACANTATARVVLYVFSALVTLLPAAVILTSYCLVLVAIGRMRSVAGREKDLSTCASHFLAIAIFYGTVVFTYVQPHGSTNNTNGQVVSVFYTIIIPMLNPFIYSLRNKEVKGALQRKLQVNIFPG

SEQ ID NO: 165 - DNA, 1330 bp, Homo sapiens
  source
  (1)..(1330)
  CDS (201)..(1130)
catcaagtaaatcactctttacttgatgattataaatacatttcttaaatttgaaaatgaataacactattgtatttgtcataaaaatacaaatagaaaaaagtgacttgaaatatagagccatttcattgcaagaaatctcaaagatttcccttcttttctgggtccttctcttggtcatttctagacttttactagccatgacactaggaaacagcactgaagtcactgaattctatcttctgggatttggtgcccagcatgagttttggtgtatcctcttcattgtattccttctcatctatgtgacctccataatgggtaatagtggaataatcttactcatcaacacagattccagatttcaaacactcacgtacttttttctacaacatttggcttttgttgatatctgttacacttctgctatcactcccaagatgctccaaagcttcacagaagaaaagaatttgatgttatttcagggctgtgtgatacaattcttagtttatgcaacatttgcaaccagtgactgttatctcctggctatgatggcagtggatccttatgttgccatctgtaagccccttcactatactgtaatcatgtcccgaacagtctgcatccgtttggtagctggttcatacatcatgggctcaataaatgcctctgtacaaacaggttttacatgttcactgtccttctgcaagtccaatagcatcaatcactttttctgtgatgttccccctattcttgctctttcatgctccaatgttgacatcaacatcatgctacttgttgtctttgtgggatctaacttgatattcactgggttggtcgtcatcttttcctacatctacatcatggccaccatcctgaaaatgtcttctagtgcaggaaggaaaaaatccttctcaacatgtgcttcccacctgaccgcagtcaccattttctatgggacactctcttacatgtatttgcagtctcattctaataattcccaggaaaatatgaaagtggcctttatattttatggcacagttattcccatgttaaatcctttaatctatagcttgagaaataaggaagtaaaagaagctttaaaagtgatagggaaaaagttattttaaatcagccccagttgttaacattcaactcaacaaatcatccaacatagctgttctgctaaaatttaatttttccacaataaggaatatgtagaaagatgtcaaattaataatctaacatcacctctagaggaatttaaaatacaaaagccaacaaatcccaaacctagcagaagaaaaaaataactaaaatcagaacagaa

SEQ ID NO: 166 - protein, 309 aa, Homo sapiens
MTLGNSTEVTEFYLLGFGAQHEFWCILFIVFLLIYVTSIMGNSGIILLINTDSRFQTLTYFFLQHLAFVDICYTSAITPKMLQSFTEEKNLMLFQGCVIQFLVYATFATSDCYLLAMMAVDPYVAICKPLHYTVIMSRTVCIRLVAGSYIMGSINASVQTGFTCSLSFCKSNSINHFFCDVPPILALSCSNVDINIMLLVVFVGSNLIFTGLVVIFSYIYIMATILKMSSSAGRKKSFSTCASHLTAVTIFYGTLSYMYLQSHSNNSQENMKVAFIFYGTVIPMLNPLIYSLRNKEVKEALKVIGKKLF

SEQ ID NO: 167 - DNA, 1297 bp, Homo sapiens
  source
  (1)..(1297)
  CDS (201)..(1097)
tttcatctagtaactctctctttacttgatgattataaattttttttaatttggaaataacactattgtgagtatttgtcatgaaaagtcaaattgaaaaaagtgacttaaaatatagagccattttattgcaaaaagtcacaaggatgttcctgcttttctgggtccttctcttggtcctttctagacttttggtagtcatgggtcgaggaaacagcactgaagtgactgaattccatcttctgggatttggtgtccaacacgaatttcagcatgtccttttcattgtacttcttcttatctatgtgacctccctgataggaaatattggaatgatcttactcatcaagaccgattccagacttcaaacacccatgtacttttttccacaacatttggcttttgttgatatctgttatacttctgctatcactcccaagatgctccaaagcttcacagaagaaaataatttgataacatttcggggctgtgtgatacaattcttagtttatgcaacatttgcaaccagtgactgttacctcctagctattatggcaatggattgttatgttgccatctgtaagccccttcgctatcccatgatcatgtcccaaacagtctacatccaactcgtagctggctcatatattataggctcaataaatgcctctgtacatacaggttttacattttcactgtccttctgcaagtctaataaaatcaatcactttttctgtgatggtctcccaattcttgccctttcatgctccaacattgacatcaacatcattctagatgttgtctttgtgggatttgacttgatgttcactgagttggtcatcatcttttcctacatctacattatggtcaccatcctgaagatgtcttctactgctgggaggaaaaaatccttctccacatgtgcctcccacctgacagcagtaaccattttctatgggacactctcttacatgtacttacagcctcagtctaataattctcaggagaatatgaaagtagcctctatattttatggcactgttattcccatgttgaatcctttaatctatagcttgagaaataaggaaggaaaataagctttaaaagtgataggaaaaaagttttgttaagttagacacagttgttaaaattcaacacaacaaagcatccagcacagctaatctgccaaaatttaaagtttctaaaatagggagcatgtaggaaaatctcaaattaaccatctaacatcacacctagagcaattagaaaaaagaaataactaaaatcagaacaaaac

SEQ ID NO: 168 - protein, 298 aa, Homo sapiens
MGRGNSTEVTEFHLLGFGVQHEFQHVLFIVLLLIYVTSLIGNIGMILLIKTDSRLQTPMYFFPQHLAFVDICYTSAITPKMLQSFTEENNLITFRGCVIQFLVYATFATSDCYLLAIMAMDCYVAICKPLRYPMIMSQTVYIQLVAGSYIIGSINASVHTGFTFSLSFCKSNKINHFFCDGLPILALSCSNIDINIILDVVFVGFDLMFTELVIIFSYIYIMVTILKMSSTAGRKKSFSTCASHLTAVTIFYGTLSYMYLQPQSNNSQENMKVASIFYGTVIPMLNPLIYSLRNKEGK

SEQ ID NO: 169 - DNA, 1210 bp, Homo sapiens
  source
  (1)..(1210)
  CDS (201)..(1010)
agtcacatttatcaagtctgttgtgaattctttgctcttcttctagtagaaagcagaaccagtcaatggctaatgaaaactacacaaaggtcacctaattcattttcacaggcttgaattacaatcctcagttgcaggtcttccttttcctactctttctgacaactttctatgtcatcaatgtaactggaaacttgggaatgattgtcctcatccgaattgattcccgccttcacacacccatgtactttttcctcagccacctgtcctttgtggacacctgcttctcctcagttgtgagccccaagatgctcactgacttctttgtgaagaggaaagccatttctttccttggctgtgctttgcagcagtggttctttgggttctttgtggcagcagactgtttcctcttggagtccatggcctatgactgctatgtggccatctgtaacccattgttatactcagttgctatgtcccagaggctctgcatccagctagtggtgggtccctatgtcattggactcatgaataccatgactcacacaacaaatgcattttgtctccctttttgtggccctaatgtcatcaatcctttcttctgtgatatgtcccccttactttcccttgtatgtgctgataccaggctcaataagttggcagttttcatcgtggctggagctgtgggagtcttcagtggtctgactatcctgatttcctacatttacatcctcatggccatcctgaggatccgctctgctgatgggaggtgcaaaaccttttctacttgctcttctcacctgacagctgttttcatctcgtatggtacccttttctttatttatgtacatcccagtgcaaccttctccctggatctcaataaagtagtgtctgtgttttacacagcagtgattcctatgttgaacccacttatctacagcttgagaaacaaggaagtcaaagatgccatccacaggactgtcactcagaggaagttttgcaaggcctaaattcttatccagaaggaattagggaggaaaatttaaaagaacagagtaattgtgtggcttcctaagattccaaaacacttgcaagtgtttgggggctgtttagcatccctttatccattcaaccatccaattattcacttatttagtcaatccatgtggatttatttggccctatatgtaatcttttccctataacatac

SEQ ID NO: 170 - protein, 269 aa, Homo sapiens
MIVLIRIDSRLHTPMYFFLSHLSFVDTCFSSVVSPKMLTDFFVKRKAISFLGCALQQWFFGFFVAADCFLLESMAYDCYVAICNPLLYSVAMSQRLCIQLVVGPYVIGLMNTMTHTTNAFCLPFCGPNVINPFFCDMSPLLSLVCADTRLNKLAVFIVAGAVGVFSGLTILISYIYILMAILRIRSADGRCKTFSTCSSHLTAVFISYGTLFFIYVHPSATFSLDLNKVVSVFYTAVIPMLNPLIYSLRNKEVKDAIHRTVTQRKFCKA

SEQ ID NO: 171 - DNA, 1339 bp, Homo sapiens
  source
  (1)..(1339)
  CDS (201)..(1139)
attatttttgactccaattccagtaatttttccaaatcatggactgaagtcctataattctagatagtaagggagaaaaatctacaagcttcttagtaattgttgatttaattgatacccttgtcaacttgtgtgaatagaaaaaacactaagtgatgattttcccttctcatgatagtcaggctttcacctccgtggacatggaagtgggaaattgcaccatcctgactgaattcatcttgttgggtttctcagcagattcccagtggcagccgattctatttggagtgtttctgatgctctatttgataaccttgtcaggaaacatgaccttggttatcttaatccgaactgattcccacttgcatacacctatgtactttttcattggcaatctgtcttttttggatttctggtatacctctgtgtatacccccaaaatcctggccagttgtgtctcagaagataagcgcatttccttggctggatgtggggctcagctgtttttttcctgtgttgtagcctacactgaatgctatctcctggcagccatggcatatgaccgccatgcagcaatttgtaacccattgctttattcaggtaccatgtccaccgccctctgtactgggcttgttgctggctcctacataggaggatttttgaatgccatagcccatactgccaatacattccgcctgcatttttgtggtaaaaatatcattgaccactttttctgtgatgcaccaccattggtaaaaatgtcctgtacaaacaccagggtctacgaaaaagtcctgcttggtgtggtgggcttcacagtactctccagcattcttgctatcctgatttcctatgtcaacatcctcctggctatcctgagaatccactcagcttcaggaagacacaaggcattctccacctgtgcttcccacctcatctcagtcatgctcttctatggatcattgttgtttatgtattcaaggcctagttccacctactccctagagagggacaaagtagctgctctgttctacaccgtgatcaacccactgctcaaccctctcatctatagcctgagaaacaaagatatcaaagaggccttcaggaaagcaacacagactatacaaccacaaacatgaaggttattctctttgcaaatgctgttattgaattttccagattattggcttataaatgtgttcatttgcatttctgtagttcaattaagttcaataagtcatatttaaaacattaaaatattgaccacatgactccttgttattcgtttgttatgatgtaaacaaaacaaagtaatatttaaaacttataatattgggtt

SEQ ID NO: 172 - protein, 312 aa, Homo sapiens
MEVGNCTILTEFILLGFSADSQWQPILFGVFLMLYLITLSGNMTLVILIRTDSHLHTPMYFFIGNLSFLDFWYTSVYTPKILASCVSEDKRISLAGCGAQLFFSCVVAYTECYLLAAMAYDRHAAICNPLLYSGTMSTALCTGLVAGSYIGGFLNAIAHTANTFRLHFCGKNIIDHFFCDAPPLVKMSCTNTRVYEKVLLGVVGFTVLSSILAILISYVNILLAILRIHSASGRHKAFSTCASHLISVMLFYGSLLFMYSRPSSTYSLERDKVAALFYTVINPLLNPLIYSLRNKDIKEAFRKATQTIQPQT

SEQ ID NO: 173 - DNA, 1318 bp, Homo sapiens
  source
  (1)..(1318)
  CDS (201)..(1118)
agaaatttagaattgaatacataattgcaaagcctgattgttgcaaaatgaagactttctaaaacaaacaattagattgttggttctagacttcacgaaacactgcaaatgtgatcttatgtaacataattctacatattcatgacagtaatgcaaactgagctcattttctttccccataggtgagattccttacagccatgcagaggagcaatcatacagtgactgagtttatactgctgggcttcaccacagacccaggaatgcagctgggcctcttcgtggtgttcctgggcgtgtactctctcactgtggtaggaaatagcaccctcatcgtgttgatctgtaatgactcctgcctccacacacccatgtattttttcactggaaatctgtcgtttctggatctctggtattcttctgtctacaccccaaagatcctagtgacctgcatctctgaagacaaaagcatctcctttgctggctgcctgtgtcagttcttcttctctgcagggctggcctatagtgagtgctacctgctggctgccgtggcttatgaccgctacgtggccatctccaagcccctgctttatgcccaggccatgtccataaagctgtgtgcattgctggtagcagtctcatattgtggtggctttattaactcttcaatcatcaccaagaaaacgttttcctttaacttctgccgtgaaaacatcattgatgactttttctgtgatttgcttcccttggtggagctggcctgtggcgagaagggcggctataaaattatgatgtacttcctgctggcctccaatgtcatctgccccgcagtgctcatcctggcctcctacctctttatcatcaccagtgtcttgaggatctcctcctccaagggctacctcaaagccttctccacatgctcctcccacctgacctctgtcactttatactatggctccattctctacatctacgctctccccagatctagctattcttttgatatggacaaaatagtttctacattttacactgtggtattccccatgttgaatctcatgatctacagcctaaggaataaggatgtgaaagaggctctgaaaaaacttctcccataaatcaagattatctccaccagaggagaaacaaagacgaccttagatggagtgttgtgtatttcaaacagagttaccattgtgctttatcgtgatcagtccccttcttgacacgtgagagttacagacatgtacaataagaaaattaggaaaatttcggacaaaaacatctgaatatataagaatttgaattgaatttccta

SEQ ID NO: 174 - protein, 305 aa, Homo sapiens
MQRSNHTVTEFILLGFTTDPGMQLGLFVVFLGVYSLTVVGNSTLIVLICNDSCLHTPMYFFTGNLSFLDLWYSSVYTPKILVTCISEDKSISFAGCLCQFFFSAGLAYSECYLLAAVAYDRYVAISKPLLYAQAMSIKLCALLVAVSYCGGFINSSIITKKTFSFNFCRENIIDDFFCDLLPLVELACGEKGGYKIMMYFLLASNVICPAVLILASYLFIITSVLRISSSKGYLKAFSTCSSHLTSVTLYYGSILYIYALPRSSYSFDMDKIVSTFYTVVFPMLNLMIYSLRNKDVKEALKKLLP

SEQ ID NO: 175 - DNA, 1318 bp, Homo sapiens
  source
  (1)..(1318)
  CDS (201)..(1118)
cttaagaaatttagaattgaatacataattgcaaagtcggttgcaaaatgaaaactttctaaaacaaacaattagattgttggttctagacttcaaagattactgcaaatgtgatcttatgtagcataattctacatattcatgactgtgattcagactgagctcatttcctttccccataggtgagattccttacagccatgcagaggagcaatcacacagtgactgagtttatactgctgggcttcaccacagacccagggatgcagctgggcctcttcgtggtgttcctgggcgtgtactctctcactgtggtaggaaatagcaccctcatcgtgttgatctgtaatgactcccacctccacacacccatgtattttgtcgttggaaatctgtcgtttctggatctctggtattcttctgtctacaccccaaagatcctagtgatctgcatctctgaagacaaaagcatctcctttgctggctgcctgtgtcagttcttcttctctgcagggctggcctatagtgagtgctgcttactggctgccatggcttatgaccgctacgtggccatctccaagcccctgctttatgcccaggccatgtccataaagctgtgtgcattgctggtagcagtctcatattgtggtggctttattaactcttcaatcatcaccaagaaaacgttttcctttaacttctgccgtgaaaacatcattgatgactttttctgtgatttgcttcccttggtggagctggcctgtggcgagaagggcggctataaaattatgatgtacttcctgctggcctccaatgtcatctgccccgcagtgctcatcctggcctcctacctctttatcatcaccagtgtcttgaggatctcctcctccaagggctacctcaaagccttctccacatgctcctcccacctgacctctgtcactttatactatggctccattctctacatctacgctctccccagatctagctattcttttgatatggacaaaatagtttctacattttacactgtggtattccccatgttgaatctcatgatctacagcctaaggaataaggatgtgaaagaggctctgaaaaaacttctcccataaatcaagattatctccaccagaggagaaacaaagacgaccttagatggagtgttgtgtatttcaaacagagttaccattgtgctttatcgtgatcagtccccttcttgacacgtgagagttacagacatgtacaataagaaaattaggaaaatttcggacaaaaacatctgaatatataagaatttgaattgaatttccta

SEQ ID NO: 176 - protein, 305 aa, Homo sapiens
MQRSNHTVTEFILLGFTTDPGMQLGLFVVFLGVYSLTVVGNSTLIVLICNDSHLHTPMYFVVGNLSFLDLWYSSVYTPKILVICISEDKSISFAGCLCQFFFSAGLAYSECCLLAAMAYDRYVAISKPLLYAQAMSIKLCALLVAVSYCGGFINSSIITKKTFSFNFCRENIIDDFFCDLLPLVELACGEKGGYKIMMYFLLASNVICPAVLILASYLFIITSVLRISSSKGYLKAFSTCSSHLTSVTLYYGSILYIYALPRSSYSFDMDKIVSTFYTVVFPMLNLMIYSLRNKDVKEALKKLLP

SEQ ID NO: 177 - DNA, 1333 bp, Homo sapiens
  source
  (1)..(1333)
  CDS (201)..(1133)
gaatcatcctaaacaaagccttcatttactgtagaactatatgtatacacatatacacaatagataaatatatatatatatatgtatattgcaatatctctggcatatgattgctcgtctttagtttgaatattttcagtgacagggaatttactacatccatcaaaaaactaaatccaggcacacatacacttgaagcaatggataaagaaaacagctcaatggtgactgagtttatcttcatgggcatcacccaggaccctcagatggagatcatcttcttcgtggtcttcctcatagtttacctggttaatgtagtggggaatattggtatgattatcctgattacaacagacactcagcttcacacacccatgtattttttcctctgcaacctctcctttgttgacctgggctactcctcagccattgcccccaggatgctggctgacttcctaacaaatcacaaagttatctccttctccagctgtgccacccagtttgctttttttgtaggttttgtggatgctgagtgctatgtcctggcagccatggcctatggtcgttttgtggccatttgtcgacccctccactatagcaccttcatgtccaagcaggtctgcttggctctcatgctgggctcttacctggctggtctagtgagtttagtagcccacactaccctcaccttcagcctgagttactgtggttccaatatcatcaatcatttcttctgcgaaatcccaccactcttggccctctcttgctcagacacctacatcagtgagatcttgctcttcagtctgtgtggcttcattgaattcagcaccatcctcatcatcttcatctcctatacctttatccttgttgcaatcatcagaatgcgttcagctgaaggccgccttaaggctttctccacctgcgggtctcaccttactggcatcaccctcttctatggcacagtcatgtttatgtacctgaggccaacatccagctactccctggaccaagacaagtgggcctctgtgttctacacggttatcatccccatgttaaatcccttgatctacagtttgcggaacaaggatgtgaaagctgctttcaaaaagctaattggaaaaaaatctcaataataacacaaaatgaaaatctgtttctgtcataggtaaatgacagtagtagaagggcatagaaaatgcaaataacttttcgataaacactacccaagttaccatctccttgctaagtgaatattaaattctgaagggtgggctctaatccttaactctgcaatctgaaagaaatataaactaaattagtatatttgaaagac

SEQ ID NO: 178 - protein, 310 aa, Homo sapiens
MDKENSSMVTEFIFMGITQDPQMEIIFFVVFLIVYLVNVVGNIGMIILITTDTQLHTPMYFFLCNLSFVDLGYSSAIAPRMLADFLTNHKVISFSSCATQFAFFVGFVDAECYVLAAMAYGRFVAICRPLHYSTFMSKQVCLALMLGSYLAGLVSLVAHTTLTFSLSYCGSNIINHFFCEIPPLLALSCSDTYISEILLFSLCGFIEFSTILIIFISYTFILVAIIRMRSAEGRLKAFSTCGSHLTGITLFYGTVMFMYLRPTSSYSLDQDKWASVFYTVIIPMLNPLIYSLRNKDVKAAFKKLIGKKSQ

SEQ ID NO: 179 - DNA, 1348 bp, Homo sapiens
  source
  (1)..(1348)
  CDS (201)..(1148)
gaaagatacagattaaaacagacatatagggagacaatgttatgtaaaatttccgatgtgattattgaaacaagagaagtaattgtcacctagataaatagatgaatgagcgaatgataaatggatgaaacaaatgccaaatctgaatcagagagaaatcctcacattctttgtcactttcagtttcaagagataagaagatgttctccccaaaccacaccatagtgacagaattcattctcttgggactgacagacgacccagtgctagagaagatcctgtttggggtattccttgcgatctacctaatcacactggcaggcaacctgtgcatgatcctgctgatcaggaccaattcccacctgcaaacacccatgtatttcttccttggccacctctcctttgtagacatttgctattcttccaatgttactccaaatatgctgcacaatttcctctcagaacagaagaccatctcctacgctggatgcttcacacagtgtcttctcttcatcgccctggtgatcactgagttttacatccttgcttcaatggcattggatcgctatgtagccatttgcagccctttgcattacagttccaggatgtccaagaacatctgtgtctgtctggtcactatcccttacatgtatgggtttcttagtgggttctctcagtcactgctaacctttcacttatccttctgtggctcccttgaaatcaatcatttctactgcgctgatcctcctcttatcatgctggcctgctctgacacccgtgtcaaaaagatggcaatgtttgtagttgcaggctttaatctctcaagctctctcttcatcattcttctgtcctatcttttcatttttgcagcgatcttcaggatccgttctgctgaaggcaggcacaaagccttttctacgtgtgcttcccacctgacaatagtcactttgttttatggaaccctcttctgcatgtacgtaaggcctccatcagagaagtctgtagaggagtccaaaataactgcagtcttttatacttttttgagcccaatgctgaacccattgatctatagcctacggaacacagatgtaatccttgccatgcaacaaatgattaggggaaaatcctttcataaaattgcagtttaggcttgtgtttatttgcagtcacgaattgcttgtggagtaacaaactggcttttgaaatggaaaaacctagtgtagtcgtgatttatttaacatcatggactgtcagtaaccactttactttcttatccaaatgaaaaccttgaagattgatttcttagaaataaaagccttaatgttgagaaatttaaaatgttttattt

SEQ ID NO: 180 - protein, 315 aa, Homo sapiens
MFSPNHTIVTEFILLGLTDDPVLEKILFGVFLAIYLITLAGNLCMILLIRTNSHLQTPMYFFLGHLSFVDICYSSNVTPNMLHNFLSEQKTISYAGCFTQCLLFIALVITEFYILASMALDRYVAICSPLHYSSRMSKNICVCLVTIPYMYGFLSGFSQSLLTFHLSFCGSLEINHFYCADPPLIMLACSDTRVKKMAMFVVAGFNLSSSLFIILLSYLFIFAAIFRIRSAEGRHKAFSTCASHLTIVTLFYGTLFCMYVRPPSEKSVEESKITAVFYTFLSPMLNPLIYSLRNTDVILAMQQMIRGKSFHKIAV

SEQ ID NO: 181 - DNA, 56423 bp, Homo sapiens
  source
  (1)..(56423)
  CDS (201)..(613)
  CDS (55716)..(56223)
taaaaaactctatattagtttagatgtttaaagcatcaatcacatgctcactaggctatttcttaatgtcacatgtatttacattttgagagaagaggaagaaatagcagatgacaccactggggtaatgcataaatgacaaacctaaatgcattttaatttccttttatttagatgtcatttgaagccaagcaaacacaatgttaaagaaaaaccatacagccgtgactgagtttgttctcctgggactgacagatcgggctgagctgcagtcccttctttttgtggtatttctagtcatctaccttatcacagtaatcggcaatgtgagcatgatcttgttaatcagaagtgactcgacactacacactccaatgtacttcttcctcagtcacctctcctttgtagatctctgttataccaccaatgttactcctcagatgctggttaactttttatccaagagaaaaaccatttccttcatcggctgctttatccaatttcactttttcattgcactggtgattacagattattatatgctcacagtgatggcttatgaccgctacatggccatctgcaagcccttgttatatggaagcaaaatgaccaggtgtgtctgcctctgtctcgctgctgctccctatatttatggctttgcaaatggtctaagcacagaccaccctgatgcttcgtctgtccttctgtggacccaatgacatcaaccacttttactgtgcggacccacccctcttagtcctcgcctgctcagatacttatgtcaaagagaccgccatgttggtggtggctggttccaacctcatttgctctctcaccgtcatcctcatttcctacactttcatcttcactgccattctgcgtatccacactgctgaggggaggcgcaaggccttctccacctgcgggtctcatgtgaccgctgtcactgtcttctatgggacactgttctgcatgtacctgaggcccccttctgagacatctatacaacaggggaaaattgtagctgttttttatatctttgtgagtccgatgttaaacccattgatctacagcctgaggaataaagacgttaaaagaagtataaggaaagttattcaaaagaaactgtttgctaagtaaggtagatattttggtcataggtgttggaatctgttcttattatctgaccaattaatgaacatttaaaattaacaaatcaatctgtcattgagtgttttttgtcctttgtaatttgcatatgggacttaaaagtgtatgtcaaattattagctagagcttacactgccacctcagtaaattgaaaatgaaagcatagaaattcaaatataagactagaagacattgttctagctctgtaaaaagtaatgaagtacagatgattccattattagtactcatagtactaatatatcatagtactatatcatagtactaatatatcataatactatatcatagtactgtatcatagtactaatatatcatagtactgtatcatagtactaatatatcatagtactgtatcatagtactatatatcatagtactatatatcatagtactatatatcatagtactatatatcatactaaaatatcataaaagacagaattatcaattgctgagaaaatgacagctcattacatttttttaaatgtttttgtttgtccctttgaatgaatggaggatatctacctaacttctatgtattcagaatctcacatgaggcagcacatttagcacacttgtttagttgtaatcttctatgcttatcttcgtgagtctgtttgaaaagttggataaatggcaatgagtgactacatttgctaattacattttataatacttaataagcctccaagctattttccagaaacttgccaaccatagtagatgaggtttctgtttttcttttatacatattatatagaaatgaagatcctttaggtgtactttggattattactttaagttatatccttagaatgatatcatagatccaatgaaaccctatttcataaggcttttcatggaaatgccaaatttcctttagaaagagtttttaattgtttgtatgttgtaccagtaaggattcccatcaacatgtgaactcaattcttcactcttttattaccattgcctgtttcctttgaataaataaattgaattgaatgttttatccacgaatgcatgtggatatttgtgtgttttatgtgtgtatgtaggtgtgtgtgtgtattttgattacaatataacattttcttttttttaattgcttattcaaatttttttggtgagaatcaaggtcgtatgccttttttttttttttttttttgacagagtattgctctgttgctcaggctggagtacagtggcgcgatctcggctcactgaaagctccgcctcccgggttcacgccattctcctgcctcagcctcccgagtagctgggactacaggcgcccgccaccacgcccggctaattttttgtatttttagtagagacggggtttcaccgtgttagccaggatggtcttgatctcctgacctcgtgatccgcccgcctcggcctcccaaagtgctgggattacaggcatgagccaccgcgcccagctgcttcacctgtttttaaattgtggtgtttatatgttttcttatttatttcagatatttctcaatgatataaacatgtttttgttatatatacaggtgtagcaattgtatatatatacacatgaattccattttatctcttctattgtatcttttccaaagttaatattttatcattttaaattttctcaattttttttatttcactttattgtgtctttttttacttttaggaagttaagtttatgccacctatgatcatgtggatttttacatatattattaaattattttcatggtttcgcttgttaattttttcttatgaactatttttaatatacatctaaaatagaaaataatataaagactcctttgtaagcacaactaatcactattaaatcttcacagaatgccccatttgtttcagttatttcagaaatttaaaacttacaaagatacatctctcctgactgattctgtctcttgtcccatttcttgctgtaaactctattacaaatttaatgtttcttatccttctgtagagttacatcattggataggtgtttatatattcatagaaatatgtagtactgatttgctacatttagaacttgaaataaatgcatccactctatgtatctttctgcaatttatttatcttgcactaaatattgttggatgtatctgtggtgaatcatgcagcagcaatttttagtggtatagtctatgccaatatataaatatgcctcaatatgtgtatttattctacgattttttttttttttgagacagagtctcactcttgttgcccaggctggggtgcaatggcacgatctcggctcaccgcaaactccgccccccagggtcaagcgattctcctgtctagcctcctagtagctgggattacaggtgcccaccaccatgccaggctaattttgtatttttaatagagacgggatttcaccatgttagccaggatggtcttgatcacctgaccttgtgatcctcccgcctcagcctcccaaattgtattttatttctactgttggtgaagagttacattttccagtttcttgataatatgaaaatccattaataaatgttttgtgtgtaattatgaatgtgtaccacgtaaggagttcctctcaggtaggttggtaatttcttggtcataagatataagtatctttaaatttactatatattgccaattgttttactgatttatatttctatcaacagtttgtgagtgttacctttacatcactttattcttgccaaaactaggtgttgtcagactttaaatgttttctaatctgatgggtaaacaatgaattctcatttggtgtttaaggttgaattgttattacaagtgaaactaagtatttttaagtatattgatgctaatctcatatttctctttcacttatatgtccatatactttgttaacttttcaggtagggtgatttgtctttatttcatacatttataatagttccttatgtaccaaatgctacatacaaatcttttggtgttatatgccatttaaccttaaaaacctagggtaataatgccaggcagtgtggctcacacatgtaatcccagtactttgggaggctgaggcaggaggattgcttgagcccaggagttttaggccaaactacacaagatagagactctgtctttacaaaaaaataaaaaaaaattagccagttgtggtgggatgcccttgtggtcccagctacatgggaagctgaggcaggaggatcacttgagcctgggaggtagaggcttcagtgaaccatgttgtcaccacgacactccagtctggatgacagaggatggatgacagagcctggatgactccagcctggatgaccctgtctcaataaaacaaaacaaaccccaaaaaacctagggtgagatgaacagatgaacgttatttcttgaatgcctcagcaaatagccataggtatctatttttctggtagctgcaatttgattgggacaagttgggaatttcagctcatttgacaagtattttcataatagatattttcccagtaggattggatttttttttttccacatagtgaatgcttatatgtgagcataaaatgtttcccacagattgggattggataaattatatgaagtgtgatcctagtatattgctttgccattgaaatactggttattacccaaatagaaaattaacatttaaaagagccaacaggctgggcaaagtggcttaggcctgtaatcccagccttttgggaggccaaggcccacagatcacttgagttcaggagttcgagactaacctgggcaacatgaggaaaccctgtctctaaaaaaaccacaaaaattagttaggtctggtggcaagtgtctgtagtccaagctactcaggaggctgatgtgggaggatggcttcagcctgggaggcaaaggttgcagtgagctgagatcatgccagtgcactccagcctgggtaacagagtaagatcctgtcttaaaaaaataataaaataggccaggtgcagtagttcatgcctgtaatcccagcactttgggaggccgaggcaggtgaatcacaaggtcaggagttcgagaccagcctggccaagatggcgaaaccccgtctctactaaaaatacaaaaattagccaggtgcagtggtgggtgcctgtaattccagctacttgggaggctgaggcaggagaatcgcttgaacccggggggcagaggttgccatgagccaagatcgtgccactgtactctagccttggtgacagagccagactccaactcaaaaataaataaataaataaataaaataataaaatataatataataagaatgccaacagaataattctgatttcagctacagtttatgcttttttatgagaaattcaactccaatcttttaattttattctcctttattctgttgttcagacattgcatattaaaaaggcattttttttcttaaccaatagttttatccttattgctgtccttattctggagagaacttcatatttcaaggcacagcccaaatatcaactcccttgtcctttcatgagcaaacagttgcacatacccattcctgtgattgtgtagatattgcaactctatttgtctgttagtcacacagaaaattcataataatacaatgccatgtttcctaatatattctgagagttctgtgagaaatgaaacctattgtatcggttaagtactgaagatggccgaataggaacagctccagtctacagctcccagcgtgagcgacgcagaagatgggtgatttctgcatttccatctgaggtaccgggttcatctcactagggagtggcagacagtgggcccaggtcagtgggtgcgcgcaccctgcgcgagccgaagcagggtgaggcattgcctcactctggaagcacaaggggtcagggagttccctttcctagtcaaagaaaggggtgacagatggcacctggaaaatcgggtcactcccaccccaatactgtgcttttccgacgggcttaaaaaatggcacaccaggagattatatcccgcacctggctcagagagtcctatgcccacggagtctcactgattgctagcacagcagtctgagatcaaactgcaaggcggcagcgaggctgggggaggggtgcccaccattgcccaggcatgcttaggtaaacaaagcagccaggaagctcgaactgggtggagcccaccacagctcaaggaggcctgcctgcctctgtaggctccacctctgggggcaggacagagacaaacaaaagacagcagtaacctctgcggacttaaatgtccctgacagctttgaagagagcagtggttctcccagcacgcagctggagatctgagaaagggcagacttcctcctcaagtgggtccctgacccctgacccccgagcagcataactgggaggcaccccccagcttgggcagactgacacctcacacggccgggtactccaacagacctgcagctaagggtcctgtctgttagaaggaaaactaacaaacagaaaggacatccacaccgaaaacccatctgtacatcaccatcatcaaagaccaaaagcagataaaaccacaaagatagggaaaaaacagagcagaaaaactggaaactctaaaaagcagagcacctctcctcctccaaaggaaagcagttcctcaccagcaacggaacaaagctggatggagaacgactttgacgagatgagagaagaaggcttcagatgatcaaattactccaagctacgggaggtcattcaaaccaaaggcaaagaagttgaaaactttgaaaaaaatttagaagaatgtataactagaataacaaatagagagaagtgcttaaaggagctgatggagctgaaaaccaaggctcgagaactacgtgaagaatgaagaagcctcaggagccgatgcgatcaactggaagaaagggtatcagcaatggaagatgaattgaatgaaatgaagcaagaagggaagtttagagaaaaaagaataaaaagaaatgagcaaagcctccaagaaatatgggactatgtgaaaagaccaaatctatgtctgattggtgtacctgaaagtgacagggagaatggaaccaagttggaaaacactctgcaggatattatccaagagaacttccccaatctagcaaggcaggccaacatccagattcaggaaatacagagcacaccacaaagatactcctcgagaagagcaactccaagacacataattgtcagatacaccaaagatgaaatgaaggaaaaaatgttaagggcagccagagagaaaggtcgggttaccttcaaagggaagcccatcagactaacagcggatctctcagcagaaactctacaagctagaagagagtgggggccaatattcaacattattaaagaaaagaattttcaacccagaatttcatatccagccaaactaagcttcataagtgaaggagaaataaaatactttacagacaaccaaatgctgagagattttgtaaccaccaggcctaccctaaaagagctcctgaaggaagcactaaacatggaaaggaacaaccggtaccagccgctgcaaaatcatgccaaaatgtaaagaccatcaagactaggaagaaactgcatcaactaacgagcaaaataaccagttaacatcataattacaggatgaaattcacacataacaatattaactttaaacacaaatggactaaatgctccaattaaaagacacagactggcaaattggataaagagtcaagacccatcagtgtactgtattcaggaaacccatctcacgtgcagagacacacataggctcaaaataaaaggatggaggaagatctaccaagcaaatggaaaacaaaaaaaggaaggggttgcaatcctagtctctgataaaacagactttaaaacaacaaagatcaaaagagacaaagaaggccattacataatggtaaagggatcaattcaacaagaagagctaactatcctaaatacatatgcacccaatacaggagcacccagattcataaagcaagtcctgagtgacctacaaagagacttagactcccacacattaataatgggagactttaacaccccactgtcaacattagacagatcaacgagacagaaagtcaacaaggatacccaggaattgaactcagctctgcaccaagcatacctaatagacatctacagaactctccaccccaaatcaacagaatatacatttttttcagcaccacaccacacctgctccaaaattgaccacatacttggaagtaaagctcttctcagcaaatgtaaaagaacagaaattataacaaactatctctcagaccacagtgcaatcaaactagaactcaggattaagaatctcactcaaaaccactcaactacatggaaactgaacaacctactcctgaatgactactgggtacataacgaaatgaaggcagaaataaagatgttctttgaaaccaacgagaacaaagacacaacataccagaatctctgggacacattcaaagcagtgtgtagagggaaatttatagcactgaatgcccacaagagaaagcaggaaagatccaaaattgacaccctaacatcacaattaaaagaactagaaaagcaagagcaaacacattcaaaagctagcagaaggcaagaaataactgaaatcagagcagaactgaaggaaatggagacacaaaaaacccttcaaaaaattaatgaatccaggagctggttttttgaaaggatcaacaaaattgataaaccgctagcaagactaataaagaaaaaaagagagaagaatcaaatagaggcaataaaaaatgataaaggggatatcaccaccgatcccacagaaatacaaactaccatcagaggatactacaaacacctctatgcaaatagactagaaaatctagaagaaatggataaattcctcaacacatacactctcccaaactaaaccaggaagaagttgaatctctgaatagaccaataacaggatctgaaattgtggcaataatcaatagcttaccaacgaaaaagagttcaggaccagatggattcacagccgaattctaccagaggtacaaggaggaactggtaccattccttctgaaactattccaatcaatagaaaaagagggaatcctccctaattcattttatgaggccagcatcatcccgataccaaagcctggcagagacacaaccaaaaaagagaattttagaccaatatccttgatgaacattgatgcaaaaatcctcagtaaaatactggcaaaccgaatccagcagcacatcaaaaagcttatccaccatgatcaagtggactttatccctgggatgcaaggctggttcaatatatgcaaatcaataaatgtaatccagcatataaacagaaccaaagacaaaaaccacatgattatctcaatagatgcagaaaaggcctttgacaaaattcaacaacacttcatgctaaaaactctcaataaattaggtattgatgggacgtatttcaaaataataagagctatctatgacaaacccacagccaatatcatactgaatgggcaaaaactggaagcattccctttgaaaactggcacaaggcagggatgccctctctcaccactcctattcaatatagtgttggaagttctggccagggcaattaggcaggagaaggaaataaagggtattcaattaggaaaagaggaagtcaaattgtccctgtttgcagatgacatgattgtatatctagaaaaccccatcatctcagccccaaatctccttaagctgataagcaacttcagcaaagtctcagaatacaaaatcaatgtgcaaaaatcacaagcattcttatacaccaacaacagacaaacagagagccaaatcatgagtgaaatcccattcacagttgcttcaaagagaataaaatacctaggaatccaacttacaagggatgtgaaggacctcttcaaggagaactacaaaccactgctcaaggaaataaaagaggatacaaacaaatggaagaacattccatgctcatgggtaggaagaattaatatcttgaaaatgtccatactgcccaaggtaatttacagattcaatgccatccccatcaagctaccaagggctttcttcacagaattggaaaaaactactttaaagttcatatggaaccgaaaaagagcccgcatcgccaagtcaatcctaagccaaaagaacaaagctggaggcatcacactacctgacttcaaactatactacaaggctacagtaaccaaaacagcatggtactggtagcaaaacagagatatagatgaatggaacagaacagagcccttagaaataacgccgcatatctacaactatctgatctttgacaaacctgaggaaaacaagcaatggggaaaggattccctatttaataaatggtgcagggaaaactggctagccatatgtagaaagctgaaactggatcccttccttacaccttatacaaaaatcaattcaagatggattaaagacttaaatgttagacctaaaaccataaaaaccctagaagaaaacctaggcattaccattcaggacataggcatgggcaaggactttatgtctaaaacaccaaaagcaatggcaacaaaagccaaaattgacaaatgggatctaattaaactaaagagcttctgcacagcaaaagaaactaccatcagagtgaacaggcaacctacaaaatgggagaaaattttcacaacctactcatctgacaaagggttaatatccagaatctacaatgaactcaaacaaatttacaagaaaaaaacaaacaaccctgtcaaaaagtgggtgaaggacatgaacagacacttctcaaaagaagacatttatgcagccaaaagacacatgaaaaaatgctcatcatcactggccatctgagaaatgcaaatcaaaagcacaatgagataccatctcacaccagctagaatggcaatcattaaaaagtcaggaaactacaggtgctggagaggatgtggagaaataggaacacttttacactgttggtgggactgtaaactagttcaaccattgtggaagtcagtgtggcgattcctcagggatctagaactagaaaaaccatttgacccagccatcccattactgggtatatacccaaaggactataaatcatgctgctataaagacacatgcacacgtatgtttattgcggcattattcacaatagcaaagacttggaaccaacggaaatgtccaacaatgatagactggattaagaaaatgtggcacatatacaccatggaatactatgcagccataaaaaatgatgagttcatgtcctttgtagggatatggatgaaattggaaatcatcattctcagtaaactatcgcaagaacaaaaaaccaaacactgcatatcctcactcatagatgggaattgaacaatgagaacacatggacacaggaaggggaacatcacactctggggacggttgtggggtggggggaggggggagggattgcattgggagatatacctaatgctagatgacgagttagtgggtgcagcgcaccagcaaggcacatgtatacatatgtaactaacctgcacattgtacacatgtaccctaaaacttaaagtataataatagtaataataataaattaaaaaacagaaacattatatctatctccttgttttcatagcaagtcatcaatacatgtttctaaattgagaaagaataattacaattgaaggcacatagtgatgaaagaaaaattgttgattctgacatttggagctgaaaatatttaatagctacaatctttaaaagtcagtatttgaaatgaaaagttcttttatatatggttgggtgatctgttggataatgttttattcttcttaaagcaaggtgtccttgttctttggacatattttcagtgttgtgagttgtctttccttgtctctgtctctttctctctgttgccctctctgtatcactgcctttctctcaattcctatttcataatttggtttagcttatattgtgtcttacagactcttcacatgttggcctcagccttacatactttcaggacaatctcagtacagacaaggctgctgcttgtttttggaaatgactcctcttgcctgaaatggctcaagtgcacagcaggtgtatgtgtgtttgttggtgtgtatgtattgtgtatgttcatgtatggtgctggtggaggtgcaatcatacaacgagaataatttttgctctacaatagctactaccatttattttactttttgcagtaaaatttttttcttacccactgctctgttcattaacaaacttctagttaggtaagaaggtgttattaactaagagtttgttaatgatagtttatcctgttcagatgtgagaaagaatgttaaaactagtgtctactctattaggagatacattagatgatctcacatgcacaattcctatgtccattttgcaaacatatttactgcactgcctattataatgcatagaattctgttggtggaaaaatacaagtgtgtccagacattttcgcactggtttgctatgctaatattgttatatgttgaaagtgcatgatttgagattgactgatgcattgtcattttccccataacttgccatattagatcactacattaatttattttgcttgctgactgtctatttgttctaacattattttttaaaacaatcagaaacttcttagtagtatatgatactcgcacataattgtttggactaaattagcagtttgaccatccttatgaggatcagaacaaaatcagatcataagacatgacagaacacatatagctttgagactaaaaccttaaaaatgtgactgttttccttctcttttttgaggcttcttagagttgaaagcttcatgtgttttctcttttctgtttctgttatactgcctgacagaaacatcactttacttaccatgcttattcagtgtacctgcttttcaaggaaaatgtaatttgtgtgttggaaaggaatttgaaaagtcactggtcacatcagcccacatggatactctggattcttatctccatagagaaggccaataaccatttgccttgaccacacccaattcctacttaaaactctttatctaacatctaagtttctcttcttcttctctccttcttcttattttttttttttcttttaaccaggcttccatgatactggggacaaaaaaagagaagataagagatgaactagtggctttctggactctcaacttgaattatttgttttaaaaaagtctaggggaaaatgggtttgaggaacaccttagctttcgatgcttaagcttttgacttgttgtaatcctgggtatggaaagaactctgataactttgtggctctgttttctatttggttttgtttttaatgattctctggatgttaaacatctagcaagtaatttgatttgcttaattctgaggaaagaaaaaatttcctttgagttaaatttatggggtaaattcacttacattaaatgtaggaactttaagtgtgcagttcagtaaagtttgacaaatgtgtacagccatgttatcacaattccaattttcaaggctactgtgcagctgggaagtgtgagaatagggcaagtaaagatgccacaaagttcactgtccttaccaagattcaggaattttttcttgaataaatactcacggaattgttgcaagcttttgattactttctagtatccagaaacagttgactttgacttttttttagtgttctcatggttttcatggagggacagttttgggaaggtcattactatgtcaatcagaaagttgattcttagatagatagatagatagatagatgatagattcatcaagattgtatgaacagtttgttcatttttattgctgagagtagtaacccattatagggatatactataattggttcatctatgcatctgctgatacatgtttgagactctgtatggatatgtcttcttttgccttggataaatactgaagagcaaaatttctgtgtcatagttttatgatgaactataaatttatataaaattttataaagggccaccagtttttcacagcccattgaattattttcattattatatcttgttatgtgttataagagtttcagttgcttcacattatcattgttaatctttgtattgtcaatattttttattcctcccattgaagtgagtgtgaagtgttacaaagataaacaaagccagctaccagttaaagtagtaaggacagattttattcagtaatatactattgcaatggacaggtaggttcactgtaaactgaactctaattttgttttcacagagataactgtgtattctaaaggtagaatgaggaaataggaagaggcatgagcagggctcaagagagtcagagaagtaaaaaaattacaaaaagtgtgaaaggagtgttgatccatgtgaaacccacccaggtttgccaactggctcctaccctcccttgggagctagtagacaagagctctttctccacatattggctgaaacagacagtatcttttgttggcagccttgagttttctcaggcaggttcttccaggagtactacagtcatcccagggatatggccttgagctgttagccactgtgtttgtgttttgttcaagtctttttaggccaaggttgaggcctagtcaagaaagtgctcagaggattctttctagagtttggtccaggaggaaatctttgttatgcggtgtttcataatgggcataatttacattttcttgacaaatgcagatgttgaatttcttttcatgtgatcgtttgctgttcatgtatcttcttttatgaagtgtctgctcacaacttagactttctttttttttttaattgaactgtttatatttggaccagtgaattgtgggagatatttatatgttcttaataccaatcatttgtcagaattacttactatgaatagtcttcctagtctatggtttgccttttcattatcttagcattattttgaagaatgcgtgttttaaaatttgatgacacacacacactttatatatatataattatatatatatattttattcacaattagtgcttttattttcttcctaagaaatctttgctttcctcaagatcataaagctattcttccatttttttttttttcctggaggacttgtagatttagcatttacatttagaatttttatttccaccaatttagttttgagtattggcatgtggtgtgttataggaagttaaatattttaatgaacatatccatattttccagtagcagtctccattaaaatacctttgcacctttgttcaaaaatccattggctacatatacgagtggatctatttgtgatctctttattctgtacacttaacctcttcatcatccttagatccacacactgctttgaatgctatacttcttagtaactcttaggtggatgatattaacttaagggacagtttttcacatactttatttttttcaagaaagccttcagaaacccctgttcaacttgtgtttgaagacattaaatgtttagttaacctgattttacttcaattacaatgatcaattgattgatgtctgctagaagtgcacctaattaattagttatgtaaatactacaatggtcagataattggacacatggtactgaccatggacatttaagtagtgcaaattatgcaacaatatttgttcactttccaaaggggtttttgtgtttttatgacagcatttattttagaatcagatcatgaagttttgcaaacatcatcctgctgaaatttgatagaagtggctttaaaattattgatagatttaggaagaattaacacattgactatattgaatattctaatgcacaagtgagacgtatgtctttattatttaggtcttctttaatttcgctctgcagacgtttgtgcttttcagtgtgtatcttttgcacactttttatttttgtttctgagtagcttatgattttatgtgatatttttaagttttatattctactgtgtattgcttttatgtaactgtatgagtgtttttgggtttttttattttgttttgttttgtttttttagacagagtcccgctctgtcacccagattggagtgaagtggtataatcttggctctatgcaatgtctgcctcccaggttcaacggattctcctgcctctgcctcccaagtagctggggctacaggcacgttgccatcacaccggtttcactatgttggctaggctagtctcaaactccctacctcaaataatctgcccacctcaggctcccaaagtgctgggattacagttgtgagccatcgcacctggcctgtatgagtggtttttgtgtattgaatttgtaattgtaatcatatcatcttccaaaatatacacttaatttcccatttgtatattttaaaataacttttataataaagcatcatgtcatctgtgaataacacagatttgtttcttttcaatttgtatactttttatttagtaggtaggactttcagtaccatattgaaccgactacaacttttaaataaaaaatagccaattgagtaatcacaaacacacaagtaaaatcttaagggccaataggatgtatccaactgtctgaacatggtgtcatttgtatagctaaatccattaggtgttccactagcagacatacatcaattggtccttccagcagaagcaaagtgacatcgactaaataaactaatgtgttcagtaatatagatagataatataaaactttctgaaggctttctatgaaacataaaataagcatgtgtaaaactcatctttgagttagtataatatacatagctaaatctgtattccctaaccaaatctataagtaaattaatgtcaccttctaatgtgtggacatctgatcatgtgatcccatattaaaatttttgagactttgctcttcctcatcaaaaataaccaatccattactttttgtctatccattcagttattattgagccagaatcatttgtagtcagaagagtcattttgtaactcttatgttttattgaaatgttattgcatattaacatatgtaagaaaacaaataaatgaatatacatatacatacacacatactatagggcatattgccttcaaattgaaagctgccattctgtttaacaaagagccaaattgtcaattagttttatgcattaagggatgaggaaatgagagacaccagtattatagtcctatatgacccttcattctatagaaatatttaagaaataccattttatttttatttatttatttatttatttattttttattttattttattattattattatactttaagttttagggtacatgtgcacaatgtgcaggtttgttacatatgtatacatgtgccatgttggtgtgctgcactcattaactcgtcatttagcattaggtatatctcctaatgctatccctcccacctccccccactccacaacagtccctggagcgtgatgttccccttcctatgtccatgtgttctcattgttcaattccaacctatgagtgagaacatgtggtgtttggttttctgtccttgcgatagtttgctgagaatttgctgaaaattgagtttccagtttcatccatgtccctacaaaggacaagaactcttcattttttatggctgcatagtattccatggtgtatatgcgccacattttcttaatccagtctatcgttgttggacatttaggttggtttcaagtctttgctattgtgaatagtgccccaataaacacacgtgtgcatgtgtctttatagcagcatgatttataatcctttgggtatatactcagtaatgggatggctgggtcaaaagaaataccattttacttttaaattagtgcaaggaatcaaaaccatacagataaaaactgagataaggctttaaactcaatttgaggaaaaaaatagctatgctcaaatctctcaaatttcatgggatgtaacaaatctacattttgattttgatatatagctatattgtgttgactgatttctcaaagaataaccaccatttgtgatctaagagaattagggatgcctcttctgtcttggtcagagcccattttgattcatttgtgctaacctggaactatcagtgcactggaaaatacagactaatgaacacatgtctagcttcccttatcatctaacaaatgcagtgtaaacaagttttaaatattcttccttctattttcagccctattcctaagtcaacaattttatgactcatcaattttataaacggtcctggtctcagacctgtctttgattcttagcttgttaatgactttcaatagggcagactagttccagcataaatccagaacgtccgtcctccaaaggacctgggccctgaccaatacttctgcttccttctactgattatgttgtcactctgctgctctccacatccttacaaatccttcctttcctcaagtctttcagctgccacacctttctacccctcaccctcagtaaaggacctcaccccagtgtctatagacaaaactggagagttctgatgaaaaccttcttggttttattatattaaaattacaaaacttatctatctatattttccttcttccatattattgaaagtgatggctagtttctctgtttgtgctaaagctctgatgaacacatgtaacaaaactgtacataaatgttgtatagggatttcatcttcaaaggagaatctagctgttcaaactatcaaataaatgttaagcccttgaggaacaaaggatattataattggttctttagaattactttaaaaatactctagggaatatagctaagaaatatatatcttgccaccttgctttacaaactatggtgagttaacattaacaggtaggtcatttgctacatttgttcactaaaaatacaactttttctgtgtgtggagattagtatccaatcaatagaggaaacccatattttcatcaatttcactggacttttctattcatatgttaacatttcattgactctaaaatcaattatatgcaagctcctctgatgtatatgtgagagctaaataagcaatttctttagggtgcaaatttttgagcaataatttttacagtcatagcttattttcatgaagaactcagagagagtggcttgagttggcagcaaagactgcttttaacaatgttctgtgattctctaacaatattttaataagtagtttagtggcatataaatggagacaaaaaaacttcactctcttccttcaggtgctataattgtttatttactgttcaaatgttgcattctcagaaaaggctactttgaatagtcatctaaaagaatctcacattcattgttcttcacagacccagcttttacttgaaattataatatgtatctttctctgtgggtttaaccattatttctcatattataatgtgagctccatgaaactggaaaatttgttcactccaataaccccaggaattgtaatacacacaaaaaaatcaagctatgcagtcagtgtacatgaataaacaggcaggtaaaatttcaaagtgaaaaaacagttcttggttttgtatattcttagccatatatcaagcactaagtttaactaatttaatgttcactgacaatcataggtttctgtttgtttgtttgtttgtttgtttgagacggagtctcgctctgtcgcccagactggagtgccctggtgtgatctcggctcactgcaagctccgcctcccgggttcacgccattctcctgcctcagcctcccggtagcttggactacaggcgcccgccactacgcctggctacttttttgtattttgagtggagatggggtttcacagtgttagccaggatggtcttgatctcctgacctcgtgatctgcccgcctcggcctcccaaagtgctaggattacaggcgtgagccaccgcgcccggccgacagtcataggttttaagtgaaaatgctaccttaatttttttcttctgttttgtatctgaaataataagatatcagacatggagggaaactgaagattggacttcctacatttatttatttaaatgatgctaatattaatatctgatattcatttctttgttttttttgttccctcacaaaccttgaaaataattaccaaatgtagaattcaccaagaagacaagtataaatgcattaatgtataaatttataaatgtatatatataagagacagaaatagagaatgtgcctgtgtgtgtgtgggtttgagatacaaaaagagacagaaaacacacacatataaagagaaaacgttgtgcagaaattctgatgtgtttattgaaaaaagtaattggtgcctagatgaatagatgaatgagtgaatgataaatggatgaaacaaatgccaaatctggatcagagagaatcctcacattctttgtcactttcagttttcaagaaataagaagatgttgtccccaaaccacaccatagtgacagaattcattctcttaggactgacagacgacccagtgctagagaagatcctgtttggggtgttcctggcgatctacctaatcacactggcaggcaacctgtgcatgatcctgctgatcaggaccaattcccaactgcaaacacccatgtatttcttccttggtcacctctcctttgtagacatttgctattcttccaatgttactccaaatatgctgcacaatttcctctcagaacagaagaccatctcctacgctggatgcttcacacagtgtcttctcttcatcgccctagtgatcactgagttttacttccttgcttcaatggcattggatcgctatgtagccatttgcagccctttacattacagttccaggatgtccaagaacatttgcatctctctggtcactgtgccttacatgtatggcttccttaatgggctctctcagacactgctgacctttcacttatccttctgtggctcccttgaaatcaatcatttctactgcgctgatcctcctcttatcatgctggcctgctctgacacccgtgtcaaaaagatggcaatgtttgtagttgcaggctttactctctcaagctctctcttcatcattcttctgtcctatcttttcatttttgcagcgatcttcaggatccgttctgctgaaggcaggcacaaagccttttctacgtgtgcttcccacctgacaatagtcactttgttttatggaaccctcttctgcatgtacgtaaggcctccatcagagaagtctgtagaggagtccaaaataattgcagtcttttatacttttttgagcccaatgctgaacccattgatctatagcctacggaacagagatgtaatccttgccatacaacaaatgattaggggaaaatccttttgtaaaattgcagtttaggcctgtgtttatttgtaatccctaagtgcctgtggggtaacaaactgaaatggaaaaacctagtgtagttattatttaacagtatgggctcttagtaaccactttagtttcttctcaaaattaacactttgaagatttagtttttaaaaataaaaagcttaatgttgaaattaataatgttttatttgtcagagattctatgaatataaattgtttggtttctaataattctgtatgaaaatactgggtttacttacttgggggtaaacttttaactaacttagcctgagagaaactctgaaaatccaacccctttgaatattactatccatagagccatagtgaggctccagatagggtggctaattttacatttttaaaaaaatgatgccgggcatggtggctcacatctgtaatcccagcactttgggagccagagataggtggatcacctgaggtcaggagtttgagaccagcttggccaacatggtgaaaccccgtctctcctaaaattacaaaattagctggttgtggtggcacatgcctgtaatcccagctactcaggaggctgaggctggagaatagcttgaacctgggaggcggaggttgcagtgagtcaagatcacgccattgtacttactccacttgggcgacaagagcgaaactccatctccaaaaaaataaataaataaataaataaaaagaaaacgaaaaaagaaaaaaattgtttctacttcaatgtggtgtcttgaacaatagttctgaaacctgtgaacttattgtaatcactgtgcaaaaaatgtaaatatatgaatcacctataagttaaattttctgtaagtattctcaaaacccacactgtaaacatcgtgagaagcttcttattggttcatgtggtaataccagttatggtcctcaattctgaaaatcaactctcaacacccttttttttttttgagttttcaagtgcatggatccatttctatcatcaaaatacttcaattgcattccacgtatgttttccagtgaagtacctctgacttaggaataatttagtaggaatcaatagggtttatcaattgatatttgcatatgcataaatgactttgttagtggaaaaaggggtcttgatccagatcccagcagggggttcttggatctacagaggaaaaatttcaagataagctgcaaagtgcagtgagaagagatagttcattaaatgctactccaaagagatcatttattaaaggctattgcattacagagtaaggtgttcccagaaagcaagtggaggaatgcaccctctttaagtttttttaatggtcttttatctacgtacagactaaagtaagttgtggctacatgtgggtaggctgacggcatgacaaaatttatcattctgttgatttaaagaaaacgatccttgatattttagtgtgtgcataactattattatcatgataaaagcatatactcttatgagaattgggacacctaggttctcttgctgcattattagcgtgttcttgtaggtatttttaggctgtttcctaaactataagcatcttatgaacatgggtcatgaccggccaggactgtgccttgttaacctcaagacagagttgattttaaaatgttgtcaccctggatctcctagactcctgcttctttaacaccctgaaacagtataaaaattaataggggcgtacgtatctttttggaggaaatagtgtttattttgcttcacacaactgtctgtggcacattatttttttacattagggtattctagttctcaaagctactacagggaaaatcaatcacaaagaggctaaataaagatacacattaatcaatgtattatttagtcaaccagatgactgcatattaatacatacatatttagccctattaaattgcctcttatgtttgacattttaatattttgcactctgcttttaactaacactatacagaaaatgctacagaaaatgcttatatgatatcaactactgtatctactataaaatgttcaagtggttttccagaatattaaacagatgactaacagtttttgtaaaattgggttatattcttaagtgtcagttggttgaataagtctggttctatccaaatctgcttttagaaacagtaactgaaaaagaaagaaggcaattttgggcagcaacaatttaatatttaccttttagcactatttgtgtatttgcctggttttggcaatggcagtggcacaacagaagcaggtgatctgtagagacaagagtgaagcagaagagctgggaactgagtgacacagcgtccttacttccttttagaggcccagcatcatttcatctgtgggatatttctttatcttatgacaacatcatttaatctgtgggatagctctttatattattcttttatcttcctcttttggttaggcaaagcattgtgttcaatttctagcaagtagagtggtctgatactctatttgaaaactgtattttagaattggtacaaacacactctatattttgcctaaataactgtatacttccttttattttctagttatgagaattgctgtggcttgcagcaaccaaacttaaactttgacacctttgtaacccaaatgcttgacctgtttgtaatctcttttttttaaaatatgtatttatttattctatttgtaatttaattttttaattgtgcaagcccttgggtaaaagttatctcagaaattctttggagatagaatagaacataaatggacatgaatagaaatagtgacaattgatgtaatcatagtgtattgctaattttaggattactgttttttcttttcttaaatgaaaatgaagtagtgagagaattattatcttcatttacaatatttggagtcttagacacagagagatgaaatgacttgcctaacgtcatttggccactcagtagcacaaaagcagatttcttggttttaaattttctctctttctaattcatactgaagtggttattaagccattcttcaacacacttcaaatgctggggggaatattggagactatgaattaataagagtgttactatagattaaatagtggttattatgtgatagtgagatgtatcctaacaacagctaatgtgaattttccctgacagtcaggctaatgtgatcatttatatgcatgataattaaaattgtcttaatatccatgtgaagggagaaaattttgatatatgggaaacctttatgcttcttaggctgcattttattaatatattttcccaattataaaagcacacatatttatattaattaatttccaggtacagacaaatataaaaacataaaatttattaaggacctgctatgacaaggaataagttttgtttatattttgttatatttcttctcaataaatgtatatgactacatgttactataatgcacaaaacaaatataaagttactcaccatataataatatgaatacagattttcatttgatactataatgtatgcacctttacatagattaaatattttatgaacatttttaatgtcatattttaattagcttgtgtgatcctaatacaatattaatacatgtcaaatgtagaaaaccaatgaaccatattggcatacataagaaatagaagcaatgcttacttgtaatcaactacctgaaaagagttgctctcagcattcacatgtgttttattccatttgattatcttgcaaatcatgattccatcatatcaatgtatcttagtattttgatgaccgacgtatctgtacgtctctctctaattgttccttttgttatgttcccagaagtgtaattgctgaattaaatgttttgaacatttttaaaggtcttgctaaacatttctatggataaatttttatccagaaagcttgtaacaaacctgtaccactaatgtttgaaaacaatcattttactataactctatcagcagtaggagctcttgtttatggttatatgctactttgatctctcaaaggaagttttagaaacaaactctgttttaatttgcacagattagaaattgaagaatatatttaacaaataaaggctacatataataattttctttcatgttatgatggtgtcttacatgaagaatatttgtatttttatggagaaaaattatattttgtttattgttgttttgtaactttttcttatgccacaattgaataaacaagcacttatatggggttattggctttcattgcaatattttatgggaatatcatgaattatcctggatataattttgttgcatgttttaatgttgtaaattacttttgtgccctcacatttttaaccaacttcctccaagtgttattaagcactgctttcccactgatttgtgatgtcacctttattataccttaagtcaatctatttctgcccatttccactgttttttttgtctgaattataaatatattttaaactaaattcttatcattaaattgaacatatattttaatttctggtgaagatatttttgtcttcaattttctcttaggagattgaaaatcagatacttttagctatccaaatttttaactcagaaattataatattatgattcaatttagaaactgtatgtatagttgtataattttgaatgtagttgtacatacaatacttatacattataaagcaattaaaaaataaggaaaattattttactgtctatggtggccatagggagaactgcttaaggatgaaatattttgaatgagttgtttgttttccagaaagtcaggaagatgctggtgtctggtaagtgaggagaaaacacctaaccttggtatattaattctatggatttattaacactgttatacaaatacttatgttttcaccataccagtgtatggtgaaatcatcatgtaacattttttttcaacaaatatctctaaatacagtctctttttcttacaaagaggtttttttcccagcaattacccccaaaagaactgagagggccacatatgtttttccactatgagtcacttcaaacactgaacaaaaaaggattaatcagaaagacaataaatatttaaatttaaataatcagagaataatatatctgtgcttcataacagtgggaaaaatttgtagtaaaaagagtaagcaaattgctttaatttgaagataaaactatttaaaattaagaggcaccctacaatttggcaatgtatttgccacaaacaagataaattggtaaaattattgaaatacaagaaattaataaaaataatttgaagcactaaagaatcaatatataaatatcaaagactataagtaaaaaattgattaaaatacaaaaatgctaaaattaacacacaaaatattagcaaccaaaaatatgatgtaagatattgtttgatatatctacatttaaaagagctgatatagattggcactttcatacattgattgattaagggtataaagtttttctgaaaataaatttaatatttaataggttggtacaaaagtaatcttgtttttttgccattaaaagtaacagcacttattttttttcttaccaacctaatattattatcatattaaggagacaaaattttcttatgcttttattcagctatttcaattttaagaatctactgaaggcataagaaacttgtgtgaagagtttcatggtgttgtttttattttataatcaagacaaagtaaacacatgatgtattaaatacaaatagttcctgcttggcatggtaccatgtaacagaaacctttccatactggaaacgtgtcttagtttttgtggttcttagttcctacaaaatcacaaagtgagaactgcctgcatttaataactggtaaaatacaggcatccaccagatgggatagaagctgtctctaactaagtagaatgtcattagccttgatcatgaaggaaagtgtaaagtacaggtgaaacgttttttgtaatagaaagttatacagccattaaagtgaggatgttcctagttaagaaaaaggtaattcattttatgtaatatattatgtgcaaagatatatcctatgctgtatacagtgtgatatcttgtaaaatattagggataaggggaaataaaacttgttattaatagctatgtccatatttaaatagtcattgctattgtgagaaaataaggcaacaaaaactgtgtattttcagtttagtccagatctcaggatgtataattacaggatacttatttattaatattggaatttaaatatgaaagtaaggaaaagcaaggaaaaagcaaggtaagaaaaagaagaggtccccaattctggtttccagcacagaatgaccaatgaacaacttctcagagaaaaatgcccatgtgaaaattccgtaacccatgggtgaggtggggcacactcttggagcataaaaactggaaaaaaccacattagaattgttaagaggagcagtttcacttgcttctttcccagccaaacacagtgtcacactgaaagagattccctgggcctgtggtttccccagtgaagaaaagagagcccacggcagacatccagcttccctatgttccagagaacttcccaagaggcccattctgtctaaccttgtgggtaataacggaagacttggcaaagcttggccaccccagtcagctcataacaaagttaaggggtgtagcttacggcaaccagcacccgatcttggtggtggcatcatgttctagctggcagctttatgtgaccagagagcccagccactagcattgctcacatgtggagctgagttggcaggccctttcggtcaggaggcatgttgaacagttctgtctggctgtggtaccagtcagtaagctggaccagctgcagagcacagcctagagcaccacccaaccataaagcacaacttgcagcccaccccactcaggtagagatccaagccagcaaccccactcaaccgctgggcatagcctgcagtcccatctgacgacggagtctggtcaattatctctccaaactacagagcacatccagtaaaacttcccaattatggatcagcttgcagccccaaaaaactgcaggaaatagccagtggccctatctggccaagagatctggtcagtgatctcacctaaatttggagcaaaggcagtgaccccatcaatctgtggaccacagccagcagccccactcgaatacataccacagtgaatggtcttacctgattatggagcccagtcagcagccctgagtgattttggatcctagccagcatactcacccacctcagagcacaggcagcagtcagaggtcatgtgactagagtcagctttcaaattcatcaagtcctggttccacctcttactccctatgaaatctcaggcaaattatttaacctctactcctatgccccaatttgtttgtttgtttgttttcacagtacttatcatcacctgccatatatttgtttgtgggtgtatttgtcatctatctcctccagcaaaaaacattatcaataaagtagtttttaattttttttgagcaacagctatattgagttatatagtggctatactaatttacatttttgccaataatgtacgagcattcctttttctgtgtatccttgcaaacctctgttcatttttttgtctttttaatgacaatcattacaaattggttgaggttatacttcattatggtcttgatttgcatttcatttatgattagtgaattaaacctttttttcatatacctgctgacaatttgaatatcttctttttgaagcttttgataaaatccaacatctcttcataataataataataaaaaaatactcaacaaactaggcattgaagagacatacctcaaaataataagagccatctatggcaaacccacagccaacatcatactaaatgggaaaaagctgaaagcattccacctaataaatggaacaagacaaagatgtcctctctcatcattcctatttcacatagtactgcaagttctagccagagcaataaagccagagaaagaaatataaggcatccaaataggaaaagaagtcaagctatctctcttcactgataatatgattttatacctagaaaaccctaaagactacaccaaaaagctcctagatctgataaacaactttattaaagtttcaggatacaaaatcaatgtataaaaatattagcatctctatactcccataacattcaagctgagagctaaatcaagaatgtaatcccatttacaatagccacacgcacaaaaataaaacacctaggaaaacaacaaaccaaggaggtgaaagatctctacaaggagaactacaaaacactactggaagaaatcatagatgatataacaaatggaaaatcatcccatgtttatgaattagaagaatcagaatgctaaaacagctatattgcctaaagcaatctacagattcaacactattgccatcaagctaatgacactatttacatagaatttgagaaaacttgcctaaaatttatatggagccaaaaaagagactgaatagtcaaagcaatcctaagcaaaaagaacaatactggcagcatcaaataacccaacttcgaactatactacaaggctacagtaaccaaaaaagcatggtactggtacaaagaaagacccatagacaaaatgaaacagtgaacccagaaataaagtcagacatctacaactgtctgatctttaataagttgatagtaataaacaatagggaaagaactacctattcaataaatggagccaggataactatttagccatgtgcagaagagtgaaactggacccatacctgtcaccacatataaaaattaactcaagatggattaaagacttaaatataaggcctaaagctataaaaatcctggaagaaaactgaggaaataccactccggacattggcctcagcaaaaaatttatgaataagtctccagaagcaattgcaataaaaataaaaattgaaaaatgggatgtaattaaactaaagagctactgcatagaaaataaattaacagagtaagcaatctaaagaatgaaagaaaatgttcaaaaatgataaatccaacaaaaatctaatatccagaatatataagaaacataaacaattcaacaggcaagaaacctccccctaaaaccattaaaacacatggacacagggaggggaacatcacacactggggccttttgtggggtgggaggctaggtaagggataccattaggagaaatacctaatgtagataacggattgatgggtgcagcaagccaccatggcatgtgtatacctgtgtaacaaacctgcacgttctgcacatgtaccccagatcttaaagtataataaaaaataggcaaaagacataaacagacacttctcaaaatgaagcatacatgtggccaaaaaatatattaaaaatacagtatcattaatcatcagagaaatgtatatcacaactacaatgagataacatctcacaccggtcagaatggctattattaaaaagtgaaataaataacagacattggtgaggttgtggagaaaatggaatccttatacacttttggtgggaatgtaaattagttcatccactgtggaagcagtttggaaatttctcaaagaacttaaaacacaagtaccatttgacccagcaatcctattactgggtataaacccaaaggaaagtaaataattttaccaaaaccacatgcacttgtgcaatcattgcagcactatacactgtagcaaagacatggaatcaacgtagataaccatcaatgatgaacgggataaagaaaatatgatacatacacactattgaatactatgaagccatgaaaatgaaatcatgtcttttgcagcaacatagatgcagctgaaggccattatcctaagtgaattaatgtaggaacagaaaaccaaatgtgcccatgttcttattaaaggtatgagagaaacattgaatacacatgaaaaataaaggagaacaagcaacactgggggttaatagagggggaagagctggggagtgcagactgaaaaatgatcagaccaatggaacagaatagagagcccagaaataagaccacacatctatgaccatctgatcttcaacaaagctgacaaaaacaggcaatgggaaaaggactccctatttaataaatggtgctgggataactggctagccatatgcggaagattgaagctggacccccttccctataccacacacaacaatcaactcaagatggattagagacttaaatgcaaaaccccaaactgtgaaaaccctaggagaaaatgtcggcagtatcatcctagaaaaagaaatgggcaatgatttcatgacaaagacacaaaaagcaattgcaaaaagaaaaaagcaaaaattgacaagtaggatctaattaaacttaagagcttcttcacagcaaaacaaactgttaacagagtaaaaagacagcctatggaatagaagaaaatatttccaaactatgtatctgacaaaggtctaatattcagcatgtttaagaaacttaaatttacaagagaaaagcaaacaacacatttaaaagtgggctaagatgctggcaacagtggctcatgccagtaatcccagcactttgggaggcagaggcaggtggattatctgaggtcaggagttcaagaccagcctggccaacatggcaaaaccctgtttctactaaaaatacaaaaaataactgggcatggtggtgcgtgcctgtaatcccagctactctagaggctgaggctggagaatcacttgaactcaggaggtagaggttgcagtgagccgagattgcaccactgcactccagcctgggcgacagagtgagattctgtctcataaataaataaataaataaataaataaataaaatacataataaaagtgggcaaagaacataaacacttctcaaaagaagacatacatgcagccaacaattatatgaaaaaaggtcaatatcactgattattagagaaatgcaaatcaaaaccacaatgagatgccatcttacaccagtcagaatgactattattaaaaagtaaaaaaataacagatgctggtgaggttgcaaaaaaaaaggaacatttttatactgttagtgggagtgtaaactcgttcagccactgtggaaagcagtatggcaattcctcaaagagctaaaagcagaactaccatttgatccaacaatcccattactaggtatatacccacagaattataaatcattctaccataaagatacattcatgtgactgttcattttggtactattcacaatagcaaaggcatggaatcaacttaaatgcccatcaatgacagtttggataaagaaaatgtggtgcatacacaccatgtaatactacatagccataaagaagaagaagatcgtgtcttttgcaggaacatggatggatctggaggctattatctttaacaaactaatgctgaagcagaaaaccaagtaccgtatgttcttatttataagtgggagctaaatgattagaacttacaaacacaaagaaggaaacaacagacactggggtcttcttgaggggggagggtgggaggagggataggagcagaaaagataattatgggtacaaggcttaatactctggtgatgaaataatctgtgcaacaaactcccatcacacatgttcacctatgtaacaaaccttcacatgtatccccaaaactaaaataaaagttttttttttttaaaggaaaactgttgggtactatgctcactacctgggtgatgggatcatttgtataccaaatatcagtgacattcaatttacctatgtaacaaacttgcacatatacccctgaaactaaaaatagaaaaaattattaaaataaaacaaaaaagaaaaaagatgaaaaagagatatctataatcatttgcacatttcaatcagatttttaaaaatttatttattttgaaattgagttgttcaaatttcctatgtaacctgaatattagtcccttgtcagatgaatgatttgtaagtattttctcccattgtgtaggttgtcttttcactctatagattacttcttttgctgtgcagagatttcttttgtttgatgaaatcctgtttatctatatttggttttgttgcctgtgctttagaggccttatccaaaaactctttacctagaccaatgtctaaaagtattttcccagagttttcttctagtagatttatagtttcaggtcatacatttgtctttaaaacattttgattagatttttgtatagtagtctatgatagtcttttatatgtctgaggaattgattgtaatgtcacctttgtcatttctgatcgtgctgatttggatcttctttcttattttctttgttaatctagctagcagtctatccattttgtgtatcctttcaaataaacttttggttttattggtttttggatgtattttggggtctcagtttcattcagttttactctgatttagttatttattttcttttactggctttggagttagtttgttgttttatagttcctctaggtgagatgttagatcattaatttgagaactttctaactttttgagggaagtgtttagcgctgtacactttccttttaacactgattttgctgcatcccagagatttcggtaagttgtgtctctgtttttatttatttcaaatatatattttgttaatttctggtttagttgtttgcccaaaagtcattcagtagcaaattgtttaattcccgtataattttgtggttttgagagatcttggtattgatttttatttttattccagtgttctccaagagggagtttgacatgattttatttcttaattgattgacactggctttatggcctagtatgtgatcaaccttccagtatgttccaggtgcagaggacaagaacgtatattctgtggttatgggtggagtactccgcagatgtctattaggtccaattaatcaagtgtcaaatttaagtccagaatttattagttttcagaccttgatgacctaaggctgtaattggggtgttgaattcccctactgctattgtgtggctttttaggtctttttgtcagtctagaagtacttgttttatgaatttgggtgctccaatgtggggtgtgtatatgtgtaggatagttaagtcttcttgtttaattgaaccctatgtcattaggcagtgccctttttgtcattttttccagtttttggtttacagcttcttttatctgacataacaatagcaacccctgctgtcttttatttttcatttgtctagtagattatttttcatccttttactttgagcctatgtgagatagatctcttgaaaattgcagatggatggatcttattttttatctaacttgctactctagtatatgcctgtctttataggtaaatttcttgaagacagcacatacttgagtattgatatttgtttgtttgtttttcttttgttttacttttttttccattgagcagtcactcagcgtcttttaattgtagaattttgtctattaacattgaagagtattattgttaggtaagagtttactactgccattttgttatttcttcgcttgttgttttctaaatcctttatttcttgtgttctatcttactgtattactctgtagttaagtaattttctttagaagtatgttttgattccatgctatgtttttgtgtatctgtcataggtttttgttttgtgggtaccgtgaggtttacaaaaaaaatctatagtataacagttcgttttgaacagataatgacttaattttgattgcaaataaaagcatcaaaaaccaactctacacttttaatatgccctacacacattttgacttttggtgtttcaatgtacatgtttttatattgcctacttctaaactgtagttattgatggttttaatagttttgtattttattcttcatacttatgatacaagtggtttatttaccacaattatagtatgacagtattctgattttgaatgttcttttacgagggaattttatacattccaatgttttcctgttacatgttagtacccatttctttcagactgaagaactctctttagcatttcttgaaaaacaggtctggtgttgatgaatttcctcagcttttgtttttctgcgaaaaaaaaatctttatttcaccttcatgttcgaagaataactttaatgcacataatattcttccttgaaagattttttctcttatcatcttgagtatagcataccatttcctcttgacctgctagcttctgtgagaaatctgctgaaagccatattcaagctctgtattactctgttctcacattgctaaacaaaattaccttagcctgagtagtttataaagtgaagaggtttaattgacacacagttccacaggctgtacaggaggcatggctgggaggcttcaggaaacttacaatcatgatggaaggtgaaggggaagcaagcacatcttcacatggcgacagaggagagagggtaaaggggaaagtgctacacacttttaaacaaacagatctcatgagaactctatcataagatagcactaggggaatggtattaaactattagaaaacaccccgatgatccattcacctcccaccaggccccacctccaaaactgggggattacaattcaatataaggcttaggtgggaacacagagtcaaaccatatcattctgtcccggtccctcccaaatttcatgttcttctcacatttcaaaacgcaatcatgtcttcccaatagttccccaaagttttaactcattccagcacaaacttaaatgtccaattcctcatgtccaaatgtccaaatgtccaaaatctcatctgagacaaggtccacaggtaagcctgtaaaactaaaaacaagttatttacttctaagatacaagggagttacaggcagtggataaatgcttctgttccaaaaggaagaaattggccaaaataaaggagctacatatgccatgcaagtccaaaatccagaagggcagtcattaaatcttaaagctccaaaataatctcctttgactccatgtttcacatccaggccacactaatgcaagggttgctctctcaaggcctggggcaactccaccctcatggctctgcagggtgcagccctgttggctgctttcacaggctgattttgagtgcttgtggcttttccagatgcatggcacaagctgtgagtggagctaccattctggtttctgaaagatagtgtcccttttcttacagatccattacgcaggacccagtgggaactcggtgtgggggctccaaccccacattttccttctgcattgcactagtagaggctctctgtgaggattctgcccctgcagcagacttctgcctggatatccaggcatttgcatacaacctctaaaacttaggcaaaagctcccaagccttaattcatgtcttctgcacacccacaggccagacactatgtggaacttgccaaagcttggggcttgcaccctctgaagcaatggcccaagctgtaccttggcactttttagtcctgactggagttggagtggctaggacgcaggtcatcatgttctgaggctacacagagcactgcagacctgggtctggcccccgacatcattttttcctatttgccctctgagcctatgatgggagtggctgtaataaaggtctctgaaatttcttggaggcattttccccactgtcttggctattaacatgtagctcctctttatttatgcaaacttctgcagccttgaattcctccctataaaatgggtttttcttttctaccacatgttcaggctgcaaatttttcaaactttcatgctctgctttccttttaaatataaattccaatttcagaccatctctttgaaaatagagaagaagccaggctaattcttgaatgctttgctgcttagaaatttcttccaccaggtacctgaattcatctctctcaaattcaaagttccacagctctctagagcaggggcacaatgccaccagtctctttgttaaagcatagcaagagttacctttactccacttcctaataagttctacatctccatctgagaccacctcagcctggacttcactctccatattactattagtattttgttcaccaccactcaacaagtctctaggaagttccaaactttctcctcttcctgtcttcttctgagccctccaaactgttccaacctctgcttgttacccaattacaaagtcgattccacatttttgggtatctataggaatgccccacttctctggtaccaattttatgtattagtccattctcacatcactgtaaagaactaactgagattgagtaatttatgaagaaaagaggtttaatcgattcaccgttccttaggctgtataggtagcatggttgagaaggcctcagaaaactaacaatcatggtggaagggcaaagggaaaacaagcacatggcaagaggagaaaaacagagcgaagggggaagtgctacacacttttaaataacagatattgtgagaactctaacacaaggcaacactaggggaatggtgctaaaccattagaaatcacccccatgatccaatcacttcccaccaggtcccacctccagcagtaggagacggcaaatttagatgaaatttgggtggagacacagagccaaaccatatcagtctccattaaatgtgatatttttctcttgctgatttgaatattatttctttgtctttgatttttcctaatttgattacagtgtaacctgagatattactgtttgtattgaatttgattggtgagcaatggtcttttctacctagatgctattgtgtttctccagaactgagaaattttcagttattatttcaataagtatagtttctaggcctttttatctctcattccatttggatatttcaatcatgcaaaagttaatgtacttgattgtgtcccataattttcataggcctgctttacttttttttttttttcagctcctctgagaagttagtttcaaatgttctatcttcaagcttactgattctttcctctgtcatcaaaactatgggcacggtggctcacgcctgtaatcccagcactttgggaggccgagacgggtggatcatctgaggtcaggagtttgagaccagtctggccaacatggtgaaaccccatctctactaaaaaaatacaaagaattagctgtttgtgatgatgggcacctgtaatcccagctacttgtgaggctgaggcaggagaatcccttgaacccggggggcagagtttgcagtgagccaagatcgtgccatcgcagtccagcctgggcaacaagagcgaaactctgtctcaaaaaaagaaaaaggatagaggaggttgggaagagggaggcagggagtcagcgtcatagcaatgggtgagaaagatgaaagatgtgtggccattgctggctttggaggtagaatgcgggcagcctccaaaacctggaaaaagcaagaaagtagattttccccgagaacctccaaaaagaaagcagtactgccgacaccttgattctagcccagtaagaagcattttgggctttggacatccagaaatgcaagacaaaatttgtgttgttttaagggattaaatctgtgatagtttattatggcagcaacagaaaaagaatatacctgtcaaaactgggttcccatcttcaaaggcttcccctctgcttgccgtccagtccacagctccacttgcaggcgcagtacagttggctttcgagcagggcttggattgaaaattcagcatgtaaggaagaagtctagagtccagacgaaccttgaacaccccttaattgcccctcccgtcgagagcagggaccaggatccactgagtgtagagcagagcaacaatcctcaaggtgtcctcacccccaggcaccctcccacagggctcaaccagctaacctctttccaccctttgaattgtctctctctcccttcaggcatataattaaatttgcataaattcaaagagcatatgctgcaatcccattgtaatttcagatttgtttttatttcctgagtttgctaaggaaataataaaaacaaaacctccttaaaaaaaaaaaaaagatttctaatgagtttttaagttcagtttttgtattctttatttctgggattaatatttttaaacattgtttttatttctctttccaatttcttattttcttcctgaattattttcctttttttttagttttctgttttcttataatttctttttttaacatttttctttctttaaatatttttttaaattccttatttcctcagagatctttgttctgacctgtaatttcttgaacttctttaagaggcttatgctgaattcattgtcagacatttaatagatctttaattgttcagggtccattgttgagcctctgttgatttcttttggtggtgtcatatttcccttggtttttataatcttcgcatatttatgtcgatgcctgtgcatttgaagagagagacacttccagttttcgcaggtgttctttgttggtcttagatctttagttcttagtattctttttttttttttaagacagagtcttgctctgttacccatgaatgcagtggtgtgatcttgggttactgcagcctctggctcccaggttcttccagcgattctcctgcctcagcctcccaagtagctgggattaccggcatacagcactacgcctggctaatttttgtatttttagtagagatgaggttttaccatggtggccaggctggtctcgaactcctggcctcaggtgatccacccgccttggccacccaaagtgctaggattacaggcgtgagccactgtgcctggccagtattcactcttaaatgttgacttgttgttgcttctgctggggtaggcttatagtgaccactgcaactaaatttctcttctgtcattgtttcctagtgtggggaagtcttattttgtgcactgaagcttaaatactgtgttgggactatattgctgtgctgtcattgtttccaattccggaaagttattaatcccagtcttttaattgttttggggccaggctgggggaggcttcatgaaagaaccttgggtttgtggaaaatccggctaagaattcttgctgtactgccaactgtgcttcctgtatttctatgacactaatcggtctgttaaatgtggcatctctactaattacagtgctgagtagccaccaggctccatgcatcaggtactgcattcagtgtcctattctttgttctcagttcacctcagatgattcaattctcctagcactcccaaaggtttttatgagagaggaccagagtggattactgatgaagattcctaagctggagggagactgaacatccaattccatttccccccttcctccttagcagacataggtctagggaaattctttgtgagtggcattatactagcttgggaaagggggtagtgcaaccggaaatgaccatttcttttacactccacaactttccttgattctgcacttctcctctgagttctgttgtatttacaatggagctcccatctttgaatagcttctagttttatttttatggggacagtgatgctaggggattttctattccatcatctttcttctttctgactttaccctccaaaagtgtaatcctcaaaatttcaagatttttttttgtatgccttctatggagctcatacaacaaacaatgatacatttgaaattatgacaatatgactgaagcataattagtttcctaatcccagagtcctttaattaaacacaagagggatgattccagaagtaacactcatcactgctattccttagtccctctgagatttgctttaagagcaggtctccacctctcacatcttgctataaatatgactgcattttaaagcttagagaagcacctaaaaacctttttaatcaaatatcaaggaaatgagtatatatcagaaccagaattaagtccttgcatttttatgttctttatttttggttaaaggggaaatatattaatgtattaactgaatctcacaaaatgtttgcatttttattattaaaaatcatttttttcttttactttgcatatcattggggggcatgaatcagtttctcctctgaaaaattctcagtgccttctctcagaggctgtgagcaaagaagtaggaaaggaggttagctatgaaaagtgttaactccatttgtaacaatactcattacatgcttactatatgcaaatcatttttctaagcactttaaatgagtaaactatattattcctcctaaaaactccatttctcattttatagctgggaacattaacgtaagacagtttagataatttgacactgtggtggtggtacgatttgttactgatgaagctagaatcaaaatcactaatggggattagattcataaaattgttactttttgaatactaaaatatttactcagacattcagtatattagagtaggcccagtatcatgtaatctaatttattttgcaaaaattgcaaatgagcgagatattaaccaagttcaattagaaagttagttggtggcagagctgagcataggttccagagccacccagaacttttgtttgcttgggagaatctctgagcacacctggatagcttagggaattgctgcttttgggtatcactggtcatttgcatctgatcataggtactagactgctgacaagttggccattagtggacaggtatattgagagttgatttaagtgttgcatctgtcaaggttaacacgaaacattctgttggccctgagtctcacatttcaatctagaatccatctgtgtactttactttccttgcaaataaatgatctagtgaatttatatattttttccacttagctcctagcacacatcatttgtatttcaatcatttatttttcttcaccatattagaacatttccaataccattaaagaagaaggaaggcaatgaaaaggagacagagatagcctcatacattctcctttcgctgaaagtaatatcattttgaaaacagactacgggtcccatcttcttcctctctagtttccaacagcataaagctttgtatgtctctgaggacaagatagaaaactacattagcaaatgttttcctttgcatctccttatttcaagtaaataagggacttatattttcaaatattttaagtcaccttgaaggttgcttcttaaaaaataactgtttattatgcttctactcttcattttaaaaattttgcttgtttccacctttacaagcaaaaatggacaaaatcgtattttatcctgcagtcctctaggacaaatttaactttggggtactctgtttcctaaaaatgcatatatgtaatcttctatttctagtagcagagtttgaactcaattaatttccctaacaacagactcactaaaattcgctgtgatatttttcaaatagtattttatggaattatcactgatgaaataaaaaacaaaacaagaaagacaggggaggagccaagatggccgaataggaagagctcgggtctacagctcccagcgtgagcaacacagaagacaggtgatttctgcatttccatctgaggtactgggttcttctcactagggagtgccagacagtgggcacaggtcagtgggtgcgcacaccctgcgcgagcggaagcagggcgaggcattgcctctctcaggaagcgcaaggggtcagggagttccctttcctagtcaaagaaaggggtgacagatggcacctggaaaatcaggtcactcccaccccaatactgcgcttttctgacgggattaaaaaacggcgtgccagattatatcccacacctggcttggagggtcctacacccacggagtctcactgattgctagcacagcagtctgagatcaaactgcaaggtggcagcgaggctaggggaggagcgcccgccattgcccaggcttgcttaggtaaacaaagcagccctgaagctggaactgggtggagcccaccacagctcaaggaggcctgcctgcctctgtaggctccacctctgggggcagggcacagacaaacaaaaagacagcagtaacctctgcagacttaaatgtccctgtctgacagctttgaagagagcagtggttctcccagcacacagctggagatctgcctcctcaagtgggtccctgacccctgacccccgagcagcctaactgggaggcaacccccagcgggggcagactgacacctcacacggccgggtactccaacagacctgcagctgagggtcctgtctgttagaaggaaaactaacaaacagaaaggacatccacaccgaaaacccatctgtacatcaccatcatcaaagaccaaaagtagataaaaccacaaagatggggaaaaaacagagcagaaaaactggaaaccctaaaaagcagagcgcctctcctcctccaaaggaacgcaattcctcaccagcaatggaacaaagctggacggagaatgactttgacgagctgagagaaggcttcagacgatcaaactactccaagctacgggaggacattcaaaccaaaggtaaagaacttgaaaactttgaaaaaaatttagaagaatgtataactagaataaccaatagagagaagtgcttaaaggagctgatggagctgaaaaccaagctcgagaactacatgaagaatgcagaagcctcaggagccgatgcgatcaactggaagaaagggtatcagcaatggaagatgaattgaatgaaatgaagtgagaagggaagtttagagaaaaaagaataaaaagaaatgagcaaagcctccaagaaatatgggactatgtgaaaagaccaaatctacgtctgattggtgtacctgaaagtgatggggagaatggaaccaagttggaaaacactctgcaggatattatccaagagaacttccccaatctagcaaggcaggccaacatccagattcaggaaatacagagaacgccacaaagacactcccccagaagagcaactccaagacacataattgtcagattcaccaaagttgaaatgaaggaaaaaatgttaagggcagccagagagaaaggtcgggttaccctcaaagggaagcccatcagactaacagcggatctctcggcagaaactctacaagccagaagagagtgggggccaacattcaacattcttaaagaaaagaattttcaacccagaatttcatatccagccaaactaagcttcataagtgaaggagaaataaaatactttacagacaagcaaatgctgagagattttgtaaccaccaggcctgccctaaaagagctcctgaaggaagcgctaaacatggaaaggaacaaccggtaccagccactgaaaaatcataccaaaatgtaaagaccatcgagactaggaagaaactgcatcaactgacaagcaaaataaccagctaacatcataatgacaggatcaaattcacacataacaatattaactttaaaagtaaatggactaaacactccaattaaaagacacagactggcaaattggataccaagagtcaagacccatcagtgtgctgtattcaggagacccatctcacgtgcagagacacacataggctcaaaataaaaggatggaggaagatctaccaagccaatggaaaacaaaaaaaggcaggggttgcaatcctagtctctgataaaacagactttaaaccaacaaagatcaaaagagacaaagaaggccattacataatggtaaagggatcaattcaacaagaagagctaactatcctaaatatatatgcacccaatacaggagcacccagattcataaagcaagtcctgagtgacctacaaagagacttagactcccacacattaataatgggagactttaacaccccactgtcaacattagacagatcaacgagacagaaagtcaacaaggatacccaggaattgaactcagctctgcaccaagcgtacctaatagacatctacagaactctccaccccaaatcaacagaatatatatttttttcagcaccacaccacacctactccaaaactgaccacatacttggaagtaaacctctactcagcaaatgtaaaagaacagaaattataacaaactatctctcagaccacagtgcaatcaaactagaactcaggattaagaatctaactcaaaaccactcaactatgtagaaactgaacaacctgctcctgaatgactgctgggtacataacgaaatgaaggcagaaataaagatgttctttgaaaccaacgagaacaaagacacaacataccagaatctctgggacgcattcaaagcagtgtgtagagggaaatttatagcactaaatgcccacaagagaaagcaggaaagatccaaaattgacaccctaacatcacaattaaaagaactagaaaagcaagagcaaacacattcaaaagctagcagaaggcaagaaataactaaaatcagagcagaactgaaggaaatagagacacaaaaaacccttcaaaaaattaatgaatccaggagctgtttttttgaaaagatcaacaaaattgataaaccagtagcaagactaataaagaaaataagagagaagaatcaaataggcgtgataaaaaatgataaaggggatatcaccaccgatcccacagaaatacaaactaccatcagagaatactacaaacacctctatgcaaatagacttagaaaatctagaagaaatggataaattcctggacacatacactctcccaaactaaaccaggaagaagttgaatctctgactagaccaataacaggatctgaaattgtggcaataatcaatagcttaccaacgaaaaagagtccaggaccagatggattcacagccgaattctaccagaggtacaaggaggagctggtaccattccttctgaaactattccaaccaatagaaaaagagggaatcctccctaactcattttatgaggccagcatcatcctgataccaaagccgggcagagacacaaccaaaaaaggaattttagaccaatatccctgatgaacattgatgcaaaaatcctcagtaaaatactggcaaaccgaatccagcagcacatcaaaaagcttgtccaccatgatcaagtgggcttcatccctgggatgcaaggctggttcaatatatgcaaatcaataaatgtaatccagcatataaacagaaccaaagacaaaaaccacatgattatctcaatagatgcagaaaaggcctttgacaaaattcaacaacacttcatgctaaaaactctcaataaattaggtattgatgggacgtatttcaaaataataagagctatctatgacaaacccacagccaatatcatactgaatgggcaaaaactggaagcattccctttgaaatctggcacaagacagggatgtcctctctcaccactcctattcaacatagtgttggaagttctggccagggcaattaggcaggagaaggaaataaatggtattcaattaggaaaagaggaagtcaaattgtccctgtttgcagacgacatgattgtatatctagaaaaccccatcatctcagccccaaatctccttaagctgataagcaacttcagcaaagtctcaggatacaaaatcaatgtacaaaatcacaagtattcttatacaccaacaacagacaaacagagagccaaatcatgagtgaactcccattcacaattgcttcaaagagaataaaatacctaggaatccaacttacaagggatgtgaaggacctcttcaaggagaactacaaaccactgctcaatgaaataaaagaggatacaaaccaatggaagaacattccatgctcatgggtaggaagaatcaatatcttgaaaatgtccatactgcccaaggtaatttacagattcaatgccatccccatcaagctaccaatgactttcttcacagaattggaaaaaactactttaaagttcatatagaaccaaaaaagagcccgcatcgccaagtcaatcctaagccaaaagaacaaagctggaggcatcatggtacctgacttcaatctatactacaaggctacagtaaccaaaacagcatggtactggtagcaaaacagagatatagatgaatggaacagaacagagctctcagaaatatcgccgcatatctacaactatctgatctttgacaaacctgacaaaaacaagcaatggggaaaggattccctatttaataaatggtgctgggaaaactggctagccatatgtagaaagctgaaactggatcccttccttacaccttatacaaaaatcaattcaagatggaataaagacttaaacgttagacctaaaaccataaaaactctagaagaaaacctaggctttacctttcaggacataggcatgggcaaggactttatgtctaaaacaccaaaagcaatggcaacaaaagccaaaattggcaaatgggatctagttaaactaaagagcttctgcacagcaaaagaaactaccatcagagtgaacaggcaacctacaaaatgggagaaaattttcacaacctactcatctgacaaagggctaatatccagaatctacaatgaacttaaacaaatgtacaagaaaatcaaacaaccccatcaaaaagtgggcgaaggacatgaacagacacttctcaaaagaagacatttatgcagccaaaaaacacatgaaaaaatgctcaccatcactggccatcagagaaatgcaaatcaaaagcacaatgagataccatctcacaccagttagaatggcaatcattaaaaagtcaggaaacaacaggtgctggagaggatgtggagaaataggaacacttttacactgttggtgggactgtaaactagttcaaccattgtggaagtcagtgtggtgattcctcagggatctagaactagaaataccatttgacccagccatcccattactgggtatatacccaaaggactataaatcatgctgctataaagacacatgcacaagtatgtttattgtggcattattcacaatagcaaagacttggaaccaacccaaatgtccaacaatgttagactggattaagaaaatgtggcacatatacaccatggaatactatgcagccataaaaatgatgagttcatgtcctttgtagggacatggatgaaattggaattcatcattctcagtaaactatcgcaagaacaaaaaaccaaacactgcgtatcctcactcataggtgggaattgaacaatgagaacactggacacaggaaggggaacatcacactctggggactgttgtggggtggggggaggggggagggatagcattgggagataaacctaatgctagatgacgagttagtgggtgcagcacaccagcatggcacatgtatacatatgttacaaacctgcatgttgtgcacatgtaccctaaaacttaaagtataataataataaagaaatgggtcttctctacccaagaacacacacacacaaaaaaaaaaaaaaaaaaaaacaacaagaaagacaaacagtatgctcatcacacacaaatgcaaggtcatttttaggcattagatggggcttaatttaatctaagtttttcatgtactttgtatcttctaacctgcatacctctatttcctcttctagccctctacctctggtaaccactgttttatttttatcactgtatatttaattttttaaatattccccatataagtgagatcattcagtatttgtctttctgtgtctggtttatttcacttagaataatgtcctccaggcttgtacgtgttgtatcaaataacacgatcttccttttcagggatgaataatattctattgtaaatatataccaccatttctttatctatttgtccttcatgaggcacttgggttgtttccataccttagctgtgatgaataatactgcaaaaacatggaagtacagatgctttaagaggtggtgaattcacaggataaacaagtctagagatctaatgaacaacatgaggactaggggtaataaaattataccgtatttgggattcgtgctaaatgaatatatcttagctgatcttgcacacagacacacaaaaagggtaactatatgttaatgtttgtgttaatttgctttactatagtaagattttactctatgtatcacatgacattatgttgtgaaccttaaatagatgcattaaaatttattttttaaaagggttcattaactgcggttcaggcaatctataaaccttttacattttggaggtgagattttcagtatctgcatttatcttggattttcaaggggttcatttgaacaagcaaacaaacgaagaaacaagcttaagaatctttcttacaatgaattcttcctaagtagttttcttgactggtttcttttctttttctgaaacagtcttttcttattcacttgtgattgaatagcctacaaaattgatctagacaattaggctcttgaaattgattacggcctagtgcattctcacctggaataaaagccttcctttggagcatcttctattttttaattgttgagagttggggactttccttctcattctgtattttcagtgtcagtttttatggcttgtgtgttccaggtatggttgggtcatggtcatgcagtctattcacaaggccttgtgcttagaagaacatcccaagcttggtttaatgctttgatctcatggtcctgaaattttacataatttttttgtacaaggattcttgcagttttatttcgtattgaaataggagagtttccttatcctcctcgcatggcaagtgacaggagtgtggcttgcttctttggtgccccactgctcaaatccctaggggtggaatgcagacaggcaggtgtacaggtcgtgggagtgtttttgggctccaaccccacagcagcatctagggttaagtgtttacagctcctgaagccccaatgggtgtgtgttacagtgtgatctttcagctttgctgtcttcaggcggcttgcattaatcagctcagttagaccctctgcattaccacaagggcagcaggctttctgtattccaagttcttgcccagtgtatcggaaaaattggatcacatgtggacatggaggatgagtgcaaggttttattgagtggtggaggtggctctcaatgagatggatggggagccagaaaggggacggagtgggaaattggtcttcccctggagtcgggcagctcatttgccgatgatgctctgaccacccccagacgaactcccctcggtgtctgcatcgttccaccatcactggtctgctggcatctgctggtgtctgctgttgtgctcctctgctcctgtcaacatccagccacttgtgtccatgcccactaaggcctcgggtttttttgggcacaggatggggcctgtggtgggccagagtggtcttggaaaatgcaacatttgggtgcaaaaacaggagagcctgttctcacttaggtccttgggcaaagttctgtgggtggagccctcaccagggaccccacccttctctacacatcacttcccaaccctgctcctgtatcaatattggattctgtatactatgtatctgaggtcccagttctaggttttacaacttgtaactttttcctatccttgacctactcctctgctcgttcttcctctatcatgcagaaccttcccaacatactgacctagcaagcccaggtgttccttattcaagaggtgttcaccttttattctgtcctgacacaggggttagacctactgtggttttccttctttgtacacacatcttagctgtagtctttttacctctctccacttatgagcccttcttctctactgcaattgtgtatttctggatcccataaaagccaatgagcctctcagtcaaaactgtttcagatctcacaggcagttattaagccacatgcaacaaataagttattctgcaaatgaactcctctagtccaatttcctactgtgtctttttaaatctgaaattcccacatcctgatatattttctctcatttttctttgttgtaaccactgaaactgtactctggtgaaggccattgatactcttgataggaacttgaaatgagtaacacttaacgtgagaaagatttgaagtgaataagagtaaagtgaaatatctgtagtttagggagcttagctggattttctgcactttgcattaagtgtgtgtgtgtgtgtgtttgtgtgtgcacatacacacacaaatttcactcagtgatagtttccaaagaaccattacatctggtatccttgtatttgctcgttatccttctgtagacccaggaaatctgagacaggtctcagttagtttagaaagtttattttgccaaggttgaggacacacctgtgacacagcttccagaggtcctgaggacatgtgttgaaggtggtcatggtacagcttgcttttatacattttagagagacataatctatcaatcaatacatgtaagatttaccttggtttggtgcaggacaactcaaagtccaggttggggcagcgtggcgtggcgtttccaggctgtaggtaaatttaaatattttctggttgacaattggtttgtctaaagacctgagatcaatagaaaagtctgtgttatgttaatgctggagaggaataatgaggcatgtccgacccccatttcccttaaccgcctgaactagtctttcaagttaaattttacaagccctggctgaggaggaagtccctttatttatttttggtttacacttcttatgatatccttcttagaagttttcttgctacagttgttgccataaactttactttttttttttttttggtagaaccttactctgtcgccaggctggagtacagtggctgatctccgctcactgcaacctctccatcctgggcttgagcaattcttctgcctcagcctccgaagtagctgagattacaggcacgtgccaccacacctgactgatttttgtatttttagtagagatggggtttctccgtgttggccaggctggtcttgaactcctgacctcaggtgacccacccgcctcagcctcccaaagtgctcgaactacaggcatgagccatcctgcctggccaaacattacttttttaatgaggtcttccttgactttcctttccccaaaactgtatttcctttatttttctccacaacagttatttgaatattatttatttacttgaaataatagctctctctgtccactagaatgggaaaaccaaaaaaagcagaaatttttgaaaggtttgttcgcttctgcatctatagtgcccaatcacacaaaatattgagtatcagtaaatacttgtttcatgaatatctattttgatgcccaaaatgacatgagaagaggaaagataaatattattatttccatttacacatgggaaaacacagtgattcattcagttgcaaagcttttaaattactgaagtaactctgtaatccagggctcctaaccagctcctaacatcaagatatgtcatagcttctacttgatatttcttagatatatcacatacaggtactcaagggcacaagtcagtcacatagtagaacatgactaagtgtaaggagaatgtgtctggcacaatcctgtttatcatggtgcactatgtaagaatgccatgactatctgtgtccccagaagttccttatcatcatatatctcaaggccttccaggtctatacatacaattttatgaaacagtttagctttagaaaggtgatatgtattgcagcagcagctaataaaggaagtttttaaaatacataattttcagttcttacctcagattctcagattgtatgcactagtagtgtgacctcggttcaattatttaacctttttgtacgttgcttttctcaatagtaacagcaagacagagttttgattataggcattctaaaacttacagtaaaataaatgaggtgactcattttgagatgagacaagaattgagaagcctgtaataaaaatttcaagtatgaaagaatgggcaaaaattaaaaacttctcgaaagaaaggaaaatgtgaattagcaaagattctgatgtgaagagaggtaaaaagccaaaaggatttgtaatacctcttgttagatacaagttgtgattaaaagattaaataccaactctgaaaatattaatttattttctttctaaacacattaagtcattgctctaaacatcctcaagatactatatgaaaatttattttatttcacagttctttgttcatttatttggcatatgtttattgagccattctgactgtgcattttgagctatgatcttggaacacttgcattagaatcctacagataatcattagagatgaagattccagtaccccacataagaatttctgcaaaaacctgtgatatgggctaataaacaagcttcccaagaattgcttctacactaagtttcaataatcacttaattctcctgagaacatgacatcacgcaaggctacatggagataaatctgtgagtaaaaattgcaagtcattcattcttacatgctctcctttttgcattttaagaaaatttagtataaaaatatgtgttgagaagtataattaaaaaatgaacttcactttgtccctgctctcaacaccattatgtgatgagaaagtatatactttataatgatacaatgggggctaaataataaattagagaaatatagaatactctggaaataaagaagagagaattcagtgacacgtattaggagaaatggatgagaaatgcttcacaaagaagtggcctttaaagtgggtcatgtagcatgaatagaattaggttttaaaaagtacaggaagatagaagagatgtagctcagtcatatagatagatagatagatagatagatagatagatgatggatagatagatacaggtgtaggtatagatatatctataggtgtagagaaagaatatattagtaatgtaatgcctaggcaaatgatataatgacattgtagacttacaaaattatagtaagtctaccataattaccaaaaccagtttatggtagtacccagaaatagataactttcgatgatatatgaagatgtggagaaaaactaattcaaatgaacattaacatggtatgtgcatttgtttatattggctttatttccatagcttgaagagcaaactgtcaggaaatgtccaacacaaatggcagtgcaatcacagaattcattttacttgggctcacagattgcccggaactccagtctctgctttttgtgctgtttctggttgtttacctcgtcaccctgctaggcaacctgggcatgataatgttaatgagactggactctcgccttcacacgcccatgtacttcttcctcactaacttagcctttgtggatttgtgctatacatcaaatgcaaccccgcagatgtcgactaatatcgtatctgagaagaccatttcctttgctggttgctttacacagtgctacattttcattgcccttctactcactgagttttacatgctggcagcaatggcctatgaccgctatgtggccatatatgaccctctgcgctacagtgtgaaaacgtccaggagagtttgcatctgcttggccacatttccctatgtctatggcttctcagatggactcttccaggccatcctgaccttccgcctgaccttctgtagatccagtgtcatcaaccacttctactgtgctgacccgccgctcattaagctttcttgttctgatacttatgtcaaagagcatgccatgttcatatctgctggcttcaacctctccagctccctcaccatcgtcttggtgtcctatgccttcattcttgctgccatcctccggatcaaatcagcagagggaaggcacaaggcattctccacctgtggttcccatatgatggctgtcaccctgttttatgggactctcttttgcatgtatataagaccaccaacagataagactgttgaggaatctaaaataatagctgtcttttacacctttgtgagtccggtacttaatccattgatctacagtctgaggaataaagatgtgaagcaggccttgaagaatgtcctgagatgaaatattgtcatgaccatggtgatgcctttgtttcctaataaacattaaatcgaaatctttggctcacatgtcctagcgttctgatggtgagttttaatattctctgtgagtctatgttgagtgtctcagctaaaaagctcatgctgggtaaaaatgagatttttctaggctttgctcctccacatatattccatgaatca

SEQ ID NO: 182 - protein, 306 aa, Homo sapiens
MLKKNHTAVTEFVLLGLTDRAELQSLLFVVFLVIYLITVIGNVSMILLIRSDSTLHTPMYFFLSHLSFVDLCYTTNVTPQMLVNFLSKRKTISFIGCFIQFHFFIALVITDYYMLTVMAYDRYMAICKPLLYGSKMTRRVCICLATFPYVYGFSDGLFQAILTFRLTFCRSSVINHFYCADPPLIKLSCSDTYVKEHAMFISAGFNLSSSLTIVLVSYAFILAAILRIKSAEGRHKAFSTCGSHMMAVTLFYGTLFCMYIRPPTDKTVEESKIIAVFYTFVSPVLNPLIYSLRNKDVKQALKNVLR

SEQ ID NO: 183 - DNA, 1336 bp, Homo sapiens
  source
  (1)..(1336)
  CDS (201)..(1136)
cataaaaggtagagagctgctttgaatatccctaatttagtttacctgaaacaaagttcagtagaaatagaatgaggaaaactgccaaaaagaggggacgtttttggtaaaagatcattactgtaatagtaataatcatgttgctattgtattgtaatccaatatatatgtaaagttcctttcttccaccgaaggaaattatgagaagaaactgcacgttggtgactgagttcattctcctgggactgaccagtcgccgggaattacaaattctcctcttcacgctgtttctggccatttacatggtcacggtggcagggaaccttggcatgattgtcctcatccaggccaacgcctggctccacatgcccatgtactttttcctgagccacttatccttcgtggatctgtgcttctcttccaatgtgactccaaagatgctggagattttcctttcagagaagaaaagcatttcctatcctgcctgtcttgtgcagtgttacctttttatcgccttggtccatgttgagatctacatcctggctgtgatggcctttgaccggtacatggccatctgcaaccctctgctttatggcagcagaatgtccaagagtgtgtgctccttcctcatcacggtgccttatgtgtatggagcgctcactggcctgatggagaccatgtggacctacaacctagccttctgtggccccaatgaaattaatcacttctactgtgcggacccaccactgattaagctggcttgttctgacacctacaacaaggagttgtcaatgtttattgtggctggctggaacctttctttttctctcttcatcatatgtatttcctacctttacattttccctgctattttaaagattcgctctacagagggcaggcaaaaagctttttctacctgtggctcccatctgacagctgtcactatattctatgcaacccttttcttcatgtatctcagacccccctcaaaggaatctgttgaacagggtaaaatggtagctgtattttataccacagtaatccctatgctgaaccttataatttatagccttagaaataaaaatgtaaaagaagcattaatcaaagagctgtcaatgaagatatacttttcttaaaaatcagtattcttttggtttctaaagcccttcctagacttttttctttagctgagaaatatagtgcatcaatggagaacattgcagttttcaaaactttatttatttttattttattattatattttgagatggagtttctctctgtcttaggctggagtgcagtggtgtgatctcggctcactgcaacctttgcctcc

SEQ ID NO: 184 - protein, 311 aa, Homo sapiens
MRRNCTLVTEFILLGLTSRRELQILLFTLFLAIYMVTVAGNLGMIVLIQANAWLHMPMYFFLSHLSFVDLCFSSNVTPKMLEIFLSEKKSISYPACLVQCYLFIALVHVEIYILAVMAFDRYMAICNPLLYGSRMSKSVCSFLITVPYVYGALTGLMETMWTYNLAFCGPNEINHFYCADPPLIKLACSDTYNKELSMFIVAGWNLSFSLFIICISYLYIFPAILKIRSTEGRQKAFSTCGSHLTAVTIFYATLFFMYLRPPSKESVEQGKMVAVFYTTVIPMLNLIIYSLRNKNVKEALIKELSMKIYFS

SEQ ID NO: 185 - DNA, 1099 bp, Homo sapiens
  source
  (1)..(1099)
  CDS (201)..(899)
tcttgggtctaacaagccgtccagagctgcgagttgctttcttggcactgttcctttttgtctacatagccactgtggtaggaaacttggggatgattattttaatcaaagttgattctcgacttcacactcccatgtaattttttctctccagtttgtccattctagatctgtgtttctccacaaatttcactcccaaaatgctagaaaatttcttatcagagaagaagaccatttcctatgcaggttgtttgatgcagtgctatgttgtcattgctgtggtccttgcagagcactgcatgttggcagtcatggcatatgaccgctatatggccatctgtaatccattgctctacagtagcaaaatgtcccaaggtgtttgtgtccacctggtcattgtcccttatgtctatggctttcttctcagtgtgatggaaaccttaaggacctacaacctctccttctgtggaacaaatgaaatcaaccatttctactgtgctgatcctcctcttatcaaactggcatgctctgacacgtacagcaaggagctgtccatgtacatagtagccggctacagcaacgtccagtctcttctgatcattctcacatcctacatgttcatccttgtcgctatcctcagaagccattctgcagagggaaggaaaaaagctttttccacatgtggttcccacctgacagttgtcacaatcttctatggaaccctcttctgcatgcatttgagacgtcccacagacgagtccgtggagcaggggaaaatggtggctgtgttttacaccacagtgatactcatgctgaactccatgatctatggcctcaggaacaaggatgtgaaagaggcgttgaaaaaagcaataggaaaacaaacattgggaaaataaaaatgctaagctatcattaaaaatttgtgaagtaatgagatataatatcattgggttagatgtcacattttaggctacatttgcacaattcatttctaattttctgttaggtagctgactgagttaagcttcctgaaactagcgggttgaaacgggaagagtagaagattccatttaggcttgcacggtggctcacgcct

SEQ ID NO: 186 - protein, 232 aa, Homo sapiens
MLENFLSEKKTISYAGCLMQCYVVIAVVLAEHCMLAVMAYDRYMAICNPLLYSSKMSQGVCVHLVIVPYVYGFLLSVMETLRTYNLSFCGTNEINHFYCADPPLIKLACSDTYSKELSMYIVAGYSNVQSLLIILTSYMFILVAILRSHSAEGRKKAFSTCGSHLTVVTIFYGTLFCMHLRRPTDESVEQGKMVAVFYTTVILMLNSMIYGLRNKDVKEALKKAIGKQTLGK

SEQ ID NO: 187 - DNA, 1324 bp, Homo sapiens
  source
  (1)..(1324)
  CDS (201)..(1124)
ctacatttattcatcacagagcctgttacataacaggcactgagaaaagatctgtgaaaagaatgcaaagtgtgctaatagatattgtataaagggagcatctgaaggtataaattaataaataaacattctaatatttcctttattttattttagttatcaaaaagttttgtaactgatattgacttagaattcagaaaatgctcaatttcaccgatgtgacagagttcattcttttggggctaacgagccgtcgagaatggcaagttctcttcttcatcatctttcttgtggtctacatcatcaccatggtgggcaatatcggcatgatggtgttaatcaaggtcagtcctcagcttaacaaccccatgtactttttcctcagtcacttgtcatttgttgatgtgtggttttcttccaatgtcacccctaaaatgttggaaaacctgttttcagataaaaaaacaattacttatgctggttgtttagtacagtgtttcttcttcattgctcttgtccatgtggaaatttttattcttgctgcgatggcctttgatagatacatggcaattgggaatcctctgctttatggcagtaaaatgtcaagggttgtctgtattcgactgattactttcccttacatttatggttttctgacgagtctggcagcaacattatggacttacggcttgtacttctgtggaaaaattgagatcaaccatttctactgtgcagatccacctctcatcaaaatggcctgtgccgggacctttgtaaaagaatatacaatgatcatacttgccggcattaacttcacatattccctgactgtaattatcatctcttacttattcatcctcattgccattctgcgaatgcgctcagcagaaggaaggcagaaggccttttccacatgtgggtcccatctgacagctgtcattatattctatggtactctgatcttcatgtatctcagacgtcccacagaggagtctgtggagcaggggaagatggtggctgtgttctataccacagtgatccccatgttgaatcccatgatctacagtctgaggaacaaggatgtgaaaaaggccatgatgaaagtgatcagcagatcatgttaaacaaaataaaatcaaatttgatttaattttatcttctattatttgtttggaaaaagtttattacccagtacctaggaacattaagataaagatattctgtgggttgaaaagaaaaataaaagtggtacaaattgagaaaatataaggaggaatgattcatttctgttgatgtgagtatggagattaattacatacaaata

SEQ ID NO: 188 - protein, 307 aa, Homo sapiens
MLNFTDVTEFILLGLTSRREWQVLFFIIFLVVYIITMVGNIGMMVLIKVSPQLNNPMYFFLSHLSFVDVWFSSNVTPKMLENLFSDKKTITYAGCLVQCFFFIALVHVEIFILAAMAFDRYMAIGNPLLYGSKMSRVVCIRLITFPYIYGFLTSLAATLWTYGLYFCGKIEINHFYCADPPLIKMACAGTFVKEYTMIILAGINFTYSLTVIIISYLFILIAILRMRSAEGRQKAFSTCGSHLTAVIIFYGTLIFMYLRRPTEESVEQGKMVAVFYTTVIPMLNPMIYSLRNKDVKKAMMKVISRSC

SEQ ID NO: 189 - DNA, 1333 bp, Homo sapiens
  source
  (1)..(1333)
  CDS (201)..(1133)
tgttatatattcagttcattttatgtatagtatatttaaaccctgtattgtacatttttgcaaagtgtacattgtttttaaattatttgaattaaaataaggacaaacacaactcagtttcaagaataaaacaaattcatttactttccttttgaaacaatttctccataggcaacacagacttggcctatactaaggcaatgcctaatttcacggatgtgacagaatttactctcctggggctgacctgtcgtcaggagctacaggttctcttttttgtggtgttcctagcggtttacatgatcactctgttgggaaatattggtatgatcattttgattagcatcagtcctcagcttcagagtcccatgtactttttcctgagtcatctgtcttttgcggacgtgtgcttctcctccaacgttacccccaaaatgctggaaaacttattatcagagacaaaaaccatttcctatgtgggatgcttggtgcagtgctactttttcattgccgttgtccacgtggaggtctatatcctggctgtgatggcctttgacaggtacatggccggctgcaaccctctgctttatggcagtaaaatgtctaggactgtgtgtgttcggctcatctctgtgccttatgtctatggattctctgtcagcctaatatgcacactatggacttatggcttatacttctgtggaaactttgaaatcaatcacttctattgtgcagatccccctctcatccagattgcctgtgggagagtgcacatcaaagaaatcacaatgattgttattgctggaattaacttcacatattccctctcggtggtcctcatctcctacactctcattgtagtagctgtgctacgcatgcgctctgccgatggcaggaggaaggcgttctccacctgtgggtcccacttgacggctgtttctatgttttatgggacccccatcttcatgtatctcaggagacccactgaggaatccgtagagcagggcaaaatggtggctgtgttttacaccacagtaattcctatgttgaatcccatgatctacagtctgagaaataaggatgtaaaagaagcagtcaacaaagcaatcaccaagacatatgtgaggcagtaaaactgtagtggatattgttgtccctattataaatagggtcctgttataaatggtcacatgtaaaagtcctagctcagaaaacagtatcaaaaggtaactctttcacacactaagaggtctgatgtaacagggtgatgttttaccccttgtatggactctaattactaagcatattttctcctatatgtgcgccaatatta

SEQ ID NO: 190 - protein, 310 aa, Homo sapiens
MPNFTDVTEFTLLGLTCRQELQVLFFVVFLAVYMITLLGNIGMIILISISPQLQSPMYFFLSHLSFADVCFSSNVTPKMLENLLSETKTISYVGCLVQCYFFIAVVHVEVYILAVMAFDRYMAGCNPLLYGSKMSRTVCVRLISVPYVYGFSVSLICTLWTYGLYFCGNFEINHFYCADPPLIQIACGRVHIKEITMIVIAGINFTYSLSVVLISYTLIVVAVLRMRSADGRRKAFSTCGSHLTAVSMFYGTPIFMYLRRPTEESVEQGKMVAVFYTTVIPMLNPMIYSLRNKDVKEAVNKAITKTYVRQ

SEQ ID NO: 191 - DNA, 1351 bp, Homo sapiens
  source
  (1)..(1351)
  CDS (201)..(1151)
tctttctgtctctgaaataattaccaagtttacttattagacctagaagcttgagtttaataactgagttagagtaataaacaattcaaagaaatgttatcagggaattgtcctagccatataagggcagtcctgcaaataattctttaaagtttttaacctctcttttcccccaaacagatgaatttccaaactctgacatggctcctgaaaatttcaccagggtcactgagtttattcttacaggtgtctctagctgtccagagctccagattcccctcttcctggtctttctggtgctctatgggctgaccatggcagggaacctgggcatcatcaccctcaccagtgttgactctcgacttcaaacccccatgtactttttcctgcaacatctggctctcattaatcttggtaactctactgtcattgcccctaaaatgctgattaactttttagtaaagaagaaaactacctcattctatgaatgtgccacccaactgggagggttcttgttctttattgtatcggaggtaatcatgctggctttgatggcctgtgaccgctatgtggctatttgtaaccctctgctgtacatggtggtggtgtctcggcggctctgcctcctgctggtctccctcacatacctctatggcttttctacagctattgtggtttcatcttatgtattctctgtgtcttattgctcttctaatataatcaatcatttttactgtgataatgttcctctgttagcattatcttgctctgatacttacttaccagaaacagttgtctttatatctgcagcaacaaatgtggttggttccttgattatagttctagtatcttatttcaatattgttttgtctattttaaaaatatgttcatcagaaggaaggaaaaaagccttttctacctgtgcttcacatatgatggcagtcacaattttttatgggacattgctattcatgtatgtgcagccccgaagtaaccattcattggatactgatgataagatggcttctgtgttttacacgttggtaattcctatgctgaatcccttgatctacagcctgaggaataaggatgtgaagactgctctacagagattcatgacaaatctgtgctattcctttaaaacaatgtaattttaaacagtacaggtaaatgaggagagagttaatataagctgccattatgtaaaagaaaatgtaggaaaaagaaaaggtaggtagccgagttacaggttcgtaagcaatcataagaattacaacaagatacaatttagggagctttgaattaaaaaataaactgaaaccctttgagttgtgaggttaagttagaaaaa

SEQ ID NO: 192 - protein, 316 aa, Homo sapiens
MAPENFTRVTEFILTGVSSCPELQIPLFLVFLVLYGLTMAGNLGIITLTSVDSRLQTPMYFFLQHLALINLGNSTVIAPKMLINFLVKKKTTSFYECATQLGGFLFFIVSEVIMLALMACDRYVAICNPLLYMVVVSRRLCLLLVSLTYLYGFSTAIVVSSYVFSVSYCSSNIINHFYCDNVPLLALSCSDTYLPETVVFISAATNVVGSLIIVLVSYFNIVLSILKICSSEGRKKAFSTCASHMMAVTIFYGTLLFMYVQPRSNHSLDTDDKMASVFYTLVIPMLNPLIYSLRNKDVKTALQRFMTNLCYSFKTM

SEQ ID NO: 193 - DNA, 1051 bp, Homo sapiens
  source
  (1)..(1051)
  CDS (201)..(851)
gatgttccttgtgaattgcttgcatccagcattaagggctggtttttatcttttatttttccaatcctctttccttctcaaggtgtccaagacacacagagccacggaatctcacaagtgtctgagaattcctcctcctgggactctcagaggatccagaactgcagccgctcctcgctttgctgtccctgtccctgtccatgcatctggtcatggtgctgaggaacctgctcaacatcctggctgtcagctctgactcccccctccacacccccacgtacttcttcctctccaacctgtgctgggctgacaccggtttcacctcggccacggttcccaatatgattgtggacatgcagtcgcatagcagagtcatctctcatgcggactgcctgacacagatttccttcttgctcctttttgcatgtatagaaggcatgctcctgactgtgatgacctatgactgctttgtagccatctgttgccctctgcactacccagtcatcgtgaatcctcacctctgtgtcttcttcgttttggtgtcctttttccttagcctgttggattcccagctgcacagttggattgtgttacaattcaccatcatcaagaatgtggaaatctctaattctgtctgtgacccctctcaacttctcaaacttgcttgttctgacagcgtcatcaatagcatattcatgcatttccataatactatgtttggttttcttcccatttcagggatccttgtgtcttactataaaatcgtcccctccattcttaggatttcatcgtcagatgggaagtataaagccttctccacctgtggctctcacctagcagttgtttgctgattttatggaacaggcattggcgtgtacttgacttcagctctgtcaccaccccccaggaatggtgtgatggcgtcagtgatgtacgctgtggtcacccccatgctgaaccttttcatctacagcctgagaaacagggacatacaaagtgccctgtggaggctgctcagcagaacagtcgaatctcatgatctgttccatcc

SEQ ID NO: 194 - protein, 216 aa, Homo sapiens
MHLVMVLRNLLNILAVSSDSPLHTPTYFFLSNLCWADTGFTSATVPNMIVDMQSHSRVISHADCLTQISFLLLFACIEGMLLTVMTYDCFVAICCPLHYPVIVNPHLCVFFVLVSFFLSLLDSQLHSWIVLQFTIIKNVEISNSVCDPSQLLKLACSDSVINSIFMHFHNTMFGFLPISGILVSYYKIVPSILRISSSDGKYKAFSTCGSHLAVVC

SEQ ID NO: 195 - DNA, 1330 bp, Homo sapiens
  source
  (1)..(1330)
  CDS (201)..(1130)
tcaccagggaggcaatttgagtaaacctccaaaactcaaaactttttcctatctcagaaaagatcctcaaatcacaacccagtagaatccaagaatttattatattacatattacagtggagaagtttaacaaatttaaagatgtattaataaaaattgttttcttttcaggtaatgtaattaaccatcatttgaaatacatggcgaatagaaacaatgtgacagagtttattctattggggcttacagagaatccaaaaatgcagaaaatcatatttgttgtgttttctgtcatctacatcaacgccatgataggaaatgtgctcattgtggtcaccatcactgccagcccatcactgagatcccccatgtactttttcctggcctatctctcctttattgatgcctgctattcctctgtcaatacccctaagctgatcacagattcactctatgaaaacaagactatcttattcaatggatgtatgactcaagtctttggagaacattttttcagaggtgttgaggtcatcctacttactgtaatggcctatgaccactatgtggccatctgcaagcccttgcactataccaccatcatgaagcagcatgtttgtagcctgctagtgggagtgtcatgggtaggaggctttcttcatgcaaccatacagatcctcttcatctgtcaattacctttctgtggtcctaatgtcatagatcactttatgtgtgatctctacactttgatcaatcttgcctgcactaatacccacactctaggactcttcattgctgccaacagtgggttcatatgcctgttaaactgtctcttgctcctggtctcctgcgtggtcatactgtactccttaaagacccacagcttagaggcaaggcatgaagccctctctacctgtgtctcccacatcacagttgtcatcttatcctttataccctgcatatttgtgtacatgagacctccagctactttacccattgataaagcagttgctgtattctacactatgataacttctatgttaaaccccttaatctacaccttgaggaatgctcaaatgaaaaatgccattaggaaattgtgtagtaggaaagctatttcaagtgtcaaataaatgtgactggagcccaacaagattcaactgaggcaagggtcaaaaggacattttgggtaatgccagcaaggaatacttatttgataaataaaataattaaccactgtgatccatagatgatgccttgaggggagtcaaaatgggttcaggaaaaaggagaaaacctaaccatgtatcattctcacaaactgggaaaattc

SEQ ID NO: 196 - protein, 309 aa, Homo sapiens
MANRNNVTEFILLGLTENPKMQKIIFVVFSVIYINAMIGNVLIVVTITASPSLRSPMYFFLAYLSFIDACYSSVNTPKLITDSLYENKTILFNGCMTQVFGEHFFRGVEVILLTVMAYDHYVAICKPLHYTTIMKQHVCSLLVGVSWVGGFLHATIQILFICQLPFCGPNVIDHFMCDLYTLINLACTNTHTLGLFIAANSGFICLLNCLLLLVSCVVILYSLKTHSLEARHEALSTCVSHITVVILSFIPCIFVYMRPPATLPIDKAVAVFYTMITSMLNPLIYTLRNAQMKNAIRKLCSRKAISSVK

SEQ ID NO: 197 - DNA, 60989 bp, Homo sapiens
  source
  (1)..(60989)
  CDS (201)..(611)
  CDS (39988)..(40012)
  CDS (60293)..(60789)
  modified_base (28886)..(28985): a, t, c, g, unknown or other
  modified_base (29108)..(29108): a, t, c, g, unknown or other
  modified_base (31447)..(31546): a, t, c, g, unknown or other
  modified_base (34276)..(34375): a, t, c, g, unknown or other
  modified_base (36877)..(36976): a, t, c, g, unknown or other
  modified_base (40482)..(40581): a, t, c, g, unknown or other
  modified_base (42087)..(42087): a, t, c, g, unknown or other
  modified_base (44965)..(45064): a, t, c, g, unknown or other
  modified_base (45633)..(45633): a, t, c, g, unknown or other
  modified_base (49080)..(49179): a, t, c, g, unknown or other
  modified_base (52751)..(52850): a, t, c, g, unknown or other
  modified_base (52920)..(52920): a, t, c, g, unknown or other
  modified_base (57435)..(57534): a, t, c, g, unknown or other
caagggaagacgggctctttgggtgaggaactcaatagagacttactaaatgtttattgtgtgtaaatcactattcaggatacaacaatgaagacatgctgtgcgacacaatagatgtaatcatattcctgttgactatttcattacaggtcctgttctcctgagctctcacctctgatgcaagcctgaaagaaaagtaaatgagacagaataataatattacagaatttgtcctcctgggcttctctcaggatctggatgtgcaaaaagcattatttgtcatatttttactcacatacttggtgacagtggtggggaacctgctcattgtggtgactattattaccagcccttccttgggctccccaatgtacttcttccttgcctgcctgtcatttatagatgctgcatattccactacaatttctcccaaattgattgtagacttactctgtgataaaaagactatttctttcccagcttgcatgggccagttatttatataccacttgtttggtggttctgaggtcttccttcttgtggtgatggcctgtgatcactatgtggccatctgtaagccactgcactatttgaccatcatgaatcgacaggtttgaatccttctgttggtggtggtcgtgactggaggttttctgcattctgtgtttcaaattgttgttgtatacagtctcgctttctgtggccccaatgtcattgactactttgtctgtgacatgtacccattattggaactggtatgcactgacacctactttattggccttactgtttttgtcaatggtggaacaatctgtatagtcgtcttcacccttctactaatctcctatggagtcatcctaaactcccttaaaacttacagtcaagaagggaggcataaagtcctgtttacctgcagctcccacattatcgtctttgccctcttttttgttccctgtattttcatgtatgttagacctgtttcaaacatccttttgataaattcctgacagtgttttatacagttatcacacccatgttgaatcctttaatatacacattgagaaattcagagatgagaaattctgtagaaacactcttgtgtaaaagttaactgtattagagtaagagtgcccctatcatgtagataacaacgatgtagacaaggtcttcccagtgtggtcttcttccacatgtgcagcgcagaatggagaattggagaaatatgtgattaaaatagatgttcctgttcagaatgaagactacggtgccacctttagtgtaatttatttaaatactttgtagaatatacaagcaccatattcacgaatatctttaaaattcgcttttctctgacttgggttgaaactcaatgtgcagtctgataatactcttaagataaatctttgaaagacttcagaaaaatttaatagtgcgtcccttaagaactttaaactaaacattttgaggatgaaaatctgtcctatcccgttaaataagttatgagatcagtagagatgctagcagaggtaagtggaaaaaaattgataaggaggaagattgtaaacagtagttgcaactcagatcagcttcagtggcaagatacatagtttggccttcagcttttctcttctaattcccctcaagtaagagaatcctaaatgagctgttctgatcatgtataagaatatgtaaattcacatggcataagggatatattatggtatatatgaggagcctctgccctgcccttcatttaggaaagaaggatttatttttccagctgttgggtgtgctgttagtagacagcattcagatgatgtccccttaggtatctttagaagttgcagaaagccacctcaataaaggtctcatgccctttctcagagcagtccctctttgcgtccaggttaacatttaggttcaggtatcattagagtgcaagtcagaaatatggtacttttctagaaaaaaaatatttcattttgttatgttaaataacataaactatactataaaactacagtaaccaaaacagcatggtactggtatcaaaacagatacatagaccaatggaacagaacaggggcctcagaaatgacaccacacatctgcaagcatctaatcttccacagttctgtagacaactgggctttaaggttattgggttccaatggcattgtgtgagtaacttcccattataaatctcctggagtcattgtcatttcttttgtgttaccatatacagatggtatatttggtaaggtttgtaaaatgtctctgatggtcatgaatgatgttgttccaaggaacttgcctgatgagtccaaactctgtattttggctagacagatcaattacactagactagtgttatttactgtcattcccatagtcctccaagcttcttctggggaatcaactattatgatgctatcaatgaattaattaatcaaattaaaatgaatttatttttattatattcgtgtataaattttatttcaccaaattatggctgtatgttaagtatatatctgtggggaaaaatgataaacttattttgcctttttttctgcataaaactgagctattcatgatatttctttgattctaaatgtttatctggaagtataaagatatggatattgcaattaaattttgaaagaataatgtgctattctagataagacagattaaaacattatatcgataaaaaggcagtactgtttcaaatatatacatatgtaaataaataataggacttacacattacttcagtttcctatatatatttaaattgaggatgtttcatttaagatgtttttgttacatatgatagaaaactcaattcaaactatcttgaaatataaggatatttacttattggctaacataagtgtaaaattcaatcttatgtccagcttcatggtaagaggatgaaattatttaatgaaagagtgtttttctttgctcactgcactgtatcctgtgtgtcacatattggatttcatcgggctctcctatcacaagaagaattgctatctgtagccattgagagaaggttcttttttcaacgttagccaaggtaattgacctgattatgatgtggaatggaggtgttataacacagtggtggtaggcaatgatatttttgtcttccaggtgactgacaggggcacatcttgccatgccctgtctaattgtgataataagtgagaatagaaaagaatcaggttctgaatgattatagtgtaccaggatgagatattttggagatgaaggtctaagctacacctttaagtaagtcatgagaccagtagcggtgctagtaaaaggtgaagtgggagaaatagaattgacaataaaggaataagatggtacatagcagttgcaactctatgatcagccatggtggcaagagacaatatttgtcccttaacctttctcttttaattttcccccaggaagagaatcttaaagaagctgttctcaagtgtatatgaagaaatggattcaagtgacataataggtaggctgtgatagataaaaggatgtacttccttgccctccctttaggaaagaaggatatatatttccagttgctgggcacgctgttcacagacaactttcagatattaggcctttcaatatctgtagaagttgcagaaagccacctcaccaaaggcctcatgtcctttcccagaaaattccctttttgcaactagatcaatatttaggtgtcactggagtgcaagtgataaatattgccttgttctacaaggaaatatttcatttgactaacaaattgtgaatatcaaatatgcactgacaagaattggaggaacgtatgtaaaggcatcttgtggatatcggaacaaaaaaggcaaaatagatggctgcatgggggaatgtttattagcattgggttaatttctcagaatatatgtggcataggtatgtgatgactaaaacttactgagcacatattgtgtgtcaaacatgtggaaatgagcatttcacattctcaggttaggattgtccagctggcaccgtaactcatcttttaggaggccattccaatgtctcatttgttcagcttctagatgatgacaattgtggttataccagtaaattctattgtgatgagttatatgttttaaatttatttactaaaaattttcttctggatagataatgaatgagataccatggcaatggataacagattctactccatgaataataaataaggcaagtgctaggaaaaatatgtaaccagaatatatggtgaaaaaatgctgtcctctccagactgaggagttggaatgaagtaagctgtcacaaggttgttggctggtttccctagctacttgtaccatgttaaagagtcaatgatggacattgctgatggcattttagaccttgtggctttgtagagtattcatctctgcaacagtgactacaaaggtaactgagaaaaaggctgactgacatccaaaatgcagttcatgttcatgagattcctggaagcttcttctgcagtagattctttttgttgggcatttatgttgtaaactaacattgtagtatttggtgttccttttgagagattcatccacatatggttcttccaactactttgtcatcatttttccatttttaaatttccaatttcctcattagcttattaaacctgttagccagtgtccattttcagtgtagatccataagtatggttattattccttccacatacagcggaaaacaagactgaccgctcaaaatactgccttctgggaggcttttccttcaatctcgtgcttccagaccaccttctgcagacagtgcagcatttgcagagttttgtctgtttttgctgttccatgcaggttggttactccttttgttgtcatctttaaaacattgttttttattttctatagctttattgaggtgtatgtgacaaaaatctataatatatatttaagttgtacagtgtgatattttggtaaatatatacattgtgaaatgattaccacaatcaacacgttcagcatctcacataattaccttttgtgtgtggtgagaatatttaagatgcattttctcagcaaacttcaagtatacaatatggtattaccaagtatagtctctatgctgtaacttagttctccagaattattcattctgcataaatgaaactttgtactctttgaccaacatctcctcatttctctgtcccggcattccatcacaatcgccattctactctctgctcttatgagtttgacatctttttttagattccacatataattaagacaatgccgtccttactttcagtgtggagaaaagggaacccttttacatggttgactggaatgtaaattgaaacagcaattatggaagacactatgaaggataaaactaccatctgatccagcaatcccaccatgtggaatgaataaaaggaaaatgaagttagtattttgaagagatacctgaattcccacgtaaactgcagcattatttataatcagcaagatatggaaacaacttagactttcccggacagagcctcggccccccgcccacgtctccagccgccagcatggtgctgctggctgggacccagctgcagggtggcggggcgcgctgcatgacccggccaccgccgtccccactcctaggcacacaggtcgaggaggaccgcgctgactacaaagagttccaggacttctccagtctgcctgacacccgcagcatcgcctgggacgactctttctaccctttccaggaggaggaggaggagcacggcctcgagggtgtggagagcgtcctggaggagggcgtcctggaggagggcgtcctggaggcgtggggctgctgcagacgttggtgcggcggggggtgagcgctgagaaggcgcaggagactgaccacaatggctagaccggccttgatgtcgcctgctaccacggctttgtggatataccgtggtggccttagctgagtgcccccacattgaagtcaactggcaggacagggaggggaacgcaaccctaatcatagctgcacaggcaggagctgcccctggccccatgggcacagttgccttagacactggctctcagccttgcacttcctgcgtcagcatcacctgggctggttcatttgagttttcacacagatctggtggaaacacaggctgccaagcgctgcccctggagtctttctttgaataggcctggggtggggcccaagaatgagcagaagaacaggtttcctggtgaggctgatgctgctggcccagggatcccacgttgaggacggagggctttgaggttttcctgcctgatgatggccaggaagccttctcagtaggcatggaagaccagcagagtcccagaccccaggagagatgtcgtcagagggacacagaggcatcatggaattaaagtgaaaatgaagaaaggagctgagcatctgtttaaagactttcctgcgctgtttggctaaagaggctgttctggcccagtcagggcactctatcatcaccaactacttgttgaactatggaatgggtcttgatcttgaaggatggacgcgttcgggttgaaagcagccatgcagggtggaaccgatcgcatccgagccctgagctcgcaggggcgggtgtccactcgagggcccctgccgtgggatgtcgccagaggagtggccacttacacgtccgcctcatgcagaggctcctggagcgcccctgccagcagcggttggggaaaaagtaccagcttagctgcctgcgctccaccagagggcggggaagcccgagggctggaagaactggctgcagatggtcagggactgcaagccttccgcgctgacgctgcgctccgtgtgtggcctggaggaccggggcgccctggaccacatggtcaggatgaccaccagcctctaacagccccgctgtggccctcgcgtgccagaccgtgtgcccccagagctccctgtgcctggggaagaggcggctggcggtgcaggaaatcctgggggctcaggaaattctagcgacgcggcgtggggtggggaggcaggcgcaggaggcgggcgaagtggagggcgcagagcagcacaagcggccctgcccagaggccgcgggctcccgggagggctccccaagagccggcctcccacctgccccgctgccagggtcctggggctctgccgaccccgccccgcggaaggccagcctcctgcccctgcagcgcctgtggcggagcagcttgcggcccggcgtggtggtgccccggatccgcctcagcaaggcgcccgcgcccaacttgcagcgccagaggccagcgcggaagggcagcaccaaggacagtggccacctgcggatacccaagtggccttacaaggtggccacggaggagaaaccggaggctgaggaggccgagaagaagcgccaggccaagatgcaggagaagcgcccgccgccctggaagaagaggacgtgagaatccgcgggtgcttgacacggggttcgagggcagggtgaggccgtggggctgggcaccgtggcccctcccgggaccaccaggccgcgcgcgtttccacgctgtctttctagaatgctcccaggaaggggctgggggagccacatcgattcgcctgacaccagccaccctaacaatcagtacacctagcgggcatgttgcctaaaaggctccctttagagaagctcaattaagatgtttttaaagatcaatttattaggccgggcgcggtggctcacgcctgtaatcccagcactttgggaggccgaggcgggcgaatcacctgaggttgggagtctgagagtagcctgaccaacatggagaaaccccgtctctactaaaaatacaaaattagccgagcatggtggcacatgcctgtaatctcagctactcgggaggctgaggcaggagaatcgcttgaacccaggaggcagaggtggcagggagccaagatcgcgccattgcactccggcctgggcaacaagagccaacctccgtctcaataaaaaaaaacctcaatttattaaagagtattttctgtgtgattttgtatttttaattgttatccaatttgccaagttttacaagtgatagtgccccttgtatccaaggcagttttaatgcacttgcctgaagaccttttatttaaaatactgtttctagcaataaatgtgtatgatatctgtaggagtttacacagaaatcatgggattccctcctttttggctgtttggtcttcttattgttggtgcacatgcacactggatgtttttattaattagattaagtgacactggatatttctgtttgatggagggattgactcattcagccacatgatcaagtgagaaagagatatcatattttattgtatctttttaaaaagtattatccatacagtcatatactggggaaaagcatttatcatcaaattataaaagaatgcagagataagcatgtatgtattgctagaattaaattctttttaatcaaggagttttggataagctggatagaaaatctttaacatattctaaatagatatgaggggaaagtgtcatttgataaaatgggggaaatgtaatagatgattaccagaaatacaaaattaagccatatatgctcttaagtaaatcgaatccagacatccttcaaatgtaaaaaaaggatgcaacaagagtaagatgcaaattaaaggaacggggggaggtgatgtttagaagaagcaaagagaatataatgggaagcaaacttattttaggcaaattctcctggagtggaccagacagccctctcttgcagactcagttccaaagagtcccttatgtgggtatttcttttatttttcctttgaggactgcacttggtgtttaattcaacctcatgtggacctcatggaatttccaagacgtggggccttggcattgtggcaccttcctgccacgtgtacataattcacagcattaccaagtcaccgcgagctccacgctcacctctgtcagcccaggacccagccaggcagtgtcacatggtctcccaggcatgcctttccaagccggctatccctgctgagaaagttctgaaggcactggtccggggagctgagccctgggtctgtcctaaaactccataggtgactgcactgcagcccacacggagagctgtggctctaacacaaggattttgagaggcttcagtcgcctttaagtggcacttccaggacacccatcctgagctctcacgaatggctccaccttcccaagaatgtctaattgtcattggaagagccagtgtctggcagctttgctcgggctgatgtggcatctgacccttggtgggttgccagacattccttcctgtttccgccatgggaagttaacactgggaatggtatggagcccccaattctacagtaagccttgggtgtctgctgcttccaggtcaacaatgggcatttctagtcctgaccagccattaccacactgtaaccgatgctcataatctccagggatgtgtagaacagcaatggcaggacagcaaacaaatggcgatttccccaggtcccatgctgttctggagtgggcatgttaggtccctgttcccaatgtgttccagccttacccaggtgcacagggtaccctggggccagcacaggtcttgtcaagtaatgctcctggtgtccacaaaacagctccagagatacctgcattttgaaaagcctgccaggccagcaagtatggggcaggacccagattgctttggcaaatctgaaggtgagctggccacttgcctggtgagtagaagctgcctttacctggccagtgtatgcaacttgagagacaatgacaacttcacgggggggtttctggtgggactgggaagcctgacctcccctgcagctttggtatggccccagtggaaagactggattttgaaaacccaccagacccaactgaaagaagggtcatccctgattggatcccagactctccctggtctctctgggctcactctagacgtgacttgcctgtgggccgcccttccctttgtcccatgaggcaggtccaggtagcttctgcagctgtgtgcctggctactggcccagcacttcttatttttgccttgtggaagtagatttgctagtagaggaattttccaagtcaaaggaagtgtcaccaagcctctttcctcgacctatggcgagcccaggctcttggtttcttattctctttggaatgggcagcagagggcgtgagccggcctccagccaggctcagggagtgtgggagagcagggagaaaagcctagataatggagaactggagccaccttgaggggggtgtcctggggtcagtgtcggggtgatcagatgagccagtttatatttaagcaacattattttgttcaattattttgggtaagggattcctcgggggaagtgtggtcatctggtcccagaggtggagtgaaatgcccactcatcttcctgagccatttggaagccctttcttctagccctaggtactggtgacacaggctcctcggtctcaggaggtgcacatggctgagggggtgcaggcttcttgtcacttacccactcagcactattgggcatcgggtattcacaggtctcacagtggcctctctaaaaacctggtgtcctaggagaacattgattatttttgtctatttttgtttctttgaacttctgcattcactcactgagggctcgccctccctgcacccctcatgttgttcaggaaggaggggactgatgaacatggacccccttctcctcttctgtcagttgccaccacactgtccccaccggctttatcaccacgttctcccacccctgttgcctcatctcttcttcctcattcacccttccttcctttgcctgttttcttctcccagttggttaagttctttatcatccctggcaccacctaccctgaggtttgcccaggacagaaaagcaggggcctctgtgaggcaatgtggtgttatcatggtgggacctccagacccccagagtgagtgaacagcaggcctgccagcatctgtgctgatggctaagaattcctacaccgccgtgcccctcccaccccctcctctttgctcaggagggagaccaggtttgctctcttgcaatgacagcccagcccctgctgtgcacagggatgcggctcagggtccctccctgcaccctgatgttagttaactgtagatagtgaatttcaagttgacagctaccttctcagggatttatatataaatatagttaaaggaaaagctatagtctattttactactttttagtgtttgtgaacattaagcttaaactggacagaataaatatttctcagacaatggcgatgctactgattacaagtgagatgggtggagctcgccccttgatggagaatttttttggtgattggagattggggactctggaagcagaaatggctttgcggtgggtgtgaagtcacttctgtccctcggagagcctcttgtggatgtgaaagcatgtatcaacaccagtgaaatccacctccatgtgcatggaggcacctgatgagaacacaaatgagccagtcctggcacttccctccagaaccggtcactcctggtctgacattggagcatgtgaattaagagtgacaattttttctacttgcttatgtgaataaagtgttctacagtcagccagcactaaactcactagaaaggaggagggaagagcgtgcagccaatcatctagaattacctcggtgtgcagaggctgtcccttggctgcacttgggaaaagcagtgtgaaacatcctgtgcctctttcttctggagctcctcctgacagtttcctggcaacactagagacctcaagactatggagatcagaatttcaacagctttgtcgtctcagcattgaccactcctgagacccggggctcctcctgggagcaggagacagggagttcatgatgttcgttgcaaaataggatttatgaatgcaggagggccgtgctggacccctctgccttcttctccccctgctgtcagcagtgacaaggtctccagtgtggaggcgagtctgttgtgggtgaaacagaagcccctggggtaaggccagaccccaggcctgaaaaggatgcaaagcctgctgtttcaggctgtcaggaagaatcgtgggtacaaagtgaatacgatgaaatgcatcccagagaggaaatgaatgtgccctcactaagaagtgggtctggctgccaggtctctggcagcccacctgcaagaggactacatcccctgcagccctgccatccacactacatgatgtggagtggctgtctcttccctcttaccctggggacccaagcctactttgaggagtgattcacagccctgatgtgtgccttgcattattctttccccaggtgtgcccggagactcaagcttgctcatttctgtcctgacacatctctctggtcctgtggtggtcagagtcctcctgtgctgtgtcagctcctagacatcattagtctttcacgtgataaagtatgaccacttttctcttttacagtatttggggaaattgtaacacactccccagggatttgcgcaggtccctctgggtcccatggtaggtagttctatggattctgcacctggcagtcagcactcccccttggaagcccctggggtccctgtttctgtgggcctggtccttggtttctaccgcattaccttttcgctgggacctgcaagaactgcctggagggccatggtctagggaaggacaggtggaaccctgaccacaacagatccttctaaaacaacaaagtcaccttgatgacgacgactgtagtggggtggatgccatcgcagcgggcatgctgggagccgccaagggcttaccgcaaaagcagttcttcccaaggcaccctttgcatcttcccctcctcacctctcagtgcatttggaaattgcttaggcattggaatgacttaaatcaactgcttgtttctgtgcccccgcactcccaggttccttcattaatattttcaataagtggctaaaaaaactcctctggaggttgtttttgagagcaggaaaaagaaaaacacacactacctgaaatgattttactaatttttgagtgactcagttgaaagtcagtgttgcatacacaatttcctcatgctgagccagcttgaaataagacttgataaaaggcacggccctcagtagcaggcggtgccactgtggacagtgtacactatggtgtgagggtatgcacaggtgagtgtaagtgtgtttactcatacacacagataaactgaaaggacaccaggcttcgtgctggcaaaggttatgatgctgctgtagcttgttatggaccccaggccgtgtctgatgggaaatgctttgatggcatgttgttcaatgtatataatggggtctcccatggcccaaggacccagtatgagcactccgcccactgtggtgaagaacacagctggagtcatcacagcccaggtctttattgaaaggcagtgttgacccagaaggctcatgtagaacccatttggccaggtgtggaccaactctctccatctgacttgacttggctacacagagggacccagtcccaaaaagcccagacccaagaggaaaccaaatgacatttaccattacaccagctttcattaattttttccataacatcataagaactgtattgctaagtatgcttataaatgctatttacagtctgttcccttttattagatgaaagattaataaagaacaaaaaattgcctgtagtaaaaccgtgcctgaggccaagagtggtggctcatgcctgtaatcccagcactttgggaggccacgatgtgcaaatcacctgaggtcaggagttcaagaccagcctggacaacatggcgaaaccccagctccacaaaatacaaaaaaaaaaaaaaaaattatgtgggcttgatggcaggtgcctgttattccaattacttcggtggttgagacaggagaatctcttgaacctgggaggtggaggttgcagtgagccgaaattgcaccattgccctccagcattggtgaaagtgaaagagagggagggagggagagagggagggagaatgagagagagagggaggagagagagtgaggggagagagagagagacaaagaaagaaagaaagaaagaaagaaagaaagaaagaaagaaagaaagaaagaaagaaagagagagaagaaagaaagaaagaaagaaagaaagaaagaaagaaagaaagaaagaaagaaatagaaagaaagaaatgaaagaaagaaagaaagaaagaaagaaagaaagaaagaaagaaagaaagaaagaaagaaaaagaaagccagcaatgcctgaaggacactgtgtggtcatcacgtcagcaggttgacactcacctggaagtcatgaaatctgtccattagcgactgatgggttgagctgtgagctctgagctcacacactggggcatgtgccactgctctgactcactcctttaaagaggaaaatacaactgagctttctaataccaaatatttaatcacaggattgaaaaacaaatcatcattcaagggaaattcgtctttaaaaccctttcctgatgtaacagtcccaaatcatagggattacgaacttgagccactgagcctagactgactgatatagcctaccaataagctatatacataaactcatgtcttcctacttctcagaaccatgaaatcaatcattaatccctttctttcatttatttttattgtgtcttaacaatactagaagccaaattcattcttttcttcaacctcttttattgattatatgacttcctaaaacacccgaataaaggttattattcatcatttcttcaatatacaccctttgatatcagacaacctacatgagagtcattggaatttatggtggttcacagataattttttgcagtattaagtttttaaattagtctttagtaccaaacctccctactccatactctgaccactctctctgagcagtaatcaatgctgcattgtaccctcaggattggaagccatgagaaaaaatcttcctcaaatcctaaccaagatgatttccgctcaagtggtaagtggataaatttgcagcatgtctgtctgaggctgaatctgagggaaaaggcctaatacttacaatccactggttggttttcctgctctccttatttaactttctttggttttcttgaattttttcccaaaaagatctcatttgcttcattatcatctcctataaaagaactatgaatttgaacatcagagaaacaaatggcttttggttgtcagacccccattgataaggaaatcaagggatgagatatgaaagagatttgggaagatctcagactgtagaactgcaacatgcaacacaaccagtttaataggaaaatcataagcagggctaatttacagataatgtggcatcttgcatcagaattggaatctactgacaccgtgccttgctaattctaacatattttattctattatttccagtgttggtaaataggtttcctatatagaaggcttttgaacttgtagtttagatagccaaaaactctttctgatattgagctctttacagtgccctgaacactaaactaaatagtcaaattattataatgattattaacttcatcactccctcagtgaaaggtaagttccaggaaggaaggtattctcacagattccatttaaatttctatcattgatacctaggcactacatgacatccagtacagaacagaataatctcatgctcttcatcttccccctaatctctttacctgtgccatcctccagcttacaaagtgctctcagagctatcacttgcccagtgttccttagttgcccctcacagtgtgtgtgagccccgtgctcctgagtgttccagaacagcaaatgaagcaggctcttatccaccgctccaaatatcattttttctccctgtggatcccacacatttgttcattagagctcaggaattgccagagactggcttttatggcaatgcacactggattcttcagaaaaatattagttttgacgtcctcctgctgtgacagttccccgcatgtgggcagccggtaggaattttggcttcttcccgggaaaggcagagacagggcctacagaagctggggccacagcctgtggtgatggggtctacgagttagttcagacagaataggcagatgggttctttctggaaggcttgtgtgatgtctgagaccattttcctgaaggaaggaaattaggaaacatatgattaaaacttcatcttatgccttggagaaacaaagaccaaagcaaaatttgactcaggttgtgactcagtgctaaacttctgtctagagtagaacaggctttagtttgaataagacaaaaatagaacctgaggcacaaagagagcccttggatctctaggtaaaattgttgggttcatgcacaactcacagggcactacatcctcatcctaccattttcttttgcatagaaaaatgtacctcagagaggccaggtgtgatggctcacacctgtaatcccagcattttgggatgccaaggctggtagatcaggttggagaccagcctggctaatatggggaaactctgcctctactaaaaacacaaaaatcagccaggagtggtggcacatacctgtaatcccagaaacttagaagatggggcaggagaatggcttgaaccctgaagttgcagtcagctgagattgagccactgctcttcagcctaggcattaaagcaagaagaaagaaagaaagaaaaatgagagaaagagagagagagaaagagagagaaaaaaggaagaaagaaagaaagaaaagaaaagaaacctcagtttagttgagttttgactttactccaaaaaacttcaggttcaagagtatgaaattgagaccaaattacaccattagatgatgggtcctgaatactctgaaaaccattcttaatgctcattgtgattggattagaaaagattgattccgtacaaaagaaataaataattggtttaggaaatggtatttaactgcaattttactctcattgtttcatttagatgtcataattttctcctttaaagcatttcaaaaaatctcaatcactatccaccactgcaaagtgatttctaaataaccattatttattcactgaacattgtgagatttgatcagatttcacccagaaatgcagaagaggcatttagtatactctaaaacaatattatcctcaaattattcaacatattacctaagttgtatattatagaatattctgtcttgtgcatatatttatgtgccaactttagaacagagggtattacatttatgtacaacatacaaaataaaatattctcaataaaatttaggatatacaacaagtatgaaattgcaagatatctgaaaactattttctgtgttcttagaatacataggaacaactaaggaatacataaatgatacaagtaaaattaatcttcactgtatttcacaagtatgtaggaagacaggatgacaaaataagagtaaaaacatttttactaagtaagcaaatgacatcacttatagtaacaagctcagtttgttgaaaaattaaacatagggcagtctgttttggattggaaaagtagcaggaactcctcctctgtttgttgtgttctcaccctagaaatatacttatggtctcactgaaacttgctgtagaagtagtactataaagtctgatcagggatcagggccccaccatatagtggtagtagctttcagacatcttcacagccagttccaaagccactctgtgtgtcccagaaaagaatgagcttggctacttgtacctctttatattgaatctctgaaaaatcacaccccttttcaaacaggttgtccatttcttggagtttgagatagccattagggttcttgattaggtttcaccagaagagaggaaatgatggattcaacaccttggctaatctccctaaacaaactttaaacttcctcttatcaagaaccactgagtttacaacaaatgaaccctcaaataccaaacttgtagataatttttggagttctttaatattttactcatcaaaagatgagaaagaggataccatcaatttatgattttaagaaatgtcttcaaaagtctggaatagtttttctcccttttctttttgctttatttttttctgtttttggaaatgttttgcctgaagttggctttaattctaatagtcactgaactagactggaaatgcacttaggtgttgcttttgaagcttgatttcaggttttaatgtagtactgtcaatttatatatatgtaatatattttatacatatataatatataatgtatgtattttatctataatatataataatatgtattttatatatattatgtatagatacacacacacacatatatatatatatacacacacacacacacacacacacatatatatatatattctggttctgtagcctaggctggagtgcgatggtgcaatcacagctcacagcagccttaaactgctagactcaagtgattcttttgcctcattttctcacagagccgaaattacagacgtgagccactgcacccagcctattaatttatgttgctgataaaaacataagaattgtctttattataaattaagaaacagaatatctttaaggaaatattatatcttttaggaaaaataaaatcttcagtagttatagactcctgtgaaaaccgccgttaccaatagcaattttgtgtacgtctatataacacatacatatgtaaatatatataatatatacatgaattttttcacatttggcagtcatttaagaaattcttttaccatataagttctaatttatattggtagaagtgaaataagtaaaatttgctgtttagtgaaaactgtttagcaagtgaaatgaagctgcagaaagtgtgaattggataatagatataaagatatgtcatgaaggcttcacagatggacaaatagaggtaaactaggagagtgatagtgacataaggaggatgagagtatcatgtatgtcctttatagacagcataatgtgtgattgactgtagcacacagtagagctaagtagagaagatgaggagagtacatattcaagggtataatgtttgataattttttcagagtaagcaaatgaatggaattcaggaagccaaacaatccccattttggatgtataaaacataaatttactttgttttgaatgtgtaaaacaatatattttggctgatatttagtatttctctgtctttgttggctgattcattatgatgtgtttaagcttgaaaccaccaccaaagatgaagaatctctttaaagcagccaaaatgaactgtttcattttgagggaacacttaatagaatgacaacagactgctccataatcataaatgtaagtataagacagtggactaatatttgtaaagtgtcaaaaatgtgactgccaatacagagatgaatatggattggaaataccttttacataagaggataaaaggaagatcttgtcacataagtataataaaaaaaaggggggctttataccctactaagggcttctagaacagcacccatgagatctacttgaaagataattccaacacctctgccacatttgaatctggctttattaattgctttttctcttaacagtgtttcctttatgtatcttttctgtttctgtatatgtctggtaagttttactcaaaaagtgaactatgtagagtagattaatatagaaagcaaaacccgcatgtgttcccttttactaggctgtatgtgtgtgttttgagagagaaggttgaatcaatctagtcaggagttgatttggttttgagacttgttcttcttagagttaattccagtgcaccatagatttcctgctcatctagcattactttgtgtttcggactggactggttcagcagcttttctcagtatctgctgtatcctcaactttaagtttccctccaaattccgctcagtcccccagaaggcactgctttgacctgttactcaacaattttttgcctacttgggggtggtgatgaggatggagaagcattttctgtcattctgatgaagctcagtcacaggttgtcactgtttctgggtcttcatggttggaaccttcttaatgatcctgtccaaccttcagatgtaggtctaaatcctcctcatatttttttcctattttttctttttcccctttccaaagttcaattagtgttaccagcatcccaagggcaatggcattccttatatttccctttgtagttttaagttttgttacacaggggagatggggaggtaaacacagttcttaaaatgtgatattctctgaatctcttcacaaactttaaaacaaatgtatgtggcacatatacaccgtggaatactatgtagccataaaaaggatgagttcatgtcctttgcagggtcatggatgaagctggaaaccatcattctcagcaaattaacacaacaacagaaaaccaaacactgcatgttctcactcctaagtgggagttgaacaatgagaacacatgtacacagggaggagaacatcacacactggggcctgtctggggtgggggtccaggggagggatatccttgggataactaccttatgtagatgacgggttgatgggtgcagcaaaccaccgtggtgcgtgtaaacctatgtaacaaacctgaacgttctgcacatgtaccccagaacttaaagtataataataaaaaaagtgttatgtcttaatgttgatgttaaattatcataaattaaattatatgtatatgcatttgaaaaattaggcaaaacatcaaattaatttatttcaaacttattatatacgttaaaatacttaatacatacatatatatatataattctcttctgcatgaaaaatgcttatagtttctctcattgatttcaatgcttcctgcatcttatcctggttaatttttaagtttcataaccattaccttccaaaactttatgcaatattctaacttctagcatcaattaatggagttcacaatttatctaaataaaacactgtaatataacatttgtgtgtttcaattcttttcttaacttctctttgaggttcattaatttgttgcatttcagtgttatctctgttttgtaaaattattttgtacgatgagatcacaatttatttagcaattctactgttgttgaatatttatgttgtctccaatttgagctactataaaaattgctgcaatgatcaacattgtgtttatcttgaaatacacataggcagtctgaggaatatattttagaattagaatatctagcccataaggaatgctcatagtcagttcgccaaaaagtatttcagcttacatccctgcaggcatgaattactttcattgattctttatctttcacaacacacaatattacgtgtctttaaattttgctaatttttatggaggcctgtagttcaacttatggattaatttttattattctgaggactaataaaagtaatccctttttcatatttgtccagatattcatgcctccaattttatgaagttcctgttcaaatattttcccaatattatattgggttcattttcttttatttattaccttcattaatcacctgtattgtattttattgcatatatgttgggataaatatttttctccactcttggtttgcattttaattcttggatggtatattttgaaacacagaagtcatcatttttgatataaagtaactacatttttcttcttaattgttccttttttgtcctggttaggaaatctttctgtgtgagaatattttattgtgttcccttcaccttcagaacatgaatccatgtggaaatgcactgtgtatggtttgaggtaggggtcagtattcagttttgtccatttgaatattaaattgatccagcattgtcctgatccccttgtaaatttcactgtagaatagcactctaataatgcatgagcattttgtatataagatgagatttacaaagataagcacagcataggaggtcaaataaaattacctcaaaatataggttcacaaataaacacatggataagtataatattgttagatgaagagaaagaaaatatttgcaggttaccattgagtctttttactccaaactatttcatgaagcccaagatctctactctcttccattgattttaacttcatttagacaactctgtcatctattatttcactttgtgacattcagaaataattaaaaaccagagaatatagtctatgccatacatcatgggtaatgattttccaaaaatgatttaaaaaggaaccaatacacatggttgcagtgttttcaccgtatttaatagaaacactataaatgagttttgatgacattagaatgcaactaaggacattaaatataacttatttgtcctgtttgatgaggtgcgaaaaacagggctttctgggataaacaggttcccagagcatatagacccatttctgacttttctctggtcagaagtgactacagcaaaagataggccatgagtggaggtgagcaggagcaattagggatggtgtatatcagggaactttgatcaacatcaacaaagctcatggttctaccttcacaatccaggaataatcccactgtgctggtaggtcttggaacatgttgcaccacaagtggggtggtggtaaagagactgcagtgagtgtcctccttaacacatccaagaagaaagagtccctcctctccatctatcttgtcattctgtctcttctctttccaataattgttacagacaccaaaagctcaattccaagaatcccccacgtgcacctcccaataatatttgccagatgtgaaagcctgagccccccaatacaagaaaacattcagattttgcagtgatatcgggatcatcttgagggtcacatccaacattcatgcttctcaaatctccatacaggaagatatgactattgactctttcaggctgcagagtaaaatcaactgcaaaaataatttaaaaaaaaatatagatacatgtaattaatagaaattagaattcattagggaaaattattctaccaagagtttactttaccaagatattggaagttacaaggacaggagaattgtgactacaatatttaataaagtataaggatgattaatattctctataggtagaacaaaaccctaaaaacagacattgaaaatttattgaaaacttaaaaattgagagtcaaatataagaccagcctgtttcaatccaatctccaatgtaaaagtgaaatattttatgccctgaatgccctttagctatcaaggtcattattattaaaatatttcttgttcttaaatactagtgatacaattttggcaagaatgagaagattttagcttactcaagcaccactccagataactggataaaagtccatatgttcaaattataagttgtaacttaaggcagatttttgcaaaatattttaccagtcactttgcggacatccctgctagctctagactgaaaccgaattttagattttacatgtagctcttcatgttgtaactaaactgaaattatcatttccatttttacttcctatttacataataatttcttctttctttttacatgttaagtccaaattttacattatatcaataatatgtatttattgtaagaaagtacaaatactccaacaaacttcagtgaactctattccccaatgaaatatgtttaacaattcaaatgaaatacagtaaagaaatgtaaatgtttatgtaaccttggattattacacttccttctgagcattgttccatttattcaattttttatttcttatgtcattccatttacccaatatataactctatccatgtgagcccagaacatatttgtttttcactatgttttactcttcaggttataaattggactataaatagaaacagggatgtaaaaaggttgcatcgtcatatggttcacttcctgctgaaatgaaataaagatttgatgaagggtaaaatattacccccatgattccaacaagaagtaatacactgtgggaattctgccaatgggctgacacttacctctgaatccactgagcctgtccagcagtccagtgatgggccctgcactgagctctggattcacaggctcagacacttgcagcagcagggactcatacctgcaaggagaaagatacagctaccacatctacagccaaaaaaaatacataaaagtcaccacttttatttaaaagacatttcatgagaagccctttaacccacacatttgctaattccaatattatcattttctttttcaaattcattcttattcacagttcctgattttcaagcacgatggtaaagtctatctggctgagaattcattcggatctttctttgtattgctccaaattagtaaggatcattagtcttaagactgggagaatattcaaaaatgaaattctgggttccagacctcaccagaaattcctgaaatcactgtctggaaaagtggggttatttttaagactgctgcatctgttgcttccttctcaaggccaggttgttgaaacttgctccaggcagggagatctgccttttatagttgaggttctctggaggcctacacggttcaaacattccgaatagtttgtttcatccatttttcagaattatatatttaaatataaactagaaatcatcaacacttttcactgctaaaatactttccccttttctctctggcttcccctggttgactttgtagccctgtagtaaatgtaatattttctctttgaaatatgaagtcttttgagcaataaaatggaaattaggaagagagatgctcacttcctttatttttctttcatttatttattttttgttttattcatttatttatttattttttaggttttacggaactttcattgagctgcttaataaagtcactgagtatggcaacaagtgatgcctctgaatatctatttctataaaggacacatgaaattcctgtgagcctattttcttggagattgggtaaagccaactctgagtccctttaagcatctctcttttgggctttcttagcttcaaacctctgagatttgaagaagaagggaaatagaataagtgccattccgagggacttatttgtctctcattctgggccccctccctatgaaaaggtctgcatgttactttattgtcttcactggtgcttcaatttatggctcttttgcaggagaagcttttaaagaaaatgcagtctttatgggaaaaaccctgtgaaaatcagagaaacctgaacttggaaaccaccagaatcagccactggaaggtagtcctgtactactctaccttctaccttctccaggaacttatggtgggcaaatgggtgactcttaaagtaggcacttgatatcaaactgtaatgtttctgggagtcaattttaaaaaaaaagaaaacattgagaaaaggtggtttcatttcttatgtagaatagtaggactgttagataggatttctaacaaaaccattgatgttacccaaagcatgctggtttgctttcatacaaagctgtagctatacgccaacagatacaagaaactgggccatcttgcagcattctatatgtgctggtttgataaatgctgggcataagagttatttggcagtcatggaaagctcaagtgaaccttctgagcctgggtcagcattaatctgaatgctggtggacaagtagtatttggaattgcatggaaaatttgaggcagaaagagtgacaggggaaatctagggcaaccatgaaattaagaatctcaactaattaatattgaataacacataacctatggtgagaaaagtggtgagaaatatggatttgtgtcttgagggagacatgtaaacatgcccaaaatatgggaactagtatctaaatataaggagaactctgaggacttcagaaaaatattaaaaattattttctctttgtggttgtatactttgagggtatgatagctaatattagtgtgttgaaaagtatttcataagaacctactctatgttgaatattaaattagaaaatttgctaatatagaagaaagaaagcatctttgtcctcacaaattgtacaatcccattgagagaggcaaaaatggtcaacatgcaaatatgtgcaatacatgatgtgttcgagtgtggtaggttctttgttggagaataatcaagcagggaatagaaaagaacaactgaggccagaaactggagattagtgtctgagttttaaatagggtggtcagaaaaaagactcactgaaaaattcaaattgaacaaagctttgaagaggaaggggaggatgaaagtgtgtatgtatatatatgtggaccatgagtgtgtatatatgtatatgtgtgtttgtgtgtgtgtgtgtgtaaaattctagttggagtgaacagcatatgcagtaattttgagtttgtgtatatttggaggccggaagcgccgcaaagatatctatgtttcagattggggtgacttagaaaaagaatggaaggaaatgaattcagagagacaaagatggccaaatcataaatgcagccttattaggataggttttgctgggtgaaatgtatttagctggacatgttagtctaacatcatttcacatataatgagtttaagcaacttgttgcatatctcagaaatagaaataattatttcctttctagtaactatagctccatactccaactcttaagcacgaactgttcttacttttccataaatatgggttggaatagagaaattcaaattgtgttttattttatttccaactatcttagaaaacacattatcttgaataaatttcatgtaattggtcagatacatctacgttgatctttatgcagaaagaaaggaaaggaaaaaaatttgtggattctaagaactggcaagactgaggtttaaactattggatgttcgagagacaaaaggaatcagtgagatttaataggagatggataaatacatttcccttttgactaacccattatcactgcagggttatgtgaatgtaaggttagaagctattagagctgagtatcagaagatgcctgcatttcatcatgaagaagaaaaacataatttggagatgctgaaaaagaaggggaaagatatttttcatcaacttcatttaagtaaagccaaaatggctcataggagggagattttaagaggaacgtatgaggagctgatgaaaatgtgccataaaccagatgtggagctacttcaggtacaaactcacaatgtggtttcaggtttttgactcttcacatgtgtaagtattttcctcatggctgaaatccatctccctacctttatttccatgatgtgtttccaaaaacacattcacataactaatgctactttactgggaaagtatagccccgccaagggattctaccaggccaaagatccctcctactttatccaccagccacaaaaatttgtggaatggtcaaggtaacagccccaataactgttccccaactaagtcaataatatattttgggttgtcaaacacgtataaaatagtgagtgattcatttacatttagattaatttgaggacatggcaagatcagaaattttgggaatctaggctcacattaatactattttgggatccactcatttgggtaataggttctgggaaagatgactgagtaggttattcagactcacccagaaacaatgctgcacctgttccctaggtgttggttaatccagtcagactgatacctaaaattcaccatcacaccatagaaatataattacaactctttaagtttcacaaaaatcctcctatatgttagttcagagtttgggtatccctagaagttaatttaatccacgagaaaatagaaagccccagtatctttaattattttttatcttctattcaacctaaattggtttattgctgttttttatttgtttatttggttggttgattggtttttccatttggttttggtattggttttttatttttatttatttatttttattattattatactgtaagttttagggtacatgtgcacaatgtgcaggtttgttacatatgtatacatgtgccatgttggtgtgctgcacccattaactcgttatttagcattcggtatatctcctaatgctatccctcccccctacacccaccccacatcagtcgccggagtgtgacattccccttcctgtgtccatgtgttctcattgttcaattcccacctatgagtgagaacatgcagtgtttggttttttgtccttgcgatagtttgctgagaatgatggtttccagtttcatccatgtctctacaaaggacatgaactcatcgttttttatggctgcatagtattccgtggtgtatatgtgccacattttcttaatgcagtctatcgttgttggacatttgggttggttccaagtctttgctattgtgaatagtgtcacaataaacatacgtatgcatgtgtctttatagcagcatgatttataatccttcgggtacatacccagtaatgggatggctgggtcaaatggtatttctagttctagatcnnnnnnnnnnnnnnnnnnnnnnnnnnnnnnnnnnnnnnnnnnnnnnnnnnnnnnnnnnnnnnnnnnnnnnnnnnnnnnnnnnnnnnnnnnnnnnnnnnnngatatactacgcgtcccatgcagacattctctgatttatacgtatatcctcggggatgtacttcaatgtcacacgggggtactccctgtgtatttgtcatattatcctagggaattttacttntaatgacacacggggtgtacacattgtgatactattcgtagtattctagaaagatattactcctcaggtcacaggggatgtacaccctgtgatattatcgtactatcctagggacgttactccaaatgtcgcagaaggtgtaaacgctgtgatattactggaaatgtgtcagggaaaggtactcgtaatgtctaagggcatgtacatcatgtgtgcacagcccctgtgatgttccttgtgatattctcgagggatgttaatccaaatattacatatgctgttaactatgtgtgaacacctttgtggtattattcctaatatactaaaaggatgtaactcctaacatcacatggggtatatgccatgtatgtacacattttgcgatattattcataatatcttagggagatgctcgtaattttacaattattcacgtaatactttagcgggatgatactcctaaagtcacaggaggtgtaaaccctgcgatattattcagaatattccagggggatgttactcctaatgtcacaggtgtgtataccctgtgatattattcacactttactcgtgcgatattactactaatgtcacaatgtgtgtacaccttctgatattattcgtaatatcctgggaggatgttactcctaacgtcacaagggtgtacacactgtgttattattagtaatattcctgggggattttaattttaaaatcacatggggtgtcaaccctgtgatctcattcgtaatatccaaggaagatgttactcctaatgtcacatggggtctacaccctgggatattattgggaatatcttaaaatgatgttatcttaatgtcagagggtgtgtacacctattgatactatttgtaatatcctaaggagatattactttaaaaatcacagtggatgtacatcatgtgtgtagaccctgtaatattattcacaatatcccagggaggtataacttttaatatcacagcagatgttctctatgtgtgtacaccctgtggtactgttcataataggctattcagcaaggctcccgcgcccaccttccagccccagaggccggcgcggaagggcagcaccaaggacagtggccacctgcggatacccaagtggccttacaaggtggccacggaggagaaaccggaggctgaggaggccgagaagaagcgccaggccaaggtgcaggagaagcacccggcgccgtggaagaagaggacgtgagaatccgcaggttcttgacacggggttcgagggcagggtgaggccgcggggctgagcaccatggccgctaccgggaccaccaggccgtgcggtttccacgctgtctttctaggatgctcccaggaaggggctgggggagccacatcgattcgcctgacaccagccaccctagcaatcagtacacctagcgggcatgttgcctaaaaggctccctttagagaacctcaattaagatgtttttaaagatcaatttattaggccgggcgcggtggctcacgcctgtgatcccggcactttgggaggccgaggcgggcggatcacctgaggttgggagtctgagagtagcttgaccaacatggagaaaccccgtctctactaaaaatacaaaattagccgagcatggtggcacatgcctgtaatcccatctactcaggaggctgaggcaggagaatcgctggaacccaggaggcagaggtggcagggagccaagatcgcgccatcgcactccggcctgggcaacaagagccaaactccgtctcaatcaaaaaaacctcaatttattaaagggtattttctgtgtgattttgtatttttaattgttatccaatttgccaagttttacaagtgatagggccccttgtatccaaggcagttttaatacacttgggctgaaaaataaaaactctaggggaatcagtcaaggtggggcagggcagagggtctctcaccttttgtgagttttaacttcatgatccctacctgatactcacagaagatgttaggaaaagacctgtccacatgttaaataaactttttacaaaatatatccaaacccacactaatgggaaaaaaatcaagtattagataaaaggaaaataattgctatggcaaagtagggaaataagtgataaattcatcttcctggagatggggaaaaacatttttaaatatccacagtattctgttcttcttaacaaggctggccctcagaagaacctattgttagccacaccctaacttgctggggttttattagagcctaacctacttggagtaaatgaaatacccaatcatagccttctctaagggcctcttataagggnnnnnnnnnnnnnnnnnnnnnnnnnnnnnnnnnnnnnnnnnnnnnnnnnnnnnnnnnnnnnnnnnnnnnnnnnnnnnnnnnnnnnnnnnnnnnnnnnnnnaagaactccaaaaattatctacaagtttggtatttgagggttcatttgttgtaaactcagtggttcttgataaaaggaagtttaaagtttgtttagggagattagccaaggtgttgaatccatcatttcctctcttctggtgaaacctaatcaaaaaccctaatggctatcccaaactccaagaaatggacaacctgtttgaaatgggtgtgatttttcagagattcaatataaagaggtacaagtagccaagctcattcttttctgggacacacagagtggcttttgaactggctgtgaagatgtctgaaagctactaccactatatgatgaggccctgatccctgaccagactttatagtactacttctacagcaagattcagtgagaccataagtatatttctgggtgagaacacaactaacagaggaggagttcctgctacttttccaatccaaaacagactgcactatgtttaatttttcaataaactgaacttgtttctataagtgatgtcatttgcttacttagtaaaaacgtttttactctgattttgtcatcctgtcttcctacatacttgtgaaacacagtgaagattaattttacttgtatcatttatgtattccttacttgttcctatgtattctaagaacacagaaaatagttttcagatatcttgcaatttcatacttgttgtatatcctaaattttattgagaatattttattttatatgttgtacataaatgtaataccctctgttctaaagttggcacataaatatatgcacaagacagaatattctataatatacaacttaggtaatatgttgaataatttgaggataatattgttttagagtatactaaatgtctcttcagcatttctgggtgaaaactgatcaaatctcacaatgttcagtaaataaataatggttatttagaaatcattttgcagtggtggattgtgattgagaattttcaaaatactttaaaggagaaaattatgacatctaaatgaaacaatgagagtaaaattgcagttaaataccatttcctcaaacaatcacgttttttctttttacggaatcaatcttttctaatccaatcacaatgagcattaagaatggtttacagagcattcaggacccatcatctaatggtataaattggtcctaatctcatactctgaaacctgaagtttttggagtaaaatcaaaactcaaaaaaactgaggtttcttttctttgcttttctcttcttttcttttcttttcttttctttgtttccttcctccttatttctctctctttctctctctctctctcgttctctcactctttcattcttcctttcttcttgctttcttgcccaggctgaagagcagtggctcaatctcagctgaccgcaacttcagggttcacgcaattctcctgcccagtctcctaagtttcttggattacaggtatgtgccaccactcctggctgacttttgtgtttttagtagagacagggttccccatattggccaggctgcctccagccagatctaccagccctggcatcccaaagtgctgggattacaggtgtgagccatcacatatggcctctctgaggttcatttttctatgcaaaagaaaatggtaggaagaagatgtagtgccctgtgagttgtgcatgaacccaacaattttacctacagatccaagagctctctttgtgccttaggttctatttttgtcttatacaaaataaagcctgttctactctggacagaagtgtatcactgagtcacaacctgagtcaaattttgctttggtctttgtttctccaaggcataagatgaagttttaatcatatgtttcctaatttccttccttcaggaaaatggtctcagacatcacacaagccttccagaaagaacccatctgcctcttctgtctgaactaactcatagaccccatcaccacaggctgcggccccagcttctgtaggcctttcctgtctctgcctttcctgggaagaagccaaaattcctaccggctgcccacatgcggggaactgtcacagcaggaggacgtcaaaactaatattcttctggagattccagtgttcattgccataaaagccagtctctggcaattcctgagctctaatgaacaaatgtgtgggatccacagggagaaaaaaagatattggagcggtggataagagcctgcttcatttgctgttctggaacactcgggaacactgggctcccagacactgtgaggggcaactaaggaacactgggtaagtgatggctctcagagcactttgaaagctggaggatggcacaggtaaagagattagggggaagatgaagagcatgaggattattctgttctgtactggatatcatgtagtgcctaggtatcaatgatagaaatttaaatggaatctgtgagaataccttccttcctggaacttgcatttcactgagggagtgatggaagttaataatcattataataatttgactacttagcttaatgttcaaggcacgtaaagagctcaatatcagagagagtttctggctatctaaactacaagttcaaaagccttctatataagaaacctatttaccagcactggggataatagaataaaatatgctagaattagcaaggtttggtgtcagtagattccgattctgatgcaagatgccacattatctgtacattagccctgcnnnnnnnnnnnnnnnnnnnnnnnnnnnnnnnnnnnnnnnnnnnnnnnnnnnnnnnnnnnnnnnnnnnnnnnnnnnnnnnnnnnnnnnnnnnnnnnnnnnngctgagtcgactctagaggatcctctcttccagtattctcattgctagaatggaggagaaaattttaaaggtttttaactacaattttgtaactggcattgacctactaagcactatgtgtgaggattcatgcccaaattcagtgtttgaaatacattaactttaaattcaactaaaatttctgaagtatatattcttagccccaatttaaggttaaagaaacacccacaggagcaagggaaggctccgctgattgtcttgtgccctactccctgcaaggacacatatttaacaactatctacagagaaaacacaccttcataagaaccaaaaatcaggtgcgcacccatagaacctgatagaggcccctctgcctttggaaatgggagggaagagtaggaagaactgcatcttgtggcttaagtgctgcctcagccatagtataatagaacaacatgtagtcttctaaggtttttgaccctaatacctgactcccagatggcacctctggacccatccagggcctggggaacttgccaccctgaaaagaaggacacaggtatggcaggctttgctacctgcttgttatagatccccagggccttgaatgaacacttacccaggaagtggtcatggcaggccttgagcaagacccagtgctatatttgtttcaggtctaacccagtgcaatcacagtggtagtggccacattcacctccatcattaggtagcccacaacagagggagaaagactccatctaagagaagtaagggaagagaacaagagtctctgcctgataatctggggaattctcactgatcttgtccaagaccatcaaggtggtacctctacaggtctgctttatgcagttgtcttttaaatcacataaaaggaagacaagtaacaagccaaaatatgcaaataccatcttctatatttatctatgtagtttcatttaccagagcttttgctttcttcatatgaattcaaattattgtctggtggaattttattcagttttaccaggcttgtcatgcctcctaaagcagattcagcttacattacaacatccaagtcctttcaaatatctggaaatcctttccaagaaggataggtacaaacaagcccagaacataaagactacaataaatatctaactcttcaatgcccaggcacagatgaacatctactgttctacctgcatcaacactaccatctaggaaaacaagatcccaccaaatgaaataaataaggcatcagggaccaatcctgaagaaataaagatatgtgaccctttgggcaaacaatttaaaattactgttttgagaaaactcaaagaaattcaaggtaacacagaaaagaaattcaaaatgctatcaaataaatttaacaaagagattgaaataattttaaaagaatgaagcaaaaattctggagctgaaaaatgtatttggcatattgaagaatgcaccaaagtcttctaatagcagaattgatcaagcagaagaaagaattagtgagctggaggacaaactgttgaaaaaacaatacagtcagaggaaacaaaagaaaaaaatataaaacaatgaaggacacatacaggatctagaaaatagcctcaaaagggaaatctaagagttattgaccttaaagggaaggtagagagatagagataggaagtttattcaaagggataataacagagaacttcccaaacctagagaaagatatcaatattcaactataagaaggttatagaacacccagaaatttaatccaaagaccacttcaaggcatttgataatcaaactccctaagctcaagaataaagaccctaaaagcaacaagacaaaagaatcaaataacatacaatggagctccaatatgccttgcagaagacttttcaatggaaaccttacaagccagaagagagtggtataacatatttaaagtgctgaaggaaaaaaaaccttttaccctagaataggatatctagcaaaaatatccttcaagcatgaaggagaaataaaaacttttccagacaaacaaaagttgagggatttcatcaagagcagacttgtccaacaagaaattctaaagggagtaagtacttcaatcagaaagaaaagaatgttaatgagcaataagtaatcacttaaaggtacaaacctcactggtcgtagaaagtacacagaaaacacagaatattttaacactatagctgtggtatgtaaactactcttatcctaagtagaaaaactaaacaatgaaccaatcaaaaataataaccacaacaacttttgaggacatagacaataagatataaatagaaacaacaaaaagttaaaaagcagggggacaaagttatgatgtggagttcttattagttgtttttttttttttttttgcttgtttatttgtacaaacagtgctaagttgttatcagcttaaaataatgggttataagatagtatgtaaaagcctcatgtaacctcagaccnnnnnnnnnnnnnnnnnnnnnnnnnnnnnnnnnnnnnnnnnnnnnnnnnnnnnnnnnnnnnnnnnnnnnnnnnnnnnnnnnnnnnnnnnnnnnnnnnnnntgttataacagcacggaatcctagtagctatagcttatgccatgtcctgcacggtctgactactatgaggatcccctctttcttttcttttcctttcctttttttcttttttctctctctctttctttctttctttctttctttctttctttctttctttctttctttcttttctttcttctctctctttctctctctctctctcgttctctcattctttgtttcttcttgctttcttgcccaggctgaagagcagtggctcagtctcagctgactgcaacttcagggttcaagaaattctcctgcccagtctcctaagtttcttggattgcaggtatgtgccaccactcctggctgatttttgtgtttttagtagagacagggttcccccatattggccaggctggtctccaacctgatctaccagccttggcatcccaaagtgctgggattacaggtgtgagccatcacacctggcctctctgaggttcatttttctatgcaaaagaaaatggaaggatgaggatgtagtgccctgtgagttgtgcatgaacccaacaattttacctacagatccaagagctctctttgtgcctcaggtctacttttgtcttatacaaaataaagcctgttctactctagacagaagtttatcactgactcacaacctgagtcaaattttgctttggtctttgtttctccaaggcataaggtgaaattttaatcatacgtttcctaatttccttccttcaggaaaatggtctcagacatcacacaagccttccagaaagaacccatctgcctcttctgtctgaactaactcgtagaccccatcaccacaggctgcggcccagcttctgtaggccctgtctctgcctttcccgggaagaagccaaaattcctcctggctgcccacatacggggaactgtcacagcaggaggacgtcaaaaccaatatttttctgaagaatccagtgtgcattgccataaaagccagtctctggcaattcctgagctctaatgaacaaatgtgtgggatccacagggagaaaaaaagatattggagcggtggataagagcctgcttcatttgctgttctggaacactcaggagcacggggctcacacacactgtgaggggcaactaaggaacactgggtaagtgatggctctcagagcactttgaaagctggaggatggcacaggtaaagagattagggggaagatgaagagcatgaggattattctgttctgtactggatatcatgtagtgcctaggtatcaatgatagaaacttaaatggaatctgtgagaataccttccttcctggaacttgcatttcactgagggagtgatgaagttaataatcattataataatttgactatttagtttaatgttcaaggcactgtaaagagctcaatatcagagagagtttctggctatctaaactacaagttcaaaagccttctatataagaaacctctttaccaacactggaaataatagaataaactttgctagaattagcaaggcatggtgtcagtagattccaattctgatgcaagatgccacattatctgtaaattagccctgcttatgattttcctattatactggttgcattccatgttgtggttgtacagtctgagatcttcccaaatctctttcatatctcatcccttgatttctttatcaatgggggtctgacaaccaaagccatttgtttctctatgttcaaattcataattcttttataggagacgataatgaagcaaatgagatctttttgggaaaaaattcaagaaaaccaaagaaagttaaatgaggagagcaggaaaaccaaccagtggattgtaagtattaggctttttccctcggattcagcctcagacagacatgctacaaatgtatccacttaccacttgagtgaaatcatcttggttaggatttgaggaaggttttttctcatggcttccaatcctgagggtacaatgcagcattgattactgctcagagagagtggtcaggctatggagtagggaggtttagtactaaagactaatttaaaaacttaatactgcaaaaaattatctgtgaatcaccataaattccaatgactctcaggtaggttgtccgatatcaaagggtgtatattgaagaaatgatgaatcataacctttctttgtgtgttttaggaagtcatataatgaataaacgtggtttaagaaaagaacgaatttagcttctagtattgttaagaaacaataaaaataaatgaaagaaagggaggaatgattgatttcatggttctgagaagtgggaagacatgagtttatgtacatagcttattcgtaggatacatcagtcagtctaggctcagtggctcaaattcgtaattcctatgatttgggactgctacctcaggaaagggttttaaagacaaatttcccttgaatgattatttgtttttcaatcctgtgataaaatatttggtattagaaagctcaattgtattttcctctttaaaggagtgagtcagagcagcggcacatgccccagtgtgtgagctcagagctcagtgctcaacccatcactggactaatggacagatttcatgacttccaggtgagtgtcaacctgctgaagtgatgagcacacagtcccttcaggcatggctggctttctttctttctttctttctttctttctttctttctttctttctttctttctttctttctctctctctccctctacgcacaccctctctcctccctctctctctctctcttgctctccctccctctctctctctttcatcaacgctagagggcaatggtgcaatctcggctcactgcaacttccacttcccaggttcaagcgattctcctgtctcggccacccaagtagctggaataaaaggcacccaccatcatgcccagctaattttttttttttttttttttttttttgtattttgtagagctggggtttctccatgttgtccaggctggtcttgaactcctgacctcaggtgatttgcccgtcgtgacctcccaaagtgctgggattacaggcatgagccaccactcttggcctcaggcacggttttactacaggcaattttttattctttattaatctttcatctaataaaagggaacagactgtaaatagcatttataaacatacttagtaatacacttcttatgatcatatggaaaaaataaatgaaagctggtgtaatggtaaacgtcattcagtttcctcttgagtctgggccttttgggtctgggtcctctgtgcagcaagtcaagtcagatggagagagatggtccacacgtggccaaatgggttctacgcgagccttctgggtcaacactgcctttcaataaagaactgggctgtgatgactccaccgtgttctccacacagtgggcagagtgctcacctgggttcttggggcaagggagacccaattaggaacgagccgaattccgaaannnnnnnnnnnnnnnnnnnnnnnnnnnnnnnnnnnnnnnnnnnnnnnnnnnnnnnnnnnnnnnnnnnnnnnnnnnnnnnnnnnnnnnnnnnnnnnnnnnnagttaacagacggagcccagcagccaagcacatagccatgacctgcaggtacgacactagaggacccttccttgaaagcaccacctccctggctcggaggcaaccaacaccaaaccagtgcaccaaacaaaaatacaaccaagaagcttcacaaaatccacctcactcccctgctacctccactggagcaaggtgctggtatccacagctgaaagacttgaagacagacgacattaaaggactctttgttgatactccccagtaccactctggagcacggcagctccactgggtgactagacccaaaagagcaaaaacaataactgcagtttgcctctcagtaaggcccatccataggggaatggggagaataccacatcaagggagcaccttgggggacaaaagaataggaacagcagcacttgagcccgatatcttccctctgacacagtctacccaaatgagaaggaaccagaaaaacaattctagtgatatgacaaaacaaggttctttaacacccccaaaagatcacaccagctcaccaacagtggatccaaacccagatgaaatctctgaattgccagaaaaagaattcagaagttgattattaagctaatcaaggaggaaacagagaaatgtgaagtccaacttaaagaaatcaaaaacatgataaaggatatgaaaggaaaattctttagtgaaatagcataaatttaaaaaatcataacttctggaaatcaaggacacacttagggaaatgcacactggaaagtctcaacaatagaatcaaagaagcagaagaaagaacttcagagctcaaagacaaggctttcaaattaacccaatttatcaaagacaatggaaaaataatttaaaaaaaaaacgaacaaagcctccaagaagtttgggactatgttaagcatccaaacttaagaataattggtgctcctaaggaagaagagaaatctaaaagtttggaaaacatatttggaggaatctttgagaaaaagatcccccagctttcctagggatctagacatctgaatacaagaaactcaaagaacacgtggaaaattcatcgcaaaaggatcaccgcctatgtacatagttataaggttatctaaattcaagatgaaggaaagaatcttaagatctgtgagtcaaaagcatcaggtaacctataaaaaaaactctaacagagtcacagcagatttctcagcagaaaccttacaagctagaagggattgatgtcctatctttagcctccttaaacaaaatcagccaagaattttgtatccagtgaaactaagttttagaaatgaaggaaagatacagtcttttccagacaaacaaatgctgagataatttactactaccaagccagcactacaagaactgctaaaaggagatgaaaatttgacacaaatccttaaaatgactcaaatagaacctgcttaacacagtaatctcataggacctatatgacaatcacaccaataaagaaanagcacagatattcaggcaaaataatagtatgctgaatagactagtgcctcatcttcatactaacatttcatgtaaaatggcctaaatgcctcacttaaacgacactgaatggatacgtcaccaaccatgtttctactgtctacataagaactcacagaaacctgagttaaatggggtaaacaaagctagtccaagtaaatggacaccaaaggtgagcaggaatagctattcttagatcagacaaaacagactttaaagcaacaacagtttaaaaaagacaaagaggaacattatataatgataaaaggaatagtccaacaggaaaatatcacaatcctaaatatacatgcacctaacactggagctccctaatttataaaacaattactactagacctaagaaataaaatagatggcaacacaattacattgggataacttaatactctactgacagcactagacatgtcatcaagacagaaagtcaacaaagaaacaatggacttaaactacaccctataacaaatggatttaacagatgtttacagaacattctaccaaacaactgcagaatatacattctattcatcagcatattttccaagatagaccatatgataggtcacaaaacaagtctcagtaaatttaagaaaattgaaattatatcaaatactctctcagaccacagtgggaaaaaaattggaaattgactccaaaaggaaccctcaaaaccaggcaaatacatgtaaactaaataacctgctccggaataatcactgggtcaacaatgaaatcaagatgaatattaaaaaattctttgaaccgaatgataatagtggcacactgttatcaaaacctctgaaacacaacaaaagcagtgctaacaggaaagcttatagcattaaatgccgacattaaaaagtctgaaaaagcacaaatagacaatctaaggtcacacctcaggggactggagaaacaagaacaatccaaacccaaacccagcagaagaaaaggaatacaaagataaaagcagaactaaatgaaattcaaacaaaaaaaaagataaatgaaacaaaaaaaagataaatgaaacaaaaaaaacctgattatttgaaaagatataggggtggagccaagatggctgaagaggaacagctccagtctacagctcccagcgtgacgaatgcagaagatgggtgatttctgcatttccaactgaggtaccgggttcatctcactgggcagtgtcagaaagtgggtgcaggacagtgggtgcagcacaccgagcatgagccaaagcaaggtgaggcatcatttcacccaggaagcgcaatgggtcaaggaattccctttcctagtcaaagaaatgggtgacagacagcaccagaaaaagtgggtcactcccaccctaatactgcgcttttccaatgctcttagcaaatgacacaccaggatattataacctgtgcccggctcagagggtcctacgcctgtggagcctcactcatcgctagcacagcagtctgagatcaaactgcaaggtggcagccaggctgggggaggggcacctgccattgccaaggcttgagtaggtaaacaaagcggctgggaagctccaactgggtggagcccactgcagctcaaggaggcctgcctgcctctctagactccacatctgggggcagggcatagccaaacaaaaggcagcagaatcctctgcagacttaaatgtccctgtctgatagagttgaagagagtagtggttctcccagaatgcagctggagatctgagaatggacagactgcctcctcaagtcagtccctggccccccagtaggggcagatggacacctcacagggctaggtactcctctgagacaaaacttccagaggaacgatcagacagcagcattcacggttcacaaaaatctgctgttctgcagaaacctctgaggatacccaggcaaacagggtctggagtggatctctagcaaactccaacagacctgcagctgagggtcctgtctgctagaaggaaaactaacaaacagaaaggacatccacaccaaaaccccatctgtacgtcaccatcatcgaagaccaaaggtagataaaaccaaaaagatggggaaaaaacagcagaaaaactggaaactctaaaaatcagagcgcctctcctcctccaaaggaacacagctcctcaccagcaatggaacaaagtgggatggagaatgactttaacgaattgagagaagaagccatcagatgatcaaactattccaagctaaaggaggaagttcgaacccatagcaaagaagttaaaaaccttgaaaaaaaattagatgactggctaacaagaataagcaatgcagagaagtccttaaaggacctgatggagctgaaaaccaaagcacaagaactacatgatgaatgcacaagcctcagtagatgattcgatcaactggaagaaagagtaacgtgatggaaggtcaaatggatgaaatgaagtgagaagagaacttaagagaaaaaataataaaaagaaataaacaaagcctccaagaaatatgggagtatatgaaaagaccaaatctccgtctgattggtgtacctaaaagtgatgaggagaatggaaccaagttggaaaacactctgcaggatattatccaggagaagttccccaatgtagcaaggcagaccaacattcagattcagggaatacagagatgtccacaaagatagtcctcgagaagagcaagtccaagacacataattgtcagattcaccaaagttgaaatgaaggaaaaaatgttaagggcagccagagagaaaggtcagttacccacaaaggaagcccatcagactaacagaggtgtcnnnnnnnnnnnnnnnnnnnnnnnnnnnnnnnnnnnnnnnnnnnnnnnnnnnnnnnnnnnnnnnnnnnnnnnnnnnnnnnnnnnnnnnnnnnnnnnnnnnntttatttttttttagtatttattgatcattcttgggtgtttctcagagagggggatttggcagggtcataggacaatagccgagggaaggtcagcagataaacatgtgaacaagggtctctggttttcctagacagaggaccctgcggccttccgcagtgtttgtgtccctgggtactagagattagggagtggtgatgactcttaacgagcatgctgccttcaagcatctgtttaacaaagcacatcttgcaccacccttaatccatttaaccctgagtggatacagcacatggttcagagagcacggggttgggggtaaggttatagattaacagcatcccaaggcagaagaatttttcttagtacagaacaaaatggagtctcccatgtctacttctttctacacagacacagtaacaatctgatctctctttcttttccccacatttcccccttttctatttgacaaaaccaccattgtcatcatggcccgttctcaatgagctgttgggtacacaacccagacggggtggtggctgggcagaggggctcctcacttcccagatngggtggccgggcagaggcgccccccacctcccagacagggcagtgcgggcggagcgcctcacctccctcccggatgggcagatgactggcggggttgaccccacctccctcccagacggggtggctggtcgggtggggtctgacccctacctccctcctggacgtggtggctggccatgatttgcatttctctaatgatcactaatattgaccttttttcatatgttttttgacagcatgtatgtcttgttctgaaaagtgtctgtgcatgtcctttgcccactttttgattgagatttatcaatcaagacttcacaataggtgtcttattctaggtaggaaaatgagacattatagtataccattttcctcaaaataaacaagtagggtcatgaaaccctaaatataattttatgaaaagtattcaagctttacaaaacagccctaagatttattaggaaaaataaatatttagaaattgcaaaaaagctgaaaaagattagtaattaggggagactatctctattaagtataaatatttaaaatccttgaccactgggatagtgtgttgctggaaaagaaaacagaaaacaagaaaagaagaaacagaagaagtgccccaagattgaaccttctaaatgtgaagaatctgacatactaaaaggagaaattaaatggtgctgggaaaactggctagtcatatatagaaagctgaaactggatcccttccttacaccttatacaaaaattaattcaagatggattaaatacttacatgttagacctaaaagcataaaaaacccgagaagaaaacctaggcattaccattcaggacataggcatgggcaaggacttcatgtctaaaacaccaaaagcaatggcaacaaaagccaaaattgacaaatgggatctaattaaagtaaagagcttctgcacagcaaaagaaactaccatcagagtgaataggcaacttacaaactgggagaaaatttttacaacctactcatctgacaaagggctaatatccagaatctacaaagaactcaaacaaatttacaagaaaaaaacaaacaaccccatcaacaagtgggtgaaggacatgaacagacacttctcaaaagaagacatttatgcagccaaaaaacacatgaaaaaatgctcatcatcactggccatctgagaaatgcaaatcaaaaccacgatgagataccatctcacacctgttagaatggtgatcattaaaaagtcaggaaacaacaagtgctgtagaggatgtggggaaataggaacacttttacactgttggtgggactgtaaactagttcaaccattgtggaagtcagtgtggcaattctttagggatctagaactacaaatatcatttgacccagcaatctcattactgggtatatgcccaaaggattataaatcatgctgctataaagacacatgcaaacatatgtttattgcggcactattcacaatagcaaagacttggaaccaactcaaatgtccaacaacgatagactggattaagaaaatgtggcacatatacaccatggaatactatgcagccataaaaaatgacgagttcatgtcctttgtagggacatggatgaagctggaaaccctcattctcagcaaactatcgcaaggacaaaaaaccaaacactgcgtgttctcactcataggtgggaattgaacaatgagaacacatggacacaggaaggggaacatcacacactggggactgttttggggtggggggagcagggagggatagcattaggagatataccgaatgctaaatgacaagttaatgggtgcagcacaccaacatggcacatgtatacatatgtaacaaacctgcacaatgtgcacatgtaccctaaaacttaaagtataataataataaaattaaaaaataaaaaataattatatattcattcataacatatatcaccaagtctgactacctatgaaagaatttaataaatgtgactatttttctgagcattaaaaaaaaggaaataattaatggattagattggcagattattttacctgtttaggaaaactagacttcaatattttcttatgatcaagaaaaataaattttccgttggctggaaaacaaatgttttcgtaatttttttaatggggatgactagaggcaggagagagggaggtgggcaagggctgaaaaactacctgctgggtaccatgctcgctacctgggcaggggtgcaatcatactccaaacctcagcatcatccaacatacctttgtaacaaacctgcacatgtgcctcctgattctaaaacaaaatctgaaaagaaaagtaagtaaataaaataaggtgttaaaatgtataaagtcactagagggaaatggaatttactgaggtgtcatatgacagaaaaaataagaagtaaaaaagttaagataaaacatttctgtataaaaacatccataattgtagcatcaataacatagtaaagtaaatatttatagcaaatatcaaagaatggaatgaacatacatacatttttgatacagaaaaactttatcagaatgtatcagtaaaatttctgactccaatagattaagaattcaaggaaacaagtaattaacaaagtttatggagtaggctctatgtgtcagacattgtgcaaggaacagagagcacaaagagaagtaactttccctgacttcagggaaatttccgaccaataaacataaacagacaattaaccaagattttttttattacatcactcaatagaaccgtacaaattggaaaattaattacatgtccaaaaatgcaggacctagttttataaactaccaaatgctcaatactatttggagaatggtgctatgttttggaagagcttggatgatataagaaatctccatgtaataataataaggataaaaataataatacaaagtgaactcatatagtgtgatttaccagggaaattgacttatgtttttccctagccttagtccctcatgaatccggactacagaggagaagcaggaacaatgagtttctttgattacatgttttctacctgtagtcaggggcagataaaattttatttcaagcctgattcaaaagaaattttcacacagatttttatgaatgaagtgtctttccaatgaaacatatgttttagtccgttttttacctaataatctgcattctatcaataaagaaagaatggaagcatcatatattgccagcatctttctttttttttttctttctttttttttctcagtcttactctgtcacccacattagagtgcagtagcatgatcacggttcactgcagtcttgacctcctgggctcaaaaactcctccaacctcagcctcctgagcagctggaaccacagacatgcaccaccacacctgtctatcttttgtgacaatggtnnnnnnnnnnnnnnnnnnnnnnnnnnnnnnnnnnnnnnnnnnnnnnnnnnnnnnnnnnnnnnnnnnnnnnnnnnnnnnnnnnnnnnnnnnnnnnnnnnnntgcctctgaatgactattgttgtaaaattaatgtctatcttttttcccatgtaaaaaattcacttagtgaagttgagataggttgatttgtaaaaggacagctatgtaaccaattgtaattgatgtattcacaccctgtcagggtctgtacaattgttccccaccaaacatgtatctgtttgatctcatccagcaccactctctcgcttgttcactgtgctccagctgctgtgaccttattcttcgcctcgggccattgtactagctcttctttattccccaaatgctcatcttctagatcttcacatggctaggtccttgtcatcactcagtctgtagttcaatttctcttccttagaggtcttcttgagccatccatgtaaagccattctctctctctttgagttatcttctatcacattactttgtttcattttatcttcaacattttcaccacacgattgtcagatttaattttttttgtcctctttttccagttagaattaaaatccatgaaagtagaggtattggctgttttgttcactatggcatttccagcacaagaaatgcccatgtgtttattctatgtcaagcttattctgtgccaagaatgggctgttacaagtaaatgcagttttcaaagggacccttgctaaacagaatgcttctgcaattgatggctttccatccttggtgacaaattgaaatagagaaatttagatcaatttattatatcagccatggttcttaggtgatgacacagaattatctctggctagtttaggcagaagagatttgctatatgcaattaagttttttaaagaacctttggaaaggttagaattacagagtctgacatgaatgaccaggaataacttgtagaagctcatctgttgggacaggtgctcccaaggagccgctgcccttctgacaccatagttatgttgccacaggcacatctccacaggtgctgctgcttctctgaccgcagatccacttcgcctttgttgacatagtcagaacccagcctcaggtaactaatttccaactcaaagacttgcacggatgctcctggttcctatctctcaagtcacgtgtctaaccttctgggactagcattgtatagcatatgatttggtagcaaatctcaagcagctcttctaacttaatttgagatgcttattaatggaagattccctcaattgaaaaaatgcttcccttactttactttcatttttagataatatttctattttttattgtatacatttaagttatacaacacaattttttgatatacatgtacatggtgaaactattactacaggtatgcactttaacatatccattatctcacatggttatcttttggcatcgtaattttttttttttttgttagaggacccaaagcctactctgttagaaaatttgcagtatacaatacaatattattaactatagtttttatactacactttatttagatctttagatttattcatcctatatatcttcccatttcccccacactctgcctctggtaaccactgttgttctattctctgtttctacatattcagctatttatttatttttttgtattccacatataggagaaattatgcagtaattttctttctgagtctggcttatttcactcaacataatgacttccagtttcattcatattattgcaaatggcaggatctccttgtttttaaaatggaaataatatccatataggaatattatatatttaatataatataaaatatatgttatatatttaatataatataaaacatcacttagtgcctcttatatattatattaaggtaatatattataatacacatattacattatcaatatagtaataatatgctatgttaatataattcataataataaattttaataataatcacattcatattttatgctttttaaaaaatctagtcatctgttgggaaacattagagttttgttttcatatagtggttattgtgaataatgcaatgaacatgtgagtgctgatatatctacaagtactactttcatttactttgtgtgtgtatccagaagagggattgctgacccatatggtagttctatttttaatttttcgatgagcctcatgctgtgtcccctaatggctgttccaatttacatttccaccaacagtgtaccagtgttctcttttctctatgtcctcaccaacacttattatctcgtctttttgataaagccatcctaagaagtgtgaggtgatgtctcgttgtgattttaatgtgcatttacctgatgattagtaatattgggcatcttttcttttatctattggccaagtttttgttttgtttggagaaatatccattcaggttctttggtaatatttaattgggttattaatttttttttgctgttgagttatgtgaattccttatatattttggatattaactccttaacagatttatgggttacaaatactttctcccaatttctaggctgtcttttacttttgttgattgttttccttgatatgctgaagtttttagcttgatgtagtcccacttgtttggtttttgtttttatttcttgtgcctttggtgtcctatccaaaaaattatcagcaagaccaatatcatgcagattttccactatgttttcgtcctagggtttttatagataatagtttgtgttcagttctttaatccattttgatttgatttttatttatggtgtagtataagtgtccagttttattcttttgcatgtggatatccagctttcttaacaccgattaattgaagagagtaacttttctctatgtttcattctcggtgcttttgttaaagattaattaatagtatatgcctgggaccgggtgccgtggctcacacctgtaatctcagcacattgggaggccaaggcgggtggatcacctgaggtcaggagttcaagaccagcctggccaaaatggtgaaacccccgtctctactgaaaatacaaaaaatagctaggtatggtggtgggcaactgtaatcccaactacttgggaggctgaggctggagaattgcttgaaccttggaggtggaggttgcagtgagctgggattgcccactgcactccagcctgggtgacggagcgagaatctgtcataaaaaaaaagaagaaaaacgtatacgtgtgggcttatttcttggctttctattctgtttctttggtctatgtgtctgtttttacatccatactgtttttataaccatactgatttgatgataatagctttgtgacataatttgtattttctctttattttattttattttattttattttattttattttattttatcttaccttatttcaaacggagtcttgctctgacacccatgctggagtgcagtgatgtaatcatggctcactgcagcctgcacctcccaggttcaagagattctcgtgtctcagcctcccaagtagctaggattacaggtgtgtgctgccacaccttgctaatttttgtaattttagtagagaaggggttttaccatattagccaggctnnnnnnnnnnnnnnnnnnnnnnnnnnnnnnnnnnnnnnnnnnnnnnnnnnnnnnnnnnnnnnnnnnnnnnnnnnnnnnnnnnnnnnnnnnnnnnnnnnnnagctgtatagaggtgctatcgctatgtactattgtatttacgttggtgttaatctgaactagatataaanacatgatccaagtatagtctgtctacaagagccatcctttagattcaaagacccaaataagttgaaagcaaaagcttgaaaaaatataaaccacacaaacagtaagcaaaggatagctgaagtggctatactttagctaatagtaatatcagacaaaatgaaatttaagacataaattgctattagagatgaagaaggatatttcataagggtataccagtcaattcaccaagagctgcttataaacaacagaaatttttatcttatagttctgaaggcttgggaagtccaggatcaaggcattggcagatttggtatctggcataagagtccatttcctggttctagacggccattttgccataatctcagatggtgaaaggggcaagagatctctctggggattttaccttttataagggtgctaatgccatgttataatgtctgtaataattataggcctatgtgcatctaataacagagccccaaaatatatgaagtaaaaactaacactttagaaaagagaaatagacaattcaacaacaataggtggtgactttgatatctcactctcagtaatgggttgacaactaggcagaagttcatcaagaaaacaagacttacacaatgctataaagcaactatatataacagtattctgttaagtgtacacctaactacatttatactatactctcttcaacaacagcagaatatacactcttttcaagtgcacatgcaacattctcgaggttagaccatatgtaacctaaaacaagactcaatacacttaaaagaattagacaaagtatgttctccagaatgtaatgaaattaaaaatcatcatagaagaaatttgggaaattcacaaatatgtaaaaattaaacaacacatttttaaataaccaatgcatcaaagaggaaatcatgagggaaattagaaaatactttgagataagggaagatgaaaacatcatagcataacctatggaatacatctaaaccagtgcttagtgggaaatttgtagctgttaatgtgtatatttaaaaaagaagaaagatctgaaattaatcactttacctgctcccatgaagacattggaaaataagagcaaactaaacctaaaggaagcagaagaaaggaaatagcaaggactagagcaaaaacaaatgaattagagaatagatagagactaaaaaaacaacaaaaccaaagtggattctttaaaaagatcaccaaagtgacaaatctgtagctagattgaccaagaaagaaaagagatggaagactcaaattactaaaatcagcaatgaaagacagacattactactgaccttacaaaaatgaaaaggattataagggatactataagccattatatgcaaaaaattatatgacttagataaaatggatacattcttagaaagacataagccactgaaattgacttaatagatgatctgaacatagtataataagtaaagatattgaattagtaataaaaatatttctcacaaagaaaacccaggccaagatggctttactggtgaattttattaagcaattaaggaagaattaacaccagtcctccacaagtttttctaaaaaataggagagaacaattcccaactcattctatgatacaagtattaccctgataccaaaatcaaagatatcataagaaaagaaaactacaaccatctcttatgaaaatagatattaatacaagaattctcaacaaaagtttagcaaatggcatccagtagcatataaaaggaaatgtacaccatgactaagtgggatttatttaggagtgcaaggttgtttcaatatatgaaaaccaaccaatgtaatacactatgtcaatagaataaaggacgtagtgttcagtaatgatagctgctattattgctatttttcttggttctccattcactgcttacccatatattaaaatatagcagcagttacaactcttatgatatatgatttaaacggcatcctattcttcaggctgcagagtaattgctgtaatatatgtttgcaagatggcagaatatatttggtttgcaaatttccactgtcctggaaattatgtgtgaagtaaatttgaagtctcttcgcctaggtgaggctttttccattgaatggctggtggaatttctagacttccaaaaaatgtgaatgggaagacatacaaatctatttttttggatttttacactggaaaagttgacactaggatttcagcttcaatttgcctcccaactccagatatcactctgcctgaaagtgcatcaagttccaaggttcatttctatggatggaatgtgtcctgatgtgtttatagtacagttgagagattgattcagaaactcagcctcctctgttacctcagacagtgaggaaacttcctcagaaatattcaacctgaatgaaaccccattttgttatccacaagtgtttagaatccttcatgacacctaagggcttataaaaggagtgctttgttgcataatattccaggccagggatgtaggatgttaataggttaaaatgcagggaaaataactaatcaggtgaagatgggttgttaataggcaaatactcccaaatttctgtttctaaggaaaaatcttttaaaaacagagataattaatccctgggaggacaaagccttaggtataatgatagatcctttaatgttctcggtatcctctctaaacactatgattcaagagaagctgttttcttattttaaaggcagaataagaaagggggtattgttagaacatttgtgtcctttattccataatatagatctagatgctggagaagatcagaagattctctttagtaactaagaacttggagtttcaaattcaactgacattttctttccctttaacttgaacttcaaaggcattggagttttgaaaatgcttgctgaatccatttgaagaaatttgtgtcatcttgacattctgtgaattttgtaaaattgtccagtcagtggagacttggatatatacattacataacacgctgtttgaacaggtacctataaaggttactttgtatttctgaatacattggccattctcctaaactatagaggcaattacagtaagttacctaaaactgcttattcttaatccagtttcttacatttcctctttctcccaacgggtttataattgaaatcattaaagtattacatctgataattgatggtgaatcacttctaaatgtttgaggacaatttttagaaatatttattctcctcactgtatattgatataactacaatttaccaggaaaaggttaatattttatggattcctgaatcaatttctaggcttttaagtgtggagagagtgcagtaggtggatgggtcattgaagattttctccaggggtagggcatatgatgtaatgatagtcagagattgctttatgtagaatcactcatttccttgaaataatactctttgaaagtctccagggagaaaaagagggaaaatctcaccttgtactagtagcaggagatatgagaaacaattgaaaataaagaaaggcaaaattaaagtagagctgacagggtgtgtgaccttcaccgagctcaggccggatcagtgtgggagggaagagaaggagagaatttggattatgttattcaaaggaaaactttagctctaagactgcgatcaaaaggcaagtgtattaaaatacaggatctgcaagtaaacagtgtactctctgctgtagctgggaatctatattgaactccaggcttaggtgtattttttattttgactctattcatgtgttcccagatattgttttaaccagatgataacttgtttctgctacaatggatgtggtctcagcaatatggctgaatttcttcatccctaaactcagacttagcctctttcttaggcaatcaagacaggtattggcaaagataagacatgaaacttaattttgtcactgtaaggtgaattttccttgtatacactcatattaatgtatcttaaggaaggccagatatgatggaaaaaaaattcacattgttgggcattagacctggattttcttgttattctctgccacaaataaattagctgtgttttcttagatgttacctcttgagacttcagtttattcacctttaaagtacggataagttgatgcaatgcaaagtacctgaggatttttaatgtctaacaattctagagtcttgtccagttggacccttgaaatcattacatctgactctgcatttcttagcttagcaaaaggaatgccattaatttcttatggtcacaggtgttagctttaggtactagtccacttgtccaaactctggcactgctgagtcccagaagcactggttaagtgctgaagagctagaggcagacatcttgtgcttgaatacagtcttctctgtttttttttaattgacactataattttgggtaagttgtttttcttttcaacacggtttacttnnnnnnnnnnnnnnnnnnnnnnnnnnnnnnnnnnnnnnnnnnnnnnnnnnnnnnnnnnnnnnnnnnnnnnnnnnnnnnnnnnnnnnnnnnnnnnnnnnnnagtgtacttttctttcaaatatagataattgtgtaccaacttcaaagcattgtgaggattaagtgaaaaaatgcatgtaaagcatttagtatagtaccaagtacacgacaagcatgcaataaaaatgaacaattattataggaagtccagcgtataaaaataaatctctgcgtgctagagagtcagaatggtgctgagctgagtggtcagtacggtttgcattgcctgtgagtatatgttatttccataggtcccgatggtatctctggagtgaagtttgtttatgtccttacctctcaattgcggtctgagggcccttttatggaatatcaaggtctttctgctaggttgacacttttctccatttctaatttctgtaaaaatatgggtattagaagatgtaagtggtaataggcacactatgtctttggactagggcagaaaaaggaactaatcctgtgctcaagtctcccaattaacagtgaacatcaaagacaccaattttgaacatgagactgagttgttctgtttgtatgtttgtatctgcagggaaataggaaggagatgaaaactgtaaaaaagaactgctctttaaatatattctaattacttcaagacttgcaagaaattgaataagtgagataatgaaaatgaatgagtcaagtttggggttttctgtctggttttgatcaggaagtctaacttttggcatagaccttcaggaacttgtaaaaacattagttgattgttggttctctcaaaggccatctcctctagggaaaagttggtaatcagaagggcatccaaccttattctcaagagttcttgtccctgaaaggattctctggagcactgggctatccagaagggagaccatgatcctggagcttggagctcttaggcccgcttctcaatgaagcatgtgtgggatcacaaggaagatgttaccttttcatgtacctcgtcaggtatcatacccccatgtaacagaggcaattcatcttacccaccactgcctttgtgctttaagaacacataaagatttaaaaaaaaaaaaaaacctgaagtctaggaaaaagtgagaataatagcaaaacttagctttaagtactatcttaaagttaattgaatgaaatgtgcattcttcttcaagtaaatgaaaatagactatgtattaaggagattctcattgattattcagacttgacttactgactgtcatatcaatgctataaaaccagagatcaacaatctttgactggtagactaaagatgatattaggaagattctaaaagatccatgagcagtcatagatattaggaagattctaaaagatccatgggcagtcatggcagcctcatcctctgtcctgatcttttcagaaaagttagggtccagtcaggcactctccctatgtccatatggtgacttggtgacaaaaatttaatgagcacattatagcagttacttcaactatacccagctatttcctggattcctatcatgtaccaatgtacaattccctatatttgttttcctacatattctgctcaatgtaaacatttatgatttcagcttcaggtctccaagaaaaaatatagaaactatatttctttcctaactatacaggtagttatgcaagctgtagaaaacataaataaaaatcacccatagtttcacatccagaagtaaatgtcctaaatatattatttccttatcaacttttctctacacatatgttttaccataggtaaaacaaaacctatataaaattttataactaaaatttttgaagtcaaattttattactaaaatatacctataaaacctataatcttcaatactaaatccataactattatcactaacttttaacctatggaatacttgcataattataattaagatatacagactattttatggtttttagttcatgttatttcatatacacattttaaagtcttattagtctccaaaactattacctctaatgaatgcattaattcatcatattgatgtctaagtgaagttttgaaacaactacactctaggaaatggaatctctctcttctgggtgtcccatgtcttctaagaatatttttgaggtcaggctaataaaaaactaagaagtcagctagagaagtttacgggtacctattcctagagagttttgggaagagaaggaatcatctgtgagatggcagagcagtgaaaaggcaaagttttggactatttgattcttttatgcttcttttttttcctttcttttttctaaaggtaaaatattccttcctggaggttttatcacccacactacatagatggagaagaaaaagaatgtgactgaattcattttaataggtcttacacagaaccccataatggagaaagtcacgtttgtagtatttttggttctttacatgataacactttcaggcaacctgctcattgtggttaccattaccaccagccaggctctgagctcccccatgtacttcttcctgacccacctttctttgatagacacagtttattcttcttcttcagctcctaagttgattgtggattcctttcaagagaagaaaatcatctcctttaatgggtgtatggctcaagcctatgcagaacacatttttggtgctactgagatcatcctgctgacagtgatggcctgtgactgctatgtggccatctgcaaacctctgaactacacaaccattatgagccacagcctgtgcattctcctggtggcagtggcctgggtgggaggatttcttcatgcaactattcagattctctttacagtatggctgcccttctgtggccccaatgtcataggccacttcatgtgtgacttgtacccattgttaaaacttgtttgcatagacactcatacccttggtctctttgttgctgtgaacagtgggtttatctgcttattaaacttccttatcttggtggtatcctatgtgatcatcttgagatctttaaagaacaatagcttggaggggaggtgtaaagccctctccacctgtatttctcacatcatagtagttgtcttattctttgtgccctgtatatttgtgtatctgcgctcagtgaccactctgcccattgataaagctgttgctgtattttatactatggtggtcccaatgttaaatcccgtggtctacacactcagaaatgctgaggtaaaaagtgcaataaggaagctttggagaaaaaaagtgacttcagataatgattaaataagaccattgagcactcaacatagaggtaataggtatttaagcttcttgatttgtagatgaatatgtcaactctaacaaggggctggctaatgcttgcagatagtcagtaaagcataaagctaaagcttggactgtaaagcttactgtctcttatcccacactcttgtcatcaccactattgctttttaattaataca

SEQ ID NO: 198 - protein, 310 aa, Homo sapiens [sequence omitted]

SEQ ID NO: 199 - DNA, 1348 bp, Homo sapiens
  source
  (1)..(1348)
  CDS (201)..(1148)
  modified_base (300)..(302): a, t, c, g, unknown or other
cagggcaagatgggctctttgggtgaggaactcaatagagacttactaaatatttattatgtgtaaatcactattcaggatacagcaatgaagatgtgccctgtgacacaatggatgtaatcatattcctgatcactatttcgttacaggccctgtttccctgagctctcacctctgatacaagccttaaagaagagtaaatgagacagaataacaatattacagaatttgtcctcctgggcttttttcaggatcctggtgtgcaaaaagcattatttgtcatgtttttactcacatatnnngtgacagtggtggggaacctgctcattgtggtggatatattctccagcccttctttgtgttccgcaatgtatttcttccttgcctgcctgtcatttatagatgctgcatattccactaccatttctcccaagttaattgtaggcttattctgtgataaaaagactatttccttccaaggttgcatgggccagctatttatagaccatttctttggtggggctgaggtcttccttctggtggtgatggcctgtgatcgctatgtggccatctgtaagccactgcactatttgaccatcatgaatcgacaggtttgcttccttctgttggtggtggccatgattggaggttttgtacattctgcgtttcaaattgttgtgtacagtctccctttctgtggtcccaatgtcattgttcatttcagttgtgacatgcacccattactggaactggcatgcactgacacctactttataggcctcactgttgttgtcaatagtggagcaatctgtatggtcattttcaaccttctgttaatctcctatggagtcatcctaagctcccttaaaacttacagtcaggaaaagaggggtaaagccttgtctacctgcagctccggcagtaccgttgttgtcctcttttttgtaccctgtattttcatatatgttagacctgtttcaaactttcctactgataagttcatgactgtgttttataccattatcacacacatgctgagtcctttaatatatacgttgagaaattcagagatgagaaatgctatagaaaaactcttgggtaaaaagttaactatatttattataggaggagtgtccgtcctcatgtaggtaaggaggtatgtagtcaaggtcttcccagtgaagttttcaggtttctaagggcaagtcaaggatcccaaagaaagaagacaggatttggatgctcctagctcaattacaaagtcatcccatcatgacatctgattgaagttcaagatctcaacttctacatcgagactgagtgtggatggggctccttgggggcgggt

SEQ ID NO: 200 - protein, 315 aa, Homo sapiens
  MOD_RES (34)..(34): Variable amino acid
MRQNNNITEFVLLGFFQDPGVQKALFVMFLLTYXVTVVGNLLIVVDIFSSPSLCSAMYFFLACLSFIDAAYSTTISPKLIVGLFCDKKTISFQGCMGQLFIDHFFGGAEVFLLVVMACDRYVAICKPLHYLTIMNRQVCFLLLVVAMIGGFVHSAFQIVVYSLPFCGPNVIVHFSCDMHPLLELACTDTYFIGLTVVVNSGAICMVIFNLLLISYGVILSSLKTYSQEKRGKALSTCSSGSTVVVLFFVPCIFIYVRPVSNFPTDKFMTVFYTIITHMLSPLIYTLRNSEMRNAIEKLLGKKLTIFIIGGVSVLM

SEQ ID NO: 201 - DNA, 1300 bp, Homo sapiens
  source
  (1)..(1300)
  CDS (201)..(1100)
aatcactgagagtacaaaattgtgtctttttcaacttggcaattccaaagtctatgacagatttgacatagatactgcatacacatttttaattgaatgagtaaatacaatattaaaatcataatgtatttaaagttttccccccttgttttataggtaaactgcttatatgatctgaagtaagcagctgtaaagaatagatggagccaaggaaaaatgtgactgactttgtcctcttgggcttcacacagaatccaaaggagcagaaagtactttttgttatgttcttgctcttctacattttgaccatggtgggcaacctgctcattgtagtgaccgtaactgtcagtgagaccctgggctcaccaatgtccttctttcttgctggcttaacatttatagatatcatttattcttcatccatttcccccagattgatttcagacttgttctttgggaataattccatatccttccaatctttcatggcccagctctttatcgagcacctttttggtgggtcagaggtctttctcctgttggtgatggcctatgaccgctatgtggccatctgtaagcccttgcattatttggttatcatgagacaatgggtgtgtgttttgctgctggtagtgtcctgggttggaggatttctgcaatcagtatttcaacttagcattatttatgggctcccattctgtggccccaatgtcattgatcattttttctgtgacatgtatcccttattgaaactggcctgcactgacacccatgttattggcctcttagtggtggccaatggaggactgtcttgcactattgcgtttctgctcttactcatctcttatggtgtcatcctgcactctctaaagaaacttagtcagaaagggaggcaaaaagcccactcaacctgcagttcccacatcactgtggttgtcttcttctttgttccttgtatttttatgtgtgctagacctgctaggaccttctccattgacaaatcagtgagtgtgttttatacagtcataaccccaatgctgaaccccttaatctacactctgagaaattctgagatgacaagtgctatgaagaagctttagagcagagacctcatatcaagtagtacataagtgagttacccaccaggaagagagccatttgactttacagccctctccttgggacccaggagttttttaaaatctgatgccatattccctttcttcaaagcatttacaattattattaaagaatgaacaatatgattgtgttaatagtaacagtctacctctctgctaga

SEQ ID NO: 202 - protein, 299 aa, Homo sapiens
MEPRKNVTDFVLLGFTQNPKEQKVLFVMFLLFYILTMVGNLLIVVTVTVSETLGSPMSFFLAGLTFIDIIYSSSISPRLISDLFFGNNSISFQSFMAQLFIEHLFGGSEVFLLLVMAYDRYVAICKPLHYLVIMRQWVCVLLLVVSWVGGFLQSVFQLSIIYGLPFCGPNVIDHFFCDMYPLLKLACTDTHVIGLLVVANGGLSCTIAFLLLLISYGVILHSLKKLSQKGRQKAHSTCSSHITVVVFFFVPCIFMCARPARTFSIDKSVSVFYTVITPMLNPLIYTLRNSEMTSAMKKL

SEQ ID NO: 203 - DNA, 1297 bp, Homo sapiens
  source
  (1)..(1297)
  CDS (201)..(1097)
aaaagaaaccactgcagaatccagtacagagcaaagcaggcagatcaagatgattctaccaggaagcattcctctgtaactatctagatctctttcttcttttccatttcattcatctaaacacaggtaatttacatgcatattaaatttaaccacttatttcttttcacagacacccaagagttgattcctccccaggaatgagaaatcacacaatggtgactgaattcatccttctgggaatccctgagacagagggcctagagacagcccttttattcctgttctcctcattttatttatgcaccctcttgggaaacgtgcttatccttacagctatcatctcctccactcgacttcacactcctatgtattttttcttgggaaacctctccatctttgacctgggtttctcttcaacgactgttcccaagatgttgttctacctttcggggaacagccatgctatctcgtatgcaggctgcgtgtcccagcttttcttctaccatttcctaggctgtactgagtgtttcctctacacagtgatggcctgtgaccgctttgttgccatatgttttcctttgagatacacggtcatcatgaaccacagggtgtgctttatgttggccacggggacctggatgattggctgtgtccatgccatgatcctaactcccctcaccttccagttaccttactgtggccctaacaaggtgggctattacttctgtgatattcctgcagtgttacctctagcctgtaaggacacatccttagcccagagggtaggttttacaaatgttggtcttttgtctctcatttgcttttttctcatccttgtttcctatacttgcattgggatttccatatcaaaaatccgctcagcagagggcaggcagcgggccttctccacctgcagcgctcacctcactgcaatcctttgtgcttatgggccagtcatcgttatctatctacaacccaatcccagtgccttgcttggttccataattcagatattgaataatctggtaaccccaatgttgaatccactaatctatagccttaggaataaggatgtaaaatcagatcagccctgaggaatgtatttcccaagaaaagctttgctctgggaaataaatgagaacatttaaagctttgctggatttaagattttgattacattttgaagtttgactctccactccctgagaaaatttcccatctgctgctgccaaggcaagttgaaacgaaatgtactccaaatcaatctactacttaacctcgctcttttaaaata

SEQ ID NO: 204 - protein, 298 aa, Homo sapiens
MRNHTMVTEFILLGIPETEGLETALLFLFSSFYLCTLLGNVLILTAIISSTRLHTPMYFFLGNLSIFDLGFSSTTVPKMLFYLSGNSHAISYAGCVSQLFFYHFLGCTECFLYTVMACDRFVAICFPLRYTVIMNHRVCFMLATGTWMIGCVHAMILTPLTFQLPYCGPNKVGYYFCDIPAVLPLACKDTSLAQRVGFTNVGLLSLICFFLILVSYTCIGISISKIRSAEGRQRAFSTCSAHLTAILCAYGPVIVIYLQPNPSALLGSIIQILNNLVTPMLNPLIYSLRNKDVKSDQP

SEQ ID NO: 205 - DNA, 1336 bp, Homo sapiens
  source
  (1)..(1336)
  CDS (201)..(1136)
ctggtactggaataagaaagtgctattcctcttcaaagacctatactgaagcaaaaggaagttataaaatataaaaaataatttaaccctattgttcttaatcagaaaaatatagttgccatatttcatataaaacatgctcacagtaaatgctatctcccttcctttctgtaagaacagagccccatatatgagaagaaatgtccaacgccaccctactgacagcgttcatcctcacgggccttccccatgccccagggctggacgcccccctctttggaatcttcctggtggtttacgtgctcactgtgctggggaacctcctcatcctgctggtgatcagggtggattctcacctccacacccccatgtactacttcctcaccaacctgtccttcattgacatgtggttctccactgtcacggtgcccaaaatgctgatgaccttggtgtccccaagcggcaggactatctccttccacagctgcgtggctcagctctattttttccacttcctggggagcaccgagtgtttcctctacacagtcatgtcctatgatcgctacctggccatcagttacccgctcaggtacaccaacatgatgactgggcgctcgtgtgccctcctggccaccggcacttggctcagtggctctctgcactctgctgtccagaccatattgactttccatttgccctactgtggacccaaccagatccagcactacttctgtgacgcaccgcccatcctgaaactggcctgtgcagacacctcagccaacgagatggtcatctttgtgaatattgggctagtggcctcgggctgctttgtcctgatagtgctgtcctatgtgtccatcgtctgttccatcctgcggatccgcacctcagaggggaggcacagagcctttcagacctgtgcctcccactgtatcgtggtcctttgcttctttggccctggtcttttcatttacctgaggccaggctccagggacgccttgcatggggttgtggccgttttctacaccacgctgactcctcttttcaaccctgttgtgtacaccctgagaaacaaggaggtaaagaaagctctgttgaagctgaaaaatgggtcagtatttgctcagggtgaatagttaagaaaggccatatatggctaacttttctttttttatttgtaattaaattaaaccttcaacataagcattatacttgaatggagcatttcaattattcagtcttaatttttaattggacagttaattaatttttcatttttttctgcagagtgtttgttagaatcctagttaaagcagccatttcacggtgataatct

SEQ ID NO: 206 - protein, 311 aa, Homo sapiens
MSNATLLTAFILTGLPHAPGLDAPLFGIFLVVYVLTVLGNLLILLVIRVDSHLHTPMYYFLTNLSFIDMWFSTVTVPKMLMTLVSPSGRTISFHSCVAQLYFFHFLGSTECFLYTVMSYDRYLAISYPLRYTNMMTGRSCALLATGTWLSGSLHSAVQTILTFHLPYCGPNQIQHYFCDAPPILKLACADTSANEMVIFVNIGLVASGCFVLIVLSYVSIVCSILRIRTSEGRHRAFQTCASHCIVVLCFFGPGLFIYLRPGSRDALHGVVAVFYTTLTPLFNPVVYTLRNKEVKKALLKLKNGSVFAQGE

SEQ ID NO: 207 - DNA, 1336 bp, Homo sapiens
  source
  (1)..(1336)
  CDS (201)..(1136)
agacagagaaagactaggaaatcacttcattagtttatgaaggaagctttgttaacaagcaaagtccacaataactccagaattatctacctgcttgatgcagtttccacacagagaatggattctcatttctcaattaagtgctaaatgctgggtgctctttatattcccagagggagagagaccaagggtgagaagaaatgtccaacgccagcctactgacagcgttcatcctcatgggccttccccatgccccagcgctggacgcccccctctttggagtcttcctggtggtttacgtgctcactgtgctggggaacctcctcatcctgctggtgatcagggtggattctcacctccacaccaccatgtactacttcctcaccaacctgtcgttcattgacatgtggttctccactgtcacggtgcccaaattgctgatgactttggtgttcccaagtggcagggctatctccttccacagctgcatggctcagctctatttctttcacttcctagggggcaccgagtgtttcctctacagggtcatgtcctgtgatcgctacctggccatcagttacccgctcaggtacaccagcatgatgactgggcgctcgtgtactcttctggccaccagcacttggctcagtggctctctgcactctgctgtccaggccatattgactttccatttgccctactgtggacccaactggatccagcactatttgtgtgatgcaccgcccatcctgaaactggcctgtgcagacacctcagccatagagactgtcatttttgtgactgttggaatagtggcctcgggctgctttgtcctgatagtgctgtcctatgtgtccatcgtctgttccatcctgcggatccgcacctcagaggggaagcacagagcctttcagacctgtgcctcccactgtatcgtggtcctttgcttctttggccctggtcttttcatttacctgaggccaggctccaggaaagctgtggatggagttgtggccgttttctacactgtgctgacgccccttctcaaccctgttgtgtacaccctgaggaacaaggaggtgaagaaagctctgttgaagctgaaagacaaagtagcacattctcagagcaaatagacactagggaagattacatatcttagctcttgtgaatagtgctgtgaaaaacatacaggggcaggtatcttttggatgtaatgaattcttttcctttgggtagatacccagtagtggaactgctagattaaatgttaattctatttttagttctttgagaaatctccacactgttttccatagaggttgtactagtttac

SEQ ID NO: 208 - protein, 311 aa, Homo sapiens
MSNASLLTAFILMGLPHAPALDAPLFGVFLVVYVLTVLGNLLILLVIRVDSHLHTTMYYFLTNLSFIDMWFSTVTVPKLLMTLVFPSGRAISFHSCMAQLYFFHFLGGTECFLYRVMSCDRYLAISYPLRYTSMMTGRSCTLLATSTWLSGSLHSAVQAILTFHLPYCGPNWIQHYLCDAPPILKLACADTSAIETVIFVTVGIVASGCFVLIVLSYVSIVCSILRIRTSEGKHRAFQTCASHCIVVLCFFGPGLFIYLRPGSRKAVDGVVAVFYTVLTPLLNPVVYTLRNKEVKKALLKLKDKVAHSQSK

SEQ ID NO: 209 - DNA, 1336 bp, Homo sapiens
  source
  (1)..(1336)
  CDS (201)..(1136)
gagagagagagagagagagagactaggaaatcacttcattagctttatgaaggaagctttgtaacaagcaaagtccatgaaaactccagaattatctacctggttttcacatagagaatgacttctcagttatcaattaattggtaaatgctgggtgctccttatatccccagagggagagagaccaagggtgagaagaaatgtccaagaccagcctcgtgacagcgttcatcctcacgggccttccccatgccccagggctggacgccccactctttggaatcttcctggtggtttacgtgctcactgtgctggggaacctcctcatcctgctggtgatcagggtggattctcacctccacacccccatgtactacttcctcaccaacctgtccttcattgacatgtggttctccactgtcacggtgcccaaaatgctgatgaccttggtgtccccaagcggcagggctatctccttccacagctgcgtggctcagctctattttttccacttcctggggagcaccgagtgtttcctctacacagtcatgtcctatgatcgctacttggccatcagttacccgctcaggtacaccagcatgatgagtgggagcagatgtgccctcctggccaccagcacttggctcagtggctctctgcactctgctgtccagaccatattgactttccatttgccctactgtggacccaaccagatccagcactatttgtgtgatgcaccgcccatcctgaaactggcctgtgcagacacctcagccaacgagatggtcatctttgtggacattgggctagtggcctcgggctgctttctcctgatagtgctgtcttatgtgtccatcgtctgttccatcctgcggatccacacctcagaggggaggcacagagcctttcagacctgtgcctcccactgcatcgtggtcctttgcttttttgttccctgtgttttcatttacctgagaccaggctccagggacgtcgtggatggagttgtggccattttctacactgtgctgacaccccttctcaaccctgttgtgtacaccctgagaaacaaggaggtgaagaaagctgtgttgaaactgagagacaaagtagcacattctcagggagaataaatactaggaagtagatacactagtttgtttaaaaatagtaatataatttagttattcatgtgaaattgattatatgtatagttctcagtgttaaacattattccaaaacacctgcacagttataattcttccacagattgtctaagacagttttaacctcacagctagacttatgtgtatgaggaacatgcttatattct

SEQ ID NO: 210 - protein, 311 aa, Homo sapiens
MSKTSLVTAFILTGLPHAPGLDAPLFGIFLVVYVLTVLGNLLILLVIRVDSHLHTPMYYFLTNLSFIDMWFSTVTVPKMLMTLVSPSGRAISFHSCVAQLYFFHFLGSTECFLYTVMSYDRYLAISYPLRYTSMMSGSRCALLATSTWLSGSLHSAVQTILTFHLPYCGPNQIQHYLCDAPPILKLACADTSANEMVIFVDIGLVASGCFLLIVLSYVSIVCSILRIHTSEGRHRAFQTCASHCIVVLCFFVPCVFIYLRPGSRDVVDGVVAIFYTVLTPLLNPVVYTLRNKEVKKAVLKLRDKVAHSQGE

SEQ ID NO: 211 - DNA, 1336 bp, Homo sapiens
  source
  (1)..(1336)
  CDS (201)..(1136)
gtgtgagagaggctgaaataatttcatcatcatctctgtgagggaagctttgtaacaagcgaagtgcaggataactccagaattatctacctggttgatgcagtttccacatagagaatggattctcatttctcaattaagtgctaaatgctgggtgctctttatatccccagagggagagagaccaagggtgagaagaaatgtccaacgccagcctcgtgacagcattcatcctcacaggccttccccatgccccagggctggacgccctcctctttggaatcttcctggtggtttacgtgctcactgtgctggggaacctcctcatcctgctggtgatcagggtggattctcacctccacacccccatgtactacttcctcaccaacctgtccttcattgacatgtggttctccactgtcacggtgcccaaaatgctgatgaccttggtgtccccaagcggcagggctatctccttccacagctgcgtggctcagctctattttttccacttcctggggagcaccgagtgtttcctctacacagtcatgtcctatgatcgctacttggccatcagttacccgctcaggtacaccagcatgatgagtgggagcaggtgtgccctcctggccaccggcacttggctcagtggctctctgcactctgctgtccagaccatattgactttccatttgccctactgtggacccaaccagatccagcactacttctgtgacgcaccgcccatcctgaaactggcctgtgcagacacctcagccaacgtgatggtcatctttgtggacattgggatagtggcctcaggctgctttgtcctgatagtgctgtcctatgtgtccatcgtctgttccatcctgcggatccgcacctcagatgggaggcgcagagcctttcagacctgtgcctcccactgtattgtggtcctttgcttctttgttccctgtgttgtcatttatctgaggccaggctccatggatgccatggatggagttgtggccattttctacactgtgctgacgccccttctcaaccctgttgtgtacaccctgagaaacaaggaggtgaagaaagctgtgttgaaacttagagacaaagtagcacatcctcagaggaaataaatactaggaagtaaatacactagtttgtttaaaaatagtaatctaatttagttattcatgtgaaattgattatatgtatagttctcagtgttaaacattattccaaaacacctgcacagttataattcttccacagattgtctaagacagttttaacctcacagctagacttatatttatgatgaacatgattatattct

SEQ ID NO: 212 - protein, 311 aa, Homo sapiens
MSNASLVTAFILTGLPHAPGLDALLFGIFLVVYVLTVLGNLLILLVIRVDSHLHTPMYYFLTNLSFIDMWFSTVTVPKMLMTLVSPSGRAISFHSCVAQLYFFHFLGSTECFLYTVMSYDRYLAISYPLRYTSMMSGSRCALLATGTWLSGSLHSAVQTILTFHLPYCGPNQIQHYFCDAPPILKLACADTSANVMVIFVDIGIVASGCFVLIVLSYVSIVCSILRIRTSDGRRRAFQTCASHCIVVLCFFVPCVVIYLRPGSMDAMDGVVAIFYTVLTPLLNPVVYTLRNKEVKKAVLKLRDKVAHPQRK

SEQ ID NO: 213 - DNA, 1399 bp, Homo sapiens
  source
  (1)..(1399)
  CDS (201)..(1199)
gggagtaaggtgagagaatgataaagaccagtagcaagaatgagagagagaagagagagagaacggatagttagatagatagatagatagatagatagatagatagatagatagatagatagatagatagaatagatagataagtatccttttctgtccttatttgggagtgacacagaattgatgtgctgagcctagaaatgttagagggtgttgagcatctccttctgctacttcttttgacagatgtgaacagcaaggaactgcaaagtggaaaccagacttctgtgtctcacttcattttggtgggcctgcaccacccaccacagctgggagcgccactcttcttagctttccttgtcatctatctcctcactgtttctggaaatgggctcatcatcctcactgtcttagtggacatccggctccatcgtcccatgtgcttgttcctgtgtcacctctccttcttggacatgaccatttcttgtgctattgtccccaagatgctggctggctttctcttgggtagtaggattatctcctttgggggctgtgtaatccaactattttctttccatttcctgggctgtactgagtgcttcctttacacactcatggcttatgaccgtttccttgccatttgtaagcccttacactatgctaccatcatgacccacagagtctgtaactccctggctttaggcacctggctgggagggactatccattcacttttccaaacaagttttgtattccggctgcccttctgtggccccaatcgggtcgactacatcttctgtgacattcctgccatgctgcgtctagcctgcgccgatacggccatcaacgagctggtcacctttgcagacattggcttcctggccctcacctgcttcatgctcatcctcacttcctatggctatattgtagctgccatcctgcgaattccgtcagcagatgggcgccgcaatgccttctccacttgtgctgcccacctcactgttgtcattgtttactatgtgccctgcaccttcatttacctgcggccttgttcacaggagcccctggatggggtggtagctgtcttttacactgtcatcactcccttgcttaactccatcatctacacactgtgcaacaaagaaatgaaggcagcattacagaggctagggggccacaaggaagtgcagcctcactgacttcatccatcacagacatgcaggaaaccctataatgcagggccctggataggacaccaaataagtggaaattttaaagcagaaatagaaagaaagattcatgcatagaatagaggactcctggctgggaacccggaaagttccacattgtaacctgttctcaaacgtgattttccatatgtctttcttcagtgccaatg

SEQ ID NO: 214 - protein, 332 aa, Homo sapiens
MLEGVEHLLLLLLLTDVNSKELQSGNQTSVSHFILVGLHHPPQLGAPLFLAFLVIYLLTVSGNGLIILTVLVDIRLHRPMCLFLCHLSFLDMTISCAIVPKMLAGFLLGSRIISFGGCVIQLFSFHFLGCTECFLYTLMAYDRFLAICKPLHYATIMTHRVCNSLALGTWLGGTIHSLFQTSFVFRLPFCGPNRVDYIFCDIPAMLRLACADTAINELVTFADIGFLALTCFMLILTSYGYIVAAILRIPSADGRRNAFSTCAAHLTVVIVYYVPCTFIYLRPCSQEPLDGVVAVFYTVITPLLNSIIYTLCNKEMKAALQRLGGHKEVQPH

SEQ ID NO: 215 - DNA, 1339 bp, Homo sapiens
  source
  (1)..(1339)
  CDS (201)..(1139)
atgtagttggctatggcggttacattccaaggataatgccttgtaacttgaatcacaagcagcctttccataacttagatgcaaatcacagtcacttaattgacaagttttatttctccagtatgttcacttgattgacagcaagccaaggcattcttccatgtcctcagcctcctctttccttcctaggactggcttccatggaggtgaagaactgctgcatggtgacagagttcatccttttgggaatcccacacacagaggggctggagatgacactttttgtcttattcttgcccttctatgcctgcactctactgggaaatgtgtctatccttgttgctgttatgtcttctgctcgccttcacacacctatgtatttcttcctgggaaacttgtctgtgtttgacatgggtttctcctcagtgacttgtcccaaaatgctgctctaccttatggggctgagccgactcatctcctacaaagactgtgtctgccagcttttcttcttccatttcctcgggagcattgagtgcttcttgtttacggtgatggcctatgaccgcttcactgccatctgttatcctctgcgatacacagtcatcatgaacccaaggatctgtgtggccctggctgtgggcacatggctgttagggtgcattcattccagtatcttgacctccctcaccttcaccttgccatactgtggtcccaatgaagtggatcacttcttctgtgacattccagcactgttgcccttggcctgtgctgacacatccttagcccagagggtgagcttcaccaacgttggcctcatatctcttgtctgctttctgctaattcttttatcctacactagaatcacaatatctatcttaagcattcgtacaactgagggccgtcgccgtgccttctccacctgcagtgctcacctcattgccatcctctgtgcctatgggcccatcatcactgtctacctgcagcccacacccaaccccatgctgggaaccgtggtacaaattctcatgaatctggtaggaccaatgctgaaccctttgatctataccttgaggaataaggaagtaaaaacagccctgaaaacaatattgcacaggacaggccatgttcctgagagttagtaagagcagataaatgggtgcatggctctggaattccttttgctttgacctaagaaatttcattctggaatcttcatatgtgacaatgacttggaattttcagcactgtgctgaatgatatggaccattatgctatatataatacattatctttttgcaatattttattttattgtctaggttctgcctcttcacctatc

SEQ ID NO: 216 - protein, 312 aa, Homo sapiens
MEVKNCCMVTEFILLGIPHTEGLEMTLFVLFLPFYACTLLGNVSILVAVMSSARLHTPMYFFLGNLSVFDMGFSSVTCPKMLLYLMGLSRLISYKDCVCQLFFFHFLGSIECFLFTVMAYDRFTAICYPLRYTVIMNPRICVALAVGTWLLGCIHSSILTSLTFTLPYCGPNEVDHFFCDIPALLPLACADTSLAQRVSFTNVGLISLVCFLLILLSYTRITISILSIRTTEGRRRAFSTCSAHLIAILCAYGPIITVYLQPTPNPMLGTVVQILMNLVGPMLNPLIYTLRNKEVKTALKTILHRTGHVPES

SEQ ID NO: 217 - DNA, 1345 bp, Homo sapiens
  source
  (1)..(1345)
  CDS (201)..(1145)
agtgtgtttctggttcctaaaatctataggtaggtagatgcttaccgactccatttcatctgagtgttcactttttggttttcgtaacacaaagtcagtgttttcatagagagaaaacactgatatttgttttctatagaaacaaacactgatagaatttgactttttctctctcatctccacagatttctcagagaagaatgggtgtaaaaaaccattccacagtgactgagtttcttctttcaggattaactgaacaagcagagcttcagctgcccctcttctgcctcttcttaggaatttacacagttactgtggtgggaaacctcagcatgatctcaattattaggctgaatcgtcaacttcatacccccatgtactatttcctgagtagtttgtcttttttagatttctgctattcttctgtcattacccctaaaatgctatcagggtttttatgcagagatagatccatctcctattctggatgcatgattcagctgttttttttctgtgtttgtgttatttctgaatgctacatgctggcagccatggcctgcgatcgctacgtggccatctgcagcccactgctctacagggtcatcatgtcccctagggtctgttctctgctggtggctgctgtcttctcagtaggtttcactgatgctgtgatccatggaggttgtatactcaggttgtctttctgtggatcaaacatcattaaacattatttctgtgacattgtccctcttattaaactctcctgctccagcacttatattgatgagcttttgatttttgtcattggtggatttaacatggtggccacaagcctaacaatcattatttcatatgcttttatcctcaccagcatcctgcgcatccactctaaaaagggcaggtgcaaagcgtttagcacctgtagctcccacctgacagctgttcttatgttttatgggtctctgatgtccatgtatctcaaacctgcttctagcagttcactcacccaggagaaagtatcctcagtattttataccactgtgattctcatgttgaatcccttgatatatagtctgaggaacaatgaagtaagaaatgctctgatgaaacttttaagaagaaaaatatctttatctccaggataaatatgctctttattaagatctatttctgtattcataatcatgattatatgtatatatttataccttgactatttaaaagtaatttgaggtccaggtacggtgacttacgcctgtaatcccagcactttgggaggccgagttgggtggatcacgaggtccggtgttcaagaccagcctggccaagatgatgaaaccccatc

SEQ ID NO: 218 - protein, 314 aa, Homo sapiens
MGVKNHSTVTEFLLSGLTEQAELQLPLFCLFLGIYTVTVVGNLSMISIIRLNRQLHTPMYYFLSSLSFLDFCYSSVITPKMLSGFLCRDRSISYSGCMIQLFFFCVCVISECYMLAAMACDRYVAICSPLLYRVIMSPRVCSLLVAAVFSVGFTDAVIHGGCILRLSFCGSNIIKHYFCDIVPLIKLSCSSTYIDELLIFVIGGFNMVATSLTIIISYAFILTSILRIHSKKGRCKAFSTCSSHLTAVLMFYGSLMSMYLKPASSSSLTQEKVSSVFYTTVILMLNPLIYSLRNNEVRNALMKLLRRKISLSPG

SEQ ID NO: 219 - DNA, 1342 bp, Homo sapiens
  source
  (1)..(1342)
  CDS (201)..(1142)
atgtacctaaatagtatcttgactttcccagtgtggcacaataattaacttgcagatagaggactacataccaggtctacatctcccaatataagccactctccgcaatacattctcagcagatatttacaaaattacctaagctgattttccttttcttgtttcttcagggaaaccctgcccaccatatagtagttgtcatgggaaactggagcactgtgactgaaatcaccctaattgccttcccagctctcctggagattcgaatatctctcttcgtggttcttgtggtaacttacacattaacagcaacaggaaacatcaccatcatctccctgatatggattgatcatcgcctgcaaactccaatgtacttcttcctcagtaatttgtcctttctggatatcttatacaccactgtcattaccccaaagttgttggcctgcctcctaggagaagagaaaaccatatcttttgctggttgcatgatccaaacatatttctacttctttctggggacggtggagtttatcctcttggcggtgatgtcctttgaccgctacatggctatctgcgacccactgcactacacggtcatcatgaacagcagggcctgccttctgctggttctgggatgctgggtgggagccttcctgtctgtgttgtttccaaccattgtagtgacaaggctaccttactgtaggaaagaaattaatcatttcttctgtgacattgcccctcttcttcaggtggcctgtataaatactcacctcattgagaagataaactttctcctctctgcccttgtcatcctgagctccctggcattcactactgggtcctacgtgtacataatttctaccatcctgcgtatcccctccacccagggccgtcagaaagctttttctacctgtgcttctcacatcactgttgtctccattgcccacgggagcaacatctttgtgtatgtgagacccaatcagaactcctcactggattatgacaaggtggccgctgtcctcatcacagtggtgacccctctcctgaacccttttatctacagcttgaggaatgagaaggtacaggaagtgttgagagagacagtgaacagaatcatgaccttgatacaaaggaaaacttgacactggtatacactacattaaatacatttctttttttattattttttttaagttccagggtacatgtgcaggatgtgcaggtttgttacatagttaaacgtgtgccatggtggtttgctgcacctatcaatccatcacccatgtactaagcccagcatgcattagttctttttcctaatgctctccccaacccccagccc

SEQ ID NO: 220 - protein, 313 aa, Homo sapiens
MGNWSTVTEITLIAFPALLEIRISLFVVLVVTYTLTATGNITIISLIWIDHRLQTPMYFFLSNLSFLDILYTTVITPKLLACLLGEEKTISFAGCMIQTYFYFFLGTVEFILLAVMSFDRYMAICDPLHYTVIMNSRACLLLVLGCWVGAFLSVLFPTIVVTRLPYCRKEINHFFCDIAPLLQVACINTHLIEKINFLLSALVILSSLAFTTGSYVYIISTILRIPSTQGRQKAFSTCASHITVVSIAHGSNIFVYVRPNQNSSLDYDKVAAVLITVVTPLLNPFIYSLRNEKVQEVLRETVNRIMTLIQRKT

SEQ ID NO: 221 - DNA, 1704 bp, Homo sapiens
  source
  (1)..(1704)
  CDS (201)..(342)
  CDS (627)..(1504)
tcagaattttctaagtgttttattaattttaaatgatggaattattttattcattcaatcaacagtttattttaagcgcccatgagtgctagggtaccgctaaatcacaaaaagcatttgataaatatagcatctcaaaatccagtaggtgagatcaaaaaactttcattcatattttgtgtcttccttgcagatccagaatggagaaaagagagataaacagtgcttttggggtaaaatccaggtataggtatttgggcccactctatgtcatctatacatattatcatattagaatcattcttctcttcactcaggctcctgaccttgacctctttccaggtgcatttaactccctttcctcaggttctctaagagttgcctgacacttgcccaggtcccctgaataaaatacaggtaaatcagtgcataagaagctttatacagtgatctcagacttgtgaccaagagcccctctgcaccattgatagacagtggccgtgcccaccaggaggatgggcaatcacactgcagtgagcctattccttctgtggggattttccagtttttcagacctgcagagtctactttttgtggtgattctcttctacatgtgaccatcctagctgcaaacgtgtccataatgggggccatcaagctcagccacaaccttcacactcctatgtactttttcctctgtggcctgtccttttcagaaacttgtaccactgtggtagtaatccctcgcatgttggtggactttctatcagagagcaagaccatttctcttcctgagtgtgccacacagatgtttttctttctgggctttgcatccaacaactgtttcatcatggccgctatgtcctacgaccgctacacggccatccacaacccactgcagtaccacacccttatgacaagaaagatctgcttgcagatgatgatggcttcttggatggttgggttcctgttttctctgtgcatcatcgtcactgtattcaacttgtctctttgcgacttgaacactatccagcactatttctgtgatatctcaccagtggtctcccttgcttgtaattacactttctatcatgaaatggctatttttgtgctctctgcctttgtgttggtgggcagctgtattttaattatgatttcctatgtcttcattgtgttcatagtcataaagatgccctctgcaaaggggaggtctaaggccttctcaacttgctcctcccacctcactgttgtgtccatacactatggatttgcttgctttgtctatttgaggcccaagaacagcaactccttcgatgaagacatgctgacggccatgatatatacaatactgatgcctctgcttaaccccatcgtgtacagtctgagaaacaaagaaatgcagatagccctaagaaaaacactaggcagtgtatttggggttttccctcagaagacaaaaaaagagcctgaacatttaaaaaaattacacagcattgataaataaaggtgagaaaagtggagtacttctaattaatatcactttgtgcacaaagtggttaaagtattgtctaatttcctgatatgtcctggcctcaccattttcctactacagagaggatgcagttttaaaatgtttttaaatgttatgtgtgtgtgtttatgtgtgtgtgcatgtgtgtatgtacacatatccattcagggtac

SEQ ID NO: 222 - protein, 339 aa, Homo sapiens
MEKREINSAFGVKSRYRYLGPLYVIYTYYHIRIILLFTQAPDLDLFPAANVSIMGAIKLSHNLHTPMYFFLCGLSFSETCTTVVVIPRMLVDFLSESKTISLPECATQMFFFLGFASNNCFIMAAMSYDRYTAIHNPLQYHTLMTRKICLQMMMASWMVGFLFSLCIIVTVFNLSLCDLNTIQHYFCDISPVVSLACNYTFYHEMAIFVLSAFVLVGSCILIMISYVFIVFIVIKMPSAKGRSKAFSTCSSHLTVVSIHYGFACFVYLRPKNSNSFDEDMLTAMIYTILMPLLNPIVYSLRNKEMQIALRKTLGSVFGVFPQKTKKEPEHLKKLHSIDK

SEQ ID NO: 223 - DNA, 1159 bp, Homo sapiens
  source
  (1)..(1159)
  CDS (201)..(959)
ttcacatttctttcaacaggaacaattcacaaagatggagattggaaaccataccacagtgacagagtttattattttggggttaactgaggatcctacactttgtgacatcttctttgtgatatttctaggaatctacattgtcaccttaataggcaatatcagcataataaagaagctgttcccaacttcacactcccatgtacctgttcctcagccacttggcttttgtggacatagggcttgccacagtagtcacacctataatgcttatgggattcctaagacgtggaacagccctccctgtcactagctgtgaagcccagctctgttctgtagtcatgtttgggacgtctgaatgcttcctactggcgaccatggcctatgatcgctatgtggccatctgctcacccctggtgaactccacccacttgtcccccataatctgcatactcttagtgggggtttgctacctgggtggatgtgtgaatgcctcaacatttactagttgtttattgagtctgtctttctgtggaccaaatcagatagatcattttttctgtgatttctctcctttgttgaaactttcctgctcaaatatctccattcctgaaattatcccttccatctcttctggatctatcattgtggtcacagtatttgccatagccatctcctacatctacatcctcatcaccatcctgaagatgcgctccgccgaggggcgccacaaggccttctccacctgtacctcccacctcgctgcggttactctctactatggaacgattaccttcatttatgtgatgcccaaatccagttactcaactagccagaacagattgatatcgctgtcctacacagtggtaatccccatactgaacccctttatctatagtctgaggaacagagatgtaaaggaggcactaagaaaggcaactgtcagaatatattcttaggatcaatttgtagcatttcagacgacctataaagttttcattatcggtatcacgtttaggacctaccaaatactacttaactgattgcttaaaataaaattatatttatttgttctaactttcatttttaaatacttgtagaccaattgggagacctagatgtcagtaataatgatagtaataattattactattattaa

SEQ ID NO: 224 - protein, 252 aa, Homo sapiens
MYLFLSHLAFVDIGLATVVTPIMLMGFLRRGTALPVTSCEAQLCSVVMFGTSECFLLATMAYDRYVAICSPLVNSTHLSPIICILLVGVCYLGGCVNASTFTSCLLSLSFCGPNQIDHFFCDFSPLLKLSCSNISIPEIIPSISSGSIIVVTVFAIAISYIYILITILKMRSAEGRHKAFSTCTSHLAAVTLYYGTITFIYVMPKSSYSTSQNRLISLSYTVVIPILNPFIYSLRNRDVKEALRKATVRIYS

SEQ ID NO: 225 - DNA, 1369 bp, Homo sapiens
  source
  (1)..(1369)
  CDS (201)..(1169)
tatagaaagactgattacacataaatacataaacaatgaaaccctaaggtaaaaaaaaaaaagtctgaactttccttgaatgatacatctgttcatattaaccttcatgtatatattaatgaagatgaagccatcaaatttataacattttaatgtgctgttctcattagggttcatttagtcagcagctacttcgtctcatgaattccctgaaggacgggaatcacaccgctctgacggggttcatcctattgggcttaacagatgatccaatccttcgagtcatcctcttcatgatcatcctatctggtaatctcagcataattattcttatcagaatttcttctcagctccatcatcctatgtatttctttctgagccacttggcttttgctgacatggcctattcatcttctgtcacacccaacatgcttgtaaacttcctggtggagagaaatacagtctcctaccttggatgtgccatccagcttggttcagcggctttctttgcaacagtcgaatgcgtccttctggctgccatggcctatgaccgctttgtggcaatttgcagtccactgctttattcaaccaaaatgtccacacaagtcagtgtccagctactcttagtagtttacatagctggttttctcattgctgtctcctatactacttccttctattttttactcttctgtggaccaaatcaagtcaatcattttttctgtgatttcgctcccttacttgaactctcctgttctgatatcagtgtctccacagttgttctctcattttcttctggatccatcattgtggtcactgtgtgtgtcatagccgtctgctacatctatatcctcatcaccatcctgaagatgcgctccactgaggggcaccacaaggccttctccacctgcacttcccacctcactgtggttaccctgttctatgggaccattaccttcatttatgtgatgcccaattttagctactcaactgaccagaacaaggtggtgtctgtgttgtacacagtggtgattcccatgttgaaccccctgatctacagcctcaggaacaaggagattaagggggctctgaagagagagcttgttagaaaaatactttctcatgatgcttgttattttagtagaacttcaaataatgatattacatagaaccctatctcttctcttgagaatactcaatgcacgtgtagatacagatttagtgtttgctttcttgacagtgttgaaagtttcatgtagaatctaccacatcttttcttctccccatgtacctaattttcaaacagtttctagaacttaataagcatacttgcatatttaaaatggagagataaagaaaaaattaatga

SEQ ID NO: 226 - protein, 322 aa, Homo sapiens
MNSLKDGNHTALTGFILLGLTDDPILRVILFMIILSGNLSIIILIRISSQLHHPMYFFLSHLAFADMAYSSSVTPNMLVNFLVERNTVSYLGCAIQLGSAAFFATVECVLLAAMAYDRFVAICSPLLYSTKMSTQVSVQLLLVVYIAGFLIAVSYTTSFYFLLFCGPNQVNHFFCDFAPLLELSCSDISVSTVVLSFSSGSIIVVTVCVIAVCYIYILITILKMRSTEGHHKAFSTCTSHLTVVTLFYGTITFIYVMPNFSYSTDQNKVVSVLYTVVIPMLNPLIYSLRNKEIKGALKRELVRKILSHDACYFSRTSNNDIT

SEQ ID NO: 227 - DNA, 1345 bp, Homo sapiens
  source
  (1)..(1345)
  CDS (201)..(1145)
cttctttatttgtattttaaagattcactattacaagtcattggccattcttcaaaagtgccaacctgaagttctgtcaaaatgagcttgtcattacatctgctgtcaagaattccagacttgaactcacagctatgggattacgacttcatactcgatataccaggtccataaaaacaatataagtttcaactactgaaatgaaaagacaaaatcaaagctgtgtggttgaattcatcctcctgggcttttctaactttcctgagctccaggtgcagctctttggggttttcctagttatttatgtggtgaccctgatgggaaatgccatcattacagtcatcatctccttaaaccagagcctccacgttcccatgtacctgttcctcctgaacctatctgtggtggaggtgagtttcagtgcagtcattacgcctgaaatgctggtggtgctctctactgagaaaactatgatttcttttgtgggctgttttgcacagatgtatttcatccttctttttggtgggactgaatgttttctcctgggagcgatggcttatgaccgatttgctgcaatttgccatcctctgaactacccagtgattatgaacagaggggtttttatgaaattagtaatattctcatggatctcagggatcatggtggctactgtgcagaccacttgggtatttagttttccattttgtggccccaatgaaattaatcatctcttctgtgagactcccccggtactagagcttgtgtgtgcagacaccttcttatttgaaatctatgccttcacaggcaccattttgattgttatggttcctttcttgttgatcctcttgtcttacattcgagttctgtttgccatcctgaagatgccatcaactactgggagacaaaaggccttttccacctgtgcctctcacctcacatctgtgaccctgttctatggcacagccaatatgacttatttacaacccaaatctggctactcacccgaaaccaagaaactgatctcattggcttacacgttgcttacccctctgctcaatccgctcatctatagcttacgaaacagtgagatgaagaggactttgataaaactatggcgaagaaaagtgattttacacacattctgattgtgttgagaagctgagtaagatttggccactgcctgagtgaactctatttaaatttaataaagggtgaaaacagactgcattttttgtatgactatgtaagtttgttgagtttttttattggaaaacgtatctcaataaagaactgctgtcacttgtttttagtagatacatatgttctcataacatgacacaacagt

SEQ ID NO: 228 - protein, 314 aa, Homo sapiens
MKRQNQSCVVEFILLGFSNFPELQVQLFGVFLVIYVVTLMGNAIITVIISLNQSLHVPMYLFLLNLSVVEVSFSAVITPEMLVVLSTEKTMISFVGCFAQMYFILLFGGTECFLLGAMAYDRFAAICHPLNYPVIMNRGVFMKLVIFSWISGIMVATVQTTWVFSFPFCGPNEINHLFCETPPVLELVCADTFLFEIYAFTGTILIVMVPFLLILLSYIRVLFAILKMPSTTGRQKAFSTCASHLTSVTLFYGTANMTYLQPKSGYSPETKKLISLAYTLLTPLLNPLIYSLRNSEMKRTLIKLWRRKVILHTF

SEQ ID NO: 229 - DNA, 1345 bp, Homo sapiens
  source
  (1)..(1345)
  CDS (201)..(1145)
ctattttttatatttggaatataatccaagtatttggtcattgtctaaaattgccaaagaaaatttctgtcaggataggctcctcatcttctgccagaatttctggggtgaatgcagactggaactcttagctaatggactgtggctttattctgtatatactatgtccataaaatcaatgcacgacttcattactgaaaatggaaagacaaaatcaaagctgtgtggttgaattcatcctcttgggcttttctaactatcctgagctccaggggcagctctttgtggctttcctggttatttatctggtgaccctgataggaaatgccattattatagtcatcgtctccctagaccagagcctccacgttcccatgtacctgtttctcctgaacttatctgtggtggacctgagtttcagtgcagttattatgcctgaaatgctggtggtcctctctactgaaaaaactacaatttcttttgggggctgttttgcacagatgtatttcatccttctttttggtggggctgaatgttttcttctgggagcaatggcttatgaccgatttgctgcaatttgccatcctctcaactaccaaatgattatgaataaaggagtttttatgaaattaattatattttcatgggccttaggttttatgttaggtactgttcaaacatcatgggtatctagttttcccttttgtggccttaatgaaattaaccatatatcttgtgaaaccccagcagtgttagaacttgcatgtgcagacacgtttttgtttgaaatctatgcattcacaggcacctttttgattattttggttcctttcttgttgatactcttgtcttacattcgagttctgtttgccatcctgaagatgccatcaaccactgggagacaaaaggccttttccacctgtgccgctcacctcacatctgtgaccctattctatggcacagccagtatgacttatttacaacccaaatctggctactcaccggaaaccaagaaagtgatgtcattgtcttactcacttctgacaccactgctgaatctgcttatctacagtttgcgaaatagtgagatgaagagggctttgatgaaattatggcgaaggcgagtggttttacacacaatctgactgtgttgagaagccatgtaagatttagtcactgcatgactgtattcaatctaaatttaataaatttagattcattaagtttgcattttttggcatgagtatgactaatttattgtgttctccaagtttgattgtatatcaggagcatctttatatgttaatgtttttagttttttcaccagtgcataatattccttaat

SEQ ID NO: 230 - protein, 314 aa, Homo sapiens
MERQNQSCVVEFILLGFSNYPELQGQLFVAFLVIYLVTLIGNAIIIVIVSLDQSLHVPMYLFLLNLSVVDLSFSAVIMPEMLVVLSTEKTTISFGGCFAQMYFILLFGGAECFLLGAMAYDRFAAICHPLNYQMIMNKGVFMKLIIFSWALGFMLGTVQTSWVSSFPFCGLNEINHISCETPAVLELACADTFLFEIYAFTGTFLIILVPFLLILLSYIRVLFAILKMPSTTGRQKAFSTCAAHLTSVTLFYGTASMTYLQPKSGYSPETKKVMSLSYSLLTPLLNLLIYSLRNSEMKRALMKLWRRRVVLHTI

SEQ ID NO: 231 - DNA, 985 bp, Homo sapiens
  source
  (1)..(985)
  CDS (201)..(785)
cagactcgcggctccacacccccatgtactacttcctcagtcacctggcattcattgatctgtgttactcatcttctattgggcccaagatgctgcaaaatgtattggtgaagaaaaaaaccatctccttttcaggctgttttgctcagctgtacttctccggtgcttttgccactacagaatgattcctcttggccacaatgccctacgaccgctacgtggccatctgcaaccccctgatttacacagctattatgacgcagcgggtctgcagggagttagtgataggggtctatacctatggcttccgaaactctgtgatacagacagctctgacgtttcagctgtctttctgcaactccgacgtcatccaccacttctactgtgctgacccccctctcctggccctctcctgctctgacacccacaacaaagaaaagcagctcatgatcttctctgcagtaaatctcactgggtccctccttaccatcttcatctcctacatttgcatcctcttttccattataaaaatccagtcttccgagggcaagtgcagagcattttccacccgtgcctcccacctcactgtcgtcaccatcttttatggcacactatttttcatgtacctgcagcaaccaaaagcggggaattcatggaagccaaacaaagtagtctctgtgttttatagtcttgtaattcccatgcttaaccctcttatctatcgcctgagaaacacagaagtaaaggatgccctgaaaaaaatgctagagggcaaagagttatagtgagtgagttaatggaacgcagcatactgaaagtttgatatattgacaaggtaatgtctctaattaagtttacatttagcaggccaactgctgtccaatcaggaagcaaacagtaatccaatttgggaattttaatgaccaaagtactgggtcacttatttaacatagtaatgtttaatccaattatcgtgaactatcaa

SEQ ID NO: 232 - protein, 194 aa, Homo sapiens
MPYDRYVAICNPLIYTAIMTQRVCRELVIGVYTYGFRNSVIQTALTFQLSFCNSDVIHHFYCADPPLLALSCSDTHNKEKQLMIFSAVNLTGSLLTIFISYICILFSIIKIQSSEGKCRAFSTRASHLTVVTIFYGTLFFMYLQQPKAGNSWKPNKVVSVFYSLVIPMLNPLIYRLRNTEVKDALKKMLEGKEL

SEQ ID NO: 233 - DNA, 1351 bp, Homo sapiens
  source
  (1)..(1351)
  CDS (201)..(1151)
tctgatatttcagtactaccttcaataatttctaatttatgttctcaatgacaacagaagcactcaataattttgcacttggatgtaccaacttgttaatgactatgataccacaaattgatctgaagcaaattttcctttgtcctaattgcagactatacatgatccctgttggagctttcatcttttccttgggaaacatgcaaaaccaaagctttgtaactgagtttgtcctcctgggactttcacagaatccaaatgttcaggaaatagtatttgttgtatttttgtttgtctacattgcaactgttgggggcaacatgctaattgtagtaaccattctcagcagccctgctcttctggtgtctcctatgtacttcttcttgggcttcctgtccttcctggatgcgtgcttctcatctgtcatcaccccaaagatgattgtagactccctctatgtgacaaaaaccatctcttttgaaggctgcatgatgcagctctttgctgaacacttctttgctggggtggaggtgattgtcctcacagccatggcctatgatcgttatgtggccatttgcaagcccttgcattactcttctatcatgaacaggaggctctgtggcattctgatgggggtagcctggacagggggcctcttgcattccatgatacaaattctttttactttccagcttcccttttgtggccccaatgtcatcaatcactttatgtgtgacttgtacccgttactggagcttgcctgcactgatactcacatctttggcctcatggtggtcatcaacagtgggtttatctgcatcataaacttctccttgttgcttgtctcctatgctgtcatcttgctctctctgagaacacacagttctgaagggcgctggaaagctctctccacctgtggatctcacattgctgttgtgattttgttctttgtcccatgcatatttgtatatacacgacctccatctgctttttcccttgacaaaatggcggcaatattttatatcatcttaaatcccttgctcaatcctttgatttacactttcaggaataaggaagtaaaacaggccatgaggagaatatggaacagactgatggtggtttctgatgagaaagaaaatattaaactttaaaaaatccaaagttaagagtaaaaaaggtcaaaatggccttaaataaaaacttaatgagatacatctttcatggcaagagataaagtaatgctagaaaaaaatcattaatgtgggatcagaaaacttatgtgtccaccctcagaaagcacaaatatgcacctcctcagtcacctatataggcctagtcttaccccgtgact

SEQ ID NO: 234 - protein, 316 aa, Homo sapiens
MQNQSFVTEFVLLGLSQNPNVQEIVFVVFLFVYIATVGGNMLIVVTILSSPALLVSPMYFFLGFLSFLDACFSSVITPKMIVDSLYVTKTISFEGCMMQLFAEHFFAGVEVIVLTAMAYDRYVAICKPLHYSSIMNRRLCGILMGVAWTGGLLHSMIQILFTFQLPFCGPNVINHFMCDLYPLLELACTDTHIFGLMVVINSGFICIINFSLLLVSYAVILLSLRTHSSEGRWKALSTCGSHIAVVILFFVPCIFVYTRPPSAFSLDKMAAIFYIILNPLLNPLIYTFRNKEVKQAMRRIWNRLMVVSDEKENIKL

SEQ ID NO: 235 - DNA, 1492 bp, Homo sapiens
  source
  (1)..(1492)
  CDS (201)..(212)
  CDS (399)..(1292)
tgtcaaaaatccagtctttttaagagacattctctggaaatatctctattttgaggtgtagtagattatcttacatatatatccactcacacataccttccagttagaacactgaagcctcatcattgtaattaaagcaataaattttgtaaaaatgaaaaggataattgtgggaggagattctaaacactccttttctaatgagctgctctgtgtcgccaggggaaacatggttgagtaaggcatcacatttttgacatggagcttctgacaaataatctcaaatttatcattgacccttttgtttacaggttctgacaccttagtccaataccttcagaagaacacatggaaaataggaaaaattgacttaattcatcctcttggggctcacacagaaccctgagggccaaaaagttttatttgtcacattcttactcatctacattgtgacgataatgggcaacctccttatcatggtgaccatcatggccagccagtccctgggttcccccatgtacttttttctggcttctttatcatttatacataccgtctattatactgccattgctcccaaaatgattgttgacctgctctctgagaaaaagaccatttcttttcagggttgtatggctcaactttttatggatcatttatttgctggtgctgaagtcattcttctggtggtaatggcctatgatcaatatgtggccatctgtaagcctcttcattatttgatcatcatgaatcgtcgagtctgtgttctcatgctgttggtggcctggattggaggctttcttcactcattggttcaatttctctttatttatcagctccctttctgtggacccaatgtcattgacaacttcctgtgtgatttgtatcccttattgaaacttgcttgcaccaatacctatgtcactgggctttctatgatagctaatggtggagcgatttgtactgtcaccttcttccctctcctgctttcctatggggtcatattaccctctcttaagactcagagtttggaagggaaatgcaaagctttctacacctgtgcatcccacatcactgtgatcactttattctttgtcccctgcatcttcctgtttgcaaggcccaactccacctttcccattgataaatccatgactgtggttttaacttgtataactcccatgctgaaaccactaatctatgccctgaggaatgcagaaatgaaaagtgccatgaggaaactttggagtaaaaaagtaagcttagctggaaaagggctgtatccctcatgagaatatgactttcattctttcacagaagcaaggaataatttcactatcctatcagattacatttctgttatcattcgcctttagttatttagcttacttattctgaagcaattatatacattaatatttatgtaagtacaatatgttaagcccattacagaccaagataattgcataggtttaacagtgtatagtgtttt

SEQ ID NO: 236 - protein, 301 aa, Homo sapiens [sequence omitted]

SEQ ID NO: 237 - DNA, 1333 bp, Homo sapiens
  source
  (1)..(1333)
  CDS (201)..(1133)
ttggtaaatatattgaatagttactatgaattccatttcactcagaaaaaaatacaaagaattgtcaataataagccattggaaaggtgcaatttcattgcaagaatatgtatttgacctctaaatttagaatttatttctttttttcttttgcagattaactagttctaatctgtggtttcttcacatcaactgaaacaatgcagcaaaataacagtgtgactgaattcatactgttaggattaacacaggatcccttgaggcagaaaatagtgtttgtaatcttcttaattttctatatgggaactgtggtggggaatatgctcattattgtgaccatcaagtccagccggacactaggaagccccatgtacttctttctattttatttgtcctttgcagattcttgcttttcaacttccacagcccctagattaattgtggatgctctctctgaaaagaaaattataacctacaatgagtgcatgacacaagtctttgcactacatttatttggctgcatggagatctttgtcctcattctcatggctgttgatcgctatgtggccatctgtaagcccttgcgttacccaaccatcatgagccagcaggtctgcatcatcctgattgttcttgcctggatagggtctttaatacactctacagctcagattatcctggccttaagattgcctttctgtggaccctatttgattgatcattattgctgtgatttgcagcccttgttgaaacttgcctgcatggacacttacatgatcaacctgctgttggtgtctaacagtggggcaatttgctcaagtagtttcatgattttgataatttcatatattgtcatcttgcattcactgagaaaccacagtgccaaagggaagaaaaaggctctctccgcttgcacgtctcacataattgtagtcatcttattctttggcccatgtatattcatatatacacgccccccgaccactttccccatggacaagatggtggcagtattttatactattggaccaccctttctcaatccactcatctacacactgaggaatgcagaagtgaaaaatgccatgagaaagttatggcatggcaaaattatttcagaaaacaaaggataaattgagggcctgacctgattactttttcagtcaaatcatgatttaacagagtaagtatagacagcaaataggaaagtacctgaatgctgtgggaataatatatcatcgtatctaagtttgtgggttcctatgttttctagttaacaggagttgtgactaccaagacattgtcttttgtgccagaactaggtagaatatag

SEQ ID NO: 238 - protein, 310 aa, Homo sapiens
MQQNNSVTEFILLGLTQDPLRQKIVFVIFLIFYMGTVVGNMLIIVTIKSSRTLGSPMYFFLFYLSFADSCFSTSTAPRLIVDALSEKKIITYNECMTQVFALHLFGCMEIFVLILMAVDRYVAICKPLRYPTIMSQQVCIILIVLAWIGSLIHSTAQIILALRLPFCGPYLIDHYCCDLQPLLKLACMDTYMINLLLVSNSGAICSSSFMILIISYIVILHSLRNHSAKGKKKALSACTSHIIVVILFFGPCIFIYTRPPTTFPMDKMVAVFYTIGPPFLNPLIYTLRNAEVKNAMRKLWHGKIISENKG

SEQ ID NO: 239 - DNA, 1339 bp, Homo sapiens
  source
  (1)..(1339)
  CDS (201)..(1139)
atatatatacatggagagtcttattagaaagccattttaattgaataccagatatttactctctgaaccacttgaatgaggtaaattaaatctagctagttcctcaaataaaatatgatcattgtacttcttaacaaagacttgtaagcttataaattatgtcatttcaggtgacttatatgttctatctacactggaccatggaaaaaagcaataatagcactttgtttattctcttggggttttcccaaaataagaacattgaagtcctctgctttgtattatttttgttttgctacattgctatttggatgggaaacttactcataatgatttctatcacgtgcacccagctcattcaccaacccatgtatttcttcctcaattacctctcactctccgacctttgctacacatccacagtgacccccaaattaatggttgacttactggcagaaagaaagaccatttcctataataactgtatgatacaactctttaccacccatttttttggaggcatagagatcttcattctcacagggatggcctatgaccgctatgtggccatttgcaagcccctgcactacaccattattatgagcaggcaaaagtgtaacacaatcatcatagtttgttgtactgggggatttatacattctgccagtcagtttcttctcaccatctttgtaccattttgtggcccaaatgagatagatcactacttctgtgatgtgtatcctttgctgaaattggcctgttctaatatacacatgataggtctcttagtcattgctaattcaggcttaattgctttggtgacatttgttgtcttgttgttgtcttatgtttttatattgtataccatcagagcatactctgcagagagacgcagcaaagctcttgccacttgtagttctcatgtaattgttgtggtcctgttttttgctcctgcattgttcatttacattagaccggtcacaacattctcagaagataaagtgtttgcccttttttataccatcattgctcccatgttcaaccctctcatatacacgctgagaaacacagagatgaagaacgccatgaggaaagtgtggtgttgtcaaatactcctgaaaagaaatcaacttttctgaattgtttctgcttttcatgccgtggttccctgatgaatgagaaaaattcactctcatcttgctcttgtccttaatgtttggagagaaaagtgggcaaacaggaagcatatcccttctgtggttttatacttctacattgacatctctttaacaaattgaacattattcttatccatactctcctccgcctttcttaatca

SEQ ID NO: 240 - protein, 312 aa, Homo sapiens
MEKSNNSTLFILLGFSQNKNIEVLCFVLFLFCYIAIWMGNLLIMISITCTQLIHQPMYFFLNYLSLSDLCYTSTVTPKLMVDLLAERKTISYNNCMIQLFTTHFFGGIEIFILTGMAYDRYVAICKPLHYTIIMSRQKCNTIIIVCCTGGFIHSASQFLLTIFVPFCGPNEIDHYFCDVYPLLKLACSNIHMIGLLVIANSGLIALVTFVVLLLSYVFILYTIRAYSAERRSKALATCSSHVIVVVLFFAPALFIYIRPVTTFSEDKVFALFYTIIAPMFNPLIYTLRNTEMKNAMRKVWCCQILLKRNQLF

SEQ ID NO: 241 - DNA, 1435 bp, Homo sapiens
  source
  (1)..(1435)
  CDS (201)..(1235)
atgagaacatgcagtgttttgttttctgttcttgtgatagtttgctgagaatgatggtttcccgcttcatccatgtcccatttgtaaaaatgaaaaggataattgtgggaggatattctaaacacttcttttctaatgagctgctctgtgtgaggccctggtcagggaaaacgtggtcgataaggcatcacatttttgacatggagcttctgacaaataatctcaaatttatcactgacccttttgtttgtaggctccgacacctgagtccaacaccttcagaagaacacatgaaaaataagaacaatgtgactgaatttatcctcttagggctcacacagaaccctgaggggcaaaaggttttatttgtcacattcttactaatctacatggtgacgataatgggcaacctgcttatcatagtgaccatcatggccagccagtccctgggttcccccatgtacttttttctggcttctttatcattcatagataccgtctattctactgcatttgctcccaaaatgattgttgacttgctctctgagaaaaagaccatttcctttcagggttgtatggctcaactttttatggatcatttatttgctggtgctgaagtcattcttctggtggtaatggcctatgatcgatacatggccatctgtaagcctcttcatgaattgatcaccatgaatcgtcgagtctgtgttcttatgctgttggcggcctggattggaggctttcttcactcattggttcaatttctctttatttatcagctccctttctgtggacccaatgtcattgacaacttcctgtgtgatttgtatcccttattgaaacttgcttgcaccaatacctatgtcactgggctttctatgatagctaatggaggagcgatttgtgctgtcaccttcttcactatcctgctttcctatggggtcatattacactctcttaagactcagagtttggaagggaaacgaaaagctttctacacctgtgcatcccacgtcactgtggtcattttattctttgtcccctgtatcttcttgtatgcaaggcccaattctacttttcccattgataaatccatgactgtagttctaacttttataactcccatgctgaacccactaatctataccctgaagaatgcagaaatgaaaagtgccatgaggaaactttggagtaaaaaagtaagcttagctgggaaatggctgtatcactcatgagaatgtgacattcattctttcacagaagcaaggaacaatttcactatcctatctgattacatttctgttatcatttccttttagttttttagcttacttattctgaagcagtcatataaattaatatttgtctaggtgtaatatgttacacccattacagaccaagaaaattgcataggtttaacagtgtgtactgtttt

SEQ ID NO: 242 - protein, 344 aa, Homo sapiens
MELLTNNLKFITDPFVCRLRHLSPTPSEEHMKNKNNVTEFILLGLTQNPEGQKVLFVTFLLIYMVTIMGNLLIIVTIMASQSLGSPMYFFLASLSFIDTVYSTAFAPKMIVDLLSEKKTISFQGCMAQLFMDHLFAGAEVILLVVMAYDRYMAICKPLHELITMNRRVCVLMLLAAWIGGFLHSLVQFLFIYQLPFCGPNVIDNFLCDLYPLLKLACTNTYVTGLSMIANGGAICAVTFFTILLSYGVILHSLKTQSLEGKRKAFYTCASHVTVVILFFVPCIFLYARPNSTFPIDKSMTVVLTFITPMLNPLIYTLKNAEMKSAMRKLWSKKVSLAGKWLYHS

SEQ ID NO: 243 - DNA, 2278 bp, Homo sapiens
  source
  (1)..(2278)
  CDS (201)..(202)
  CDS (1124)..(2078)
taccattttttatcttttattccatatattttactgtaccttttctatgtttagatatgcaaatactattgtgtaaaagttgtcaggtctctacaataggctataccatctaggtttgtgtaagtatactccatgatgttcacacaaagatgaaatcacccaatggcacatttcctagaatatatactcattgttgagcaatgtatgactgtagtataaattttgtggtttataattgctaaaaaatagagaaatttctgtttcatacaatatgtgctgcaaacaggctgcataactaacagaagataatctattgaaacttttaagaatatctacaaagcacattctcaggaagcggttttataacattgagtgttttgagccttatattagattggtgcaaaagtaattgtagtttttgtcactgaaagtaatggtgataaataactatatgatggctatataattgagggaacatattattagtggaatttttaatcagaccacttaaagattctcttaagtagatgttctatatatccatcataatgagataaacttggaacaggtaaaaatgtaatgtatcaatacagaactgtgaccatctgacaagacacaatacgccccccagccaaattttactattatgtttttatgtatgtttatcctttcaaaggactcttttgccacgatcatatgactactataatctgctcaatgcttttttgattttgctgatatgtttcctttgttgtcatataattatgttttaccatgagaattcattgctgtatcatataaatttacatacagcttgtgtacaataatattgataattactattttttcttgttttccagatgagggaacaaaagtgctgaaagacaaaactatttttccctaatcaaaaagactataaattatcaagtaagactcttagtgaagtcgaagaccttgaaaacacactaaccacatttgtcttcactcctttacatcaagcctcttctgggttcctcctaccctaccttctcaacttctgttgttacaactaatttaatttttctttatttttctctctttctgtctccatcacctttttctgtctctctctcttttagtgaagggccttggtaccagaagagagaaaccagagctctgtgaccacattcatcctgttgggtttctcagaatatccacacctccaggcgcccctcttcctggtgttctcgaccacctacactgtcgctctggtgggaaacctgggcataattgtggttgtaagaatcaatcctaagctccataccaccatgtactttttcctcagtcatctatcctttttggatacttgttattccaatgtatttacacccaaactgttagagattttggttgtggaagacagaactatctccttcaaaggatgcatggtacaatttttctttggttgtgcatttgtaatcacagaaatgttcatgttagcggtgatggcttatgacttgtttatggctgtttgtaaccccctgctctacacagtggctatgtctcctaagctctgtgctctcctggtaactggaacttacacatggggtggactctgttccctgacactcacttattctcttttggtgttatcctactgtggatctaacatcataaatcactttggctgtgagtactctgccattctttctctatcctgctctgatccctacttcaaccagatggcgtgtttagtcatttctatattcagtgaagcttgtagcctcctggccatccttgccttctatgtcttcatagttgccactgtcatcaagatgctttctacgggtggaccccaaaaggccatctccacctgtgcctcccacctgaccaccgtctccattttccatggggtcatcctgctcctttactgtgtgcccaactccaaaagctcatggctcctggtcaaagtggctactgtactttttacagtcataatccctatgctgaatcccctgatctacagccttaggaacaaagatgtaaaagagaccgtcaggaagttgataaactcccaatcaccttttcactcaaaataattcaaataaatgtttgtttatgtgtcctatgtccatttttttcatatacatgattgatgagagtttatatttaaatatatgactgtgtttgaagtccattacatattggatacttcacatttttcgatgttcaagatgccttaccattatctctagtttataacaatgtaatgcattctgttttaccccttttcaggaga

SEQ ID NO: 244 - protein, 318 aa, Homo sapiens [sequence omitted]

SEQ ID NO: 245 - DNA, 1342 bp, Homo sapiens
  source
  (1)..(1342)
  CDS (201)..(1142)
ttgatggagctggagaattggcaatagtaggaagttcccaggaggtgatgctactgctggtttgatgaccacattttgagaatcactgttctatatcacttgtcctagaaacacatgaagcctctttcctatctcttttttcctatccagttctgcttttcaagaataacttttttccttttaatccaacaagtatcatgatggcatctgaaagaaatcaaagcagcacacccacttttattctcttgggtttttcagaatacccagaaatccaggttccactctttctggttttcttgttcgtctacacagtcactgtagtggggaacttgggcatgataataatcatcagactcaattcaaaactccatacaatcatgtgctttttccttagtcacttgtccttgacagacttctgtttttccactgtagttacacctaaactgttggagaacttggttgtggaatacagaaccatctctttctctggttgcatcatgcaattttgttttgcttgcatttttggagtgacagaaactttcatgttagcagcgatggcttatgaccgttttgtggcagtttgtaaacccttgctgtataccactattatgtctcagaagctctgtgctcttctggtggctgggtcctatacatgggggatagtgtgctccctgatactcacatattttcttcttgacttatcgttttgtgaatctaccttcataaataattttatctgtgaccactctgtaattgtttctgcctcctactcagacccctatatcagccagaggctatgctttattattgccatattcaatgaggtgagcagcctaattatcattctgacatcatatatgcttattttcactaccattatgaagatgcgatctgcaagtgggcgccagaaaactttctccacctgtgcctcccacctgacagccatcactatcttccatggaactatccttttcctttactgtgttcctaatcctaaaacttctagcctcatagttacagtggcttctgtgttttacacagtggcgattccaatgctgaacccattgatctacagccttaggaacaaagatatcaataacatgtttgaaaaattagttgtcaccaaattgatttaccactgaatatgatgttcttagatacgttatttctgaaaaaagtgatttactatcttacagattacccatctcttacagtgcaattgattattcaaattatttaatcaatagactatcagttgacacattcacaccagcacaaccttttgaaatagatctaaatgacatgtaactaaaaattctaaaacctaaagcttttatatcat

SEQ ID NO: 246 - protein, 313 aa, Homo sapiens
MASERNQSSTPTFILLGFSEYPEIQVPLFLVFLFVYTVTVVGNLGMIIIIRLNSKLHTIMCFFLSHLSLTDFCFSTVVTPKLLENLVVEYRTISFSGCIMQFCFACIFGVTETFMLAAMAYDRFVAVCKPLLYTTIMSQKLCALLVAGSYTWGIVCSLILTYFLLDLSFCESTFINNFICDHSVIVSASYSDPYISQRLCFIIAIFNEVSSLIIILTSYMLIFTTIMKMRSASGRQKTFSTCASHLTAITIFHGTILFLYCVPNPKTSSLIVTVASVFYTVAIPMLNPLIYSLRNKDINNMFEKLVVTKLIYH

SEQ ID NO: 247 - DNA, 1345 bp, Homo sapiens
  source
  (1)..(1345)
  CDS (201)..(1145)
ctccaaagacttggcttggtttgttttagacataacagctgcctgcatgaggtatgttcttcttggacaaaactaggaccagtaactattccttctccttttttccttttaatcaaagaaagtcatgacataattatcactcaccccatattttgctttggcaggaacaattctcttcaacccttccattaaaaggaattatgatgatggttttaaggaatctgagcatggagcccacctttgcccttttaggtttcacagattacccaaagcttcagattcctctcttccttgtgtttctgctcatgtatgttatcacagtggtaggaaaccttgggatgatcataataatcaagattaaccccaaatttcacactcctatgtactttttccttagtcacctctcttttgttgatttttgttactcttccattgtcactcccaagctgcttgagaacttggtaatggcagataaaagcatcttctactttagctgcatgatgcagtacttcctgtcctgcactgctgtggtgacagagtctttcttgctggcagtgatggcctatgaccgctttgtggccatctgcaatcctctgctttatacagtggccatgtcacagaggctctgtgccctgctggtggctgggtcatatctctggggcatgtttggccccttggtactcctttgttatgctctccggttaaacttctctggacctaatgtaatcaaccacttcttttgtgagtatactgctctcatctctgtgtctggctctgatatactcatcccccacctgctgcttttcagcttcgccaccttcaatgagatgtgtacactactgatcatcctcacttcctatgttttcatttttgtgactgtactaaaaatccgttctgttagtgggcgccacaaagccttctccacctgggcctcccacctgacttctatcaccatcttccatgggaccatccttttcctttactgtgtacccaactccaaaaactctcggcaaacagtcaaagtggcctctgtattttacacagttgtcaaccccatgctgaaccctctgatctacagcctaaggaataaagacgtgaaggatgctttctggaagttaatacatacacaagttccatttcactgaaccagtctcaaaagttgttttcaatccaaatgaacaacccaaacagaggctacaatgtttctaaagcctagagcatatatttatatgaggtttttatggaattgtcaaatgtgaattgatatagcattcccagtattatcaggttcagaaatctctacaagtttagtccagtttatacaaaatgaatgaaaataaacatt

SEQ ID NO: 248 - protein, 314 aa, Homo sapiens
MMMVLRNLSMEPTFALLGFTDYPKLQIPLFLVFLLMYVITVVGNLGMIIIIKINPKFHTPMYFFLSHLSFVDFCYSSIVTPKLLENLVMADKSIFYFSCMMQYFLSCTAVVTESFLLAVMAYDRFVAICNPLLYTVAMSQRLCALLVAGSYLWGMFGPLVLLCYALRLNFSGPNVINHFFCEYTALISVSGSDILIPHLLLFSFATFNEMCTLLIILTSYVFIFVTVLKIRSVSGRHKAFSTWASHLTSITIFHGTILFLYCVPNSKNSRQTVKVASVFYTVVNPMLNPLIYSLRNKDVKDAFWKLIHTQVPFH

SEQ ID NO: 249 - DNA, 1336 bp, Homo sapiens
  source
  (1)..(1336)
  CDS (201)..(1136)
aaactaagtttatgcatttgtgttatacaaagttgaactttttaaaatttcacaaaaagttttattctttgctgataagataaactatcctactttttctggtgtctttttacaggatacagccaaaactaaaatttagactatataatggagaataatttttaagtttcttttcctccaatctcatataaattggagacatgggcaaggaaaactgcaccactgtggctgagttcattctccttggactatcagatgtccctgagttgagagtctgcctcttcctgctgttccttctcatctatggagtcacgttgttagccaacctgggcatgattgcactgattcaggtcagctctcggctccacacccccatgtactttttcctcagccacttgtcctctgtagatttctgctactcctcaataattgtgccaaaaatgttggctaatatctttaacaaggacaaagccatctccttcctagggtgcatggtgcaattctacttgttttgcacttgtgtggtcactgaggtcttcctgctggccgtgatggcctatgaccgctttgtggccatctgtaaccctttgctatacacagtcaccatgtcttggaaggtgcgtgtggagctggcttcttgctgctacttctgtgggacggtgtgttctctgattcatttgtgcttagctcttaggatccccttctatagatctaatgtgattaaccactttttctgtgatctacctcctgtcttaagtcttgcttgctctgatatcactgtgaatgagacactgctgttcctggtggccactttgaatgagagtgttaccatcatgatcatcctcacctcctacctgctaattctcaccaccatcctgaagatgggctctgcagagggcaggcacaaagccttctccacctgtgcttcccacctcacagctatcactgtcttccatggaacagtcctttccatttattgcaggcccagttcaggcaatagtggagatgctgacaaagtggccaccgtgttctacacagtcgtgattcctatgctgaactctgtgatctacagcctgagaaataaagatgtgaaagaagctctcagaaaagtgatgggctccaaaattcactcctagggaagattttattagcacaattcaggattcccaagtagtggcaggcgggggttcacgggagaggcacagtgttggagtacagagaagaaggagctcagtagttataagcgagtcttttttgattcacttatctttgtgcttcttaaactttaaggagtaggattgaacatatttcaaaatttgctgccaacttttaaaaa

SEQ ID NO: 250 - protein, 311 aa, Homo sapiens
MGKENCTTVAEFILLGLSDVPELRVCLFLLFLLIYGVTLLANLGMIALIQVSSRLHTPMYFFLSHLSSVDFCYSSIIVPKMLANIFNKDKAISFLGCMVQFYLFCTCVVTEVFLLAVMAYDRFVAICNPLLYTVTMSWKVRVELASCCYFCGTVCSLIHLCLALRIPFYRSNVINHFFCDLPPVLSLACSDITVNETLLFLVATLNESVTIMIILTSYLLILTTILKMGSAEGRHKAFSTCASHLTAITVFHGTVLSIYCRPSSGNSGDADKVATVFYTVVIPMLNSVIYSLRNKDVKEALRKVMGSKIHS

SEQ ID NO: 251 - DNA, 1342 bp, Homo sapiens
  source
  (1)..(1342)
  CDS (201)..(1142)
taagaaattaaaaaacattacagtgtttttacatgttagatatttaagaaatcttaaacaacaaactcatagattccggaagagatatttgcttcatccttcaggagccgtaaaggtattcaatcacccttcttattttctcattctccttaacatttttgttttcagaactaactttcagattcgaagaaacagaagcgatgctgctgactgatagaaatacaagtgggaccacgttcaccctcttgggcttctcagattacccagaactgcaagtcccactcttcctggtttttctggccatctacaatgtcactgtgctagggaatattgggttgattgtgatcatcaaaatcaaccccaaactgcatacccccatgtactttttcctcagccaactctcctttgtggatttctgctattcctccatcattgctcccaagatgttggtgaaccttgttgtcaaagacagaaccatttcatttttaggatgcgtagtacaattctttttcttctgtacctttgtggtcactgaatcctttttattagctgtgatggcctatgaccgcttcgtggccatttgcaaccctctgctctacacagttaacatgtcccagaaactctgcgtgctgctggttgtgggatcctatgcctggggagtctcatgttccttggaactgacgtgctctgctttaaagttatgttttcatggtttcaacacaatcaatcacttcttctgtgagttctcctcactactctccctttcttgctctgatacttacatcaaccagtggctgctattctttcttgccacctttaatgaaatcagcacactactcatcgttctcacatcttatgcgttcattgttgtaaccatcctcaagatgcgttcagtcagtgggcgccgcaaagccttctccacctgtgcctcccacctgactgccatcaccatcttccatggcaccatcctcttcctttactgtgtgcccaactccaaaaactccaggcacacagtcaaagtggcctctgtgttttacaccgtggtgatccccatgttgaatcccctgatctacagtctgagaaataaagatgtcaaggatacagtcaccgagatactggacaccaaagtcttctcttactgagcctgttactttcatggagtttgtcacacatataaataaattctgtccataaatattgatcttaaagatatctttacaaataaacaaagttagggttgtacaactcaacgaaatggattttcttttcaacagactaaacttagctctgtctcttactttctgggaagcatcagtaatccctctaatctttaatatttcat

SEQ ID NO: 252 - protein, 313 aa, Homo sapiens
MLLTDRNTSGTTFTLLGFSDYPELQVPLFLVFLAIYNVTVLGNIGLIVIIKINPKLHTPMYFFLSQLSFVDFCYSSIIAPKMLVNLVVKDRTISFLGCVVQFFFFCTFVVTESFLLAVMAYDRFVAICNPLLYTVNMSQKLCVLLVVGSYAWGVSCSLELTCSALKLCFHGFNTINHFFCEFSSLLSLSCSDTYINQWLLFFLATFNEISTLLIVLTSYAFIVVTILKMRSVSGRRKAFSTCASHLTAITIFHGTILFLYCVPNSKNSRHTVKVASVFYTVVIPMLNPLIYSLRNKDVKDTVTEILDTKVFSY

SEQ ID NO: 253 - DNA, 1336 bp, Homo sapiens
  source
  (1)..(1336)
  CDS (201)..(1136)
tgtatgttttatgcatttgtattatacaatgttgaactttttcagatttcccaaaatttctgttctttgctgataaaaattagctatcctacttcttctgatatctttttacaggatacacccaaaactaaaatttagactatataatggagaataagttttaggtttttttctcctctaatcctgcataaattggagacatgggcaaggaaaactgcaccactgtggctgagttcattctccttggactatcagatgtccctgagttgagagtctgcctcttcctgctgttccttctcatctatggagtcacgttgttagccaatctgggcatgactgcactgattcaggtcagctctcggctccacacccccgtgtactttttcctcagccacttgtcctttgtagatttctgctactcctcaataattgtgccaaagatgttggctaatatctttaacaaggacaaagccatctccttcctagggtgcatggtgcaattctacttgttttgcacatgtggagtcactgaggtcttcctgctggccgtgatggcctatgaccgctttgtggccatctgtaaccccctgctgtacatggtgaccatgtctcagaagctgcgtgtggagctgacctcttgctgctacttctgtgggacggtgtgttctctgattcactcgtccttagctcttaggatcctcttctatagatctaatgtgattaaccacttcttctgtgatctaccccctctcctaagtcttgcttgctctgatgtcactgtgaatgagacactgctgttcctggtggccactttgaatgagagtgttaccatcatgatcatcctcacctcctacctgctaattctcaccactatcctgaagatacactctgcagagagcaggcacaaagctttctccacctgtgcctcccacctcacagccatcactgtctcccatggaacaatcctttacatttattgcaggccgagttcaggcaacagtggagatgttgacaaagtggccaccgtgttctacacagttgtgattcccatgctgaaccccctgatctacagcctgagaaataaggatgtgaacaaagctctcagaaaagtgatgggctccaaaattcactcctagggaagattttattcacagaattcaggatccccaagttgtggcaagtgaaggttcgtaggaggggtgcagtgttggagtagagagaagaaggagctcagtagttatgagggatccttttttgattcacttatctttgtttctcttaaatttaaactaataggattgaacatatttcaaaatttgcagccaacttttataaa

SEQ ID NO: 254 - protein, 311 aa, Homo sapiens
MGKENCTTVAEFILLGLSDVPELRVCLFLLFLLIYGVTLLANLGMTALIQVSSRLHTPVYFFLSHLSFVDFCYSSIIVPKMLANIFNKDKAISFLGCMVQFYLFCTCGVTEVFLLAVMAYDRFVAICNPLLYMVTMSQKLRVELTSCCYFCGTVCSLIHSSLALRILFYRSNVINHFFCDLPPLLSLACSDVTVNETLLFLVATLNESVTIMIILTSYLLILTTILKIHSAESRHKAFSTCASHLTAITVSHGTILYIYCRPSSGNSGDVDKVATVFYTVVIPMLNPLIYSLRNKDVNKALRKVMGSKIHS

SEQ ID NO: 255 - DNA, 1387 bp, Homo sapiens
  source
  (1)..(1387)
  CDS (201)..(1187)
tttggagaaagcaacatttaatggtaattctattttgaaactgtagttattcctgtcttgacacagcacctatcaggatattaacagagatctattttgtctcaccttatattctacagaggggatggttaagctgctttgtcaatcactttcaatatttaatttctaagactgattttcggatcacacgaaaggaaaacatgtttctgacagagagaaatacgacatctgaggccacattcactctcttgggcttctcagattacctggaactgcaaattcccctcttctttgtatttctggcagtctacggcttcagtgtggtagggaatcttgggatgatagtgatcatcaaaattaacccaaaattgcatacccccatgtattttttcctcaaccacctctcctttgtggatttctgctattcctccatcattgctcccatgatgctggtgaacctggttgtagaagatagaaccatttcattctcaggatgtttggtgcaattctttttcttttgcacctttgtagtgactgaattaattctatttgcggtgatggcctatgaccactttgtggccatttgcaatcctctgctctacacagttgccatctcccagaaactctgtgccatgctggtggttgtattgtatgcatggggagtcgcatgttccctgacactcgcgtgctctgctttaaagttatcttttcatggtttcaacacaatcaatcatttcttctgtgagttatcctccctgatatcactctcttaccctgactcttatctcagccagttgcttcttttcactgttgccacttttaatgagataagcacactactcatcattctgacatcttatgcattcatcattgtcaccaccttgaagatgccttcagccagtgggcaccgcaaagtcttctccacctgtgcctcccacctgactgccatcaccatcttccatggcaccatcctcttcctctactgtgtacccaactccaaaaactccaggcacacagtcaaagtggcctctgtgttttacaccgtggtgatccccttgttgaatcccctgatctacagtctgagaaataaagatgttaaggatgcaatccgaaaaataatcaatacaaaatattttcatattaaacataggcattggtatccatttaattttgttattgaacaataaatttttcctgttttttcaaatggactgtgcatcaagagttcactaaaaaaaatcactttagatttaaaaaaaccttttttgcaatagaatggctatgagttttagatcagggaagctattcttggctcagcttatataagccagacaaaactaattgacgttgactacaaaataataattgtctataaaatattttgtct

SEQ ID NO: 256 - protein, 328 aa, Homo sapiens
MFLTERNTTSEATFTLLGFSDYLELQIPLFFVFLAVYGFSVVGNLGMIVIIKINPKLHTPMYFFLNHLSFVDFCYSSIIAPMMLVNLVVEDRTISFSGCLVQFFFFCTFVVTELILFAVMAYDHFVAICNPLLYTVAISQKLCAMLVVVLYAWGVACSLTLACSALKLSFHGFNTINHFFCELSSLISLSYPDSYLSQLLLFTVATFNEISTLLIILTSYAFIIVTTLKMPSASGHRKVFSTCASHLTAITIFHGTILFLYCVPNSKNSRHTVKVASVFYTVVIPLLNPLIYSLRNKDVKDAIRKIINTKYFHIKHRHWYPFNFVIEQ

SEQ ID NO: 257 - DNA, 1333 bp, Homo sapiens
  source
  (1)..(1333)
  CDS (201)..(1133)
ttttttttaatacagtaataatgcctctttgaaagtgacactcacctgggatactttttgagggtaaagaagataatttacataaacaaatcttgttctactttacagataattttttttttgatatcttggaaagtcaagttctagactgtcattctcgtaatgatttctgtagcagtttgaaacaagaacaaggaagaatggactgggaaaattgctcctcattaactgatttttttctcttgggaattaccaataacccagagatgaaagtgaccctatttgctgtattcttggctgtttatatcattaatttctcagcaaatcttggaatgatagttttaatcagaatggattaccaacttcacacaccaatgtatttcttcctcagtcatctgtctttctgtgatctctgctattctactgcaactgggcccaagatgctggtagatctacttgccaagaacaagtcaatacccttctatggctgtgctctgcaattcttggtcttctgtatctttgcagattctgagtgtctactgctgtcagtgatggcctttgatcggtacaaggccatcatcaaccccctgctctatacagtcaacatgtctagcagagtgtgctatctactcttgactggggtttatctggtgggaatagcagatgctttgatacatatgacactggccttccgcctatgcttctgtgggtctaatgagattaatcatttcttctgtgatatccctcctctcttattactctctcgctcagatacacaggtcaatgagttagtgttattcaccgtctttggttttattgaactgagtaccatttcaggagttttcatttcttattgttatatcatcctatcagtcttggagatacactctgctgaggggaggttcaaagctctctctacatgcacttcccacttatctgcggttgcaattttccagggaactctgctctttatgtatttccggccaagttcttcctattctctagatcaagataaaatgacctcattgttttacacccttgtggttcccatgttgaaccccctgatttatagcctgaggaacaaggatgtgaaagaggccctgaaaaaactgaaaaataaaattttattttaaggaaatagtaaaaatacatgtttatacacacaaaaatgcatattcatactggtgttttcttcaaattatatattataacataaagttgtctcaaataccctaatttaatataatacatattttactcagccacaatctagcaattctctggaattgtctaaatatgctatttttttaatgtgttttcaatttaggtaagg

SEQ ID NO: 258 - protein, 310 aa, Homo sapiens
MDWENCSSLTDFFLLGITNNPEMKVTLFAVFLAVYIINFSANLGMIVLIRMDYQLHTPMYFFLSHLSFCDLCYSTATGPKMLVDLLAKNKSIPFYGCALQFLVFCIFADSECLLLSVMAFDRYKAIINPLLYTVNMSSRVCYLLLTGVYLVGIADALIHMTLAFRLCFCGSNEINHFFCDIPPLLLLSRSDTQVNELVLFTVFGFIELSTISGVFISYCYIILSVLEIHSAEGRFKALSTCTSHLSAVAIFQGTLLFMYFRPSSSYSLDQDKMTSLFYTLVVPMLNPLIYSLRNKDVKEALKKLKNKILF

SEQ ID NO: 259 - DNA, 928 bp, Homo sapiens
  source
  (1)..(928)
  CDS (201)..(728)
tagatgcatgctactcttctgtcattgctcccaaattacttgtgaacttggtttctgaaaagaagaccatttcttacaatggctgtgttgcacagttatatttcttctgctctttagttgacacagaatctttcctcttggctgccatggcttaagaccggtacatagcaatctgtaacccgctgctctatacagtgattatgtccaagaaggtttgttgccagcttgcaattggagcatttttggggggcactatgagctcaattattcataccacgaacactttccatctgtcattctgctccagagatattaaccatttcttttgtgatatctccccactcttctctctgtcctgcactgacacatacatgcatgacatcattctggtggtctttgccagttttgtggaagcaatctgtcttctatcagttctcctttcttatgtcttcattatggcagctattcttagaacaggttctgtggagggaagaagaagagggttctccacttgtgcttcccacctgactgtggtcactatgtatcatggtaccttgatcttcatttatttgcgtcccagcactggccattcactggatattgacaaagtgacctctgtgttctatactttgattatacctatgttgaaccctctaatttacagtctaaggaacaaagatgtcaaaaatgcttttagaaaagtgattggccgaaaattacttccttaaggtgaaactgggcctgacatcatttcaacaatacctgctctttgacttggttctaactgttggaaaagtcagtttaatatgaatgttctccatatctatgggtaacgaatcttcacccacagaatagggtgaaagcctgaccttagagtatggctctctcatatcatttatattacgtctattattttaaagttgaaatt

SEQ ID NO: 260 - protein, 175 aa, Homo sapiens
MSKKVCCQLAIGAFLGGTMSSIIHTTNTFHLSFCSRDINHFFCDISPLFSLSCTDTYMHDIILVVFASFVEAICLLSVLLSYVFIMAAILRTGSVEGRRRGFSTCASHLTVVTMYHGTLIFIYLRPSTGHSLDIDKVTSVFYTLIIPMLNPLIYSLRNKDVKNAFRKVIGRKLLP

SEQ ID NO: 261 - DNA, 1051 bp, Homo sapiens
  source
  (1)..(1051)
  CDS (201)..(851)
cttgtgaattgcttgcatccaaaatatacacacagtattaagggctggtttttatcttttatttttccaatcctcttttcttcccaaggtgtccaagtcacacagagccacagaatctcacaggtgtctgagaattcctcctcctgggactctcagaggatccagaactgcagcccatcctggctggtctgtccctgtccatgtatctggtcacggtgctgaggaacctgctcatcatcctggctgtcagctctgacccccacctccacacccccatgtgcttcttcctctccaacctgtgctgggctgacatcggtttcaccttggccacggttcctaagatgattgtggacatgcagtctcataccagagtcatctcttatgagggctgcctgacacggatatctttcttggtcctttttgcatgtatagaagacatgctcctgactgtgatggcctatgactgctttgtagccatctgtcgccctctgcactacccagtcatcgtgaatcctcacctctgtgtcttcttccttttggtatactttttccttagcttgttggattcccagctgcacagttggattgtgttacaattcaccatcatcaagaatgtggaaatctctaattttgtctgtgacccctctcaacttctcaaacttgcctgttctgacagcgtcatcaatagcatattcatgtatttccatagtactatgtttggttttcttcccatttcagggatccttttgtcttactataaaatcgtcccctccattctaaggatttcatcatcagatgggaagtataaagccttctccacctgtggctctcacttggcagttgtttgctgattttatggaacaggcattggcgtgtacctgacttcagctgtgtcaccaccccccaggaatggtgtggtagcgtcagtgatgtacgctgtggtcacccccatgctgaaccttttcatctacagcctgagaaacagggacatacaaagtgccctgcggaggctgctcagcagaacagtcgaatctcatgatctgttccatcc

SEQ ID NO: 262 - protein, 216 aa, Homo sapiens
MYLVTVLRNLLIILAVSSDPHLHTPMCFFLSNLCWADIGFTLATVPKMIVDMQSHTRVISYEGCLTRISFLVLFACIEDMLLTVMAYDCFVAICRPLHYPVIVNPHLCVFFLLVYFFLSLLDSQLHSWIVLQFTIIKNVEISNFVCDPSQLLKLACSDSVINSIFMYFHSTMFGFLPISGILLSYYKIVPSILRISSSDGKYKAFSTCGSHLAVVC

SEQ ID NO: 263 - DNA, 1378 bp, Homo sapiens
  source
  (1)..(1378)
  CDS (201)..(1178)
gagatgtttgttacttacctaaagtgctctgtatacagtatgtttcaaagtgatagaatttcctgcaaaaaatcatgtgcacaaatgtatgtttcttatattaaatttttgtctccgaactgcagaagcctgtgtggttacatgcagattgggtgagcatacatttctgtagactgtggacttatgcattcacaagcaggatgttccttcccaatgacacccagtttcacccctcctccttcctgttgctggggatcccaggactagaaacacttcacatctggatcggctttcccttctgtgctgtgtacatgatcgcactcatagggaacttcactattctacttgtgatcaagactgacagcagcctacaccagcccatgttctacttcctggccatgttggccaccactgatgtgggtctctcaacagctaccatccctaagatgcttggaatcttctggatcaacctcagagggatcatctttgaagcctgcctcacccagatgttttttatccacaacttcacacttatggagtcagcagtccttgtggcaatggcttatgacagctatgtggccatctgcaatccactccaatatagcgccatcctcaccaacaaggttgtttctgtgattggtcttggtgtgtttgtgagggctttaattttcgtcattccctctatacttcttatattgcggttgcccttctgtgggaatcatgtaattccccacacctactgtgagcacatgggtcttgctcatctatcttgtgccagcatcaaaatcaatattatttatggtttatgtgccatttgtaatctggtgtttgacatcacagtcattgccctttcttatgtgcatattctttgtgctgttttccgtcttcctactcatgaagcccgactcaagtccctcagcacatgtggttcacatgtgtgtgtaatccttgccttctatacaccagccctcttttcctttatgactcattgctttggccgaaatgtgccccgctatatccatatactcctagccaatctctatgttgtggtgccaccaatgctcaatcctgtcatatatggagtcagaaccaagcagatctataaatgtgtaaagaaaatattattgcaggaacaaggaatggaaaaggaagagtacctaatacatacgaggttctgaatgcaattttatgaaatttcagtgagagaaatgtcttgtcataaaaattatattctaatatgtggctttattggctctcttctgtatttaaatacattgaatttctccatctgcttttcataccacattttgagatctgttgctgcattttttttttttttttttgagacagagtcttgctctgttgcccaggctggaga

SEQ ID NO: 264 - protein, 325 aa, Homo sapiens
MFLPNDTQFHPSSFLLLGIPGLETLHIWIGFPFCAVYMIALIGNFTILLVIKTDSSLHQPMFYFLAMLATTDVGLSTATIPKMLGIFWINLRGIIFEACLTQMFFIHNFTLMESAVLVAMAYDSYVAICNPLQYSAILTNKVVSVIGLGVFVRALIFVIPSILLILRLPFCGNHVIPHTYCEHMGLAHLSCASIKINIIYGLCAICNLVFDITVIALSYVHILCAVFRLPTHEARLKSLSTCGSHVCVILAFYTPALFSFMTHCFGRNVPRYIHILLANLYVVVPPMLNPVIYGVRTKQIYKCVKKILLQEQGMEKEEYLIHTRF

SEQ ID NO: 265 - DNA, 1345 bp, Homo sapiens
  source
  (1)..(1345)
  CDS (201)..(1145)
acaataagaaagaagaaccatatgaaagaagaatttccagaccacaaagagaagactggcccagtttttctgtgtagtcatgatgacctggatgcttgagagcagtatgtgatcaatgattttgccacctcatgtcaccataatccaagttctaacatatcttcatcaaaggtaggacctggaagagagtcatccccatcatggaccagatcaaccacactaatgtgaaggagtttttcttcctggaacttacacgttcccgagagctggagtttttcttgtttgtggtcttctttgctgtgtatgtagcaacagtcctgggaaatgcactcattgtggtcactattacctgtgagtcccgcctacacactcctatgtactttctcctgcggaacaaatcagtcctggacatcgttttttcatctatcaccgtccccaagttcctggtggatcttttatcagacaggaaaaccatctcctacaatgactgcatggcacagatctttttcttccactttgctggtggggcagatatttttttcctctctgtgatggcctatgacagataccttgcaatcgccaagcccctgcactatgtgaccatgatgaggaaagaggtgtgggtggccttggtggtggcttcttgggtgagtggtggtttgcattcaatcatccaggtaattctgatgcttccattccccttctgtggccccaacacactggatgccttctactgttatgtgctccaggtggtaaaactggcctgcactgacacctttgctttggagcttttcatgatctctaacaacggactggtgaccctgctctggttcctcctgctcctgggctcctacactgtcattctggtgatgctgagatcccactctggggaggggcggaacaaggccctctccacgtgcacgtcccacatgctggtggtgactcttcacttcgtgccttgtgtttacatctactgccggcccttcatgacgctgcccatggacacaaccatatccattaataacacggtcattacccccatgctgaaccccatcatctattccctgagaaatcaagagatgaagtcagccatgcagaggctgcagaggagacttgggccttccgagagcagaaaatgggggtgagcagtcagatggagagtggaagtctgtctgacttagttttctcaaaatgctagcctaagagtaacaggtcgctagctcttcttccactacttcattgtatatcttcatagccgctcgattctattagcgggagtatacaaacaaaaagaagaaatgagattaaacaatgtgagctatcgagcttgtggactcaggagaag

SEQ ID NO: 266 - protein, 314 aa, Homo sapiens
MDQINHTNVKEFFFLELTRSRELEFFLFVVFFAVYVATVLGNALIVVTITCESRLHTPMYFLLRNKSVLDIVFSSITVPKFLVDLLSDRKTISYNDCMAQIFFFHFAGGADIFFLSVMAYDRYLAIAKPLHYVTMMRKEVWVALVVASWVSGGLHSIIQVILMLPFPFCGPNTLDAFYCYVLQVVKLACTDTFALELFMISNNGLVTLLWFLLLLGSYTVILVMLRSHSGEGRNKALSTCTSHMLVVTLHFVPCVYIYCRPFMTLPMDTTISINNTVITPMLNPIIYSLRNQEMKSAMQRLQRRLGPSESRKWG

SEQ ID NO: 267 - DNA, 1348 bp, Homo sapiens
  source
  (1)..(1348)
  CDS (201)..(1148)
tgactgcaactcccttctttgagagagagagactgagactgagactgagaaagagaaagagagtctttgcataaagctgtaacctgtaatcctctgccctccctctcaggcattttgtagttatttgctaataccacctataatgtggactgtcattactatcccaggtctgcatcttgtccttgtggtccacgggaagcatgtccataaccaaagcctggaacagctcatcagtgaccatgttcatcctcctgggattcacagaccatccagaactccaggccctcctctttgtgaccttcctgggcatctatcttaccaccctggcctggaacctggccctcatttttctgatcagaggtgacacccatctgcacacacccatgtacttcttcctaagcaacttatctttcattgacatctgctactcttctgctgtggctcccaatatgctcactgacttcttctgggagcagaagaccatatcatttgtgggctgtgctgctcagttttttttctttgtcggcatgggtctgtctgagtgcctcctcctgactgctatggcatacgaccgatatgcagccatctccagcccccttctctaccccactatcatgacccagggcctctgtacacgcatggtggttggggcatatgttggtggcttcctgagctccctgatccaggccagctccatatttaggcttcacttttgcggacccaacatcatcaaccacttcttctgcgacctcccaccagtcctggctctgtcttgctctgacaccttcctcagtcaagtggtgaatttcctcgtggtggtcactgtcggaggaacatcgttcctccaactccttatctcctatggttacatagtgtctgcggtcctgaagatcccttcagcagagggccgatggaaagcctgcaacacgtgtgcctcgcatctgatggtggtgactctgctgtttgggacagcccttttcgtgtacttgcgacccagctccagctacttgctaggcagggacaaggtggtgtctgttttctattcattggtgatccccatgctgaaccctctcatttacagtttgaggaacaaagagatcaaggatgccctgtggaaggtgttggaaaggaagaaagtgttttcttaggtcatgcgtagaaacttatttatccaaactgctggagaattaaacaatccaagccttcacctccacctctgcctcaggcaagggagatatttggtgctctcatttgtggagactcttccctccagattcctctcacccttcctcatggtcacttgtctactgactgtgccatagatagccaaaaagggaaggaatttctt

SEQ ID NO: 268 - protein, 315 aa, Homo sapiens
MSITKAWNSSSVTMFILLGFTDHPELQALLFVTFLGIYLTTLAWNLALIFLIRGDTHLHTPMYFFLSNLSFIDICYSSAVAPNMLTDFFWEQKTISFVGCAAQFFFFVGMGLSECLLLTAMAYDRYAAISSPLLYPTIMTQGLCTRMVVGAYVGGFLSSLIQASSIFRLHFCGPNIINHFFCDLPPVLALSCSDTFLSQVVNFLVVVTVGGTSFLQLLISYGYIVSAVLKIPSAEGRWKACNTCASHLMVVTLLFGTALFVYLRPSSSYLLGRDKVVSVFYSLVIPMLNPLIYSLRNKEIKDALWKVLERKKVFS

SEQ ID NO: 269 - DNA, 1231 bp, Homo sapiens
  source
  (1)..(1231)
  CDS (201)..(1031)
tttgtccccaaagacagcacgatagttatctaaaaaattttcagtaaagtttcatgattgtatatatgaaagacacaaattaactcaacattgatgattcaaggttttatatttagccagcttcatgactgaaaataatagtgtttctttttcttttctgggaataaacccatttccttctcattcctttttctcagcagatggcaccaagcagatccatggaagtgagtgggaaccacacctctgtggccatgtttgttctcctaggactctcagatgaaaaagagctgcagctcatcctctttccagtcttcctggtgatctaccttgtgaccctgatttggaacatgggtcttatcatcctcatcagaatagactctcatctgaacacacccatgtacttttttctcagtttcctctcatttacagacatctgctattcttctaccatcagcccaaggatgctttcagacttcttaaaagataagaagacaatttccttccttgcctgtgccactcagtattttcttggggcctggatgagtctggctgagtgctgcctcttggtcatcatggcctgtgacagatatgtggccattggcagccccctgcagtactcagcaatcatggtccctagtatctgttggaagatggtagctggagtctgtgggggtggattccttagtagcttagttcatacagtcccttgctttaatctctactactgtgggccaaatatcattcaacatttcttctgtaacacacttcagattatttccttgtcttgctccaacccctttatcagccaaatgattctttttctggaagctatttttgttgggttgggctctttgcttgttatccttttgtcttatggtttcattgtagcttccatactgaaaatatcatcaaccaaatgttgtgccaaggccttcaatacctgtgcctcccacctggcagctgtggctctcttctatggcacagccctttctgtgtacatgcatcctagctctagccactccatgaagtaggacaaggtgctctcagtgttctatgttatacttatccccatgttaaacactctgatctatagtttgaggaacaaggaaatcaaagaggccctcaagagggtgacaaatggagcaacatatttacattagtaagaacaacatttgggtagatattgttatttctataacgaagatagaaacaagaatatgtaagtgactct

SEQ ID NO: 270 - protein, 276 aa, Homo sapiens
MAPSRSMEVSGNHTSVAMFVLLGLSDEKELQLILFPVFLVIYLVTLIWNMGLIILIRIDSHLNTPMYFFLSFLSFTDICYSSTISPRMLSDFLKDKKTISFLACATQYFLGAWMSLAECCLLVIMACDRYVAIGSPLQYSAIMVPSICWKMVAGVCGGGFLSSLVHTVPCFNLYYCGPNIIQHFFCNTLQIISLSCSNPFISQMILFLEAIFVGLGSLLVILLSYGFIVASILKISSTKCCAKAFNTCASHLAAVALFYGTALSVYMHPSSSHSMK

SEQ ID NO: 271 - DNA, 1336 bp, Homo sapiens
  source
  (1)..(1336)
  CDS (201)..(1136)
gaacctgaagcattgtgcaggtacatgctgacaattcaagaaaggctggggtctttccatcagaagagtgaaacatttgtccatttccagtgcttgttggaagaaaagatgtacacatatgaagacggtaatgttatcacttcaactgagttagcaatccattctcttgtctcctttctgatattaggagcactgagccaatgactgggggaggaaatattacagaaatcacctatttcatcctgctgggattctcagattttcccaggatcataaaagtgctcttcactatattcctggtgatctacattacatctctggcctggaacctctccctcattgttttaataaggatggattcccacctccatacacccatgtatttcttcctcagtaacctgtccttcatagatgtctgctatatcagctccacagtccccaagatgctctccaacctcttacaggaacagcaaactatcacttttgttggttgtattattcagtactttatcttttcaacgatgggactgagtgagtcttgtctcatgacagccatggcttatgatcgttatgctgccatttgtaaccccctgctctattcatccatcatgtcacccaccctctgtgtttggatggtactgggagcctacatgactggcctcactgcttctttattccaaattggtgctttgcttcaactccacttctgtgggtctaatgtcatcagacatttcttctgtgacatgccccaactgttaatcttgtcctgtactgacactttctttgtacaggtcatgactgctatattaaccatgttctttgggatagcaagtgccctagttatcatgatatcctatggctatattggcatctccatcatgaagatcacttcagctaaaggcaggtccaaggcattcaacacctgtgcttctcatctaacagctgtttccctcttctatacatcaggaatctttgtctatttgagttccagctctggaggttcttcaagctttgacagatttgcatctgttttctacactgtggtcattcccatgttaaatcccttgatttacagtttgaggaacaaagaaattaaagatgccttaaagaggttgcaaaagagaaagtgctgctgagtttacagattctgagatttctgccagatatggcccatcagaatctccctaacccacaaaatatgataatgaatggactataacaaaattcatgctgcctactgcctttggacaaagaaggcttgatttgatgcacaaaatatgccaatatggaccaacagatgactcaatgccacagacatcaggatctttaggtcctg

SEQ ID NO: 272 - protein, 311 aa, Homo sapiens
MTGGGNITEITYFILLGFSDFPRIIKVLFTIFLVIYITSLAWNLSLIVLIRMDSHLHTPMYFFLSNLSFIDVCYISSTVPKMLSNLLQEQQTITFVGCIIQYFIFSTMGLSESCLMTAMAYDRYAAICNPLLYSSIMSPTLCVWMVLGAYMTGLTASLFQIGALLQLHFCGSNVIRHFFCDMPQLLILSCTDTFFVQVMTAILTMFFGIASALVIMISYGYIGISIMKITSAKGRSKAFNTCASHLTAVSLFYTSGIFVYLSSSSGGSSSFDRFASVFYTVVIPMLNPLIYSLRNKEIKDALKRLQKRKCC

SEQ ID NO: 273 - DNA, 1384 bp, Homo sapiens
  source
  (1)..(1384)
  CDS (201)..(1184)
tttatttttgtatgtttgccttagctcatttccagattaaagaagagagcagtggcctcagctcagtgattaattacatgaactccttacgtggtattcgaccaatataagcccattaagagaaaggctgggttcttgttgtggcctactgaagactctctactctcatctcctgaagagcagtaagagagaccaatgacatggagtggcggaaccatagtgggagagtgagtgagtttgtgttgctgggcttccctgctcctgcgccactacaggtactattgtttgcccttttgctgctggcctatgtgttggtgctgactgagaacacactcatcattatggcaattaggaaccattctaccctccacaaacccatgtacttttttctagctaatatgtcctttctggagatctggtatgtcactgtcactattcccaagatgcttgctggctttgttggatccaaacaggatcatggacagctaatctcctttgagggatgcatgacacagctctactttttccttggcttgggctgcactgagtgtgtccttctcgctgttatggcctatgatcgctatatggccatctgctatcctctccactacccagtcattgtcagtggccggctgtgtgtgcagatggctgctggctcttgggctggaggttttggcatctccatggtcaaagtttttcttatttctggcctctcttactgtggccccaacatcatcaaccactttttctgtgatgtctctccattgctcaacctctcatgcactgatatgtccacagcagagcttacagatttcatcctggccatttttattcttctagggccactctctgtcactggggcctcctatgtggccattactggtgctgtgatgcacattccttcggctgctggacgctataaggccttttccacctgtgcctctcatctcactgttgtgataatcttctatgcagccagtatcttcatctatgctcggccaaaggcactctcagcttttgacaccaacaagttggtctctgtactgtatgctgtcattgtaccattgctcaatcccatcatttactgcctgcgcaatcaagaggtcaagagagccctatgctgtactctgcacctgtaccagcaccaggatcctgaccccaagaaagctagcagaaatgtatagaagggatgtgtgaaatctgataaaatgctattaaacttgggatcaatgtgttctatgaagtccagtggagttcttagggcctaaattgggggccagagtttcaaaggcatcactatggaactaggaatactttctttaactagtccaagaggagagagaggaataggttgcaagctagaaaatggatttctgcaggacag

SEQ ID NO: 274 - protein, 327 aa, Homo sapiens
MEWRNHSGRVSEFVLLGFPAPAPLQVLLFALLLLAYVLVLTENTLIIMAIRNHSTLHKPMYFFLANMSFLEIWYVTVTIPKMLAGFVGSKQDHGQLISFEGCMTQLYFFLGLGCTECVLLAVMAYDRYMAICYPLHYPVIVSGRLCVQMAAGSWAGGFGISMVKVFLISGLSYCGPNIINHFFCDVSPLLNLSCTDMSTAELTDFILAIFILLGPLSVTGASYVAITGAVMHIPSAAGRYKAFSTCASHLTVVIIFYAASIFIYARPKALSAFDTNKLVSVLYAVIVPLLNPIIYCLRNQEVKRALCCTLHLYQHQDPDPKKASRNV

SEQ ID NO: 275 - DNA, 1351 bp, Homo sapiens
  source
  (1)..(1351)
  CDS (201)..(1151)
atttagatggaacttttatcaaaatacagtgagaagtcagacattcagaaatcgagaggcaaagtcagttatcagtggaaagggtaacatctcagtggattcatgtcctaagaagcctctgatatttcaaaactagagttcatcttagcaaaaattcatgaagtatccatcttgttctaggtgatgaaagaaaccacagcatggagctctggaacttcaccttgggaagtggcttcattttggtggggattctgaatgacagtgggtctcctgaactgctctgtgctacaattacaatcctatacttgttggccctgatcagcaatggcctactgctcctggctatcaccatggaagcccggctccacatgcccatgtacctcctgcttgggcagctctctctcatggacctcctgttcacatctgttgtcactcccaaggcccttgcggactttctgcgcagagaaaacaccatctcctttggaggctgtgcccttcagatgttcctggcactgacaatgggtggtgctgaggacctcctactggccttcatggcctatgacaggtatgtggccatttgtcatcctctgacatacatgaccctcatgagctcaagagcctgctggctcatggtggccacgtcctggatcctggcatccctaagtgccctaatatataccgtgtataccatgcactatcccttctgcagggcccaggagatcaggcatcttctctgtgagatcccacacttgctgaaggtggcctgtgctgatacctccagatatgagctcatggtatatgtgatgggtgtgaccttcctgattccctctcttgctgctatactggcctcctatacacaaattctactcactgtgctccatatgccatcaaatgaggggaggaagaaagcccttgtcacctgctcttcccacctgactgtggttgggatgttctatggagctgccacattcatgtatgtcttgcccagttccttccacagcaccagacaagacaacatcatctctgttttctacacaattgtcactccagccctgaatccactcatctacagcctgaggaataaggaggtcatgcgggccttgaggagggtcctgggaaaatacatgctgccagcacactccacgctctagggaaggatcatggctagcttccagaattccttctcctgagagtcaaaagattcatgttatgaatcaaatactaatggtaaaaccaatacagtgcagagtatagcatttaatagaaaagtgaaggaatgtaactggatttgtcaaatgctctttaaatcttctctccatgaagtaatttatagggcatgatttacactatc

SEQ ID NO: 276 - protein, 316 aa, Homo sapiens
MELWNFTLGSGFILVGILNDSGSPELLCATITILYLLALISNGLLLLAITMEARLHMPMYLLLGQLSLMDLLFTSVVTPKALADFLRRENTISFGGCALQMFLALTMGGAEDLLLAFMAYDRYVAICHPLTYMTLMSSRACWLMVATSWILASLSALIYTVYTMHYPFCRAQEIRHLLCEIPHLLKVACADTSRYELMVYVMGVTFLIPSLAAILASYTQILLTVLHMPSNEGRKKALVTCSSHLTVVGMFYGAATFMYVLPSSFHSTRQDNIISVFYTIVTPALNPLIYSLRNKEVMRALRRVLGKYMLPAHSTL

SEQ ID NO: 277 - DNA, 1345 bp, Homo sapiens
  source
  (1)..(1345)
  CDS (201)..(1145)
ttggtttaaattgcaaccaactaataataataaatatatatatttattgttaattagaacaagctagatagcaaagagctagaaatactcaactaggtgtcagttttaacatgaccctcttctacaagacttgatgtcacagacccaaaaaaatgtgttcttttttcttgtgccaaacaggtaaacaggcaaaaatatcaatgggagaagaaaaccaaacctttgtgtccaagtttatcttcctgggtctttcacaggacttgcagacccagatcctgctatttatccttttcctcatcatttatctgctgaccgtgcttggaaaccagctcatcatcattctcatcttcctggattctcgccttcacactcccatgtatttttttcttagaaatctctcctttgcagatctctgtttctctactagcattgtccctcaagtgttggttcacttcttggtaaagaggaaaaccatttctttttatgggtgtatgacacagataattgtctttcttctggttgggtgtacagagtgtgcgctgctggcagtgatgtcctatgaccggtatgtggctgtctgcaagcccctgtactactctaccatcatgacacaacgggtgtgtctctggctgtccttcaggtcctgggccagtggggcactagtgtctttagtagataccagctttactttccatcttccctactggggacagaatataatcaatcactacttttgtgaacctcctgccctcctgaagctggcttccatagacacttacagcacagaaatggccatcttttcaatgggcgtggtaatcctcctggcccctgtctccctgattcttggttcttattggaatattatctccactgttatccagatgcagtctggggaagggagactcaaggctttttccacctgtggctcccatcttattgttgttgtcctcttctatgggtcaggaatattcacctacatgcgaccaaactccaagactacaaaagaactggataaaatgatatctgtgttctatacagcggtgactccaatgttgaaccccataatttatagcttgaggaacaaagatgtcaaaggggctctcaggaaactagttgggagaaagtgcttctctcataggcagtgacctctgagtctgacttttagagctatggcaacattctttaaaaaggagcaagattttagtaggcaattatgaattaggttatttcaggaagaagtgtgaaaatgaacatgttctaaaaactgtgaatactacaatctaaactagaacatagggaaaaaataaaagcatgaaaagttaggtcatttcttgattgtaaaagg

SEQ ID NO: 278 - protein, 314 aa, Homo sapiens
MGEENQTFVSKFIFLGLSQDLQTQILLFILFLIIYLLTVLGNQLIIILIFLDSRLHTPMYFFLRNLSFADLCFSTSIVPQVLVHFLVKRKTISFYGCMTQIIVFLLVGCTECALLAVMSYDRYVAVCKPLYYSTIMTQRVCLWLSFRSWASGALVSLVDTSFTFHLPYWGQNIINHYFCEPPALLKLASIDTYSTEMAIFSMGVVILLAPVSLILGSYWNIISTVIQMQSGEGRLKAFSTCGSHLIVVVLFYGSGIFTYMRPNSKTTKELDKMISVFYTAVTPMLNPIIYSLRNKDVKGALRKLVGRKCFSHRQ

SEQ ID NO: 279 - DNA, 1342 bp, Homo sapiens
  source
  (1)..(1342)
  CDS (201)..(1142)
ctgtacagacaaaagacactgactgaaatgttgaggagtgggagtggcagtacattcagtacattcagatcccatgaaacaaagaactcacccaaattcctacagcctgagtcccctcctcattaatgagattttgtaaaaagaaatctgtgttcctaatagaattttcttttgtcttcccagatttttgaagacaaaaaatgctggctagaaacaactccttagtgactgaatttattcttgctggattaacagatcatccagagttccggcaacccctctttttcctgtttctagtgatctacattgtcaccatggtaggcaaccttggcttgatcactcttttcggtctaaattctcacctccacacaccaatgtactatttcctcttcaatctctccttcattgatctctgttactcctctgttttcactcccaaaatgctaatgaactttgtgtcaaaaaagaatattatctccaatgttgggtgcatgactcggctgtttttctttctctttttcgtcatctctgaatgttacatgttgacttcaatggcatatgatcgctatgtggccatctgtaatccattgctgtataaggtcaccatgtcccatcaggtctgttctatgctcacttttgctgcttacataatgggattggctggagccacggcccacaccgggtgcatgcttagactcaccttctgcagtgctaatatcatcaaccattacttgtgtgacatactccccctcctccagctttcctgcaccagcacctatgtcaacgaggtggttgttctcattgttgtgggtactaatatcacggtacccagttgtaccatcctcatttcttatgttttcattgtcactagcattcttcatatcaaatccactcaaggaagatcaaaagccttcagtacttgtagctctcatgtcattgctctgtctctgttttttgggtcagcggcattcatgtatattaaatattcttctggatctatggagcagggaaaagtttcttctgttttctacactaatgtggtgcccatgctcaatcccctcatctacagtttgaggaacaaggatgtcaaagttgcactgaggaaagctctgattaaaattcagaggagaaatatattctaattagaagcagtaatgatgtaaaacaattgaaggacttcaaatttttattagtgtttttcatgaagagattttgttgtttctacagatggtgttatgtgtgatttaataaacttgtcttatcatttctcttatgagatcatcttgtgtcttcttttttgtttttgcatctctggcacttctcgcaatattactaaagaggt

SEQ ID NO: 280 - protein, 313 aa, Homo sapiens
MLARNNSLVTEFILAGLTDHPEFRQPLFFLFLVIYIVTMVGNLGLITLFGLNSHLHTPMYYFLFNLSFIDLCYSSVFTPKMLMNFVSKKNIISNVGCMTRLFFFLFFVISECYMLTSMAYDRYVAICNPLLYKVTMSHQVCSMLTFAAYIMGLAGATAHTGCMLRLTFCSANIINHYLCDILPLLQLSCTSTYVNEVVVLIVVGTNITVPSCTILISYVFIVTSILHIKSTQGRSKAFSTCSSHVIALSLFFGSAAFMYIKYSSGSMEQGKVSSVFYTNVVPMLNPLIYSLRNKDVKVALRKALIKIQRRNIF

SEQ ID NO: 281 - DNA, 1342 bp, Homo sapiens
  source
  (1)..(1342)
  CDS (201)..(1142)
ctgtacagacaaaagacactgactgaaatgttgaggagtgggagtggcagtacattcagaacattcagatcccatgaaacaaagaagtcacccaaattcctacagcctgagtcccctcctcattaatgagattttgtaaaaagaaatctgtgttcctaatagaattttcttttgtcttcccagatttttgaagacaaaaaatgctggctagaaacaactccttagtgactgaatttattcttgctggattaacagatcatccagagttccagcaacccctctttttcctgtttctagtggtctacattgtcaccatggtaggcaaccttggcttgatcattcttttcggtctaaattctcacctccacacaccaatgtactatttcctcttcaatctctccttcattgatctctgttactcctctgttttcactcccaaaatgctaatgaactttgtatcaaaaaagaatattatctcctatgttgggtgcatgactcagctgtttttctttctcttttttgtcatctctgaatgttacatgttgacctcaatggcatatgatcgctatgtggccatctgtaatccattgctgtataaggtcaccatgtcccatcaggtctgttctatgctcacttttgctgcttacataatgggattggctggagccacggcccacaccgggtgcatgcttagactcaccttctgcagtgctaatatcatcaaccattacttgtgtgacatactccccctcctccagctttcctgcaccagcacctatgtcaacgaggtggttgttctcattgttgtgggtattaatatcatggtacccagttgtaccatcctcatttcttatgttttcattgtcactagcattcttcatatcaaatccactcaaggaagatcaaaagccttcagtacttgtagctctcatgtcattgctctgtctctgttttttgggtcagcggcattcatgtatattaaatattcttctggatctatggagcagggaaaagtttcttctgttttctacactaatgtggtgcccatgctcaatcctctcatctacagtttgaggaacaaggatgtcaaagttgcactgaggaaagctctgattaaaattcagagaagaaatatattctaattagaagcagtaataatgtaaaacgattgaagaactttaaatttttattagtgtgttccatgaagagattttgttgtttctacagatggtgttatgtgtgatttaataaacttgtcttatcatttctcttatgaaatcatcttgtctctttttttggttttgcatctctggcacttctcacaattttactaaataggtca

SEQ ID NO: 282 - protein, 313 aa, Homo sapiens
MLARNNSLVTEFILAGLTDHPEFQQPLFFLFLVVYIVTMVGNLGLIILFGLNSHLHTPMYYFLFNLSFIDLCYSSVFTPKMLMNFVSKKNIISYVGCMTQLFFFLFFVISECYMLTSMAYDRYVAICNPLLYKVTMSHQVCSMLTFAAYIMGLAGATAHTGCMLRLTFCSANIINHYLCDILPLLQLSCTSTYVNEVVVLIVVGINIMVPSCTILISYVFIVTSILHIKSTQGRSKAFSTCSSHVIALSLFFGSAAFMYIKYSSGSMEQGKVSSVFYTNVVPMLNPLIYSLRNKDVKVALRKALIKIQRRNIF

SEQ ID NO: 283 - DNA, 973 bp, Homo sapiens
  source
  (1)..(973)
  CDS (201)..(773)
accttcatacccccatgtatttcttcctctttaacttgtccttcatagatctctgttattcttctgtgtttacacccaaaatgctaatgaactttatttcagagaagaatattatctccttcaaggggtgcatgacccaacttttctttttctgttttttttggtcatttctgaatgttatgtgctgacgtcaatggcgtatgatcgctgtggccatctgtaacccacttctgtatcacattgccatgtctcctacagtgtgctccagccttatgtttggttcctatttgatggccttttctggtgccatggcccacactggatgcatgctgagactgactttctgtgatgcgaacaccatcgatcactacttctgtgacatcctccctctgctccagctctcctgcaccagcacctacatcaatgagctggtggttttcactgtggttggcatcaacatcattgtgcccactgttaccatctttatctcttatggtttcatcctctccagcatcctccatatcagttccaaggagggcaggtccaaagctttcagcacttgcagttcccatataattgctgtttctctgttctttggatcaggtgcatttatgtatctcaacccatcttctgctgggtccatggataagagaaaattatcttctgtcttttatacaaatgtggttcccatgttgaaccccttaatctacagcctgaggaacaaagatgttaaatttgccctaagaaaagccctgagtagtaggaaactttgataagtaatagtatgtgtctgtgtgtatagtcacaagacagggatattctgtttgtttaattataatattatagtagcagccttcttatcctatttctttttaccatggtaaaaaaaactgagtcttctttaaattgattataatttttctggaatagatttcttcttttctctataattttcactattaaaaaaaatctt

SEQ ID NO: 284 - protein, 190 aa, Homo sapiens
MIAVAICNPLLYHIAMSPTVCSSLMFGSYLMAFSGAMAHTGCMLRLTFCDANTIDHYFCDILPLLQLSCTSTYINELVVFTVVGINIIVPTVTIFISYGFILSSILHISSKEGRSKAFSTCSSHIIAVSLFFGSGAFMYLNPSSAGSMDKRKLSSVFYTNVVPMLNPLIYSLRNKDVKFALRKALSSRKL

SEQ ID NO: 285 - DNA, 1342 bp, Homo sapiens
  source
  (1)..(1342)
  CDS (201)..(1142)
ctgtacagacaaaagacactgactgaaatgttgaggagtgggagtggcagtacattcagtacattcagatcccatgaaacaaagaactcacccaaattcctacagcttgagtcccctcctcattaatgagattttgtaaaaagaaatctgtgttcctaatagaattttcttttgtcttcccagatttttgaagacaaaaaatgctggctagaaacaactccttagtgactgaatttattcttgctggattaacagatcgtccagagttctggcaacccttctttttcctgttcctagtgatctacattgtcaccatggtaggcaaccttggcttgatcactcttttcggtctaaattctcacctccacacaccaatgtactatttcctcttcaatctctccttcattgatctctgttactcctctgttttcactcccaaaatgctaatgaactttgtgtcaaaaaagaatattatctccaatgttgggtgcatgactcggctgtttttctttctctttttcgtcatctctgaatgttacatgttgacctcaatggcatatgatcgctatgtggccatctgtaatccattgctgtataaggtcaccatgtcccatcaggtctgttctatgctcacttttgctgcttacataatgggattggctggagccacggcccacaccgggtgcatgtttagactcaccttctgcagtgctaatatcattaaccattacttgtgtgacatactccccctcctccagctttcctgcaccagcacctatgtcaacgaggtggttgttctcattgttgtgggtactaatatcacggtacccagttgtaccatcctcatttcttatgttttcattgtcactagcattcttcatatcaaatccactcaaggaagatcaaaagccttcagtacttgtagctctcatgtcattgctctgtctctgttttttgggtcagcggcattcatgtatattaaatattcttctggatctatggagcagggaaaagttttttctgttttctacactaatgtggtgcccatgctcaatcccctcatctacagtttgaggaacaaggatgtcaaagttgcactgaggaaagctctgattaaaattcagaggagaaatatattctaattagaagcagtaatgatgtaaaacaattgaaggacttcaaatttttattagtgtttttcatgaagagattttgttgtttctacagatggtgttatgtgtgatttaataaacttgtcttatcatttctcttatgagatcatcttgtgtcttcttttttgtttttgcatctctggcacttctcgcaatattactaaagaggt

SEQ ID NO: 286 - protein, 313 aa, Homo sapiens [sequence omitted]

SEQ ID NO: 287 - DNA, 1342 bp, Homo sapiens
  source
  (1)..(1342)
  CDS (201)..(1142)
ctgtacagacaaaagacactgactgaaatgttgaggagtgggagtggcagtacattcagtacattcagatcccatgaaacaaagaactcacccaaattcctacagcctgagtcccctcctcattaatgagattttgtaaaaagaaatctgtgttcctaatagaattttcttttgtcttcccagatttttgaagacaaaaaatgctggctagaaacaactccttagtgactgaatttattcttgctggattaacagatcgtccagagttccggcaacccctctttttcctgtttctagtgatctacattgtcaccatggtaggcaaccttggcttgatcattcttttcggtctaaattctcacctccacacaccaatgtactatttcctcttcaatctctccttcattgatctctgttactcctctgttttcactcccaaaatgctaatgaactttgtatcaaaaaagaatattatctcctatgttgggtgcatgactcagctgtttttctttctcttttttgtcatctctgaatgctacatattgacctcaatggcatatgatcgctatgtggccatctgtaatccattgctgtataaggtcaccatgtcccatcaggtctgttctatgctcacttttgctgcttacataatgggattggctggagccacggcccacaccgggtgcatgcttagactcaccttctgcagtgctaatatcatcaaccattacttgtgtgacatactccccctcctccagctttcctgcaccagcacctatgtcaacgaggtggttgttctcattgttgtgggtattaatatcatggtacccagttgtaccatcctcatttcttatgttttcattgtcactagcattcttcatatcaaatccactcaaggaagatcaaaagccttcagtacttgtagctctcatgtcattgctctgtctctgttttttgggtcagcggcattcatgtatattaaatattcttctggatctatggagcagggaaaagtttcttctgttttctacactaatgtggtgcccatgctcaatcctctcatctacagtttgaggaacaaggatgtcaaagttgcactgaggaaagctctgattaaaattcagagaagaaatatattctaattagaagcagtaataatgtaaaacgattgaagaactttaaatttttattagtgtgttccatgaagagattttgttgtttctacagatggtgttatgtgtgatttaataaacttgtcttatcatttctcttatgaaatcatcttgtctctttttttggttttgcatctctggcacttctcacaattttactaaataggtca

SEQ ID NO: 288 - protein, 313 aa, Homo sapiens [sequence omitted]

SEQ ID NO: 289 - DNA, 1330 bp, Homo sapiens
  source
  (1)..(1330)
  CDS (201)..(1130)
ggcccagcagagctgagatcctctcacagacacgttgttaatacctcagggtggggaggtgtgtagatgagggaggatggaagagagggcatctgcacactggctggtccactagagtcttcttcccttagccatgcttgtgcctgtcatgactctttgtgttttgccctctgcttccccagacagctcgccaagagagaatgactctgagaaacagctcctcagtgactgagtttatccttgtgggattatcagaacagccagagctccagctccctcttttccttctattcttagggatctatgtgttcactgtggtgggcaacttgggcttgatcaccttaattgggataaatcctagccttcacacccccatgtactttttcctcttcaacttgtcctttatagatctctgttattcctgtgtgtttacccccaaaatgctgaatgactttgtttcagaaagtatcatctcttatgtgggatgtatgactcagctatttttcttctgtttctttgtcaattctgagtgctatgtgttggtatcaatggcctatgatcgctatgtggccatctgcaaccccctgctctacatggtcaccatgtccccaagggtctgctttctgctgatgtttggttcctatgtggtagggtttgctggggccatggcccacactggaagcatgctgcgactgaccttctgtgattccaacgtcattgaccattatctgtgtgacgttctccccctcttgcagctctcctgcaccagcacccatgtcagtgagctggtatttttcattgttgttggagtaatcaccatgctatccagcataagcatcgtcatctcttacgctttgatactctccaacatcctctgtattccttctgcagagggcagatccaaagcctttagcacatggggctcccacataattgctgttgctctgttttttgggtcagggacattcacctacttaacaacatcttttcctggctctatgaaccatggcagatttgcctcagtcttttacaccaatgtggttcccatgcttaacccttcgatctacagtttgaggaataaggatgataaacttgccctgggcaaaaccctgaagagagtgctcttctaatgggtctcttcatatcactggcaaccgattctcggtaagcatgatactcaagtgtctttctatttataggcggaggaattttaatatttttcctcaaagagggtctcctctccacttttaaaaattggaaatctctttcctatactctccttgaggactatattattttgcaacaattaaattggctcactgcctgcaag

SEQ ID NO: 290 - protein, 309 aa, Homo sapiens
MTLRNSSSVTEFILVGLSEQPELQLPLFLLFLGIYVFTVVGNLGLITLIGINPSLHTPMYFFLFNLSFIDLCYSCVFTPKMLNDFVSESIISYVGCMTQLFFFCFFVNSECYVLVSMAYDRYVAICNPLLYMVTMSPRVCFLLMFGSYVVGFAGAMAHTGSMLRLTFCDSNVIDHYLCDVLPLLQLSCTSTHVSELVFFIVVGVITMLSSISIVISYALILSNILCIPSAEGRSKAFSTWGSHIIAVALFFGSGTFTYLTTSFPGSMNHGRFASVFYTNVVPMLNPSIYSLRNKDDKLALGKTLKRVLF

SEQ ID NO: 291 - DNA, 1333 bp, Homo sapiens
  source
  (1)..(1333)
  CDS (201)..(1133)
actttgggagttataatcactcggactgtgaagatagacccacagtgagtggtaaaaaccttcctaccaaagttcaaatctctctccttggattccttttctaagaatgggagatagagactaagaatgtggtggtgatgtttctttctaagtggtcctcttctcttgtcccctccgactctcctgcctgaccaaaaagaatggcagccaaaaactcttctgtgacagagtttatcctcgaaggcttaacccaccagccgggactgcggatccccctcttcttcctgtttctgggtttctacacggtcaccgtggtggggaacctgggcttgataaccctgattgggctgaactctcacctgcacactcccatgtacttcttcctttttaacctctctttaatagatttctgtttctccactaccatcactcccaaaatgctgatgagttttgtctcaaggaagaacatcatttccttcacagggtgtatgactcagctcttcttcttctgcttctttgtcgtctctgagtccttcatcctgtcagcgatggcgtatgaccgctacgtggccatctgtaacccactgttgtacacagtcaccatgtcttgccaggtgtgtttgctccttttgttgggtgcctatgggatggggtttgctggggccatggcccacacaggaagcataatgaacctgaccttctgtgctgacaaccttgtcaatcatttcatgtgtgacatccttcctctccttgagctctcctgcaacagctcttacatgaatgagctggtggtctttattgtggtggctgttgacgttggaatgcccattgtcactgtctttatttcttatgccctcatcctctccagcattctacacaacagttctacagaaggcaggtccaaagcctttagtacttgcagttcccacataattgtagtttctcttttctttggttctggtgctttcatgtatctcaaacccctttccatcctgcccctcgagcaagggaaagtgtcctccctgttctataccataatagtccccgtgttaaacccattaatctatagcttgaggaacaaggatgtcaaagttgccctgaggagaactttgggcagaaaaatcttttcttaagaaaggattagtattggaggaaggagatacaatgctttgcttattagtgtgtgttttcagtgagattcaagttccatttttttcctgtcttgtacagaaaaagaattttaaatctttacatttggatgagtgttaagtgcagacatattctccctgtctctgcttcacctagttattccaggatttcttcattttatgca

SEQ ID NO: 292 - protein, 310 aa, Homo sapiens
MAAKNSSVTEFILEGLTHQPGLRIPLFFLFLGFYTVTVVGNLGLITLIGLNSHLHTPMYFFLFNLSLIDFCFSTTITPKMLMSFVSRKNIISFTGCMTQLFFFCFFVVSESFILSAMAYDRYVAICNPLLYTVTMSCQVCLLLLLGAYGMGFAGAMAHTGSIMNLTFCADNLVNHFMCDILPLLELSCNSSYMNELVVFIVVAVDVGMPIVTVFISYALILSSILHNSSTEGRSKAFSTCSSHIIVVSLFFGSGAFMYLKPLSILPLEQGKVSSLFYTIIVPVLNPLIYSLRNKDVKVALRRTLGRKIFS

SEQ ID NO: 293 - DNA, 1339 bp, Homo sapiens
  source
  (1)..(1339)
  CDS (201)..(1139)
gctgatctgccttatctctttcttaaattatttaaacatgtttttatttgtgagaggtatgttttcaaatgtcgcaaattgtgaaatttaggtatatcttctgttagctttgcatactaaaaaatttctcaggtgatgatagaggaaagctattgacaatgccgatgtctctatcagaataggttttctgatgaacctggatggaacaacacaatctaacaacggtgaatgaattcattcttacgggaatcacagatatcgctgagctgcaggcaccattatttgcattgttcctcatgatctatgtgatctcagtgatgggcaatttgggcatgattgtcctcaccaagttggactccaggttgcaaacccctatgtacttttttctcagacatctggctttcatggatcttggttattcaacaactgtgggacccaaaatgttagtaaattttgttgtggataagaatataatttcttattatttttgtgcaacacagctagctttctttcttgtgttcattggtagtgaactttttattctctcagccatgtcctacgacctctatgtggccatctgtaaccctctgctatacacagtaatcatgtcacgaagggtatgtcaggtgctggtagcaatcccttacctctattgcacattcatttctcttctagtcaccataaagatttttactttatccttctgtggctacaacgtcattagtcatttctactgtgacagtctccctttgttacctttgctttgttcaaatacacatgaaattgaattgataattctgatctttgcagctattgatttgatttcatctcttctgatagttcttttatcttacctgctcatccttgtagccattctcaggatgaattctgctggcagacaaaaggctttttctacctgtggagcccacctgacagtggtcatagtgttctatgggactttgcttttcatgtacgtgcagcccaagtccagtcattcctttgacactgataaagtggcttccatattttacaccctggttatccccatgttgaatcccttgatctatagtttacgaaacaaagatgtaaaatatgccctacgaaggacatggaataacttatgtaatatttttgtttaaattttgtacaatatgattcctataaattaggttatgggcatgaatttttgctctgcatacttccagaagacataacaagcataactgattcaacatatatttacatatgtctcatacatgataggctcttctaattgctatacatagattaataaacaaaatagtagaaatctttgccttccttgatggatagatgaatt

SEQ ID NO: 294 - protein, 312 aa, Homo sapiens
MEQHNLTTVNEFILTGITDIAELQAPLFALFLMIYVISVMGNLGMIVLTKLDSRLQTPMYFFLRHLAFMDLGYSTTVGPKMLVNFVVDKNIISYYFCATQLAFFLVFIGSELFILSAMSYDLYVAICNPLLYTVIMSRRVCQVLVAIPYLYCTFISLLVTIKIFTLSFCGYNVISHFYCDSLPLLPLLCSNTHEIELIILIFAAIDLISSLLIVLLSYLLILVAILRMNSAGRQKAFSTCGAHLTVVIVFYGTLLFMYVQPKSSHSFDTDKVASIFYTLVIPMLNPLIYSLRNKDVKYALRRTWNNLCNIFV

SEQ ID NO: 295 - DNA, 1360 bp, Homo sapiens
  source
  (1)..(1360)
  CDS (201)..(1160)
tttaattatactttaccacagttttaatgaatgtgactgtagctttgtgtggttttgacctgatgggaagaggagactctatttagaatttgaaataaaggaaatacctctattgctcatacatcaaattgttaattttcttagaagataatgtttcaaatataataaatattgattttctagtttgcacagttaccaagatgaatcatgtggtaaaacacaatcacacggcagtgaccaaggtgactgaatttattctcatggggattacagacaaccctgggctgcaggctccactgtttggactcttcctcatcatatatctggtcacagtgataggcaatctgggcatggttatcttgacctacttggactccaagctacacacccccatgtactttttccttagacatttgtcaatcactgatcttggttactccactgtcattgccccgaagatgttagtaaacttcatagtgcacaaaaacacaatttcttacaattggtatgccactcagctagcattctttgagattttcatcatctctgagctctttattctatcagcaatggcctatgatcgctacgtagccatctgtaaacctcttctgtacgtgatcatcatggcagagaaagtactttgggtgctggtaattgttccctatctctatagcacgtttgtgtcactatttctcacaattaagttatttaaactgtccttctgtggctcaaacataatcagctatttttactgtgactgtatccctctgatgtccatactctgttctgacacaaatgaattagaattaataattttgatcttctcaggctgtaatttgctcttctccctctcaattgttctcatatcctacatgtttattctagtggccattctcagaatgaactcaaggaaagggaggtacaaagccttctccacctgtagctctcatctgacagtggtgatcatgttctatgggacattgttatttatttacttgcaacccaagtccagtcatactttggctattgataaaatggcctcagtgttttataccctgttgattcctatgctgaatccgttgatctacagcctaaggaacaaagaagtaaaagatgctctaaagagaactttaaccaatcgattcaaaattcccatttaatatcttaatactcagttgcatagttgggtacaataatctgtttagtactctgtcaaaccaattataacataaaaaaagtagaaatactctatctgcttagattttcctctttttctggacaaaacatgtcctcttagagcaacctgtactctttgccacctcaatggaataaataaatactatattcaggtaatatatgt

SEQ ID NO: 296 - protein, 319 aa, Homo sapiens
MNHVVKHNHTAVTKVTEFILMGITDNPGLQAPLFGLFLIIYLVTVIGNLGMVILTYLDSKLHTPMYFFLRHLSITDLGYSTVIAPKMLVNFIVHKNTISYNWYATQLAFFEIFIISELFILSAMAYDRYVAICKPLLYVIIMAEKVLWVLVIVPYLYSTFVSLFLTIKLFKLSFCGSNIISYFYCDCIPLMSILCSDTNELELIILIFSGCNLLFSLSIVLISYMFILVAILRMNSRKGRYKAFSTCSSHLTVVIMFYGTLLFIYLQPKSSHTLAIDKMASVFYTLLIPMLNPLIYSLRNKEVKDALKRTLTNRFKIPI

SEQ ID NO: 297 - DNA, 1336 bp, Homo sapiens
  source
  (1)..(1336)
  CDS (201)..(1136)
acatctaaatgttaatttacacttttatctacattggcaatataattccgttttaaggtcacattctataaatgtattagcaatttatagaaacactaaatgaattaaatgctaggttattgtataatcagaaaccttttgaagtcattcatgttaagtatcaactttgatttctcagcagtttaaagcaattgaacatcatgggtagaagaaataacacaaatgtgcctgacttcatccttacgggactgtcagattctgaagaggtccagatggccctctttatactatttctcctgatatacctaattactatgctgggcaatgtggggatgatattgataatccgcctggacctccagcttcacactcccatgtattttttccttactcacttgtcatttattgacctcagttactcaactgtcatcacacctaaaaccttagcgaacttactgacttccaactatatttccttcatgggctgctttgcccagatgttcttttttgtcttcttgggagctgctgaatgttttcttctctcatcaatggcctatgatcgctacgtagctatctgcagtcctctacgttacccagttattatgtccaaaaggctgtgttgcgctcttgtcactgggccctatgtgattagctttatcaactcctttgtcaatgtggtttggatgagcagactgcatttctgcgactcaaatgtagttcgtcactttttctgcgacacgtctccaattttagctctgtcctgcatggacacatacgacattgaaatcatgatacacattttagctggttccaccctgatggtgtcccttatcacaatatctgcatcctatgtgtccattctctctaccatcctgaaaattaattccacttcaggaaagcagaaagctttgtctacttgtgcctctcatctcttgggagtcaccatcttttatggaactatgatttttacttatttaaaaccaagaaagtcttattctttgggaagggatcaagtggcttctgttttttatactattgtgattcccatgctgaatccactcatttatagtcttagaaacaaagaagttaaaaatgctctcattagagtcatgcagagaagacaggactccaggtaattaaaatagcaggaatgctgaacatttaaactcatcttttctttcttttctatttggtatgtccttggtctccctataaaaacaattgaatccttcatgtttgcatttctgttgtgctaacctttgcttgactaaacgtgatcttgaacatttcaaggtgtatgttttcagaaatccagattgtaattagaaatcataat

SEQ ID NO: 298 - protein, 311 aa, Homo sapiens
MGRRNNTNVPDFILTGLSDSEEVQMALFILFLLIYLITMLGNVGMILIIRLDLQLHTPMYFFLTHLSFIDLSYSTVITPKTLANLLTSNYISFMGCFAQMFFFVFLGAAECFLLSSMAYDRYVAICSPLRYPVIMSKRLCCALVTGPYVISFINSFVNVVWMSRLHFCDSNVVRHFFCDTSPILALSCMDTYDIEIMIHILAGSTLMVSLITISASYVSILSTILKINSTSGKQKALSTCASHLLGVTIFYGTMIFTYLKPRKSYSLGRDQVASVFYTIVIPMLNPLIYSLRNKEVKNALIRVMQRRQDSR

SEQ ID NO: 299 - DNA, 1423 bp, Homo sapiens
  source
  (1)..(1423)
  CDS (201)..(1223)
aactggaaaataaaatcactttaattagcagggttttttaaaaacatgataaatttagccaagaaattaattacatattttttttccttttacttatacagtgaaattcatctatttggctccaattacttcatcattgtctattccattactatcagggaaattattatgccccaagaaaaaaacaaggatacaattgaatggactccactttcacaggctataacctttataacctgcaagtaaaaactgaaatggacaagttgtcatcaggtttggatatatacaggaatccactgaagaacaagactgaagtcaccatgtttatattgacaggcttcacagatgattttgagctgcaagtcttcctatttttactattttttgcaatctatctctttaccttgataggcaatttagggctggttgtgttggtcattgaggattcctggctccacaaccccatgtattattttcttagtgttttatcattcttggatgcttgctattctacagttgtcactccaaaaatgttggtcaatttcctggcaaaaaataaatccatttcatttatcggatgtgcaacacagatgcttctttttgttacttttggaactacagaatgttttctcttggctgcaatggcttatgatcactatgtagccatctacaaccctctcctgtattcagtgagcatgtcacccagagtctatgtgccactcatcactgcttcctacgttgctggcattttacatgctactatacatatagtggctacatttagcctgtccttctgtggatccaatgaaattaggcatgtcttttgtgatatgcctcctctccttgctatttcttgttctgacactcacacaaaccagcttctactcttctactttgtgggttctattgagatagtcactatcctgattgtcctcatttcctgtgatttcattctgttgtccattctgaagatgcattctgctaagggaaggcaaaaggccttctctacatgtggctctcacctaactggagtgacaatttatcatggaacaattctcgtcagttatatgagaccaagttccagctatgcttcagaccatgacatcatagtgtcaatattttacacaattgtgattcccaagttgaatcccatcatctatagtttgaggaacaaagaagtaaaaaaggcagtgaagaaaatgttgaaattggtttacaaatgaagaatatatttaaaattgagtaaacctgaaaaaaatgttgagtgtcagagttcacatctctatattttagttaaagtatttgcatatcaaagaatagtttcaaaaaagcattaagcagcctgccaatgcagcatttttcaaatgtaaacaaattgcatcacatatttgccaattaatttgttcagagatctatattaaat

SEQ ID NO: 300 - protein, 340 aa, Homo sapiens
MDSTFTGYNLYNLQVKTEMDKLSSGLDIYRNPLKNKTEVTMFILTGFTDDFELQVFLFLLFFAIYLFTLIGNLGLVVLVIEDSWLHNPMYYFLSVLSFLDACYSTVVTPKMLVNFLAKNKSISFIGCATQMLLFVTFGTTECFLLAAMAYDHYVAIYNPLLYSVSMSPRVYVPLITASYVAGILHATIHIVATFSLSFCGSNEIRHVFCDMPPLLAISCSDTHTNQLLLFYFVGSIEIVTILIVLISCDFILLSILKMHSAKGRQKAFSTCGSHLTGVTIYHGTILVSYMRPSSSYASDHDIIVSIFYTIVIPKLNPIIYSLRNKEVKKAVKKMLKLVYK

SEQ ID NO: 301 - DNA, 1480 bp, Homo sapiens
  source
  (1)..(1480)
  CDS (201)..(1280)
tttaatatataaacagcttaatacaattcagtggtaaattaaccagtagacctgatgattttagaaacagaataagtccagccaactaatgaacgtccatttcttccatttgattctgcagtgagtggcatgaacacatggctgaccagtttgtcactgtcttctgattcactactagagaattatgcactgctgaatatatgtcgtacagtatatacaagagcacagttaacatccccttgagtcatggtgttgttcattctttttgtcataatatgaactgtaactttatgcatatcttcaagtttgttctagatttcaacatgaagaatgtcactgaagttaccttatttgtactgaagggcttcacagacaatcttgaactgcagactatcttcttcttcctgtttctagcaatctacctcttcactctcatgggaaatttaggactgattttagtggtcattagggattcccagctccacaaacccatgtactattttctgagtatgttgtcttctgtggatgcctgctattcctcagttattaccccaaatatgttagtagattttacgacaaagaataaagtcatttcattccttggatgtgtagcacaggtgtttcttgcttgtagttttggaaccacagaatgctttctcttggctgcaatggcttatgatcgctatgtagccatctacaaccctctcctgtattcagtgagcatgtcacccagagtctacatgccactcatcaatgcttcctatgttgctggcattttacatgctactatacatacagtggctacatttagcctatccttctgtggagccaatgaaattaggcgtgtcttttgtgatatccctcctctccttgctatttcttattctgacactcacacaaaccagcttctactcttctactttgtgggctctatcgagctggtcactatcctgattgttctgatctcctatggtttgattctgttggccattctgaagatgtattctgctgaagggaggagaaaagtcttctccacatgtggagctcacctaactggagtgtcaatttattatgggacaatcctcttcatgtatgtgagaccaagttccagctatgcttcggaccatgacatgatagtgtcaatattttacaccattgtgattcccttgctgaatcccgtcatctacagtttgaggaacaaagatgtaaaagactcaatgaaaaaaatgtttgggaaaaatcaggttatcaataaagtatattttcatactaaaaaataaattataaaaggtgagggtgatactctgcacctcaataccaagaatgtgtcattgtggtgttatgatatatgttggtttccatccagggttcctggctcataattcccatagcctttgttacagtcttttgttataatgttgggtgttatacctcaggggcaggccttttaccttctcctgccctcctttcacttgcacca

SEQ ID NO: 302 - protein, 359 aa, Homo sapiens
MSYSIYKSTVNIPLSHGVVHSFCHNMNCNFMHIFKFVLDFNMKNVTEVTLFVLKGFTDNLELQTIFFFLFLAIYLFTLMGNLGLILVVIRDSQLHKPMYYFLSMLSSVDACYSSVITPNMLVDFTTKNKVISFLGCVAQVFLACSFGTTECFLLAAMAYDRYVAIYNPLLYSVSMSPRVYMPLINASYVAGILHATIHTVATFSLSFCGANEIRRVFCDIPPLLAISYSDTHTNQLLLFYFVGSIELVTILIVLISYGLILLAILKMYSAEGRRKVFSTCGAHLTGVSIYYGTILFMYVRPSSSYASDHDMIVSIFYTIVIPLLNPVIYSLRNKDVKDSMKKMFGKNQVINKVYFHTKK

SEQ ID NO: 303 - DNA, 1108 bp, Homo sapiens
  source
  (1)..(1108)
  CDS (201)..(908)
ttgtgggagtctcagatgatccggagctccagattcccctcttcctggtcttcctggtgctctatttgctgaccgtggcagggaacctgggcatcatcaccctcaccagtgttgaccctcaacttcaaacccccatgtactttttcctctgacacttggctattattaatctttgcaattctactgtcgttgcccctaaaatgctggttaacttcctggttaccaagaaaaccatatcatactatggatgtgcagcccaactgggtggattcttggttttcattgtggctgagattttcacgctggctgcaatggcctatgaccgctatgtggctatttggagccctctgctctacgccgtagtggtgtctccaaaggtgtgtcgtctgctggtgtccctcacataccttcagagtcttatcacagcactgactgtctcttcctgtgtgttctctgtgtcatactgttcttccaacattatcaaccatttttactgtgatgatgtccctttgctagcattgtcctgttctgatacctacattccagaaacagcagtctttatcttttcagggaccaacttgcttttctccatgatcgttgttctgatatcctacttcaacattgttattaccattttgaggatacgttcctcagaaggacgacaaaaagccttttccacctgtgcttctcacatgatagctgtggttgtgttctatgggactctccttttcatgtatttgcaaccaaggagtaatcattcattagatactgacaaaatggcttcggtcttctacaccctggtgataccagtgctgaaccctctaatctacagcctcaggaacaagaacgtgaaggatgcactaaagaggttcctagataacccatgccgatcactcaaactaatgtaaatgtaaagctaaaactatcttcctttagtgcttttcgttttttcctgaaaactgctgtgttttaaaaaaaagtgtcaagaaatttttagaaattccattcatttcagtgggaaatgtttaattgttcttatgtcaacctcacatacgcaaacaagaaaacaatatctataattaataaaaataatttgaaaataatcaca

SEQ ID NO: 304 - protein, 235 aa, Homo sapiens
MLVNFLVTKKTISYYGCAAQLGGFLVFIVAEIFTLAAMAYDRYVAIWSPLLYAVVVSPKVCRLLVSLTYLQSLITALTVSSCVFSVSYCSSNIINHFYCDDVPLLALSCSDTYIPETAVFIFSGTNLLFSMIVVLISYFNIVITILRIRSSEGRQKAFSTCASHMIAVVVFYGTLLFMYLQPRSNHSLDTDKMASVFYTLVIPVLNPLIYSLRNKNVKDALKRFLDNPCRSLKLM

SEQ ID NO: 305 - DNA, 1339 bp, Homo sapiens; identical to SEQ ID NO: 73
  source
  (1)..(1339)
  CDS (201)..(1139)

SEQ ID NO: 306 - protein, 312 aa, Homo sapiens; identical to SEQ ID NO: 74

SEQ ID NO: 307 - DNA, 1348 bp, Homo sapiens
  source
  (1)..(1348)
  CDS (201)..(1148)
ttactctctcccaagtgattgcaaagctgatttattagactgagaatactgagtttaataactgaattagattaatacatgacaagaagatcacacccaggaattgtccttgccatctagtggaaatcctagaaaatgattccttaacgtctataaccacttattttcttcctcaaacagatgaatttccaaactctgacatggctcctgaaaatttcaccagggtcactgagtttattctcacaggtgtctctagctgtccagagctccagattcccctcttcctggtcttcctagtgctctatgtgctgaccatggcagggaacctgggcatcatcaccctcaccagtgttgactctcgacttcaaaaccccatgtactttttcctgagacatctagctatcatcaatcttggcaactctactgtcattgcccctaaaatgctgatgaactttttagtaaagaagaaaactacctcattctatgaatgtgccacccaactgggagggttcttgttctttattgtatcggaggtaatgatgctggctgtgatggcctatgaccgctatgtggccatttgtaaccctctgctctacatggtggtggtgtctcggcggctctgcctcctgctggtgtccctcacatacctctatggcttttctacagctattgtggtttcaccttgtatattctctgtgtcttattgctcttctaatataatcaatcatttttactgtgatattgcacctctgttagcattatcttgctctgatacttacataccagaaacaatagtctttatatctgcagcaacaaatttggttttttccatgattacagttctagtatcttatttcaatattgttttgtccattctaaggatacgttcaccagaaggaaggaaaaaagccttttccacctgcgcttcgcatatgatagcagtcacggttttctatgggacaatgctatttatgtatttgcagccccaaaccaaccactcactggatactgataagatggcttctgtgttttacacattggtgattcctatgctgaatcccttgatctacagcctgaggaataatgatgtaaatgttgccttaaagaaattcatggaaaatccatgttactcctttaaatcaatgtaattttagagctctataaataaatgaagagatagttcatgtaacctgccattatgtaagagaaataaaagtaagtttacaagcaatcctaagaattaccaagaggtaagatttaaagatcattgaattaaaaaaaatacatggaaacattttgagttatgagagtaatacaaaacaaaaatattatttattaactttgccca

SEQ ID NO: 308 - protein, 315 aa, Homo sapiens
MAPENFTRVTEFILTGVSSCPELQIPLFLVFLVLYVLTMAGNLGIITLTSVDSRLQNPMYFFLRHLAIINLGNSTVIAPKMLMNFLVKKKTTSFYECATQLGGFLFFIVSEVMMLAVMAYDRYVAICNPLLYMVVVSRRLCLLLVSLTYLYGFSTAIVVSPCIFSVSYCSSNIINHFYCDIAPLLALSCSDTYIPETIVFISAATNLVFSMITVLVSYFNIVLSILRIRSPEGRKKAFSTCASHMIAVTVFYGTMLFMYLQPQTNHSLDTDKMASVFYTLVIPMLNPLIYSLRNNDVNVALKKFMENPCYSFKSM

SEQ ID NO: 309 - DNA, 1324 bp, Homo sapiens
  source
  (1)..(1324)
  CDS (201)..(1124)
tttacatgaattcctcttttaggaaagtagaaaattttgctttatatttcatttctgaatcaaatgtagaaataatgtttctattatctattgtgaataacaatctattctgtctacaaatattataatttgtttaaatagcactacatggaacagctaataacccaactgtttcttcctagaagagataactggactaaatgggccaacacaatctaacagtgctaactgaattcattctgatggaactcacaaggcggcctgagctgcagattcccctttttggagtcttcctcgtcatctacctaatcacagtggtgggcaacctaactatgatcattttgaccaaactggactcccacttacatacacctatgtacttttctatcagacatttggcttttgttgatcttggtaattctactgtcatttgtcccaaggtgctggcaaattttgttgtggatcgaaatactatttcctattatgcatgtgctgcacagctggcattcttccttatgttcattatcagtgaatttttcatcctgtcagccatggcctatgaccgctatgtggccatttgtaaccctctgctctattatgttattatgtctcagcgactgtgtcatgtactggtgggcattcaatatctctacagcacatttcaggctctgatgttcactattaagatttttacattgaccttctgtggctctaatgtcatcagtcatttttactgtgatgatgttcctttgctacctatgctttgctcaaatgcacaggaaatagaattgttgagcatactattttctgtatttaatttgatctcctcctttctgatagtcttagtgtcctacatgttgattttgttagctatatgtcaaatgcattctgcagagggcaggaaaaaggctttctccacatgtggttcccatttgacagtggtggttgtgttctatgggtctctactcttcatgtacatgcagcccaattccactcacttctttgatactgataaaatggcttctgtgttttacactttagtaatccccatgcttaaccctttgatttacagcttaagaaacgaagaggtgaaaaatgccttctataagctctttgagaattgatgtcaactttgtgtttaataatcaatttgtaatattgttataataaatatataatatagattaatgtcacttgataatttttcatgtgtatataaattttccaattttcaaatttttttaattgttttttatttcaataatttttgggaagtaggaggtttctggttatgtgaataagttcattggggtaatttctgagg

SEQ ID NO: 310 - protein, 307 aa, Homo sapiens
MGQHNLTVLTEFILMELTRRPELQIPLFGVFLVIYLITVVGNLTMIILTKLDSHLHTPMYFSIRHLAFVDLGNSTVICPKVLANFVVDRNTISYYACAAQLAFFLMFIISEFFILSAMAYDRYVAICNPLLYYVIMSQRLCHVLVGIQYLYSTFQALMFTIKIFTLTFCGSNVISHFYCDDVPLLPMLCSNAQEIELLSILFSVFNLISSFLIVLVSYMLILLAICQMHSAEGRKKAFSTCGSHLTVVVVFYGSLLFMYMQPNSTHFFDTDKMASVFYTLVIPMLNPLIYSLRNEEVKNAFYKLFEN

SEQ ID NO: 311 - DNA, 1171 bp, Homo sapiens; identical to SEQ ID NO: 65
  source
  (1)..(1171)
  CDS (201)..(971)

SEQ ID NO: 312 - protein, 256 aa, Homo sapiens; identical to SEQ ID NO: 66

SEQ ID NO: 313 - DNA, 1375 bp, Homo sapiens; identical to SEQ ID NO: 75
  source
  (1)..(1375)
  CDS (201)..(1175)

SEQ ID NO: 314 - protein, 324 aa, Homo sapiens; identical to SEQ ID NO: 76

SEQ ID NO: 315 - DNA, 1333 bp, Homo sapiens; identical to SEQ ID NO: 69
  source
  (1)..(1333)
  CDS (201)..(1133)

SEQ ID NO: 316 - protein, 310 aa, Homo sapiens; identical to SEQ ID NO: 70

SEQ ID NO: 317 - DNA, 1339 bp, Homo sapiens; identical to SEQ ID NO: 71
  source
  (1)..(1339)
  CDS (201)..(1139)

SEQ ID NO: 318 - protein, 312 aa, Homo sapiens; identical to SEQ ID NO: 72

SEQ ID NO: 319 - DNA, 1318 bp, Homo sapiens
  source
  (1)..(1318)
  CDS (201)..(1118)
gggaataacatcaagcagctgatatttgctgttttgttcacttgtctcagaacatgttttggggaaaaccaagggagagaacaaactcaagagggagcaggatgatgatagtcctcaggcctgggaaggatgtttctaatgattgaggagagttctttgatttctgtgattccaggctgtcagctcctgtgctttaaaatatggttgctacaaacaatgtgactgaaataattttcgtgggattttcccagaattggagtgagcagagggtcatttctgtgatgtttctcctcatgtacacagctgttgtgctgggcaatggcctcattgtggtgaccatcctggccagcaaagtgctcacctcccccatgtatttctttctcagctacttatcctttgtggagatctgctactgttctgtcatggcccccaagcttatctttgactcctttatcaagaggaaagtcatttctctcaagggctgcctcacacagatgttttccctccatttctttggtggcactgaggcctttctcctgatggtgatggcctatgaccgctatgtggccatctgcaagcccttgcactacatggccatcatgaaccagcgaatgtgtggtctcctcgtgaggatagcatggggcgggggcctgctgcattctgttgggcaaaccttcctgattttccagctcccgttctgtggccccaacatcatggaccactacttctgtgatgtccacccagtgctggagctggcctgcgcagacaccttcttcattagcctgctgatcatcaccaatggcggctccatctccgtagtcagtttcttcgtgctgatggcttcctacctgatcatcctgcacttcctgagaagccacaacttggaggggcagcacaaggccctctccacctgtgcctctcatgtcacagttgtcgacctgttcttcataccttgctccttggtctatattaggccctgtgtcaccctccctgcagacaagatagttgctgtattttatacagtggtcacacctctcttaaaccctgtgatttactccttcaggaatgctgaagtgaaaaatgccatgaggagatttattgggggaaaagtaatttgagaagagaagtagatgatttagttagggaaaataggaggagtaagggatgggaaattggggcatgtaagatctcactctgcatctaccttgcccaatggagtgagtggccttgggccagtcaccttttttgaagtttcagtttcctcatcttatgggattggacaagattaaagggagctctaggatggagtaagaggggt

SEQ ID NO: 320 - protein, 305 aa, Homo sapiens
MVATNNVTEIIFVGFSQNWSEQRVISVMFLLMYTAVVLGNGLIVVTILASKVLTSPMYFFLSYLSFVEICYCSVMAPKLIFDSFIKRKVISLKGCLTQMFSLHFFGGTEAFLLMVMAYDRYVAICKPLHYMAIMNQRMCGLLVRIAWGGGLLHSVGQTFLIFQLPFCGPNIMDHYFCDVHPVLELACADTFFISLLIITNGGSISVVSFFVLMASYLIILHFLRSHNLEGQHKALSTCASHVTVVDLFFIPCSLVYIRPCVTLPADKIVAVFYTVVTPLLNPVIYSFRNAEVKNAMRRFIGGKVI

SEQ ID NO: 321 - DNA, 1330 bp, Homo sapiens
  source
  (1)..(1330)
  CDS (201)..(1130)
gtcttgcatagggtaggctattgagcaccaaatgaataaacattgactatataaataaataaacaaatgagtcagaaaatatgcataaaagggttttattaacaagcaagtgctaaataaacatgaaggattagcgttatgattgcatgtgctttgtcacagggctcttctctgagatctgtcttctctgagtggaatccatggccagtacaagtaatgtgactgagttgattttcactggccttttccaggatccagctgtgcagagtgtatgctttgtggtgtttctccccgtgtaccttgccacggtggtgggcaatggcctcatcgttctgacggtcagtatcagcaagagtctggattctcccatgtacttcttccttagctgcctgtccttggtggagatcagttattcctccactatcgcccctaaattcatcatagacttacttgccaagattaaaaccatctctctggaaggctgtctgactcagatattcttcttccacttctttggggttgctgagatccttttgattgtggtgatggcctatgattgctacgtggccatttgcaagcctcttcattatatgaacattatcagtcgtcaactgtgtcaccttctggtggctggttcctggctggggggcttttgtcactccataattcagattctcgttatcatccaattgcccttctgtggtcccaatgtgattgaccactatttctgtgacctccagcctttattcaagcttgcctgcactgacaccttcatggagggggttattgtgttggccaacagtggattattctctgtcttctccttcctcatcttggtgtcctcttatattgtcattctggtcaacttgaggaaccattctgcagaggggaggcacaaagccctctccacctgtgcttctcacatcacagtggtcatcttgttttttggacctgctatcttcctctacatgcgaccttcttccactttcactgaagataaacttgtggctgtattctacacggtcatcacccccatgctgaaccccatcatttacacactcaggaatgcagaggtgaaaatcgccataagaagattgtggagcaaaaaggagaatccagggagggagtgaaaaaagagcttagggatgaaaaagtgatacaaaatgtatgtctgattactctctgttcttgaaatggattttgattttagtgggatattcaagaatgacagaaacaaatataaaggcttaatgatactgctgctgtgattctgcttagtagccaaagacacttggtatgctggtgtaatgtttgaaggacagaggtcaga

SEQ ID NO: 322 - protein, 309 aa, Homo sapiens
MASTSNVTELIFTGLFQDPAVQSVCFVVFLPVYLATVVGNGLIVLTVSISKSLDSPMYFFLSCLSLVEISYSSTIAPKFIIDLLAKIKTISLEGCLTQIFFFHFFGVAEILLIVVMAYDCYVAICKPLHYMNIISRQLCHLLVAGSWLGGFCHSIIQILVIIQLPFCGPNVIDHYFCDLQPLFKLACTDTFMEGVIVLANSGLFSVFSFLILVSSYIVILVNLRNHSAEGRHKALSTCASHITVVILFFGPAIFLYMRPSSTFTEDKLVAVFYTVITPMLNPIIYTLRNAEVKIAIRRLWSKKENPGRE

SEQ ID NO: 323 - DNA, 1345 bp, Homo sapiens
  source
  (1)..(1345)
  CDS (201)..(1145)
attactgtatagataagttatccactaaattgtgttttcatatccataattttgatctaggaaatatagaaaacaaatcattgctataataaaataacacatacatttcagttttgtgcaactctgttttgttcatcacagggtttttcttttttatctctccttgctacagagtatcttgtgattctaaaataacatccatggagaataatacagaggtgagtgaattcatcctgcttggtctaaccaatgccccagaactacaggttcccctctttatcatgtttaccctcatctacctcatcactctgactgggaacctggggatgatcatattaatcctgctggactctcatctccacactcccatgtacttttttctcagtaacctgtctcttgcaggcattggttactcctcagctgtcactccaaaggttttaactgggttgcttatagaagacaaagccatctcctacagtgcctgtgctgctcagatgttcttttgtgcagtctttgccactgtggaaaattacctcttgtcctcaatggcctatgaccgctacgcagcagtgtgtaaccccctacattataccaccaccatgacaacacgtgtgtgtgcttgtctggctataggctgttatgtcattggttttctgaatgcttctatccaaattggagatacatttcgcctctctttctgcatgtccaatgtgattcatcactttttctgtgacaaaccagcagtcattactctgacctgctctgagaaacacattagtgagttgattcttgttcttatatcaagttttaatgtcttttttgcacttcttgttaccttgatttcctatctgttcatattgatcaccattcttaagaggcacacaggtaagggataccagaagcctttatctacctgtggttctcacctcattgccattttcttattttatataactgtcatcatcatgtacatacgaccaagttccagtcattccatggacacagacaaaattgcatctgtgttctacactatgatcatccccatgctcagtcctatagtctataccctgaggaacaaagacgtgaagaatgcattcatgaaggttgttgagaaggcaaaatattctctagattcagtcttttaatgatgcaaaatcatcacaatgttattttatctcacttagatctactttatacaataactcaaatgttaaaatgctatatggtatatagaatgtaaaatttcatctaatattatttttgtctttagttgagaaacagttctaagtatccacgagttagaaaaatacgatgacaatttctcatggagtttaatgaaatatgt

SEQ ID NO: 324 - protein, 314 aa, Homo sapiens
MENNTEVSEFILLGLTNAPELQVPLFIMFTLIYLITLTGNLGMIILILLDSHLHTPMYFFLSNLSLAGIGYSSAVTPKVLTGLLIEDKAISYSACAAQMFFCAVFATVENYLLSSMAYDRYAAVCNPLHYTTTMTTRVCACLAIGCYVIGFLNASIQIGDTFRLSFCMSNVIHHFFCDKPAVITLTCSEKHISELILVLISSFNVFFALLVTLISYLFILITILKRHTGKGYQKPLSTCGSHLIAIFLFYITVIIMYIRPSSSHSMDTDKIASVFYTMIIPMLSPIVYTLRNKDVKNAFMKVVEKAKYSLDSVF

SEQ ID NO: 325 - DNA, 1318 bp, Homo sapiens
  source
  (1)..(1318)
  CDS (201)..(1118)
ggagaaacttggtaaaagtggagaaaagaaaaagaactagtcttgatccttccagtttctaactccagtgctgattacattagattcatggctcagagtgtaacttaatttatcttcagtctgattcttccttctgtacttgtagctctccacagagaaatactgttagctcaattacctgggaaaatcactcagtgttgatggaatttgtgttcctggcctatccctcctgcccagaactgcatattctgtccttccttggggtcagcctggtttatggtttgatcatcactgggaacattctcattgtggtgtccattcacacagaaacctgtctatgcacatccatgtactatttcctgggcagcctttctgggattgaaatatgctacactgcagtggtggtgccccatatcctggccaacaccctacagtcagagaagaccatcactctcctgggctgtgccacccagatggctttcttcattgcactgggcagtgctgattgcttcctcttggctgccatggcctatgaccgctatgtggccatttgccacccgttgcagtaccctctcctcatgacattgactctttgtgtccacttggttgtggcatcagtcatcagtggtctgttcctgtccttacaactggtggccttcatcttctctctgccattctgccaggctcagggcattgagcacttcttttgtgatgtgccaccagtcatgcatgttgtttgtgctcagagtcacattcatgagcagtcagtgctggtggcagccatactagccattgctgtgcctttcttcctcatcaccacctcctacaccttcatagtggctgctctgctcaagatccactcggctgctggccgccaccgggccttctccacctgctcttcccacctcactgtggtgctgctgcagtatggctgctgtgccttcatgtacctgtgccccagctccagctacaaccccaagcaagatcggttcatctcactggtgtacacattgggaaccccactgctcaacccacttatctatgccctgaggaacagtgagatgaaaggggccgtagggagagttcttaccaggaactgcctttcccagaacagctaggaaagacgaggggacagcctatcaggcaagtatttggttccagcccaccaaatctgtatgaaactgagatttctatcatttggtgttaaaactcatctaaaagatggtataaattatatggatactgtttatgtgtgccaaagatttttaaatatttctacaatttgactctgtaatttctcttcttggaaagaactaca

SEQ ID NO: 326 - protein, 305 aa, Homo sapiens
MEFVFLAYPSCPELHILSFLGVSLVYGLIITGNILIVVSIHTETCLCTSMYYFLGSLSGIEICYTAVVVPHILANTLQSEKTITLLGCATQMAFFIALGSADCFLLAAMAYDRYVAICHPLQYPLLMTLTLCVHLVVASVISGLFLSLQLVAFIFSLPFCQAQGIEHFFCDVPPVMHVVCAQSHIHEQSVLVAAILAIAVPFFLITTSYTFIVAALLKIHSAAGRHRAFSTCSSHLTVVLLQYGCCAFMYLCPSSSYNPKQDRFISLVYTLGTPLLNPLIYALRNSEMKGAVGRVLTRNCLSQNS

SEQ ID NO: 327 - DNA, 1345 bp, Homo sapiens
  source
  (1)..(1345)
  CDS (201)..(1145)
aatgctctatgaattattgtaatttaaagttgcattttgcggtcatgggcatgttttagatccgggactcctggaaacaagtaattacaatactggaataaagcaaaaaaatggcatgctgattgatctcagtagtcctccctccatttatcattctgattctgccttttcatttctacagggcagctacataattcccaatggagaacaacacagaggtgactgaattcatccttgtggggttaactgatgacccagaactgcagatcccactcttcatagtcttccttttcatctacctcatcactctggttgggaacctggggatgattgaattgattctactggactcctgtctccacacccccatgtacttcttcctcagtaacctctccctggtggactttggttattcctcagctgtcactcccaaggtgatggtggggtttctcacaggagacaaattcatattatataatgcttgtgccacacaattcttcttctttgtagcctttatcactgcagaaagtttcctcctggcatcaatggcctatgaccgctatgcagcattgtgtaaacccctgcattacaccaccaccatgacaacaaatgtatgtgcttgcctggccataggctcctacatctgtggtttcctgaatgcatccattcatactgggaacactttcaggctctccttctgtagatccaatgtagttgaacactttttctgtgatgctcctcctctcttgactctctcatgttcagacaactacatcagtgagatggttattttttttgtggtgggattcaatgacctcttttctatcctggtaatcttgatctcctacttatttatatttatcaccatcatgaagatgcgctcacctgaaggacgccagaaggccttttctacttgtgcttcccaccttactgcagtttccatcttttatgggacaggaatctttatgtacttacgacctaactccagccatttcatgggcacagacaaaatggcatctgtgttctatgccatagtcattcccatgttgaatccactggtctacagcctgaggaacaaagaggttaagagtgcctttaaaaagactgtagggaaggcaaaggcctctataggattcatattttaattataaagaattcacaataagataattttttccacctcatattaatctttgtctaccaagcccaatatttgggcttcctcatggacagtttctattgactgttttcttaaacatatgaattggccatactttcttcattctttaagtgacactttttttgttgttaaaatctggacattttaaataataaaaaatagcat

SEQ ID NO: 328 - protein, 314 aa, Homo sapiens
MENNTEVTEFILVGLTDDPELQIPLFIVFLFIYLITLVGNLGMIELILLDSCLHTPMYFFLSNLSLVDFGYSSAVTPKVMVGFLTGDKFILYNACATQFFFFVAFITAESFLLASMAYDRYAALCKPLHYTTTMTTNVCACLAIGSYICGFLNASIHTGNTFRLSFCRSNVVEHFFCDAPPLLTLSCSDNYISEMVIFFVVGFNDLFSILVILISYLFIFITIMKMRSPEGRQKAFSTCASHLTAVSIFYGTGIFMYLRPNSSHFMGTDKMASVFYAIVIPMLNPLVYSLRNKEVKSAFKKTVGKAKASIGFIF

SEQ ID NO: 329 - DNA, 1345 bp, Homo sapiens
  source
  (1)..(1345)
  CDS (201)..(1145)
cagtatgtaactctgtataattaatgcactgcatttggttgtcaaggccgcgctttttctagggaatcttgaagtacaagttattgctacaatgaaggaatacatattgtacttatacttttcaattttaattcaatttatttatcacactgttcttttttgtattgctacaagcatcctgtgagtcccccagagcagtgatggaaaataagacagaagtaacacaattcattcttctaggactaaccaatgactcagaactgcaggttcccctctttataacgttccccttcatctatattatcactctggttggaaacctgggaattattgtattgatattctgggattcctgtctccacaatcccatgtacttttttctcagtaacttgtctctagtggacttttgctactcttcagctgtcactcccatcgtcatggctggattccttatagaagacaaggtcatctcttacaatgcatgtgctgctcaaatgtatatctttgtagcttttgccactgtggaaaattacctcttggcctcaatggcctatgaccgctatgcagcagtgtgcaaacccctacattacaccacaaccatgacaacaactgtgtgtgctcgtctggccataggctcctacctctgtggtttcctgaatgcctccatccacactggggacacatttagtctctctttctgtaagtccaatgaagtccatcactttttctgtgatattccagcagtcatggttctctcttgctctgatagacatattagcgagcttgttcttatttatgttgtgagcttcaatatctttatagctctcctggttatcttgatatcctacacattcatttttatcaccatcctaaagatgcactcagcttcagtataccagaagcctttgtccacctgtgcctctcatttcattgcagtcggcatcttctatgggactattatcttcatgtacttacaacccagctccagtcactccatggacacagacaaaatggcacctgtgttctatacaatggtcatccccatgctgaaccctctggtctatagtctgaggaacaaggaagtgaagagtgcattcaagaaagttgttgagaaggcaaaattgtctgtaggatggtcagtttaacattgtgggatgcaccataacctagttttatttctctcggatcttctccatgttctgaatcacatttaaggtccacaataaagttaaattcctgaagtgattgccatgcctgtttaaaagtctattgtctaaataaaaggaaacattatgtccagaaacataacatctgaacaagaatggctaagacatcttgggacttc

SEQ ID NO: 330 - protein, 314 aa, Homo sapiens
MENKTEVTQFILLGLTNDSELQVPLFITFPFIYIITLVGNLGIIVLIFWDSCLHNPMYFFLSNLSLVDFCYSSAVTPIVMAGFLIEDKVISYNACAAQMYIFVAFATVENYLLASMAYDRYAAVCKPLHYTTTMTTTVCARLAIGSYLCGFLNASIHTGDTFSLSFCKSNEVHHFFCDIPAVMVLSCSDRHISELVLIYVVSFNIFIALLVILISYTFIFITILKMHSASVYQKPLSTCASHFIAVGIFYGTIIFMYLQPSSSHSMDTDKMAPVFYTMVIPMLNPLVYSLRNKEVKSAFKKVVEKAKLSVGWSV

SEQ ID NO: 331 - DNA, 1036 bp, Homo sapiens
  source
  (1)..(1036)
  CDS (201)..(836)
aactaagaagtcagctggagaagtttacaggtacctattcctagagaattttgggaacagaaggaatcatctgtgagatggcagagtaatgaaaaggcaaagttttggactatttgattcttttatgcttcttttttttcatttttttttctaaaggtaaaatattccttcctggaggttttatcacccacactacatagatgaagaataaaaggaatgtgactgaattcgttttaacaggtcttacacagaaccctaaaatggagaaagtcatgtttgcagtatttttggttctttacatgataacactttcaggcaacctgctccttgtggttacaattaccaccagccaggctcttagctcccccatgtacttcttcctgagccacctttctttgatagacacagtttattcttcttcttcagctcctaagttgattgtcgattcccttcatgagaagaaaatcatctcctttaatgggtgtatggctcaagcctatgaagaacacatttttggtgctactgagatcatcctgctgacagtgatggcctgtgacaactatgtggccatctgcaaacctctgcactacacaaccatcatgagccacagcctgtgcattctcctagtggtagtggcctggataggaggatttctccatgcaaatattcagattctatttacagtatggctgcccttctgtggccccaatgtcatagaccacttcatgtgtgacttgtgccctttgttaaaacttgtttgcctggacactcatacccttggtctctttgttgctgccaacagtgggttcatctgcttattaaacttccttctctaggtggtatcctatgtgatcatcttgagatgtttaaagaactatatcttggaggggaggggtaaagccctctccacctgtatttctcacatcataatagttgtcttattctttgtgccttgtatatttgtgtatctgcacccagtgacaaactctgcccattgataaagctgctgctgtattttatactatggtggtcccaa

SEQ ID NO: 332 - protein, 211 aa, Homo sapiens
MKNKRNVTEFVLTGLTQNPKMEKVMFAVFLVLYMITLSGNLLLVVTITTSQALSSPMYFFLSHLSLIDTVYSSSSAPKLIVDSLHEKKIISFNGCMAQAYEEHIFGATEIILLTVMACDNYVAICKPLHYTTIMSHSLCILLVVVAWIGGFLHANIQILFTVWLPFCGPNVIDHFMCDLCPLLKLVCLDTHTLGLFVAANSGFICLLNFLL

SEQ ID NO: 333 - DNA, 1342 bp, Homo sapiens
  source
  (1)..(1342)
  CDS (201)..(1142)
aaatgcaactaatctttggtttcaacagcaattgattggctttaagtcacagtatacttatgaggcaaaaattaataataacattaatttaaaaatagctttgtaaatcctaataccataagagattatttgtaatgctaggatccaaaccaagagttcatttgtatattttgccctgtgcctctcaacaggtttctaccatgggtgacaggggaacaagcaatcactcagaaatgactgacttcattcttgcaggcttcagggtacgcccagagctccacattctcctcttcctgctatttttgtttgtttatgccatgatccttctagggaatgttgggatgatgaccattattatgactgatcctcggctgaacacaccaatgtattttttcctaggcaatctctccttcattgatcttttctattcatctgttattgaacccaaggctatgatcaacttctggtctgaaaacaagtctatctcctttgcaggctgtgtggcccagctctttctctttgccctcctcattgtgactgagggatttctcctggcggccatggcttatgaccgctttattgccatctgcaaccctctgctctactctgttcaaatgtccacacgtctgtgtactcagttggtggctggttcctatttttgtggctgcattagctcagttattcagactagcatgacatttactttatctttttgcgcttctcgggctgttgaccacttttactgtgattctcgcccacttcagagactgtcttgttctgatctctttatccatagaatgatatctttttccttatcatgtattattatcttgcctactatcatagtcattatagtatcttacatgtatattgtgtccacagttctaaagatacattctactgagggacataagaaggccttctccacctgcagctctcacctgggagttgtgagtgtgctgtatggtgctgtcttttttatgtatctcactcctgacagatttcctgagctgagtaaagtggcatccttatgttactccctagtcactcccatgttgaatcctttgatttactctctgaggaacaaagatgtccaagaggctctaaaaaaatttctagagaagaaaaatattattctttgattattatttctctttcaccaattttattgtggctatttatttaatacacctgtgttcattaataaaagttactctcccgaatgtcataaaaatactcttagatgttttcatgtgatgtgctctttccatattttacttttttacctcccaagacatcattaattctgaaaatcttggatattggagatatcctggacatt

SEQ ID NO: 334 - protein, 313 aa, Homo sapiens
MGDRGTSNHSEMTDFILAGFRVRPELHILLFLLFLFVYAMILLGNVGMMTIIMTDPRLNTPMYFFLGNLSFIDLFYSSVIEPKAMINFWSENKSISFAGCVAQLFLFALLIVTEGFLLAAMAYDRFIAICNPLLYSVQMSTRLCTQLVAGSYFCGCISSVIQTSMTFTLSFCASRAVDHFYCDSRPLQRLSCSDLFIHRMISFSLSCIIILPTIIVIIVSYMYIVSTVLKIHSTEGHKKAFSTCSSHLGVVSVLYGAVFFMYLTPDRFPELSKVASLCYSLVTPMLNPLIYSLRNKDVQEALKKFLEKKNIIL

SEQ ID NO: 335 - DNA, 1165 bp, Homo sapiens
  source
  (1)..(1165)
  CDS (201)..(965)
ccaaaaggacatgacaacacaaatttcaatatcctccacaactaaaaaaacggatattttatcatcccgagaaataggcagaaagttcaatttttaaccttgtcttttaccttttaataggttcttgccatgggtgaaaagggaacaggcagaaagttcaatttttaaccttgtctcataccttttaacaggttcttgccatgggtgacaagggaacaggcaaccattcagatgtaactgatttcattcttgaaggcttcagggtccgcccagagttctacattctcctcttcttcctgttcctgctgatctatagcatggttcttttggggaacattagtgtgatgacaatcattgtaactgattcccagctgaacacaccaatgtatttttttctaggcaacctctccttcattgacgtctcctactccactgttattgctcctaaagccatggcccacttcctgtctgaaaaaaagacagtctcttttgcaggttgtgttgcccagttattcctttttgccctgttcattgtaacagaggggtttgtcctggcagccatggcctatgaccgcttcagtgccatctgcaatcctcttcttcatagtgttcacatgtcaagacgcctctgcactcagttggttgctggttcttatttctgtggctgggccagttccatcctccaagtcagtgtaacattctcagtgtccttctgtgcttccagagtcattgctcacttctactgtgattcttatcaaattgaaaagatttcctgttctaatctctttgtcaataagatggtatctctgagtttgagtgtcatcattattttgcctacaattgttgttattatagtatcttacctgtatattgtatcctcagtcttgaagatcccctccagtgaagggagaaagaaagacttttccacttgcagctcccatctgggtgttgtaagtttgctctaagggactgtttcctttgtgtacctcacacctccaagcaatcctgaacttcgcaaagtggcttcagtattttacatattggttacacccatgttaaaccctctgatctactctctaagaaacaaagatgtcaaagaagctttgagaaaaatcctgtgtaacaaaaaagctttatcctaattctacttccttatgatttcctc

SEQ ID NO: 336 - protein, 254 aa, Homo sapiens
MGDKGTGNHSDVTDFILEGFRVRPEFYILLFFLFLLIYSMVLLGNISVMTIIVTDSQLNTPMYFFLGNLSFIDVSYSTVIAPKAMAHFLSEKKTVSFAGCVAQLFLFALFIVTEGFVLAAMAYDRFSAICNPLLHSVHMSRRLCTQLVAGSYFCGWASSILQVSVTFSVSFCASRVIAHFYCDSYQIEKISCSNLFVNKMVSLSLSVIIILPTIVVIIVSYLYIVSSVLKIPSSEGRKKDFSTCSSHLGVVSLL

SEQ ID NO: 337 - DNA, 1351 bp, Homo sapiens
  source
  (1)..(1351)
  CDS (201)..(1151)
agatttatacagaatgtttatttttccttaattttatcttatcataaacatcatttctgcttcagagaaacagaatggtaagacaactgagaataaagatgttttatggatgttattattatttttgagattacctctatattgatttaataccctttgatgcacatactttgatttttagagagaaactcatctaagatatgatctgtgaaaatcacaccagagtcactgaatttattcttcttggttttacaaacaaccccgagatgcaagtttccctctttatttttttcctggccatttatacagtcactttgttgggcaactttcttattgtcacagttaccagtgtggatctcgcacttcaaacacccatgtacttctttcttcaaaatctgtcacttcttgaagtatgtttcaccttggttatggtgccaaaaatgcttgtagatctagtgtccccaaggaaaattatctcttttgtgggctgtggtacccagatgtacttcttcttcttctttggcagttctgaatgtttccttctctccatgatggcttatgatcgctttgtggccatctgtaaccctctccattattcagtcataatgaacaggtccctatgcttgtggatggccataggctcttggatgtccggtgttcctgtgtctatgctacagacagcttggatgatggcccttcctttctgtggaccaaatgccgtggaccactttttctgtgatggtcccccagtgttaaaactagtcacagtggatacaaccatgtatgaaatgcaagcacttgcctccacactcctgtttatcatgtttcccttttgtctcattttggtttcctacacccgcattatcataacaattctgaggatgtcctctgccactggccgccagaaggcattttctacttgttcctcacacctcattgtggtgtccctcttctacggaacagccagtctgacctacctgcggcccaaatcaaaccagtcccctgagagcaagaagctagtgtcattgtcctacactgtcatcacacctatgctaaaccccatcatctacggcctgaggaacaatgaagtgaaaggggctgtcaagaggacaatcactcaaaaagtcttacagaagttagatgtgttttgacttctattgtgtaagaatgcttccaaagtagggacagcagaacctactaaccaaagcttaaaacggaatggaagagttgctcttatttcatcactaactggtgggtgcatttctgtgtatcattcaggttcctagcaggaaagagatggtactcctgaattgggataagtgagaaaacgctttatgagagggctatttag

SEQ ID NO: 338 - protein, 316 aa, Homo sapiens
MICENHTRVTEFILLGFTNNPEMQVSLFIFFLAIYTVTLLGNFLIVTVTSVDLALQTPMYFFLQNLSLLEVCFTLVMVPKMLVDLVSPRKIISFVGCGTQMYFFFFFGSSECFLLSMMAYDRFVAICNPLHYSVIMNRSLCLWMAIGSWMSGVPVSMLQTAWMMALPFCGPNAVDHFFCDGPPVLKLVTVDTTMYEMQALASTLLFIMFPFCLILVSYTRIIITILRMSSATGRQKAFSTCSSHLIVVSLFYGTASLTYLRPKSNQSPESKKLVSLSYTVITPMLNPIIYGLRNNEVKGAVKRTITQKVLQKLDVF

SEQ ID NO: 339 - DNA, 1342 bp, Homo sapiens
  source
  (1)..(1342)
  CDS (201)..(1142)
ctgccactttctagatattacctcagacacattatttaatctctctgagacccatggctcattcagagaaaggtattaattctctcacttgattttgagaggaactgtgtggcaagtgctttaccaaattacagaaatgttgcttgttatttctaaataacttctcttcttggctgtgcctcagcttctggcctggagtgatggctggggaaaaccatactacactgcctgaattcctccttctgggattctctgacctcaaggccctgcagggccccctgttctgggtggtgcttctggtctacctggtcaccttgctgggtaactccctgatcatcctcctcacacaggtcagccctgccctgcactcccccatgtacttcttcctgcgccaactctcagtggtggagctcttctacaccactgacatcgtgcccaggaccctggccaatctgggctccccgcatccccaggccatctctttccagggctgtgcagcccagatgtacgtcttcattgtcctgggcatctcggagtgctgcctgctcacggccatggcctatgaccgatatgttgccatctgccagcccctacgctattccaccctcttgagcccacgggcctgcatggccatggtgggtacctcctggctcacaggcatcatcacggccaccacccatgcctccctcatcttctctctaccttttcgcagccacccgatcatcccgcactttctctgtgacatcctgccagtactgaggctggcaagtgctgggaagcacaggagcgagatctccgtgatgacagccaccatagtcttcattatgatccccttctctctgattgtcacctcttacatccgcatcctgggtgccatcctagcaatggcctccacccagagccgccgcaaggtcttctccacctgctcctcccatctgctcgtggtctctctcttctttggaacagccagcatcacctacatccggccgcaggcaggctcctctgttaccacagaccgcgtcctcagtctcttctacacagtcatcacacccatgctcaaccccatcatctacacccttcggaacaaggacgtgaggagggccctgcgacacttggtgaagaggcagcgcccctcaccctgaagggactcggatgtctgctcactcactcagtgctcatcctcccactcttcagggactggatttaaaccccactctcacagaaatcatgcagcacctcaaaggaaaaggcttcctggaagaaagtgctgaaattaaaacagagataaatctacatattgcctcttatcccagagtccacactcactatcagagcatgggtt

SEQ ID NO: 340 - protein, 313 aa, Homo sapiens
MAGENHTTLPEFLLLGFSDLKALQGPLFWVVLLVYLVTLLGNSLIILLTQVSPALHSPMYFFLRQLSVVELFYTTDIVPRTLANLGSPHPQAISFQGCAAQMYVFIVLGISECCLLTAMAYDRYVAICQPLRYSTLLSPRACMAMVGTSWLTGIITATTHASLIFSLPFRSHPIIPHFLCDILPVLRLASAGKHRSEISVMTATIVFIMIPFSLIVTSYIRILGAILAMASTQSRRKVFSTCSSHLLVVSLFFGTASITYIRPQAGSSVTTDRVLSLFYTVITPMLNPIIYTLRNKDVRRALRHLVKRQRPSP

SEQ ID NO: 341 - DNA, 1330 bp, Homo sapiens
  source
  (1)..(1330)
  CDS (201)..(1130)
aaaggtcacttaaacaaaagatatggggcttgcatggagccaagtgcaccccaatgggacactggtttgggccatatggatggtgagcaatgtatgacctgattctgttcattaagataagctttatgtctcctactctaagaaactcttcaattttcatcattctcaccttttgcctttaggttttccgaaggtcaacaatgaaaaacagaaccatgtttggtgagtttattctactgggccttacaaatcaacctgaactccaagtgatgatattcatctttctgttcctcacctacatgctaagtatcctaggaaatctgactattatcaccctcaccttactagacccccacctccagacccccatgtatttcttcctccggaatttctccttcttagaaatttccttcacatccatttttattcccagatttctgaccagcatgacaacaggaaataaagttatcagctttgctggctgcttgactcagtatttttttgctatatttcttggagctaccgagttttacctcctggcctccatgtcttatgatcgttatgtggccatctgcaaacccttgcattacctgactattatgagcagcagagtctgcatacaactagtgttctgctcctggttggggggattcctagcaatcttaccaccaatcatcctgatgacccaggtagatttctgtgtctccaacattctgaatcactattactgtgactatgggcctctcgtggagcttgcctgctcagacacaagcctcttagaactgatggtcatcctcttggccgttgtgactctcatggttactctggtgctggtgacactttcttacacatacattatcaggactattctgaggatcccttctgcccagcaaaggacaaaggccttttccacttgttcctcccacatgattgtcatctccctctcttatggcagctgcatgtttatgtacattaatccttctgcaaaagaaggaggtgctttcaacaaaggaatagctgtactcattacttcggttactcccttactgaatcccttcatatatactttaagaaatcagcaagtgaaacaagctttcaaggactcagtcaaaaagattgtgaaactttaaaaaaggagattacacttcaaaatacattttcacttaacaaatatgcattgaatgtctatatttcaagtgctaaattggcccttgaagattaaaataggaaaagtatatgtcttaatttcaagaaaactatagtctagaatcaaggaaagatatataaatggtaaatttatgtaataaatttacaaaaaacaaaataatat

SEQ ID NO: 342 - protein, 309 aa, Homo sapiens
MKNRTMFGEFILLGLTNQPELQVMIFIFLFLTYMLSILGNLTIITLTLLDPHLQTPMYFFLRNFSFLEISFTSIFIPRFLTSMTTGNKVISFAGCLTQYFFAIFLGATEFYLLASMSYDRYVAICKPLHYLTIMSSRVCIQLVFCSWLGGFLAILPPIILMTQVDFCVSNILNHYYCDYGPLVELACSDTSLLELMVILLAVVTLMVTLVLVTLSYTYIIRTILRIPSAQQRTKAFSTCSSHMIVISLSYGSCMFMYINPSAKEGGAFNKGIAVLITSVTPLLNPFIYTLRNQQVKQAFKDSVKKIVKL

SEQ ID NO: 343 - DNA, 1243 bp, Homo sapiens
  source
  (1)..(1243)
  CDS (201)..(1043)
ttttttaattgatcattcttgggtgtttctcgtggagggggatttggcagggtcataggacaatagtggagggaaggtcagcagataaacaagtgaacaaaggtctctggttttcctaggcagaggagctccttggattttcttatctccatgagttccaggttctgctgtttgctctgatcctgttgatatatgtgctgatgctgctgggcaacctggccatcatcagcttcatttgccttgattcccgccttcactcacccatgtacttcttcctctgcaacttctccctcatggagatggtggtcacctccactgtggtacataggatgctggcagacctgctatccactcacaagaccatgtccctggccaaatgcctaacccagtctttcttttacttctccctgggctctgccaacttcctgatactcatggtcatggcctttgatcgctacgtggccatctgccaccccctgcgctacccaaccatcacgaatggtccagtgtgtgtgaagctggtggtggcctgttgggtggttggtttcctctccattgtctctcccacactgcagaaaacacgactctggttctgtggccctaacatcatcggccactacttctgtgactctgccccgctgctcaagcttgcctgctctgacacccgccacattgagcgcatggacctcttcctgtccctgctctttgtgctgaccaccatgctgcttatcatcctctcctacatcctcattgtggctgcagtgctgcacatcccttcctcctctggatgccagaaggccttctccacctgtgcctctcacctcacagtggtggttctgggctatggcagtgccatcttcatctacgtgaggccaggcaagggccactccacatacctcaacaaggcggtggccatggtgactgcaatggtaacccctttcctcaaccccttcatcttcaccttccggaatgagaaggtcaaggaggtcattgaggatgtgactaaaaggatcttccttggagacccagcagcctgtaggtgagagggtgagcccttgacagggctagagagcacctgacaagtcacgaggagtagacttgctgcaggtgggcacccacatgcctaagctggagctcctcactctcttttttctcattttctcctggtccctcatcttcatgcaagtttcttctcctgcactgcagagaactaatggacacacattggtagaatgtctcaaag

SEQ ID NO: 344 - protein, 280 aa, Homo sapiens
MLLGNLAIISFICLDSRLHSPMYFFLCNFSLMEMVVTSTVVHRMLADLLSTHKTMSLAKCLTQSFFYFSLGSANFLILMVMAFDRYVAICHPLRYPTITNGPVCVKLVVACWVVGFLSIVSPTLQKTRLWFCGPNIIGHYFCDSAPLLKLACSDTRHIERMDLFLSLLFVLTTMLLIILSYILIVAAVLHIPSSSGCQKAFSTCASHLTVVVLGYGSAIFIYVRPGKGHSTYLNKAVAMVTAMVTPFLNPFIFTFRNEKVKEVIEDVTKRIFLGDPAACR

SEQ ID NO: 345 - DNA, 1051 bp, Homo sapiens
  source
  (1)..(1051)
  CDS (201)..(851)
aattgcttgcatccaaaatatacacacagcattaagggctggtttttatcttttattttcccaatcctctttccttctcaaggtgtccaagacacacagagccactgaatctcacaggtgtctgagaattcctcctcctgggactctcagaggatccagaactgcagccggtcctcgctttgctctccctgtccctgtccatgtatctggtcacggtgctgaggaacctgctcagcatcctggctgtcagctctgactcccacctccacacccccatgtacttcttcctctccaacctgtgctgggctgacatcggttacacctcggccacggttcccaagatgattgtggacacgcagtcgcatggcagagtcatctctcatgctggctgcctgacacagatgtctttcttggtcctttttgcatgtatagaagacatgctcctgactgtgatggcctatgactgctttgtagccatctgttgccctctgcactacccagtcatcgtgaatcctcacctctgtgtcttcttcgttttggtgtcctttttccttagcctgttggattcccagctgcacagttggattgtgttacaattcaccatcatcaagaatgtggaaatctctaattttgtctgtgacccctctcaacttctcaaacttgcctgttctgacagcgtcatcaatagcatattcatatattttgatagtactatgtttggttttcttcccatttcagggatccttttgtcttactctaaaattgtcccctccgttctaaggatgtcatcgtcagatgggaagtataaagccttctccacctgtggctctcacctagcagttgtttgctgatttgatggaacaggcattggcatgtacctgacttcagctgtggcaccaccccccaggaatggtgtcgtggagtcagggatgtacgctgtggtcacccccatgctgaaccttttcatctacagcctgagaaacaggcacacacaaagtgccctgcggaggctgcgcagcagaacagttgaatctcatgatctcttgcatcc

SEQ ID NO: 346 - protein, 216 aa, Homo sapiens
MYLVTVLRNLLSILAVSSDSHLHTPMYFFLSNLCWADIGYTSATVPKMIVDTQSHGRVISHAGCLTQMSFLVLFACIEDMLLTVMAYDCFVAICCPLHYPVIVNPHLCVFFVLVSFFLSLLDSQLHSWIVLQFTIIKNVEISNFVCDPSQLLKLACSDSVINSIFIYFDSTMFGFLPISGILLSYSKIVPSVLRMSSSDGKYKAFSTCGSHLAVVC

SEQ ID NO: 347 - DNA, 1336 bp, Homo sapiens
  source
  (1)..(1336)
  CDS (201)..(1136)
actttcatagcagtcatggatgttaaatattagtcaactgagtatttacatacgtaaatatatgtaacctaattaaattgactatttcttttgtttagaattgactatatttcttttgtttataaactagaggtattgtaatgccaatcattgtgacatttttctgatttcttttttttaggtaactgaatattggatacatggctcacacaaatgaatcgatggtgtctgagtttgtacttttgggactctctaattcctggggacttcaacttttctttttcgccatcttctctatagtctatgtgacatcagtgctaggcaatgtcttaattattgtcattatttcttttgactcccatttgaactctcctatgtacttcttgctcagtaatctttctttcattgatatctgtcagtctaactttgccacccccaagatgcttgtagacttttttattgagcgcaagactatctcctttgagggttgcatggcccagatattcgttcttcacagttttgttgggagtgagatgatgttgcttgtagctatggcatatgacagatttatagccatatgtaagcctctgcactacagtacaattatgaaccggaggctctgtgtaatttttgtgtctatttcctgggcggtgggcgttcttcattctgtgagccacttggcttttacagtggacctgccattctgtggtcccaatgaggtggatagcttcttttgtgaccttcccttggtgatagagctggcttgcatggatacatatgaaatggaaattatgaccctaacgaacagtggcctgatatcattgagctgtttcctggctttaattatttcctacaccatcattttgatcggtgtccgatgcaggtcctccagtgggtcatctaaggctctttctacattaactgcccacatcacagtggtcattcttttcttcgggccttgcatttatttctatatatggccttttagcagacttcctgtggacaaatttctttctgtgttctacactgtttgtactcccttgttgaaccccatcatctactctttgaggaatgaagatgttaaagcagccatgtggaagctgagaaaccatcatgtgaactcctggaaaaactagggatcgttacgaaggagcataatcctgaattagaatgaagaccctccagtgtatcatagtgtcatgccaaccatctttgccagacatatgggttattgagttacagaattggttttttgttttaagtgcaagggaattgcatcaagtcagtctctggttctatttaaatataatgttaactattttttcattgtttataa

SEQ ID NO: 348 - protein, 311 aa, Homo sapiens
MAHTNESMVSEFVLLGLSNSWGLQLFFFAIFSIVYVTSVLGNVLIIVIISFDSHLNSPMYFLLSNLSFIDICQSNFATPKMLVDFFIERKTISFEGCMAQIFVLHSFVGSEMMLLVAMAYDRFIAICKPLHYSTIMNRRLCVIFVSISWAVGVLHSVSHLAFTVDLPFCGPNEVDSFFCDLPLVIELACMDTYEMEIMTLTNSGLISLSCFLALIISYTIILIGVRCRSSSGSSKALSTLTAHITVVILFFGPCIYFYIWPFSRLPVDKFLSVFYTVCTPLLNPIIYSLRNEDVKAAMWKLRNHHVNSWKN

SEQ ID NO: 349 - DNA, 1339 bp, Homo sapiens
  source
  (1)..(1339)
  CDS (201)..(1139)
aattactgcagagtaattgtttcaaagtgatataatatttaagctaatctctgtgttgatatatttaaaattatatgatctcatatcatcaactattatcaccaactaatagaaataagaaaatattggtgttaactgtgacttattttttaattctctttgtatataaagaacttctggaacctttctgagttgagtaaatggatcttaaaaatggatctctagtgaccgagtttattttactaggattttttggacgatgggaacttcaaattttcttctttgtgacattttccctgatctacggtgctactgtgatgggaaacattctcattatggtcacagtgacatgtaggtcaacccttcattctcccttgtactttctccttggaaatctctcttttttggacatgtgtctctccactgccacaacacccaagatgatcatagatttgctcactgaccacaagaccatctctgtgtggggctgcgtgacccagatgttcttcatgcacttctttgggggtgctgagatgactcttctgataatcatggcctttgacaggtatgtagccatatgtaaacccctgcactataggacaatcatgagccacaagctgctaaaggggtttgcgatactttcatggataattggttttttacactccataagccagatagttttaacaatgaacttgcctttctgtggccacaatgtcataaacaacatattttgtgatcttccccttgtgatcaagcttgcttgcattgaaacatacaccctggaattatttgtcattgctgacagcgggctgctctctttcacctgtttcatcctcttgcttgtttcttacattgtcatcctggtcagtgtaccaaaaaaatcatcacatgggctctccaaggcgctgtccacattgtctgcccacatcattgtggtcactctgttctttggaccttgtatttttatctatgtttggccattcagtagtttggcaagcaataaaactcttgccgtattttatacagttatcacacccttactgaatccgagtatttataccctgagaaataagaaaatgcaagaggccataagaaaattacggttccaatatgttagttctgcacagaatttctagatgttagcactatataattaacttttaaatgctacgataagatagtttgaatagattatgtataatgcatcatttcacttttcttatgttataataataacgcataaagacaatactaaattactttaaattttacatttaagacttttataaacataaggatagagatctgcagcaaaatagacataaaaatagacata

SEQ ID NO: 350 - protein, 312 aa, Homo sapiens
MDLKNGSLVTEFILLGFFGRWELQIFFFVTFSLIYGATVMGNILIMVTVTCRSTLHSPLYFLLGNLSFLDMCLSTATTPKMIIDLLTDHKTISVWGCVTQMFFMHFFGGAEMTLLIIMAFDRYVAICKPLHYRTIMSHKLLKGFAILSWIIGFLHSISQIVLTMNLPFCGHNVINNIFCDLPLVIKLACIETYTLELFVIADSGLLSFTCFILLLVSYIVILVSVPKKSSHGLSKALSTLSAHIIVVTLFFGPCIFIYVWPFSSLASNKTLAVFYTVITPLLNPSIYTLRNKKMQEAIRKLRFQYVSSAQNF

SEQ ID NO: 351 - DNA, 1315 bp, Homo sapiens
  source
  (1)..(1315)
  CDS (201)..(1115)
gactatttgggatacttctctgggccattagtaaaatcactgactgacaaaattccacaaaagtaagggtccttgtaagttcaagtgccttgactgagtaccaaatgtggacatcaacatgaacatttctttccaatatgcatcatttccctaccccttattctcacttattttgatcattatgggataaagttgacgatatggaaagagcaaaccattcagtggtatcggaatttattttgttgggactttccaaatctcaaaatcttcagattttattcttcttgggattctctgtggtcttcgtggggattgtgttaggaaacctgctcatcttggtgactgtgacctttgattcgctccttcacacaccaatgtattttctgcttagcaacctctcctgcattgatatgatcctggcttcttttgctacccctaagatgattgtagatttcctccgagaacgtaagaccatctcatggtggggatgttattcccagatgttctttatgcacctcctgggtgggagtgagatgatgttgcttgtagccatggcaatagacaggtatgttgccatatgcaaacccctccattacatgaccatcatgagcccacgggtgctcactgggctactgttatcctcctatgcagttggatttgtgcactcatctagtcaaatggctttcatgttgactttgcccttctgtggtcccaatgttatagacagctttttctgtgaccttccccttgtgattaaacttgcctgcaaggacacctacatcctacagctcctggtcattgctgacagtgggctcctgtcactggtctgcttcctcctcttgcttgtctcctatggagtcataatattctcagttaggtaccgtgctgctagtcgatcctctaaggctttctccactctctcagctcacatcacagttgtgactctgttctttgctccgtgtgtctttatctacgtctggcccttcagcagatactcggtagataaaattctttctgtgttttacacaattttcacacctctcttaaatcctattatttatacattaagaaatcaagaggtaaaagcagccattaaaaaaagactctgcatataaatttaaagcatactttttagatgagacttttgaagagacactctcttgtttgtttgaacatttaagaaactcgtttttaatgtatcaggttcgtgcaaaagtcattgcggtttttgccattaaagtaaatgacaaaattaaagtaatggcaaaaaccactataacttgtgtaccagctaacagttcaagttccatatgag

SEQ ID NO: 352 - protein, 304 aa, Homo sapiens
MERANHSVVSEFILLGLSKSQNLQILFFLGFSVVFVGIVLGNLLILVTVTFDSLLHTPMYFLLSNLSCIDMILASFATPKMIVDFLRERKTISWWGCYSQMFFMHLLGGSEMMLLVAMAIDRYVAICKPLHYMTIMSPRVLTGLLLSSYAVGFVHSSSQMAFMLTLPFCGPNVIDSFFCDLPLVIKLACKDTYILQLLVIADSGLLSLVCFLLLLVSYGVIIFSVRYRAASRSSKAFSTLSAHITVVTLFFAPCVFIYVWPFSRYSVDKILSVFYTIFTPLLNPIIYTLRNQEVKAAIKKRLCI

SEQ ID NO: 353 - DNA, 1375 bp, Homo sapiens
  source
  (1)..(1375)
  CDS (201)..(1175)
taacgcaatcttccatacttagctgtactagctgtataacttgtaataactcatgaaaacccagacacatacatagcaataggaattggaattctgaaaagtttaagtgtaattggaaaatcaaacccatgctcacttcattaactgatctctgtttctctcctattcaggtagctgaaattaagtcccttccaaaatcgatgaatgagacaaatcattctcgggtgacagaatttgtgttgctgggactgtctagttcaagggagctccaacctttcttgtttcttacattttcactactttatctagcaattctgttgggcaactttctcatcatcctcactgtgacctcagattcccgccttcacacccccatgtactttctgcttgcaaacctgtcatttatagacgtatgtgttgcctcttttgctacccctaaaatgattgcagactttctggttgagcgcaagactatttcttttgatgcctgcctggcccagattttctttgttcatctcttcactggcagtgaaatggtgctcctagtttccatggcctatgaccgttatgttgctatatgcaaacctctccactacatgacagtcatgagccgtcgtgtatgtgttgtgctcgtcctcatttcatggtttgtgggcttcatccatactaccagccagttggcattcactgttaatctgccattttgtggtcctaataaggtagacagttttttctgtgaccttcctctagtgaccaagttagcctgcatagacacttatgttgtcagcttactaatagttgcagatagtggctttctttctctgagttcctttctcctcttggttgtctcctacactgtaatacttgttacagttaggaatcgctcctctgcaagcatggcgaaggcccgctccacattgactgctcacatcactgtggtcactttattctttggaccatgcattttcatctatgtgtggcccttcagcagttactcagttgacaaagtccttgctgtattctacaccatcttcacgcttattttaaaccctgtaatctacacgctaagaaacaaagaagtgaaggcagctatgtcaaaactgaagagtcggtatctgaagcctagtcaggtttctgtagtcataagaaatgttcttttcctagaaacaaagtaaacttatgagactgttaccactttagccctgtctccatacacttacaagtggattcactgtaatcttaaagcaaatcaacttggcctgtgggaaagctcagttgatcgatttgaagcaaactgtaatgataataaaaactcatgaaataaactttagtgattttaaatattctttctccattgtatattttttaatatcct

SEQ ID NO: 354 - protein, 324 aa, Homo sapiens
MNETNHSRVTEFVLLGLSSSRELQPFLFLTFSLLYLAILLGNFLIILTVTSDSRLHTPMYFLLANLSFIDVCVASFATPKMIADFLVERKTISFDACLAQIFFVHLFTGSEMVLLVSMAYDRYVAICKPLHYMTVMSRRVCVVLVLISWFVGFIHTTSQLAFTVNLPFCGPNKVDSFFCDLPLVTKLACIDTYVVSLLIVADSGFLSLSSFLLLVVSYTVILVTVRNRSSASMAKARSTLTAHITVVTLFFGPCIFIYVWPFSSYSVDKVLAVFYTIFTLILNPVIYTLRNKEVKAAMSKLKSRYLKPSQVSVVIRNVLFLETK

SEQ ID NO: 355 - DNA, 1336 bp, Homo sapiens
  source
  (1)..(1336)
  CDS (201)..(1136)
actttcatagcagtcatggatgttaaatattagtcaactgagtatttacatacgtaaatatatgtaacctaattaaattgactatttcttttgtttagaattgactatatttcttttgtttataaactagaggtattgtaatgccaatcattgtgacatttttctgatttcttttttttaggtaactgaatattggatacatggctcacacaaatgaatcgatggtgtctgagtttgtacttttgggactctctaattcctggggacttcaacttttcttttttgccatcttctctatagtctatgtgacatcagtgctaggcaatgtcttaattattgtcattatttcttttgactcccatttgaactctcctatgtacttcttgctcagtaatctttctttcattgatatctgtcagtctaactttgccacccccaagatgcttgtagacttttttattgagcgcaagactatctcctttgagggttgcatggcccagatattcgttcttcacagttttgttgggagtgagatgatgttgcttgtagctatggcatatgacagatttatagccatatgtaagcctctgcactacagtacaattatgaaccggaggctctgtgtaatttttgtgtctatttcctgggcggtgggcgttcttcattctgtgagccacttggcttttacagtggacctgccattctgtggtcccaatgaggtggatagcttcttttgtgaccttcccttggtgatagagctggcttgcatggatacatatgaaatggaaattatgaccctaacgaacagtggcctgatatcattgagctgtttcctggctttaattatttcctacaccatcattttgatcggtgtccgatgcaggtcctccagtgggtcatctaaggctctttctacattaactgcccacatcacagtggtcattcttttcttcgggccttgcatttatttctatatatggccttttagcagacttcctgtggacaaatttctttctgtgttctacactgtttgtactcccttgttgaaccccatcatctactctctgaggaatgaagatgttaaagcagccatgtggaagctgagaaaccgtcatgtgaactcctggaaaaactagggatcattacgaaggagcataatcctgaattagaatgaagaccctccagtgtatcatagtgtcatgccaaccatctttgccagacatatgggttattgagttacagaattggctttttgttttaagtgcaagggaattgcatcaagtcagtctctggttctatttaaatataatgttaactattttttcattgtttataa

SEQ ID NO: 356 - protein, 311 aa, Homo sapiens
MAHTNESMVSEFVLLGLSNSWGLQLFFFAIFSIVYVTSVLGNVLIIVIISFDSHLNSPMYFLLSNLSFIDICQSNFATPKMLVDFFIERKTISFEGCMAQIFVLHSFVGSEMMLLVAMAYDRFIAICKPLHYSTIMNRRLCVIFVSISWAVGVLHSVSHLAFTVDLPFCGPNEVDSFFCDLPLVIELACMDTYEMEIMTLTNSGLISLSCFLALIISYTIILIGVRCRSSSGSSKALSTLTAHITVVILFFGPCIYFYIWPFSRLPVDKFLSVFYTVCTPLLNPIIYSLRNEDVKAAMWKLRNRHVNSWKN

SEQ ID NO: 357 - DNA, 1372 bp, Homo sapiens
  source
  (1)..(1372)
  CDS (201)..(1172)
atttacataagttctttcctattatccacctatccagacatactattatggcctcttcaaaatttttgcattcagcaaatgcacattatatctgagatctcagaatccctcaccttaaaagtattcttaattcaaattctgattcctttctatttatcctcctttagagttgtttcagaacaagtttgcagcttggaaccatggataagtccaattcttcagtggtgtctgaatttgtactgttgggactctgtagttctcaaaaactccagcttttctatttttgtttcttctctgtgttgtatacagtcattgtgctgggaaatcttctcattatcctcacagtgacttctgataccagcctgcactcccctatgtactttctcttgggaaacctttcctttgttgacatttgtcaggcttcttttgctacccctaaaatgattgcagattttctgagtgcacacgagaccatatctttcagtggctgcatagcccaaattttctttattcacctttttactggaggggagatggtgctacttgtttcgatggcctatgacaggtatgtagccatatgcaaacccttatactatgtggtcatcatgagccgaaggacatgcactgtcttggtaatgatctcctgggctgtgagcttggtgcacacattaagccagttatcatttactgtgaacctgcctttttgtggacctaatgtagtagacagctttttttgtgatcttcctcgagtcaccaaacttgcctgcctggactcttacatcattgaaatactaattgtggtcaatagtggaattctttccctaagcactttctctctcttggtcagctcctacatcattattcttgttacagtttggctcaagtcttcagctgcaatggcaaaggcattttctacgctggcttcccatattgcagtagtaatattattctttggaccttgcatcttcatctatgtgtggccctttaccatctctcctttggataaatttcttgccatattttacactgttttcacccccgtcctaaaccccattatttatacactaaggaatagggatatgaaggctgccgtaaggaaaattgtgaaccattacctgaggccaaggagaatttctgaaatgtcactagtagtgagaacttcctttcattaagacaaaactccttcaaattcctcaggtcaatacactgtttaatattttaatgtatttttgtggtgtatctcaattgtggggaaagtagtgaagaagataatatagagaacatttaatgaatattaacaagtctttttctaggtatcaagtgaaagttaaatataaaaacatggaaaaatctctgtttagattactggttc

SEQ ID NO: 358 - protein, 323 aa, Homo sapiens
MDKSNSSVVSEFVLLGLCSSQKLQLFYFCFFSVLYTVIVLGNLLIILTVTSDTSLHSPMYFLLGNLSFVDICQASFATPKMIADFLSAHETISFSGCIAQIFFIHLFTGGEMVLLVSMAYDRYVAICKPLYYVVIMSRRTCTVLVMISWAVSLVHTLSQLSFTVNLPFCGPNVVDSFFCDLPRVTKLACLDSYIIEILIVVNSGILSLSTFSLLVSSYIIILVTVWLKSSAAMAKAFSTLASHIAVVILFFGPCIFIYVWPFTISPLDKFLAIFYTVFTPVLNPIIYTLRNRDMKAAVRKIVNHYLRPRRISEMSLVVRTSFH

SEQ ID NO: 359 - DNA, 1345 bp, Homo sapiens
  source
  (1)..(1345)
  CDS (201)..(1145)
ctctaatatttcataatttccattcaaaacaatataccaaatgagaaggatggaaagaatagtcaaggtaagttttatgagaagataaaatttctgaaagtagataattggaaatgaatcttttgcttctattgaatctgactttccttttttttttttttttttttcgtgatacaggcttctgcctatgaatcaagacaatggatgtgggcaataagtctaccatgtctgaatttgttttgctggggctctctaattcctgggaactacagatgtttttctttatggtgttttcattgctttatgtggcaacaatggtgggtaacagcctcatagtcatcacagttatagtggaccctcacctacactctcctatgtatttcctgcttaccaatctttcaatcattgatatgtctcttgcttctttcgccaccccaaagatgattacagattacctaacaggtcacaaaaccatctcttttgatggctgccttacccagatattctttctccaccttttcactggaactgagatcatcttactcatggccatgtcctttgataggtatattgcaatatgcaagcccctgcactatgcttctgtcattagtccccaggtgtgtgttgctctcgtggtggcttcctggattatgggagttatgcattcaatgagtcaggtcatatttgccctcacgttaccattctgtggtccctatgaggtagacagctttttctgtgaccttcctgtggtgttccagttggcttgtgtggatacttatgttctgggcctctttatgatctcaacaagtggcataattgcgttgtcctgttttattgttttatttaattcatatgttattgtcctggttactgtgaagcatcattcttccagaggatcatctaaggccctttctacttgtacagctcatttcattgttgtcttcttgttctttgggccatgcatcttcatctacatgtggccactaagcagctttctcacagacaagattctgtctgtgttttataccatctttactcccactctgaacccaataatctatactttgaggaatcaagaagtaaagatagccatgaggaaactgaaaaataggtttctaaattttaataaggcaatgccttcatagtttttgtgacacagaacattagacacaatgctgtgttaggcttttctttctagagggttcttaccaaattgtaattgccaagaatttgtgagggctcaagttcagtgcattttgaaactattctcatgaatgtgaatgtgttcaaaatacatttgaaatttcagaaaagcaagttaaaagaaataaagactataaaaatg

SEQ ID NO: 360 - protein, 314 aa, Homo sapiens
MDVGNKSTMSEFVLLGLSNSWELQMFFFMVFSLLYVATMVGNSLIVITVIVDPHLHSPMYFLLTNLSIIDMSLASFATPKMITDYLTGHKTISFDGCLTQIFFLHLFTGTEIILLMAMSFDRYIAICKPLHYASVISPQVCVALVVASWIMGVMHSMSQVIFALTLPFCGPYEVDSFFCDLPVVFQLACVDTYVLGLFMISTSGIIALSCFIVLFNSYVIVLVTVKHHSSRGSSKALSTCTAHFIVVFLFFGPCIFIYMWPLSSFLTDKILSVFYTIFTPTLNPIIYTLRNQEVKIAMRKLKNRFLNFNKAMPS

SEQ ID NO: 361 - DNA, 1324 bp, Homo sapiens
  source
  (1)..(1324)
  CDS (201)..(1124)
attgtgttttcatttttcattttaaatttggagaaattaaggtaatggagtttccccagaataggagagggatgggaaatgttgtttttagctgaagtactgcatgtgccaaatattttttagctgtataactagtatctagttggaagacatagtaataacaattaattctgcttcttaatgtactgcaggccagggaaatggaaagcgagaacagaacagtgataagagaattcatcctccttggtctgacccagtctcaagatattcagctcctggtctttgtgctagttttaatattctacttcatcatcctccctggaaattttctcattattttcaccataaagtcagaccctgggctcacagcccccctctatttctttctgggcaacttggccttcctggatgcatcctactccttcattgtggctccccggatgttggtggacttcctctctgcgaagaagataatctcctacagaggctgcatcactcagctctttttcttgcacttccttggaggaggggagggattactccttgttgtgatggcctttgaccgctacatcgccatctgccggcctctgcactatcctactgtcatgaaccctagaacctgctatgcaatgatgttggctctgtggcttgggggttttgtccactccattatccaggtggtcctcatcctccgcttgcctttttgtggcccaaaccagctggacaacttcttctgtgatgtcccacaggtcatcaagctggcctgcaccgacacatttgtggtggagcttctgatggtcttcaacagtggcctgatgacactcctgtgctttctggggcttctggcctcctatgcagtcattctttgtcgcatacgagggtcttcttctgaggcaaaaaacaaggccatgtccacgtgcatcacccatatcattgttatattcttcatgtttggacctggcatcttcatctacacgcgccccttcagggctttcccagctgacaaggtggtttctctcttccacacagtgatttttcctttgttgaatcctgtcatttatacccttcgcaaccaggaagtgaaagcttccatgaaaaaggtgtttaataagcacatagcctgaaaaagggcgcaaaaaaaaaaagaataaaaatagactgtagaattttatctgaaattgatttgtttatttccaagtactgcaatcactgagtacctcccatttgtcaggactattctgggaactgaaaaaagaaattactgaggcagataaggtccatctgctctccaagagatacaacctagtaaaaatagaccaccatt

SEQ ID NO: 362 - protein, 307 aa, Homo sapiens
MESENRTVIREFILLGLTQSQDIQLLVFVLVLIFYFIILPGNFLIIFTIKSDPGLTAPLYFFLGNLAFLDASYSFIVAPRMLVDFLSAKKIISYRGCITQLFFLHFLGGGEGLLLVVMAFDRYIAICRPLHYPTVMNPRTCYAMMLALWLGGFVHSIIQVVLILRLPFCGPNQLDNFFCDVPQVIKLACTDTFVVELLMVFNSGLMTLLCFLGLLASYAVILCRIRGSSSEAKNKAMSTCITHIIVIFFMFGPGIFIYTRPFRAFPADKVVSLFHTVIFPLLNPVIYTLRNQEVKASMKKVFNKHIA

SEQ ID NO: 363 - DNA, 1375 bp, Homo sapiens
  source
  (1)..(1375)
  CDS (201)..(1175)
tagctgcattggattgcattggattctagcaaaataacacagagaaccacaatcaattcaaaatttggtaggacatattcccacctggtctcagattatctcatgtattttcctgtatacctcaagttctcgtctcagtaaaatccttgagatacgtagcaagcaattggattacactccaagagacttggattacactcatgtctttcttctttgtagacttaagacccatgaacaggtcagcaacacacatcgtgacagagtttattctcctgggattccctggttgctggaagattcagattttcctcttctcattgtttttggtgatttatgtcttgaccttgctgggaaatggagccatcatctatgcagtgagatgcaacccactactacacacccccatgtactttctgctgggaaattttgccttccttgagatctggtatgtgtcctccactattcctaacatgctagtcaacattctctccaagaccaaggccatctcattttctgggtgcttcctccagttctatttcttcttttcactgggaacaactgaatgtctctttctggcagtaatggcttatgatcgatacctggccatctgccacccactgcagtaccctgccatcatgactgtaaggttctgtggtaagctggtgtctttctgttggcttattggattccttggatacccaattcccattttctacatctcccaactccccttctgtggtcctaatatcattgatcacttcctgtgtgacatggacccattgatggctctatcctgtgccccagctcccataactgaatgtattttctatactcagagctcccttgtcctctttttcactagtatgtacattcttcgatcctatatcctgttactaacagctgtttttcaggtcccttctgcagctggtcggagaaaagccttctctacctgtggttctcatttggttgtggtatctcttttctatgggacagtcatggtaatgtatgtaagtcctacatatgggatcccaactttattgcagaagatcctcacactggtatattcagtaacgactcctctttttaatcctctgatctatactcttcgtaataaggacatgaaactcgctctgagaaatgtcctgtttggaatgagaattcgtcaaaattcgtgagccaaagatgtgccatacttacaagttctaacgaagaacaaggtcgagatgttgtcagttctttagcagtctttcagtcctcagtctgagtagttagaggttgtatattttacctggaagtgtgcccagcttaaatatgtttccagcactgactctttaaaccttaattaactggtcttcaacatccacttaaaagtttt

SEQ ID NO: 364 - protein, 324 aa, Homo sapiens
MSFFFVDLRPMNRSATHIVTEFILLGFPGCWKIQIFLFSLFLVIYVLTLLGNGAIIYAVRCNPLLHTPMYFLLGNFAFLEIWYVSSTIPNMLVNILSKTKAISFSGCFLQFYFFFSLGTTECLFLAVMAYDRYLAICHPLQYPAIMTVRFCGKLVSFCWLIGFLGYPIPIFYISQLPFCGPNIIDHFLCDMDPLMALSCAPAPITECIFYTQSSLVLFFTSMYILRSYILLLTAVFQVPSAAGRRKAFSTCGSHLVVVSLFYGTVMVMYVSPTYGIPTLLQKILTLVYSVTTPLFNPLIYTLRNKDMKLALRNVLFGMRIRQNS

SEQ ID NO: 365 - DNA, 1081 bp, Homo sapiens
  source
  (1)..(1081)
  CDS (201)..(881)
acaacctgaagtttacaagaatcagacccacaggactcatttgagaaagataaaccaggtgtgcttaagaattcttttagaatatccaatatattcacctgcaagagtcaaactccttatcccaaaaaaagcttcaagatgcttcatcagcaaagcaaattgtcattgaccatcggtgttctctccacagtctgggaagcatgaataactcacagatatctactgtgacgcagtttgtgttgttggggtttcctggtccctggaaaattcagatcatctttttctcaatgattttgttggtctacatcttcactctgactgggaatatggccatcatctgtgcagtgaggtgggaccatcgactccatacccctatgtacgtgctcctagccaacttctccttcctagagatctggtatgtgacctgcacagtccccaacatgctggtaaattttttctccaaaactaagaccatatcattctctggatgtttcactcagttccacttcttcttttccctgggcacaactgaatgcttcttcctctgtgtcatggcttatgatcggtacctggccatctgccacccactgcactatccctccattatgactggccagctctgtggcatcttggtgtctctttgttggctcattggtttccttggacattcaatttccattttcttcatttttcaactacctttctgtggtcccaacatcattgatcattttctgtgtgatgtagacccactgatggcattgtcctctgcccctactcacatcatagggcatgtgttccattctgtgagctctcttttcatcaacctcaccatggtgtacatccttgggtcctataccttggtgctcagaactgtgctttaggttccttcttcagctggatggcaaaaggccatctctacctgtgggtcacacttggttgttgtgtctctgttctatggagccataatgctgatgtatgtgagtcccacacctggcaactcagttgctatgcataagctcatcacactgatatattctgtggtaacacctgtcttaaaccccctcatctacagcctacgcaa

SEQ ID NO: 366 - protein, 226 aa, Homo sapiens
MNNSQISTVTQFVLLGFPGPWKIQIIFFSMILLVYIFTLTGNMAIICAVRWDHRLHTPMYVLLANFSFLEIWYVTCTVPNMLVNFFSKTKTISFSGCFTQFHFFFSLGTTECFFLCVMAYDRYLAICHPLHYPSIMTGQLCGILVSLCWLIGFLGHSISIFFIFQLPFCGPNIIDHFLCDVDPLMALSSAPTHIIGHVFHSVSSLFINLTMVYILGSYTLVLRTVL

SEQ ID NO: 367 - DNA, 1393 bp, Homo sapiens
  source
  (1)..(1393)
  CDS (201)..(1193)
gtgtatctgggcgttactggctttgtacatatgtttaagtgaacccttctaatctctttgaacttcaattaccctgtctgtgaaagagaagggtaaagaatacctcctcgcagctcaaagagtcattaggaagaccaaatgagataatgtatgtaaaaatacttagtacatcatccagcatgagttagcaaaatctccaaatgttctttattattcattctttggttacttctgtttttctaacagctttgggaccccagaacagaacaatgcattttgtgactgagtttgtcctcctgggtttccatggtcaaagggagatgcagagctgcttcttctcattcatcctggttctctatctcctgacactgctagggaatggagctattgtctgtgcagtgaaattggacaggcggctccacacacccatgtacatccttctgggaaactttgcctttctagagatctggtacatttcctccactgtcccaaacatgctagtcaatatcctctctgagattaaaaccatctccttctctggttgcttcctgcaattctatttctttttttcactgggtacaacagagtgtttctttttatcagttatggcttatgatcggtacctggccatctgtcgtccattacactacccctccatcatgactgggaagttctgtataattctggtctgtgtatgctgggtaggcggatttctctgctatccagtccctattgttcttatctcccaacttcccttctgtgggcccaacatcattgaccacttggtgtgtgacccaggcccattgtttgcactggcctgcatctctgctccttccactgagcttatctgttacaccttcaactcgatgattatctttgggcccttcctctccatcttgggatcttacactctggtcatcagagctgtgctttgtattccctctggtgctggtcgaactaaagctttctccacatgtgggtcccacctaatggtggtgtctctattctatggaacccttatggtgatgtatgtgagcccaacatcagggaacccagcaggaatgcagaagatcatcactctggtatacacagcaatgactccattcttaaatccccttatctatagtcttcgaaacaaagacatgaaagatgctctaaagagagtcctggggttaacagttagccaaaactgagatatctttgaaaaagaagccaaattggccacttctgaccttaattttttataactatagagagtagcttcagtagtatgttctggctcacactcaggtagacagacttatctttcacagttccttagcagttaaattcagctcattaatgataaatgccaatgctcaataaaacattttaaacatatgtggcctcactg

SEQ ID NO: 368 - protein, 330 aa, Homo sapiens
MFFIIHSLVTSVFLTALGPQNRTMHFVTEFVLLGFHGQREMQSCFFSFILVLYLLTLLGNGAIVCAVKLDRRLHTPMYILLGNFAFLEIWYISSTVPNMLVNILSEIKTISFSGCFLQFYFFFSLGTTECFFLSVMAYDRYLAICRPLHYPSIMTGKFCIILVCVCWVGGFLCYPVPIVLISQLPFCGPNIIDHLVCDPGPLFALACISAPSTELICYTFNSMIIFGPFLSILGSYTLVIRAVLCIPSGAGRTKAFSTCGSHLMVVSLFYGTLMVMYVSPTSGNPAGMQKIITLVYTAMTPFLNPLIYSLRNKDMKDALKRVLGLTVSQN

SEQ ID NO: 369 - DNA, 1327 bp, Homo sapiens
  source
  (1)..(1327)
  CDS (201)..(1127)
acgtattttattttagtgaggaataaagaggatgaagaatagaagggttaactcaggatacaagacataagttgtcttcagctacggaacattggttgggacaaataatgttcttatctggagaggagatagaaaacagatgaaaaggtggttataacagataacaatttgccctattttattctgcagagtgagaaattatggaaacacagaacctcacagtggtgacagaattcattcttcttggtctgacccagtctcaagatgctcaacttctggtctttgtgctagtcttaattttctaccttatcatcctccctggaaatttcctcatcattttcaccataaagtcagaccctgggctcacagcccccctctatttctttctgggcaacttggccttactggatgcatcctactccttcattgtggttcccaggatgttggtggacttcctctctgagaagaaggtaatctcctatagaagctgcatcactcagctctttttcttgcattttcttggagcgggagagatgttcctcctcgttgtgatggcctttgaccgctacatcgccatctgccggcctttacactattcaaccatcatgaaccctagagcctgctatgcattatcgttggttctgtggcttgggggctttatccattccattgtacaagtagcccttatcctgcacttgcctttctgtggcccaaaccagctcgataacttcttctgtgatgttccacaggtcatcaagctggcctgcaccaatacctttgtggtggagcttctgatggtctccaacagtggcctgctcagcctcctgtgcttcctgggccttctggcctcctatgcagtcatcctctgtcgtataagggagcactcctctgaaggaaagagcaaggctatttccacatgcaccacccatattatcattatatttctcatgtttggacctgctattttcatctacacttgccccttccaggctttcccagctgacaaggtagtttctcttttccatactgtcatctttcctttgatgaaccctgttatttatacgcttcgcaaccaggaggtgaaagcttccatgaggaagttgttaagtcaacatatgttttgctgaatagaagaaagagaaaagcaagaacggagaaagtccagttgaatttagctaaatcatttcctcattcatgcattgaatcagtcagtcatttagcaagtattataattattaagtacttcccattttcaggcactattccaggcatatgaatgagacaggtaagattccaggtctcctagatttatattcaaggggataaa

SEQ ID NO: 370 - protein, 308 aa, Homo sapiens
METQNLTVVTEFILLGLTQSQDAQLLVFVLVLIFYLIILPGNFLIIFTIKSDPGLTAPLYFFLGNLALLDASYSFIVVPRMLVDFLSEKKVISYRSCITQLFFLHFLGAGEMFLLVVMAFDRYIAICRPLHYSTIMNPRACYALSLVLWLGGFIHSIVQVALILHLPFCGPNQLDNFFCDVPQVIKLACTNTFVVELLMVSNSGLLSLLCFLGLLASYAVILCRIREHSSEGKSKAISTCTTHIIIIFLMFGPAIFIYTCPFQAFPADKVVSLFHTVIFPLMNPVIYTLRNQEVKASMRKLLSQHMFC

SEQ ID NO: 371 - DNA, 1348 bp, Homo sapiens
  source
  (1)..(1348)
  CDS (201)..(1148)
ggaagtggacagctcagactatacgtctcctttttcagacttaatagatactgacactaaatttcaaggtccgtttattgaaagatccaaaggaatgcataagtttggtttttcatatggctctttatttttcactcatactccatggtatgagtgatcttttctttctctctacaggtcatccaagagcgagctgtaggatggaggccatgaaactattaaatcaatctcaagtgtcagaattcattttgctgggactgaccagctcccaggatgtagagtttcttctctttgccctcttctcggttatctatgtggtcacagttttgggtaaccttcttattatagtcacagtgtttaacacccctaacctgaatactcccatgtattttctccttggtaatctctcttttgtagatatgacccttgcttcttttgccacccctaaggtgattctgaacttgttaaaaaagcagaaggtaatttcttttgctgggtgcttcactcagatatttctccttcacttactgggtggggttgaaatggtactgttggtctccatggcttttgacagatatgtggccatttgtaagcccctacactacatgaccatcatgaacaagaaggtatgtgttttgcttgtagtgacctcatggctcttgggtctccttcactcagggtttcagataccatttgctgtgaacttgcccttttgtggtcccaatgtggtagacagcattttttgtgacctccctttggttactaagcttgcctgtatagacatatattttgtacaggtagtcattgttgccaacagtggcataatctccctgagctgtttcattattttgcttatctcctacagtctgatcctcataaccattaagaaccactctcctactgggcaatctaaagcccgttccactttgactgctcacatcacagtggtgattctcttctttggcccatgcatctttatctacatttggcccttcggcaaccactctgtagataagttccttgctgtgttttataccatcatcactcctatcttgaatccaattatctatactctgagaaacaaagaaatgaagatatccatgaaaaaactctggagagcttttgtgaattctagagaagatacttagattaaaaatataatggtagaggccgggcatggtggctgatgcctgtaatccccacactttgggaggaatatcaggggaaccagcccccaatatttcaacataggttcttttctattttccctaagtgttgactggtctgagaaataaagggaaagaatacaaaagagagaaattttaaagctgggtgtccaggggagaca

SEQ ID NO: 372 - protein, 315 aa, Homo sapiens
MEAMKLLNQSQVSEFILLGLTSSQDVEFLLFALFSVIYVVTVLGNLLIIVTVFNTPNLNTPMYFLLGNLSFVDMTLASFATPKVILNLLKKQKVISFAGCFTQIFLLHLLGGVEMVLLVSMAFDRYVAICKPLHYMTIMNKKVCVLLVVTSWLLGLLHSGFQIPFAVNLPFCGPNVVDSIFCDLPLVTKLACIDIYFVQVVIVANSGIISLSCFIILLISYSLILITIKNHSPTGQSKARSTLTAHITVVILFFGPCIFIYIWPFGNHSVDKFLAVFYTIITPILNPIIYTLRNKEMKISMKKLWRAFVNSREDT

SEQ ID NO: 373 - DNA, 1444 bp, Homo sapiens
  source
  (1)..(1444)
  CDS (201)..(1244)
ttttcaaaaaccttgtccattttgataggcaaataattgaaagccaagctaaacttgcattacacgtctagctggcagtcatcatgttctatgttcatatttttctagtgagcagccatggggtttcatccactgaacactctcttaagtgttatctccctttgttctgttaggagaattgagccaggcccaccaggcccatgggtaactggactgcagcggtgactgagtttgttctgctggggttttccctgagcagggaggtggagctgctgctcctggtgctcctgctgcccacgttcctgctgactcttctggggaacctgctcatcatctccactgtgctgtcctgctcccgcctccacacccccatgtacttcttcttgtgcaacctctctatcctggacatcctcttcacctcagtcatctctccaaaagtgttggccaacttaggatctagggataaaaccatctcctttgccggatgtatcacccagtgctatttctactttttcttgggcacagttgagttcctcctgctgacggtcatgtcctatgaccgttatgccaccatctgctgccccctgcggtacaccaccatcatgagaccttctgtctgcattgggaccgttgtattctcttgggtgggaggcttcctgtctgtgctctttccaaccatcctcatctcccagctgcccttctgtggctccaatatcattaaccacttcttctgtgacagtggacccttgctggccctggcctgtgcagacaccactgccatcgagctgatggattttatgctttcttccatggtcatcctctgctgcatagtcctcgtggcctattcctatacgtacatcatcttgaccatagtgcgcattccttctgcaagtggaaggaagaaggcctttaatacctgtgcttcccacctgaccatagtcatcattcctagtggcatcactgtgtttatctatgtgactccctcccagaaagaatatctggagatcaacaagatccctttggttctgagcagtgtggtgactccattcctcaacccctttatatatactctgaggaatgacacagtgcagggagtcctcagggatgtgtgggtcagggttcgaggagtttttgaaaagaggatgagggcagtgctgagaagcagattatcctccaacaaagaccaccaaggaagggcttgctcttctccaccatgtgtctattctgtaaagctccagtgttagaaagagaggagctgccttagtgaaagagtgagctagctaaggaattctgaatagtctatagtggaaagactgactgcggagacagagacttgaacgctggccttggttttcactttaatctgtgaccgcagctgtgtcaccagccattctgactctcagtactctcagctgaagtgcaacagggctggacttgatgatct

SEQ ID NO: 374 - protein, 347 aa, Homo sapiens
MGNWTAAVTEFVLLGFSLSREVELLLLVLLLPTFLLTLLGNLLIISTVLSCSRLHTPMYFFLCNLSILDILFTSVISPKVLANLGSRDKTISFAGCITQCYFYFFLGTVEFLLLTVMSYDRYATICCPLRYTTIMRPSVCIGTVVFSWVGGFLSVLFPTILISQLPFCGSNIINHFFCDSGPLLALACADTTAIELMDFMLSSMVILCCIVLVAYSYTYIILTIVRIPSASGRKKAFNTCASHLTIVIIPSGITVFIYVTPSQKEYLEINKIPLVLSSVVTPFLNPFIYTLRNDTVQGVLRDVWVRVRGVFEKRMRAVLRSRLSSNKDHQGRACSSPPCVYSVKLQC

SEQ ID NO: 375 - DNA, 1571 bp, Homo sapiens
  source
  (1)..(1571)
  CDS (201)..(1130)
  CDS (1360)..(1371)
ttaccctttagagaaaatcttctctagtgctaaaatcaatcagatgatgaccttaagtgcttcagatcttaacaggacctgcaattggataaactggggatatgagtcccatatcatgatgaagtaagtttcaggactgtaagcagaggacctgctcttaccaggatcatgtttttgttgttggacaggtgaaaaagacaatgagtcctgatgggaaccacagtagtgatccaacagagttcgtcctggcagggctcccaaatctcaacagcgcaagagtggaattattttctgtgtttcttcttgtctatctcctgaatctgacaggcaatgtgttgattgtgggggtggtaagggctgatactcgactacagacccctatgtacttctttctgggtaacctgtcctgcctagagatactgctcacttctgtcatcattccaaagatgctgagcaatttcctctcaaggcaacacactatttcctttgctgcatgtatcacccaattctatttctacttctttctcggggcctccgagttcttactgttggctgtcatgtctgcggatcgctacctggccatctgtcatcctctgcgctaccccttgctcatgagtggggctgtgtgctttcgtgtggccttggcctgctgggtggggggactcgtccctgtgcttggtcccacagtggctgtggccttgcttcctttctgtaagcagggtgctgtggtacagcacttcttctgcgacagtggcccactgctccgcctggcttgcaccaacaccaagaagctggaggagactgactttgtcctggcctccctcgtcattgtatcttccttgctgatcactgctgtgtcctacggcctcattgtgctggcagtcctgagcatcccctctgcttcaggccgtcagaaggccttctctacctgtacctcccacttgatagtggtgaccctcttctatggaagtgccatttttctctatgtgcggccatcgcagagtggttctgtggacactaactgggcagtgacagtaataacgacatttgtgacaccactgttgaatccattcatctatgccttacgtaatgagcaagtcaaggaagctttgaaggacatgtttaggaaggtagtggcaggcgttttagggaatcttttacttgataaatgtctcagtgagaaagcagtaaagtaaaagtgaagagtctagtaactagtcttttttttttttttttttttttttttttgagagagagagagagaaagtctcactctgtcgcccaggctggagtgcagtggcgcgatctcagctcactgcaacctccacctcctgggtttaagcaattctcctgcctcagcctcctgagtagctgggattacatgtgcccaccaccacacctggctaatttttgtatttttagtagagatggggtttcactcgatgaccaggctagtctcaaactcctggcatcaagtgatccacccacctcagcctcccgaagtgctgggattacaggtgtgagccaccacacctggtcttgttgtcatttttaaaaatcatattttaaaa

SEQ ID NO: 376 - protein, 313 aa, Homo sapiens [sequence omitted]

SEQ ID NO: 377 - DNA, 1342 bp, Homo sapiens
  source
  (1)..(1342)
  CDS (201)..(1142)
tgtgttccaataagatcttgtttacaaaacacctgccagagaacattgtttctccctacttgtcatctttccacgtaagaaagaaacttctctgccactgcccctagtttttacaatctctttctagttccccctcactttcctctcacctctatgttaattcttgttttgtccattctctaggtaagattctctgggatatggaaagaatcaacagcacactgttgactgcgtttatcctgacaggaattccgtatccactcaggctaaggacactcttttttgtgttcttttttctaatctacatcctgactcagctgggaaacctgcttattttaatcactgtctgggcagacccaaggctccatgcccgccccatgtacatctttcttggtgttctctcagtcattgatatgagcatctcctccatcattgtccctcgcctcatgatgaacttcactttaggtgtcaaacccatcccatttggtggctgtgttgctcaactctatttctatcacttcctgggcagcacccagtgcttcctctacaccctaatggcctatgacaggtacctggcaatatgtcagcccctgcgctaccctgtgctcatgactgctaagctgagcgccttgcttgtggctggagcctggatggcaggatccatccatggggctctccaggccatcctaaccttccgcctgccctactgtgggcccaatcaggtggattacttcttctgtgacatccctgcagtgttgagactggcctgtgctgacacaacagtcaacgagctggtgacgtttgtagacattggggtggtggttgccagttgcttctccctgatcctcctctcctacatacagatcattcaggccatcctgagaatccacacagctgatgggcggcgccgggctttttcaacttgtggagcccatgtaaccgtggtcaccgtgtactatgtgccctgtgccttcatctacctgaggcctgaaaccaacagccccctggatggggcagctgccctagtccccacggccatcactcctttcctcaacccccttatctacactctgcggaaccaagaggtgaagctggccctgaaaagaatgctcagaagcccaagaactccgagtgaggtttgaaagtgtctttctcccactagggaagctgccacaattagaatttattataatgtttaggcttcggtaacttttttcttttcttcttgttttttctcttttatatagccatactgtatgatcaaacacagtttaaggtaaaatactaactttctaacagttccttagtatcctctcaagataactctcagccactgcaagag

SEQ ID NO: 378 - protein, 313 aa, Homo sapiens
MERINSTLLTAFILTGIPYPLRLRTLFFVFFFLIYILTQLGNLLILITVWADPRLHARPMYIFLGVLSVIDMSISSIIVPRLMMNFTLGVKPIPFGGCVAQLYFYHFLGSTQCFLYTLMAYDRYLAICQPLRYPVLMTAKLSALLVAGAWMAGSIHGALQAILTFRLPYCGPNQVDYFFCDIPAVLRLACADTTVNELVTFVDIGVVVASCFSLILLSYIQIIQAILRIHTADGRRRAFSTCGAHVTVVTVYYVPCAFIYLRPETNSPLDGAAALVPTAITPFLNPLIYTLRNQEVKLALKRMLRSPRTPSEV

SEQ ID NO: 379 - DNA, 1333 bp, Homo sapiens
  source
  (1)..(1333)
  CDS (201)..(1133)
tggaggacttctccttttaagtaaacctaaataactaatggtgacaccacctcctcttttaaaaaacaatttgactctatcttgtttatctcataattcctaggcatcaatcatccgacaaaagcattcacttacaacatcattgtgctgtgtttctcttgtcaaacgtcaccattcatcttagcagactacaaaaagacatgggaaagaccaaaaacacatcgctggatgccgtggtgacagatttcattcttctgggtttgtctcaccccccaaatctaagaagcctcctcttcctggtcttcttcatcatttacatcctcactcagctggggaacctgctcattctgctcaccatgtgggctgacccgaagctctgtgctcgccccatgtacattcttctgggagtgctctcattcctggacatgtggctctcctcagtcaccgttcctcggcttattttggattttactccttccatcaaggctatcccgtttggtggctgtgtggctcaactgtatttctttcacttcctgggcagcacccagtgcttcctctacaccttgatggcctatgacaggtacctagcaatatgtcagcccctgcactacccagtgctcatgaatgggaggttatgcacagtccttgtggctggagcttgggtcgccggctccatgcatgggtctatccaggccaccttgaccttccgcctgccctactgtgggcccaatcaggtggattactttatctgtgacatccgcgcagtattgagactggcctgtgctgacacaactgtcaatgagcttgtgacctttgtggacgtcagggtagtggccgccagttgcttcatgttaattctgctctcctatgccaacatagtccatgccatcctgaagatacgcaccgctgatgggaggcgccgggccttctccacctgtggctcccacctaatcgtggtcacagtctactatgtcccctgtattttcatctaccttagggctggctccaaagaccccctggatggggcagcggctgtgttttacactgttgtcactccattactgaaccccctcatctatacactgaggaaccaggaagtgaagtctgccctgaagaggataacagcaggttgaaggactgaatgaaaataagtaactacatctgcatcattatcactgccactctcttcagctactgctgcatgtgacaaatgcccaataaactgctaaggatttaaagtgaatttattttcactttctttggcagaaaattctgaattatttcgacccaaaatcttttcccctaattaaactggttcaggttgttttacata

SEQ ID NO: 380 - protein, 310 aa, Homo sapiens
MGKTKNTSLDAVVTDFILLGLSHPPNLRSLLFLVFFIIYILTQLGNLLILLTMWADPKLCARPMYILLGVLSFLDMWLSSVTVPRLILDFTPSIKAIPFGGCVAQLYFFHFLGSTQCFLYTLMAYDRYLAICQPLHYPVLMNGRLCTVLVAGAWVAGSMHGSIQATLTFRLPYCGPNQVDYFICDIRAVLRLACADTTVNELVTFVDVRVVAASCFMLILLSYANIVHAILKIRTADGRRRAFSTCGSHLIVVTVYYVPCIFIYLRAGSKDPLDGAAAVFYTVVTPLLNPLIYTLRNQEVKSALKRITAG

SEQ ID NO: 381 - DNA, 1342 bp, Homo sapiens
  source
  (1)..(1342)
  CDS (201)..(1142)
gtttaaatagaagtgcctggcatggctcctggtaagtagtgggtatactgtaacaactactgttaaattgatttcataagctatatgctctgatgataaataagcaattcagataagaatacaaagtcatttcaattagttctattcctataataataaaactaaattagctttcattttttcccccctaagctcattgaatggacagtctaaaccaaacaagagtgactgaatttgtcttcttgggactcactgataaccgggtgctggaaatgctgtttttcatggcattctcagccatttatatgctaacgctttcagggaacattctcatcatcattgccacagtctttactccaagtctccatacccccatgtatttcttcctgagcaatctgtcctttattgacatctgccactcatctgtcactgtgcctaagatgttggagggtttgcttttagaaagaaagaccatttcctttgacaactgcatcacacagctcttcttcctacatctctttgcctgtgccgagatctttctgctgatcattgtggcgtatgatcgttacgtggctatctgcactccactccactaccccaatgtgatgaacatgagagtctgtatacagcttgtctttgctctctggttggggggtactgttcactcactagggcagaccttcttgactattcgtctaccttactgtggccccaacattattgacagctacttctgtgatgtgcctcttgttatcaagctggcctgcacagatacatacctcacaggaatactgattgtgaccaatagtggaaccatctccctctcctgtttcttggccgtggtcacctcctatatggtcatcctggtttctcttcgaaaacactcagctgaagggcgccagaaagccctgtctacctgctcggcccacttcatggtggttgccctcttctttgggccatgtatcttcatctatactcggccagacaccagcttctccattgacaaggtggtgtctgtcttctacacagtggtcacccctttgctgaatcccttcatttacaccttgaggaatgaggaggtaaaaagtgccatgaagcagctcaggcagagacaagtttttttcacgaaatcatatacataatgggcattgggattgcagacataattgcagccacatccttaatgaaagagcaaaagtaaagagtcaaaatcaacttatataacttggtaaattaggtaaaatggcatagagcaggtcagatttctgctcattaaagataagaacttattctgttcattaaagataagaacttattaactattatttaaataaagcaaaag

SEQ ID NO: 382 - protein, 313 aa, Homo sapiens
MDSLNQTRVTEFVFLGLTDNRVLEMLFFMAFSAIYMLTLSGNILIIIATVFTPSLHTPMYFFLSNLSFIDICHSSVTVPKMLEGLLLERKTISFDNCITQLFFLHLFACAEIFLLIIVAYDRYVAICTPLHYPNVMNMRVCIQLVFALWLGGTVHSLGQTFLTIRLPYCGPNIIDSYFCDVPLVIKLACTDTYLTGILIVTNSGTISLSCFLAVVTSYMVILVSLRKHSAEGRQKALSTCSAHFMVVALFFGPCIFIYTRPDTSFSIDKVVSVFYTVVTPLLNPFIYTLRNEEVKSAMKQLRQRQVFFTKSYT

SEQ ID NO: 383 - DNA, 1339 bp, Homo sapiens
  source
  (1)..(1339)
  CDS (201)..(1139)
caaaatttacaatagaggaatatgagttgctttgtgactgaaattgtctctaaaggcatatattagcccttgtctagttttctgacaacatatgaattgctcatgattttgccaacatcaatgctttttgtcctaaatcaaagtttctccttactctcctctttcagttagcatgagagttgtcacagccgacagaggcaatggatgaagccaatcactctgtggtctctgagtttgtgttcctgggactctctgactcgcggaagatccagctcctcctcttcctctttttctcagtgttctatgtgtcaagcctgatgggaaatctcctcattgtgctaactgtgacctctgaccctcgtttacagtcccccatgtacttcctgctggccaacctttccatcatcaatttggtattttgttcctccacagctcccaagatgatttatgaccttttcaggaagcacaagaccatctcttttgggggctgtgtagttcagatcttctttatccatgcagttgggggaactgagatggtgctgctcatagccatggcttttgaccgatatgtggccatatgtaagcctctccactacctgaccatcatgaacccacaaaggtgcattttgtttttagtcatttcctggattataggtattattcactcagtgattcagttggcttttgttgtagacctgctgttctgtggccctaatgaattagatagtttcttttgtgatcttcctcgatttatcaaactggcttgcatagagacctacacattgggattcatggttactgccaatagtggatttatttctctggcttcttttttaattctcataatctcttacatctttattttggtgactgttcagaaaaaatcttcaggtggtatattcaaggctttctctatgctgtcagctcatgtcattgtggtggttttggtctttgggccattaatctttttctatatttttccatttcccacatcacatcttgataaattccttgccatctttgatgcagttatcactcccgttttgaatccagtcatctatacttttagaaataaagagatgatggtggcaatgagaagacgatgctctcagtttgtgaattacagtaaaatcttttaaatatattgagaatatacaaaaaggcaaattatactagaatttcagacagatatgtgttaagtaagctatgttaaatttaaccagaatatcactttctactagtatgtattgtgttgtcttttttttcttcccaaattgaattgtggtatcaatctcttgcttatataggagatttaaagattaaacagtgtggctacttt

SEQ ID NO: 384 - protein, 312 aa, Homo sapiens
MDEANHSVVSEFVFLGLSDSRKIQLLLFLFFSVFYVSSLMGNLLIVLTVTSDPRLQSPMYFLLANLSIINLVFCSSTAPKMIYDLFRKHKTISFGGCVVQIFFIHAVGGTEMVLLIAMAFDRYVAICKPLHYLTIMNPQRCILFLVISWIIGIIHSVIQLAFVVDLLFCGPNELDSFFCDLPRFIKLACIETYTLGFMVTANSGFISLASFLILIISYIFILVTVQKKSSGGIFKAFSMLSAHVIVVVLVFGPLIFFYIFPFPTSHLDKFLAIFDAVITPVLNPVIYTFRNKEMMVAMRRRCSQFVNYSKIF

SEQ ID NO: 385 - DNA, 1339 bp, Homo sapiens
  source
  (1)..(1339)
  CDS (201)..(1139)
cagccagctgacccctctaagtggaagtccagggtgcatgtgatgagggttatttggctgtgtaagatgttaatatgatagttattttcatggctggaggctttctttcttgaacatgaatacttgcgtaggtaattctttctcattttctttcttccttcaggtaagtaacatgaaaactgatcttggagtctgaggcaatgaatggaatgaatcactctgtggtatcagaatttgtattcatgggactcaccaactcacgggagattcagcttctactttttgttttctctttgttgttctactttgcgagcatgatgggaaaccttgtcattgtattcactgtaaccatggatgctcatctgcactcccccatgtatttcctcctggctaacctctcaatcattgatatggcattttgctcaattacagcccctaagatgatttgtgatattttcaagaagcacaaggccatctcctttcggggatgtattactcagatcttctttagccatgctcttgggggcactgagatggtgctgctcatagccatggcctttgacagatacatggccatatgtaaacctctccactacctgaccatcatgagcccaagaatgtgtctatactttttagccacttcctctatcattggccttatccactcattggtccaattagtttttgtggtagatttacctttttgtggtcctaatatctttgacagtttttactgtgatctccctcggctcctcagacttgcctgtaccaacacccaagaactggagttcatggtcactgtcaatagtggactcatttctgtgggctcctttgtcttgctggtaatttcctacatcttcattctgttcactgtttggaaacattcttctggtggtctagccaaggccctctctaccctgtcagctcatgtcactgtggtcatcttgttctttgggccactgatgtttttctacacatggccttctcccacatcacacctggataaatatcttgctatttttgatgcatttattactccttttctgaatccagttatctacacattcaggaacaaagacatgaaagtggcaatgaggagactgtgcagtcgtcttgcgcattttacaaagattttgtaaatggcttggctgtcaagatgtgtaactatggattactcctcatgctgattgcataaaagaaactgcaatttcagagaaatactgaagactcaggccatactatatgcctgaaaatttatgaaatcatggtaacaatttcaccattaaattagaagtgatgttatcctttggcacagtgtgcatcaaagtgctaaatatta

SEQ ID NO: 386 - protein, 312 aa, Homo sapiens
MNGMNHSVVSEFVFMGLTNSREIQLLLFVFSLLFYFASMMGNLVIVFTVTMDAHLHSPMYFLLANLSIIDMAFCSITAPKMICDIFKKHKAISFRGCITQIFFSHALGGTEMVLLIAMAFDRYMAICKPLHYLTIMSPRMCLYFLATSSIIGLIHSLVQLVFVVDLPFCGPNIFDSFYCDLPRLLRLACTNTQELEFMVTVNSGLISVGSFVLLVISYIFILFTVWKHSSGGLAKALSTLSAHVTVVILFFGPLMFFYTWPSPTSHLDKYLAIFDAFITPFLNPVIYTFRNKDMKVAMRRLCSRLAHFTKIL

SEQ ID NO: 387 - DNA, 1276 bp, Homo sapiens
  source
  (1)..(1276)
  CDS (201)..(1076)
aaggtctcattgtcattttaatctatatccttaatgattagtgataagatttttatatacctgttggtcattaggttagttttaacgctaaagtggaaatagacttttataactttgacttctttccttctcgttcattaatatgattataatttacatttttggctgttgttctctagctatcactgctaacaaagccaatggttggggcaaatcactccgtggtgtcagagtttgtgttcctgggactcaccaattcctgggagatccgacttctcctccttgtgttctcctccatgttttacatggccagtatgatgggaaactctctcattttgctcactgtgacttctgaccctcacttgcactcccccatgtattttctgttagccaacctctccttcattgacctgggtgtttcctctgtcacttctcccaaaatgatttatgacctgttcagaaagcacgaagtcatctcctttggaggctgcatcgctcaaatcttcttcatccacgtcattggcggtgtggagatggtgctgctcatagccatggcctttgacagatatgtggccatatgtaagcccctccagtacctgaccattatgagcccaagaatgtgcatgttcttcttagtggctgcctgggtgaccggccttatccactctgtagttcaattggtttttgtagtaaacttgcccttctgtggtcctaatgtatcggacagcttttactgtgaccttcctcggttcatcaaacttgcctgcacagacagctaccgactggagttcatggttacagccaacagtggattcatctctctgggctccttcttcatactgatcatttcctatgtggtcatcattctcactgttctgaaacactcttcagctggtttatccaaggctctgtccaccctttcagctcacgtcagtgtggtagttttgttctttggtcctttgatttttgtctatacgtggccatctccctccacacacctggataagtttctggccatctttgatgcagttctcactcctgttttaaatcctatcatctacacattcaggaattgagaaatgaaggtggcaatgagaaaagtatgccgacaactagtaaatcacaggaagatctcctaagtcatggcttgttttgtgagtgtcttcattaactattgaagtttattgctgaagcttctctttgtcctaccttaatttgatcatccacatggatattgggtctattttgtttgtcatttaggagggagggaaatttg

SEQ ID NO: 388 - protein, 291 aa, Homo sapiens
MVGANHSVVSEFVFLGLTNSWEIRLLLLVFSSMFYMASMMGNSLILLTVTSDPHLHSPMYFLLANLSFIDLGVSSVTSPKMIYDLFRKHEVISFGGCIAQIFFIHVIGGVEMVLLIAMAFDRYVAICKPLQYLTIMSPRMCMFFLVAAWVTGLIHSVVQLVFVVNLPFCGPNVSDSFYCDLPRFIKLACTDSYRLEFMVTANSGFISLGSFFILIISYVVIILTVLKHSSAGLSKALSTLSAHVSVVVLFFGPLIFVYTWPSPSTHLDKFLAIFDAVLTPVLNPIIYTFRN

SEQ ID NO: 389 - DNA, 1351 bp, Homo sapiens; identical to SEQ ID NO: 63
  source
  (1)..(1351)
  CDS (201)..(1151)

SEQ ID NO: 390 - protein, 316 aa, Homo sapiens; identical to SEQ ID NO: 64

SEQ ID NO: 391 - DNA, 973 bp, Homo sapiens
  source
  (1)..(973)
  CDS (201)..(773)
  modified_base (151)..(151): a, t, c, g, unknown or other
  modified_base (841)..(940): a, t, c, g, unknown or other
accttcatacccccatgtacttcttcctctttaacttgtccttcatagatctctgttattcttctgtgtttatacccaaaatgctaatgaactttatttcagagaagaatattatgtccttcaaggggtgcatgacccaactttccttttnctgatttttttggtcatttctgaaggttatgtgctgacgtcaatggcgtatgatcgctgtggccatctgtaccccacttctgtatcacattgccatgtctcctacagtgtgctccagccttatgtttggttcctatttgatgcctttttctggtgccatggcccacactggatgcatgctgagactgactttctgtgatgcgaacaccatcgatcactacttctgtgacatcctccctctgctccagctctcctgcaccagcacctacatcaatgagctggtggttttcactgtggttggcatcaacatcattgtgcccactgttaccatctttatctcttatggtttcatcctctccagcatcctccatatcagttccaaggagggcaggtccaaagctttcagcacttgcagttcccatataattgctgtttctctgttctttggatcaggtgcatttatgtatctcaacccatcttctgctgggtccatggataagagaaaattatcttctgtcttttatacaaatgtggttcccatgttgaaccccttaatctacagcctgaggaacaaagatgttaaatttgccctaagaaaagccctgagtagtaggaaactttgataagtaatagtatgtgtctgtgtgtatagtcacaagacagggatattctgtttgtttaattataatannnnnnnnnnnnnnnnnnnnnnnnnnnnnnnnnnnnnnnnnnnnnnnnnnnnnnnnnnnnnnnnnnnnnnnnnnnnnnnnnnnnnnnnnnnnnnnnnnnnacccccaacaccccccacaccccatacccccca

SEQ ID NO: 392 - protein, 190 aa, Homo sapiens [sequence omitted]

SEQ ID NO: 393 - DNA, 1390 bp, Homo sapiens
  source
  (1)..(1390)
  CDS (201)..(1190)
cccagcagccacaaaaatgcaaatttagataattaagttattattttcatctaataactgagatatgtggtgcccagtgatgctaaagttaacagacattttgtggtcagaagattaaatttgtataagaattttggaacagaagagggttaagaggaacaaaggatatattaaaggaaaacttgcaatgtttttcccccatgcaattagttctattacttatgtttctccttgtctttataggcaatactgcacctgcattctcagtgaccttggaatctatggacataccacaaaatatcacagaatttttcatgctggggctctcacagaactcagaggtacagagagttctctttgtggtctttttgctgatctatgtggtcacggtttgtggcaacatgctcattgtggtcactatcacctccagccccacgctggcttcccctgtgtattttttcctggccaacctatcctttattgacaccttttattcttcttctatggctcctaaactcattgctgactcattgtatgaggggagaaccatctcttatgagtgctgcatggctcagctctttggagctcattttttgggaggtgttgagatcattctgctcacagtgatggcttatgaccgctatgtggccatctgtaagcccctgcacaatactaccatcatgaccaggcatctctgtgccatgcttgtaggggtggcttggcttgggggcttcctgcattcattggttcagctcctcctggtcctttggttgcccttctgtgggcccaatgtgatcaatcactttgcctgtgacttgtaccctttgctggaagttgcctgcaccaatacgtatgtcattggtctgctggtggttgccaacagtggtttaatctgcctgttgaacttcctcatgctggctgcctcctacattgtcatcctgtactccttgaggtcccacagtgcagatgggagatgcaaagccctctccacctgtggagcccacttcattgttgttgccttgttctttgtgccctgtatatttacttatgtgcatccattttctactttacctatagacaaaaatatggcattattttatggtattctgacacctatgttgaatccactcatttataccctgagaaatgaagaggtaaaaaatgccatgagaaagctctttacatggtaagaaattgcaggtggaaaatgagtggtaaagcaggaaataaaaatgactttatttttgtaagtgaaacaaaccaagccttactttttttgtatcatgtatagttgtattccatcttaagcataatttcatcttcactgacttttttttttttgagacggagtctcacttcaacacccaggctggagtgcagtggcacgatc

SEQ ID NO: 394 - protein, 329 aa, Homo sapiens
MQLVLLLMFLLVFIGNTAPAFSVTLESMDIPQNITEFFMLGLSQNSEVQRVLFVVFLLIYVVTVCGNMLIVVTITSSPTLASPVYFFLANLSFIDTFYSSSMAPKLIADSLYEGRTISYECCMAQLFGAHFLGGVEIILLTVMAYDRYVAICKPLHNTTIMTRHLCAMLVGVAWLGGFLHSLVQLLLVLWLPFCGPNVINHFACDLYPLLEVACTNTYVIGLLVVANSGLICLLNFLMLAASYIVILYSLRSHSADGRCKALSTCGAHFIVVALFFVPCIFTYVHPFSTLPIDKNMALFYGILTPMLNPLIYTLRNEEVKNAMRKLFTW

SEQ ID NO: 395 - DNA, 1036 bp, Homo sapiens
  source
  (1)..(1036)
  CDS (201)..(836)
actaagaagtcagctggagaagtttacaggtacctattcctagagaattttgggaacagaaggaatcatctgtgagatggcagagtaatgaaaaggcaaagttttggactatttgattcttttatgcttcttttttttcattttttttttctaaaggtaaaatattccttcctggaggttttatcacccacactacatagatgaagaataaaaggaatgtgactgaattcgttttaacaggtcttacacagaaccctaaaatggagaaagtcatgtttgcagtatttttggttctttacatgataacactttcaggcaacctgctccttgtggttacaattaccaccagccaggctcttagctcccccatgtacttcttcctgagccacctttctttgatagacacagtttattcttcttcttcagctcctaagttgattgtcgattcccttcatgagaagaaaatcatctcctttaatgggtgtatggctcaagcctatgaagaacacatttttggtgctactgagatcatcctgctgacagtgatggcctgtgacaactatgtggccatctgcaaacctctgcactacacaaccatcatgagccacagcctgtgcattctcctagtggtagtggcctggataggaggatttctccatgcaaatattcagattctatttacagtatggctgcccttctgtggccccaatgtcatagaccacttcatgtgtgacttgtgccctttgttaaaacttgtttgcctggacactcatacccttggtctctttgttgctgccaacagtgggttcatctgcttattaaacttccttctctaggtggtatcctatgtgatcatcttgagatgtttaaagaactatatcttggaggggaggggtaaagccctctccacctgtatttctcacatcataatagttgtcttattctttgtgccttgtatatttgtgtatctgcacccagtgacaaactctgcccattgataaagctgctgctgtattttatactatggtggtcccaa

SEQ ID NO: 396 - protein, 211 aa, Homo sapiens; identical to SEQ ID NO: 332

SEQ ID NO: 397 - DNA, 1330 bp, Homo sapiens
  source
  (1)..(1330)
  CDS (201)..(1130)
tatatataatatataatttatatatatatataataatatattatatatattatatatgtattttttgtgatggggatgaaggctagtatctttcttactccataatcttggtggtatctcagaaaactttcttatgtctcataatttatgtctttgcagagccagccagccactttgtcggtcatcagggcagataatccatgggtgccaagaacaatgtgactgagtttgttttatttggcctttttgagagcagagagatgcagcatacatgctttgtggtattcttcctctttcatgtgctcactgtcctggggaaccttctggtcatcatcaccatcaatgctagaaagaccctgaagtctcccatgtatttcttcctgagccagttgtcttttgctgacatatgttatccatccactaccatacccaagatgattgctgacacttttgtggagcataagatcatctccttcaatggctgcatgacccagctcttttctgcccacttctttggtggcactgagatcttcctccttacagccatggcctatgaccgctatgtggccatctgtaggcccctgcactacacagccatcatggattgccggaagtgtggcctgctagcgggggcctcctggttagctggcttcctgcattccatcctgcagaccctcctcacggttcagctgcctttttgtgggcccaatgagatagacaacttcttctgtgatgttcatcccctgctcaagttggcctgtgcagacacctacatggtaggtctcatcgtggtggccaacagcggtatgatttctttagcatccttttttatccttatcatttcctatgttatcatcttactgaacctaagaagccagtcatctgaggaccggcgtaaggctgtctccacatgtggctcacacgtaatcactgtccttttggttctcatgccccccatgttcatgtacattcgtccctccaccaccctggctgctgacaaacttatcatcctctttaacattgtgatgccacctttgctgaaccctttgatctatacactaaggaacaacgatgtgaaaaatgccatgaggaagctgtttagggtcaagaggagcttaggggagaagtgacattccagagaatctcaatccagctaggaaattgggagactttccatcttgtagcatctaacacagcctttttatttccagtctgatgtttgcaatggcaattatcctcctagctcttgttgttataataattccacatattctttcaatcctttattcattaaatatttattggatgtttacagtgagtgagaatacaa

SEQ ID NO: 398 - protein, 309 aa, Homo sapiens
MGAKNNVTEFVLFGLFESREMQHTCFVVFFLFHVLTVLGNLLVIITINARKTLKSPMYFFLSQLSFADICYPSTTIPKMIADTFVEHKIISFNGCMTQLFSAHFFGGTEIFLLTAMAYDRYVAICRPLHYTAIMDCRKCGLLAGASWLAGFLHSILQTLLTVQLPFCGPNEIDNFFCDVHPLLKLACADTYMVGLIVVANSGMISLASFFILIISYVIILLNLRSQSSEDRRKAVSTCGSHVITVLLVLMPPMFMYIRPSTTLAADKLIILFNIVMPPLLNPLIYTLRNNDVKNAMRKLFRVKRSLGEK

SEQ ID NO: 399 - DNA, 1324 bp, Homo sapiens
  source
  (1)..(1324)
  CDS (201)..(1124)
ttcaggaatgtatattccagcacccacttgtaaacgatccagagacaagacagcacctagtataatggtctacacataaggatgctcatcatatgggcctaaaaccttggttctgagcccctgagccctgaaagggaaagtagtgacttcatgtatctgtgtctgtggttcattttcttcaggtgtatggagaaaacaccatggaaacagggaacctcacgtgggtatcagactttgtcttcctggggctctcgcagactcgggagctccagcgtttcctgtttctaatgttcctgtttgtctacatcaccactgttatgggaaacatccttatcatcatcacagtgacctctgattcccagctccacacacccatgtactttctgctccgaaacctggctgtcctagacctctgtttctcttcagtcactgctcccaaaatgctagtggacctcctctctgagaagaaaaccatctcttaccagggctgcatgggtcagatcttcttcttccactttttgggaggtgccatggtcttcttcctctcagtgatggcctttgaccgcctcattgccatctcccggcccctccgctatgtcaccgtcatgaacactcagctctgggtggggctggtggtagccacctgggtgggaggctttgtccactctattgtccagctggctctgatgctcccactgcccttctgtggccccaacattttggataacttctactgtgatgttccccaagtactgagacttgcctgcactgacacctcactgctggagttcctcaagatctccaacagtgggctgctggatgtcgtctggttcttcctcctcctgatgtcctacttattcatcctggtgatgctgaggtcacatccaggggaggcaagaaggaaggcagcttccacctgcaccacccacatcatcgtggtttccatgatcttcgttccaagcatttacctctatgcccggcccttcactccattccctatggacaagcttgtgtccatcggccacacagtcatgacccccatgctcaaccccatgatctataccctgaggaaccaggacatgcaggcagcagtgagaagattagggagacaccggctggtttgagagtgacaatggtaggtttcttctctttggctttgttttccctttgtgaagtggagagggagctactacctttgctctcttcatagtgtgttgaggttcatcatagcagggaatgaattttgaaactaagcaacttcgtgttttaggaaaaaagaaagtatcctctttggtggttaaggtttgtgataaagagttttaac

SEQ ID NO: 400 - protein, 307 aa, Homo sapiens
METGNLTWVSDFVFLGLSQTRELQRFLFLMFLFVYITTVMGNILIIITVTSDSQLHTPMYFLLRNLAVLDLCFSSVTAPKMLVDLLSEKKTISYQGCMGQIFFFHFLGGAMVFFLSVMAFDRLIAISRPLRYVTVMNTQLWVGLVVATWVGGFVHSIVQLALMLPLPFCGPNILDNFYCDVPQVLRLACTDTSLLEFLKISNSGLLDVVWFFLLLMSYLFILVMLRSHPGEARRKAASTCTTHIIVVSMIFVPSIYLYARPFTPFPMDKLVSIGHTVMTPMLNPMIYTLRNQDMQAAVRRLGRHRLV

SEQ ID NO: 401 - DNA, 1333 bp, Homo sapiens
  source
  (1)..(1333)
  CDS (201)..(1133)
gtaagtctctggaacccttgaaaacatatggaacttcctccccgtggagggctttcctaagctacatctcggattgacactcaacaactcaacttaatcaactcaatcctgactgtccaaggaaaatgattgaattttcattttttttgtttgtttgtttgtttcaatggtttctctgtaggaacgtgggggaagatcctatggaaccacagaacaccacacaggtatcaatgtttgtcctcttagggttttcacagacccaagagctccagaaattcctgttccttctgttcctgttagtctatgttaccaccattgtgggaaacctccttatcatggtcacagtgacttttgactgccggctccacacacccatgtattttctgctccgaaatctagctctcatagacctctgctattccacagtcacctctccaaagatgctggtggacttcctccatgagaccaagacgatctcctaccagggctgcatggcccagatcttcttcttccaccttttgggaggtgggactgtcttttttctctcagtcatggcctatgaccgctacatagccatctcccagcccctccggtatgtcaccatcatgaacactcaattgtgtgtgggcctggtagtagccgcctgggtggggggctttgtccactccattgtccaactggctctgatacttccactgcccttctgtggccccaatatcctagataacttctactgtgatgttccccaagtactgagacttgcctgcactgatacctccctcctggagttcctcatgatctccaacagtgggctgctagttatcatctggttcctcctccttctgatctcttatactgtcatcctggtgatgctgaggtcccactcgggaaaggcaaggaggaaggcagcttccacctgcaccacccacatcatcgtggtgtccatgatcttcattccctgtatctatatctatacctggcccttcaccccattcctcatggacaaggctgtgtccatcagctacacagtcatgacccccatgctcaaccccatgatctacaccctgagaaaccaggacatgaaagcagccatgaggagattaggcaagtgcctagtaatttgcagggagtaaactttaagtaagttgactttaaatgacaaatttctctggatttttattttcccacatgaaaaatggaggaaagtctttataaagcataacaaatcagattacacttatatttcttgaggacctagtgctgtgtcaagtactgtgttaagcacttccacgctttttttctttttttttttttttagatggagccttgctct

SEQ ID NO: 402 - protein, 310 aa, Homo sapiens
MEPQNTTQVSMFVLLGFSQTQELQKFLFLLFLLVYVTTIVGNLLIMVTVTFDCRLHTPMYFLLRNLALIDLCYSTVTSPKMLVDFLHETKTISYQGCMAQIFFFHLLGGGTVFFLSVMAYDRYIAISQPLRYVTIMNTQLCVGLVVAAWVGGFVHSIVQLALILPLPFCGPNILDNFYCDVPQVLRLACTDTSLLEFLMISNSGLLVIIWFLLLLISYTVILVMLRSHSGKARRKAASTCTTHIIVVSMIFIPCIYIYTWPFTPFLMDKAVSISYTVMTPMLNPMIYTLRNQDMKAAMRRLGKCLVICRE

SEQ ID NO: 403 - DNA, 1318 bp, Homo sapiens
  source
  (1)..(1318)
  CDS (201)..(1118)
agataaaattatgatcttgttgaattctgaatgtctttaagtaatagattatagaaagtcactgtaagagtgagcagaatgatataaaatgaggctttgaatttgaatataataattctgacttccttctccttctcttcttcaaggtaactgcagaggctatttcctggaatgaatcaacgagtgaaacgaataactctatggtgactgaattcatttttctgggtctctctgattctcagggactccagaccttcctatttatgttgttttttgtattctatggaggaatcgtgtttggaaaccttcttattgtcataacagtggtatctgactcccaccttcactctcccatgtacttcctgctagccaacctctcactcattgatctgtctctgtcttcagtcacagcccccaagatgattactgactttttcagccagcgcaaagtcatctctttcaagggctgccttgttcagatatttctccttcacttctttggtgggagtgagatggtgatcctcatagccatgggctttgacagatatatagcaatatgcaaacccctacactacactacaattatgtgtggcaacgcatgtgtcggcattatggctgtcgcatggggaattggctttctccattcggtgagccagttggcctttgccgtgcacttacccttctgtggtcccaatgaggtcgatagtttttattgtgaccttcctagggtaatcaaacttgcctgtacagatacctacaggctagatattatggtcattgctaacagtggtgtgctcactgtgtgttcttttgttcttctaatcatctcatacactatcatcctaatgaccatccagcatcgccctttagataagtcgtccaaagctctgtccactttgactgctcacattacagtagttcttttgttctttggaccatgtgtctttatttatgcctggccattccccatcaagtcattagataaattccttgctgtattttattctgtgatcacccctctcttgaacccaattatatacacactgaggaacaaagacatgaagacggcaataagacagctgagaaaatgggatgcacattctagtgtaaagttttagatcttatataactgtgagattaatctcagataatgacacaaaatatagtgaagttggtaagttatttagtaaagctcatgaaaattgtgccctccattcccatataatttattaattgtctaggaacttccacatacattgcctcaatttatctttcaacaacttgtgtgttatattttggaatacagatacaaagttat

SEQ ID NO: 404 - protein, 305 aa, Homo sapiens
MVTEFIFLGLSDSQGLQTFLFMLFFVFYGGIVFGNLLIVITVVSDSHLHSPMYFLLANLSLIDLSLSSVTAPKMITDFFSQRKVISFKGCLVQIFLLHFFGGSEMVILIAMGFDRYIAICKPLHYTTIMCGNACVGIMAVAWGIGFLHSVSQLAFAVHLPFCGPNEVDSFYCDLPRVIKLACTDTYRLDIMVIANSGVLTVCSFVLLIISYTIILMTIQHRPLDKSSKALSTLTAHITVVLLFFGPCVFIYAWPFPIKSLDKFLAVFYSVITPLLNPIIYTLRNKDMKTAIRQLRKWDAHSSVKF

SEQ ID NO: 405 - DNA, 1351 bp, Homo sapiens
  source
  (1)..(1351)
  CDS (201)..(1151)
atttgatctttgtcacattgctgaatgttaagaactattattatttattccattttacagatgaggaaagtgagacccagaaaattctgctggttgttgaatagcatagagctgttgagttgccatttggtctgtgatagagtctatgttttaaccactgtcacttaattttgtttctgatctcaccagatacagtatccatgcctagtcagaactatagcatcatatctgaatttaacctctttggcttctcagccttcccccagcacctcctgcccatcttgttcctgctgtacctcctgatgttcctgttcacattgctgggcaaccttctcatcatggccacaatctggattgaacacagactccacacacccatgtacctcttcttgtgcaccctctccgtctctgagattctgttcactgttgccatcacccctcgcatgctggctgatctgctttccacccatcattccatcacctttgtggcttgtgccaaccagatgttcttctccttcatgtttggcttcactcactccttccttctcctggtcatgggctatgatcgctatgtggccatctgccacccactgcgttacaatgtgctcatgagcccccgtgactgtgcccatcttgtggcctgtacctgggctggtggctcagtcatggggatgatggtgacaacgatagttttccacctcactttctgtgggtctaatgtgatccaccattttttctgtcatgtgctttccctcttgaagttggcctgtgaaaacaagacatcatctgtcatcatgggtgtgatgctggtgtgtgtcacagccctgataggctgtttattcctcatcatcctctcctatgtcttcattgtggctgccatcttgaggattccctctgccgaaggccggcacaagacattttctacgtgtgtatcccacctcactgtggtggtcacgcactatagttttgcctcctttatctacctcaagcccaagggcctccattctatgtacagtgacgccttgatggccaccacctatactgtcttcacccccttccttagcccaatcattttcagcctaaggaacaaggagctgaagaatgccataaataaaaacttttacagaaaattctgtcctccaagttcctgagcgccagtttggtggtgatgaaatataataatgtgtatctccatagggctgttgtaagtgttcaggtatgtgaaaatatgtgtttgatacatactagctattgttttcccttccctttttgcttaagctcaagtgatcataatcttttctttatgagccattatgatgacctttatcccattatctgtgcctagaaatgt

SEQ ID NO: 406 - protein, 316 aa, Homo sapiens
MPSQNYSIISEFNLFGFSAFPQHLLPILFLLYLLMFLFTLLGNLLIMATIWIEHRLHTPMYLFLCTLSVSEILFTVAITPRMLADLLSTHHSITFVACANQMFFSFMFGFTHSFLLLVMGYDRYVAICHPLRYNVLMSPRDCAHLVACTWAGGSVMGMMVTTIVFHLTFCGSNVIHHFFCHVLSLLKLACENKTSSVIMGVMLVCVTALIGCLFLIILSYVFIVAAILRIPSAEGRHKTFSTCVSHLTVVVTHYSFASFIYLKPKGLHSMYSDALMATTYTVFTPFLSPIIFSLRNKELKNAINKNFYRKFCPPSS

SEQ ID NO: 407 - DNA, 1677 bp, Homo sapiens
  source
  (1)..(1677)
  CDS (201)..(203)
  CDS (548)..(1477)
ttgaccatcatttggtgatcattatttatcatctgactaaagaccacctttctcataaatattggaatccttatatcattatataatatgaaaccataaccttagatactacttcttcccatgcttgtaatcccagcagtttgggatgccgaggcgggtgaatcacctaaggtcaggagtttgagaccttcctggccaacatggtgaaacccagtcttgactaaaaatacaaaaattagccaggcatggtggcgtgcgcctgtaatcctagctacttgggaggctgagataggagaatcgcttgaacctgggaggcggaggttgcagtgagccagcatcacgccattgcaccccagcctgggcataaagattaaaactctaactcaaaaaaataaaaataaaaaataaaataaaacgtagcttcttcactgtagaatatgtatgacagcatttctggtaagtttgtaatgcatgtttttctcatgttctgttctttcttgtgtgtttttttgtttgtttgtttgtttttggtagaaacatcaaccaggtgaaagcagggaatgagacacaaatttcagaatttcttcttctaggattttcagagaaacaagaattgcagcccttcctctttgggctgttcctgtccatgtacctggtcactgtgctcgggaacctgctcatcatcctggccgcaatctcagactcctgcctccacacccccatgtacttctttctctccaacctgtccttcgtagatatctgttttgcctccaccatggtcccaaagatgttggtgaacatccagacacagagcaaagtcattacctatgcaggttgcatcacccagatgtgcttttttgtactctttatagtgttggacagcttactcctgaccgtgatggcctatgaccagtttgtggccatctgtcaccccctgcactacacggtcatcatgagccctcagctctgtggactgctggttctggtgtcctggatcatgagtgtcctaaactccatgttacaaagcttagtgacattgcagttgtccttctgcacagacttggaaatccctcactttttctgtgaacttaatgagatgatccaccttgcctgttctgacacctttgtgaacaacatggtgatgcattttgcagctgtgctgctggacggtggtcctctcgttgggatcctttattcttactgtaggatagtttcctccatacgtgcaatctcgtcaactcaggggaagtacaaggcactttccacctgtgcatctcacctctcagttgtctccatattttatggtacggggctaggggtgtaccttagctctactatgacccaaaacttacactcaactgctgtcgcctcggtgatgtacactgtggtcacccccatgctcaaccccttcatttacagtctgaggaataaagacataaagggggctctgacacaattcttcagagggaaacaataaaagagccatttttcggctgggcacagtggctcaagcctgtaatcccagcactttgggaggcagaggtgggcagatcatgaggtcaggagttcaagaccagcctggccaacatggtgaaacccccatctctactaaaaatacaaaaattagctgggcgtagtggcatgcgcctgtagtcccagccactcaggaggttgagg

SEQ ID NO: 408 - protein, 310 aa, Homo sapiens
MVKAGNETQISEFLLLGFSEKQELQPFLFGLFLSMYLVTVLGNLLIILAAISDSCLHTPMYFFLSNLSFVDICFASTMVPKMLVNIQTQSKVITYAGCITQMCFFVLFIVLDSLLLTVMAYDQFVAICHPLHYTVIMSPQLCGLLVLVSWIMSVLNSMLQSLVTLQLSFCTDLEIPHFFCELNEMIHLACSDTFVNNMVMHFAAVLLDGGPLVGILYSYCRIVSSIRAISSTQGKYKALSTCASHLSVVSIFYGTGLGVYLSSTMTQNLHSTAVASVMYTVVTPMLNPFIYSLRNKDIKGALTQFFRGKQ

SEQ ID NO: 409 - DNA, 1339 bp, Homo sapiens
  source
  (1)..(1339)
  CDS (201)..(1139)
agaatggctggataactctacacaaatagaataaaaatagataccacttcctgagagattcattgtctttgtaaggactccaggaagggtgacaaatgtccatcaaaaggtgatattgtaaagtgatgacaagctgagctgccacttgctgttcattaaacgttgctttttcctccttccccagcagacacaacagctacatggaagcagaaaaccttacagaattatcaaaatttctcctcctgggactctcagatgatcctgaactgcagcccgtcctctttgggctgttcctgtccatgtacctggtcacggtgctggggaacctgctcatcattctggccgtcagctctgactcccacctccacacccccatgtacttcttcctctccaacctgtcctttgttgacatctgtttcatctccaccacagtccccaagatgctagtgagcatccaggcacggagcaaagacatctcctacatggggtgcctcactcaggtgtattttttaatgatgtttgctggaatggatactttcctactggccgtgatggcctatgaccggtttgtggccatctgccacccactgcactacacggtcatcatgaacccctgcctctgtggcctcctggttctggcatcttggttcatcattttctggttctccctggttcatattctactgatgaagaggttgaccttctccacaggcactgagattccgcatttcttctgtgaaccggctcaggtcctcaaggtggcctgctctaacaccctcctcaataacattgtcttgtatgtggccacggcactgctgggtgtgtttcctgtagctgggatcctcttctcctactctcagattgtctcctccttaatgggaatgtcctccaccaagggcaagtacaaagccttttccacctgtggatctcacctctgtgtggtctccttgttctatggaacaggacttggggtctatctgagttctgctgtgacccattcttcccagagcagctccaccgcctcagtgatgtacgccatggtcacccccatgctgaaccccttcatctacagcctgaggaacaaggatgtgaagggggccctggaaagactcctcagcagggccgactcttgtccatgacaaatcagggcctcagaactaagaggacacactgcgtacccctaaggcaaatgttgtgggtttaaatatccggctctttttctcttttaaaaaatgtgcttgatgtgggatttttggttgttgttattgggttgtttgttgttgttattgttattgtttttgagacagagtctggctctgtcgcccaggctagagtgcag

SEQ ID NO: 410 - protein, 312 aa, Homo sapiens
MEAENLTELSKFLLLGLSDDPELQPVLFGLFLSMYLVTVLGNLLIILAVSSDSHLHTPMYFFLSNLSFVDICFISTTVPKMLVSIQARSKDISYMGCLTQVYFLMMFAGMDTFLLAVMAYDRFVAICHPLHYTVIMNPCLCGLLVLASWFIIFWFSLVHILLMKRLTFSTGTEIPHFFCEPAQVLKVACSNTLLNNIVLYVATALLGVFPVAGILFSYSQIVSSLMGMSSTKGKYKAFSTCGSHLCVVSLFYGTGLGVYLSSAVTHSSQSSSTASVMYAMVTPMLNPFIYSLRNKDVKGALERLLSRADSCP

SEQ ID NO: 411 - DNA, 1381 bp, Homo sapiens
  source
  (1)..(1381)
  CDS (201)..(1181)
aggagagatttagaagatggcagaagtttgtttttgttcaatcagctacctacgaagcccaaaactcatatactgtatagccgagaaaaagtaaactacattctcttcctaattattcttttgaaaaatgacttcatgttcattatcttctcttcattcttaaaaaaggaacacattttataaaagagtcctgactgataatgtgtcccttgaccttgcaggtcactggcctaatgaatgtctctgagccaaattccagctttgcttttgtaaatgaatttatactccaaggtttctcttgtgagtggacaattcagatcttcctcttctcactctttactacaacatatgcactgactataacagggaatggagccattgcttttgtcctgtggtgtgaccggcgacttcacactcccatgtacatgttcctgggaaatttctcctttttagagatatggtatgtctcttctacagttcccaagatgttggtcaacttcctttcagagaaaaaaaacatctcctttgctggatgttttctccagttttatttcttcttctctttgggtacatcagaatgcttgcttttgactgtgatggcctttgatcagtaccttgctatctgccgtcccttgctctatcctaatatcatgactgggcatctctatgccaaactggtcatactgtgctgggtttgtggatttctgtggttcctgatccccattgttctcatctctcagatgcccttctgtggcccaaacattattgaccatgttgtgtgtgacccagggccacgatttgcattggattgtgtttctgccccaagaatccaactgttttgctacactctaagctcattagttatttttggtaacttcctctttattattggatcctatactcttgtcctgaaagctatgttgggtatgccttcaagcactgggagacataaggccttctctacctgtgggtctcatttggctgtggtatcactgtgctatagctctcttatggtcatgtatgtgagcccaggactcggacattctacagggatgcagaaaattgaaactttgttctatgctatggtgaccccactcttcaatccccttatctatagcctccagaataaggagataaaggcagccctgaggaaagttctggggagttccaacataatctaaggcatattagattattcctccatgatcagatcagtacagtctaacaaagagaaatcagaattatatagttatttaaatctaaaaaatatggacctagtgatattgactatatcagcctatgaaattaaacacctgttggaccccttacaaattaaagttgccaaatcatatagataaatggaagcgtgtggtttcccttt

SEQ ID NO: 412 - protein, 326 aa, Homo sapiens
MCPLTLQVTGLMNVSEPNSSFAFVNEFILQGFSCEWTIQIFLFSLFTTTYALTITGNGAIAFVLWCDRRLHTPMYMFLGNFSFLEIWYVSSTVPKMLVNFLSEKKNISFAGCFLQFYFFFSLGTSECLLLTVMAFDQYLAICRPLLYPNIMTGHLYAKLVILCWVCGFLWFLIPIVLISQMPFCGPNIIDHVVCDPGPRFALDCVSAPRIQLFCYTLSSLVIFGNFLFIIGSYTLVLKAMLGMPSSTGRHKAFSTCGSHLAVVSLCYSSLMVMYVSPGLGHSTGMQKIETLFYAMVTPLFNPLIYSLQNKEIKAALRKVLGSSNII

SEQ ID NO: 413 - DNA, 1012 bp, Homo sapiens
  source
  (1)..(1012)
  CDS (201)..(812)
  modified_base (64)..(65): a, t, c, g, unknown or other
  modified_base (95)..(194): a, t, c, g, unknown or other
  modified_base (242)..(242): a, t, c, g, unknown or other
  modified_base (245)..(245): a, t, c, g, unknown or other
  modified_base (913)..(913): a, t, c, g, unknown or other
  modified_base (934)..(934): a, t, c, g, unknown or other
  modified_base (936)..(936): a, t, c, g, unknown or other
  modified_base (946)..(1012): a, t, c, g, unknown or other
atgctctcggtatacttctctgtaatctgagccaaacaaatgggagttaggtatgttttttccnncccccgagcgcagactaagaaccagttgcnnnnnnnnnnnnnnnnnnnnnnnnnnnnnnnnnnnnnnnnnnnnnnnnnnnnnnnnnnnnnnnnnnnnnnnnnnnnnnnnnnnnnnnnnnnnnnnnnnnngactgaatgtttctcctgggagcgatggcttatgaccgatttgctgcnatntgccatcctctgaactacccagtgattatgaacagaggggtttttatgaaattagtaatattctcatggatctcagggatcatggtggctactgtgcagaccacttgggtatttagttttccattttgtggccccaatgaaattaatcatctcttctgtgagactcccccggtactagagcttgtgtgtgcagacaccttcttatttgaaatctatgccttcacaggcaccattttgattgttatggttcctttcttgttgatcctcttgtcttacattcgagttctgtttgccatcctgaagatgccatcaactactgggagacaaaaggccttttccacctgtgcctctcacctcacatctgtgaccctgttctatggcacagccaatatgacttatttacaacccaaatctggctactcacccgaaaccaagaaactgatctcattggcttacacgttgcttacccctctgctcaatccgctcatctatagcttacgaaacagtgagatgaagaggactttgataaaactatggcgaagaaaagtgattttacacacattctgattgtgttgagaagctgagtaagatttggccactgcctgagtgaactctatttaaatttaataaagggtgaaaacagattgcttttttgtaggtttttaatnccccccgaggggaggataaanancccgatgctnnnnnnnnnnnnnnnnnnnnnnnnnnnnnnnnnnnnnnnnnnnnnnnnnnnnnnnnnnnnnnnnnnn

SEQ ID NO: 414 - protein, 203 aa, Homo sapiens
  MOD_RES (15)..(15): Variable amino acid
MFLLGAMAYDRFAAXCHPLNYPVIMNRGVFMKLVIFSWISGIMVATVQTTWVFSFPFCGPNEINHLFCETPPVLELVCADTFLFEIYAFTGTILIVMVPFLLILLSYIRVLFAILKMPSTTGRQKAFSTCASHLTSVTLFYGTANMTYLQPKSGYSPETKKLISLAYTLLTPLLNPLIYSLRNSEMKRTLIKLWRRKVILHTF

SEQ ID NO: 415 - DNA, 1315 bp, Homo sapiens
  source
  (1)..(1315)
  CDS (201)..(1115)
aattatggctgaaatattttatataaaaaacaactatttgatattaagctataaaatatttaattaataaaaatattacttagctaatttacccagagttaaattattatatataaaccaaaggtcatctaaatcatgaatcctcagcatgggataccctcctccaaaagtagaatagcaactcaatccctacaaacaccatggtttttctttcctccgtagaaactgaccaaaggaaaatgtcagcaggaaaccattcctcagtgactgagttcattctggctgggctctcagaacagccagagctccagctgcgcctcttcctcctgttcttaggaatctatgtggtcacagtggtgggcaacttgagcatgatcacactgattgggctcagttctcacctgcatacccccatgtactatttcctcagtggtctgtccttcattgatatctgccattccactatcattacccccaaaatgctggtgaactttgtgacagagaagaacatcatctcctaccctgaatgcatgactcagctttacttcttcctcatttttgctattgcagagtgtcacatgttggctgtaacggcatatgaccgctatgttgccatctgcagccccttgctgtacaatgtcatcatgtcctatcaccactgcttctggctcacagtgggagtttacattttaggcatccttggatctacaattcacaccggctttatgttgagactctttttgtgcaagactaatgtgattaaccattatttttgtgatctcttccctctcttggggctctcctgctccagcacctacatcaatgaattactggttctggtcttgagtgcatttaacatcctgacgcctgccttaaccatccttgcttcttacatctttatcattgccagcatcctccgcattcgctccactgagggcaggtccaaagccttcagcacttgcagctcccacatcttggctgttgctgttttctttgggtctgcagcattcatgtacctgcagccatcatctgtcagctccatggaccaggggaaagtgtcctctgtgttttatactattgttgtgcccatgctgaacccccaatctatagcctaagaaataaggatgtcaaatttgccctgaagaaaaatctggacagcaaagcatgttcatgaatccaattattgccatgttgtcatatcaaaacaggctttcagtttgattagatatgtaatatgttagatttattgtgcaaatttatcaaaatatagtgatgctcttttatgtaacacacctccaaaatattccttcagtct

SEQ ID NO: 416 - protein, 304 aa, Homo sapiens
MVFLSSVETDQRKMSAGNHSSVTEFILAGLSEQPELQLRLFLLFLGIYVVTVVGNLSMITLIGLSSHLHTPMYYFLSGLSFIDICHSTIITPKMLVNFVTEKNIISYPECMTQLYFFLIFAIAECHMLAVTAYDRYVAICSPLLYNVIMSYHHCFWLTVGVYILGILGSTIHTGFMLRLFLCKTNVINHYFCDLFPLLGLSCSSTYINELLVLVLSAFNILTPALTILASYIFIIASILRIRSTEGRSKAFSTCSSHILAVAVFFGSAAFMYLQPSSVSSMDQGKVSSVFYTIVVPMLNPQSIA

SEQ ID NO: 417 - DNA, 1318 bp, Homo sapiens
  source
  (1)..(1318)
  CDS (201)..(1118)
agatagaattatgatcttgttgaattctgaatgtctttaagtaatagattatagaaagtcactgtaagagtgagcagaatgatataaaatgaggctttgaatttgaatataataattctgacttccttctccttctcttcttcaaggtaactgcagaggctatttcctggaatgaatcaacgagtgaaacgaataactctatggtgactgaattcatttttctgggtctctctgattctcaggaactccagaccttcctatttatgttgttttttgtattctatggaggaatcgtgtttggaaaccttcttattgtcataacagtggtatctgactcccaccttcactctcccatgtacttcctgctagccaacctctcactcattgatctgtctctgtcttcagtcacagcccccaagatgattactgactttttcagccagcgcaaagtcatctctttcaagggctgccttgttcagatatttctccttcacttctttggtgggagtgagatggtgatcctcatagccatgggctttgacagatatatagcaatatgcaagcccctacactacactacaattatgtgtggcaacgcatgtgtcggcattatggctgtcacatggggaattggctttctccattcggtgagccagttggcgtttgccgtgcacttactcttctgtggtcccaatgaggtcgatagtttttattgtgaccttcctagggtaatcaaacttgcctgtacagatacctacaggctagatattatggtcattgctaacagtggtgtgctcactgtgtgttcttttgttcttctaatcatctcatacactatcatcctaatgaccatccagcatcgccctttagataagtcgtccaaagctctgtccactttgactgctcacattacagtagttcttttgttctttggaccatgtgtctttatttatgcctggccattccccatcaagtcattagataaattccttgctgtattttattctgtgatcacccctctcttgaacccaattatatacacactgaggaacaaagacatgaagacggcaataagacagctgagaaaatgggatgcacattctagtgtaaagttttagatcttatataactgtgagattaatctcagataatgacacaaaatatagtgaagttggtaagttatttagtaaagctcatgaaaattgtgccctccattcccatataatttagtaattgtctaggaacttccacatacattgcctcaatttatctttcaacaacttgtgtgttatattttggaatacagatacaaagttat

SEQ ID NO: 418 - protein, 305 aa, Homo sapiens
MVTEFIFLGLSDSQELQTFLFMLFFVFYGGIVFGNLLIVITVVSDSHLHSPMYFLLANLSLIDLSLSSVTAPKMITDFFSQRKVISFKGCLVQIFLLHFFGGSEMVILIAMGFDRYIAICKPLHYTTIMCGNACVGIMAVTWGIGFLHSVSQLAFAVHLLFCGPNEVDSFYCDLPRVIKLACTDTYRLDIMVIANSGVLTVCSFVLLIISYTIILMTIQHRPLDKSSKALSTLTAHITVVLLFFGPCVFIYAWPFPIKSLDKFLAVFYSVITPLLNPIIYTLRNKDMKTAIRQLRKWDAHSSVKF

SEQ ID NO: 419 - DNA, 1339 bp, Homo sapiens
  source
  (1)..(1339)
  CDS (201)..(1139)
aaaaatttgaatcactatacatagattgtctagcacatatatgagccacttctaaagtaaatgttctttctttatttaagtacagggtaaccctaaatgtcccatgctgttctggatactggatcatgaaggaatcattccttttccatcagagtaatatcttgttctgcaactaaggaattatatatacctgagtaaaaacgagaggctggaatcatacaggtgcaaaggaattcctcctggtagggttaactgaaaatcctaatttgcagatcccactctttttgcttgtcactctgatttatttcatcactttgttggataatttgggtataattattttaatctggttaaatgcccaacttcatactccaatgtacttcttccttggcaacctctccttttgtgatatctgctactctactgtctttgctcctaagatgctagtcaatttcctatcaaaacataagtccagtacattttctggctgtgttctacagagtttcccttttgcagtatatgtaaccacaaaggacattctcctgtccatgatggcttatgaccattacgtggccatagctaatcccttgttgtatacagtcattatggcccaaaaagtttgtattcagatggtccttgcttcttacttaggtgggctcattaattccctgacacacacaataggtttgctcaaattagacttctgtggtcctaatattgtgaatcattatttctgtgatgttcctcctcttctgaggctttcttgctctgatgctcatatcaatgaaatgctgcccttggtcttctctgggctcattgcaatgttcactttcattgtcattatggtgtcttatatctgcatcatcattgccatccagagaatccatgcagctgagggaaggtacaaagccttctccacttgtgtctcccacctaaccacggtgaccttattctatgggtctgtttcttttagttatatccagccaagttctcagtattccttggaacaggagaaggtcttggctgtgttttatacactggtgatccccatgctaaacccacttatttatagcctgagaaataaggatgtaaaagatgcagccaaaaggttgatatggtgggggaaaaaccccacttgactcagtcctgcatatagctttgctaacctaacatttacctgcaaatatatggcctatctttaaaatgatatcaaacaattataaataaaactatactccagatgctcttgtacagtttggatcaggaatgatgagtttgacttgaagactgaaaatcactttatttcacaatttattgtgttgatgacttaataaaatca

SEQ ID NO: 420 - protein, 312 aa, Homo sapiens
TRGWNHTGAKEFLLVGLTENPNLQIPLFLLVTLIYFITLLDNLGIIILIWLNAQLHTPMYFFLGNLSFCDICYSTVFAPKMLVNFLSKHKSSTFSGCVLQSFPFAVYVTTKDILLSMMAYDHYVAIANPLLYTVIMAQKVCIQMVLASYLGGLINSLTHTIGLLKLDFCGPNIVNHYFCDVPPLLRLSCSDAHINEMLPLVFSGLIAMFTFIVIMVSYICIIIAIQRIHAAEGRYKAFSTCVSHLTTVTLFYGSVSFSYIQPSSQYSLEQEKVLAVFYTLVIPMLNPLIYSLRNKDVKDAAKRLIWWGKNPT

SEQ ID NO: 421 - DNA, 1306 bp, Homo sapiens
  source
  (1)..(1306)
  CDS (201)..(1106)
taaatcagtttattatctagaaacagagcaagtactggtgaaaatgacttaagagcttaagtaagtatattcctgtatctcatttagttaacccaagaggaaaatattgttcaaaatatggatgaattaactgtcttgaatttgctatatctgcagatggagagcaaactaaaagagaaaaatcaaatgtgactacaataatggaatttgttcttttggggttttctgatattcccaatctccactggatgctttttagtatatttttacttatgtatttgatgatcctgatgtgcaatggcatcataatactactaataaaaattcaccccgctctccagactcccatgtatttttttcttagcaatttttcccttttggaaatctgttatgtaacaatcattatcccaagaatgctcatggacatttggactcagaaaggaaatatttctttgtttgcttgtgctacacaaatgtgtttttttcttatgcttggaggcacggagtgtctccttctgacagtgatggcctatgaccgctacgtggctatttgtaagcctttgcagtatcctctagtgatgaaccacaaagtctgcattcagctgataatagcttcctggaccatcacaattcctgtagtaattggggaaacatgccaaattttccttttgcccttttgcggaactaacacaattaatcatttcttttgtgacatcccgccaatactcaagcttgcttgtggaaacatatttgtgaatgagataacagtccatgtagtagcggtggtgtttatcacggtgccatttctgttgattgttgtctcttatggcaaaattatctccaacattttgaaattgtcatcagccagaggaaaggctaaagccttctccacctgctcatctcacctaatagttgtaatcttattctttggagcaggtactatcacttatttacagcccaaaccacatcagtttcaaaggatggggaaactgatttctcttttctacaccattctgattccaactttgaatcctattatatataccctgaggaacaaagatatcatggtggcattgagaaaattactagctaagttattaacatgagatgaagacttgaaattacagaaataatttctttataggtttgtcatgtggcttcagtgaatttttttttaactttgtccctatggtattcaataatgagtactgaaatttaaatacaaacttacattatgtcaaggggtgttttattcacagaatatagttatgtgctactgtgcagttggagcacaatttaactaagg

SEQ ID NO: 422 - protein, 301 aa, Homo sapiens
MEFVLLGFSDIPNLHWMLFSIFLLMYLMILMCNGIIILLIKIHPALQTPMYFFLSNFSLLEICYVTIIIPRMLMDIWTQKGNISLFACATQMCFFLMLGGTECLLLTVMAYDRYVAICKPLQYPLVMNHKVCIQLIIASWTITIPVVIGETCQIFLLPFCGTNTINHFFCDIPPILKLACGNIFVNEITVHVVAVVFITVPFLLIVVSYGKIISNILKLSSARGKAKAFSTCSSHLIVVILFFGAGTITYLQPKPHQFQRMGKLISLFYTILIPTLNPIIYTLRNKDIMVALRKLLAKLLT

SEQ ID NO: 423 - DNA, 1339 bp, Homo sapiens
  source
  (1)..(1339)
  CDS (201)..(1139)
ctcagaattcaagaaagaagattatttacctgaagaacaacatcagtagttgtctgtattttatccttgtgcatgtgtatgtgtataaaatatgtatcaatttaaatactttatatatgtaatatatatgtattttccccctgacaaattatgagtctatctttttttcacagtagattttgtgaaaaagaaagaaacatatggctgatgataattttacagttgtcactgagtttattcttttgggattgacagatcatgctgaactaaaagctgtgctttttgtggtgttcctggtgatttacgccattaccttgttgaggaatctgggcatgatcctcttaatccaaatcacctccaaactccacacacccatgtactttttactcagctgtctttcatttgtggatgcctgctattcatctgcaattgcacccaaaatgctggtgaacctcctggttgtgaaggcaacaatttctttctctgcttgcatggtacagcatttgtgtttcggagtgttcatcaccacagaaggcttcttactgtcagtgatggcctatgaccgctatgtggccattgtgagtcccttgctttacactgtagccatgtctgatagaaagtgtgtggagcttgtcacaggatcatggataggtggaatagttaacacattaatccacacaatcagcttgaggagactgtccttttgtaggctaaatgctgtcagccacttcttctgtgacattccttcactgctaaagctgtcatgttctgacacctccatgaatgagttgttgctgttaaccttctccggagtcattgccatggccaccttcttgactgtgatcatttcctacatcttcattgcttttgctagcctaaggatccactcagcatcaggcagacagcaagccttctccacctgtgcctctcacctgactgctgtgaccatattctatggtaccttaatctttagctacattcagccaagctcccagtattttgtggaacaagagaaagtggtttctatgttctatacgctagggattcccatgttaaacctgttgatacacagtttgagaaacaaggacgtaaaggaggcagtgaaaagggccatagaaatgaaacatttcctctgttaatttcaagtcactattaatcctacaacattctgtcattcagttctcacttccaagaattccgtgaatgccaaagcttctcaagactttacagatattctcattctatatacttttgttgcatttcaggaggcagccagaagagaaaacttaattcacatacctgcaacacaaaaacaacaatctatcacttagttatgctg

SEQ ID NO: 424 - protein, 312 aa, Homo sapiens
MADDNFTVVTEFILLGLTDHAELKAVLFVVFLVIYAITLLRNLGMILLIQITSKLHTPMYFLLSCLSFVDACYSSAIAPKMLVNLLVVKATISFSACMVQHLCFGVFITTEGFLLSVMAYDRYVAIVSPLLYTVAMSDRKCVELVTGSWIGGIVNTLIHTISLRRLSFCRLNAVSHFFCDIPSLLKLSCSDTSMNELLLLTFSGVIAMATFLTVIISYIFIAFASLRIHSASGRQQAFSTCASHLTAVTIFYGTLIFSYIQPSSQYFVEQEKVVSMFYTLGIPMLNLLIHSLRNKDVKEAVKRAIEMKHFLC

SEQ ID NO: 425 - DNA, 1336 bp, Homo sapiens
  source
  (1)..(1336)
  CDS (201)..(1136)
tttacatgaaacacatttattatatttgaaaataagattaaataaatattatttgaggtaaactttacttactcaaaggggatacctaaagcatgaatatctgggaaccttttctcaatgaagaataataaagtccctcccacaaccatggggtttttttgttttgttttttctcttcctgcagaaactgactggaggagatgtcaggagaaaataattcctcagtgactgagttcattctggctgggctctcagaacagccagagctccagctgcccctcttcctcctgttcttaggaatctatgtggtcacagtggtgggcaacctgggcatgaccacactgatttggctcagttctcacctgcacacccctatgtactatttcctcagcagtctgtccttcattgacttctgccattccactgtcattacccctaagatgctggtgaactttgtgacagagaagaacatcatctcctaccctgaatgcatgactcagctctacttcttcctcgtttttgctattgcagagtgtcacatgttggctgcaatggcgtatgaccgttacatggccatctgtagccccttgctgtacagtgtcatcatatccaataaggcttgcttttctctgattttaggggtgtatataataggcctggtttgtgcatcagttcatacaggctgtatgtttagggttcaattctgcaaatttgatttgattaaccattatttctgtgatcttcttcccctcctaaagctctcttgctctagtatctatgtcaacaaactacttattctatgtgttggtgcatttaacatccttgtccccagcctgaccatcctttgctcttacatctttattattgccagcatcctccacattcgctccactgagggcaggtccaaagccttcagcacttgtagctcccacatgttggcggttgtaatcttttttggatctgcagcattcatgtacttgcagccatcttcaatcagctccatggaccaggggaaagtatcctctgtgttttatactattattgtgcccatgttgaaccctctgatttatagcctgaggaataaagatgtccatgtttccctgaagaaaatgctacagagaagaacattattgtaaacagtaataataagaagatgatatattaatcctaagtagtggactgttacattgtatgaatggatgtctttcactttaatgcatctgtcaataatttttaccatttggtgagattatattaccattattttttcatttcatgaccctttgatgtcatttcccatgtggggttttaactcatatgtatcaatgagacacaa

SEQ ID NO: 426 - protein, 311 aa, Homo sapiens
MSGENNSSVTEFILAGLSEQPELQLPLFLLFLGIYVVTVVGNLGMTTLIWLSSHLHTPMYYFLSSLSFIDFCHSTVITPKMLVNFVTEKNIISYPECMTQLYFFLVFAIAECHMLAAMAYDRYMAICSPLLYSVIISNKACFSLILGVYIIGLVCASVHTGCMFRVQFCKFDLINHYFCDLLPLLKLSCSSIYVNKLLILCVGAFNILVPSLTILCSYIFIIASILHIRSTEGRSKAFSTCSSHMLAVVIFFGSAAFMYLQPSSISSMDQGKVSSVFYTIIVPMLNPLIYSLRNKDVHVSLKKMLQRRTLL

SEQ ID NO: 427 - DNA, 1315 bp, Homo sapiens; identical to SEQ ID NO: 415
  source
  (1)..(1315)
  CDS (201)..(1115)

SEQ ID NO: 428 - protein, 304 aa, Homo sapiens; identical to SEQ ID NO: 416

SEQ ID NO: 429 - DNA, 1345 bp, Homo sapiens
  source
  (1)..(1345)
  CDS (201)..(1145)
caacacacatgtgtttcagtttccttttctataagttgggagctaataataatagtgcaactccatataactgttggggttgaatgaataaaataaatataaaaagcatagaagaatgcttagcttctagtaagttctcccttaatatcagctgttattattattattaggattgatatttctgttcagcagcagtagagatggatggaaccaatggcagcacccaaacccatttcatcctactgggattctctgaccgaccccatctggagaggatcctctttgtggtcatcctgatcgcgtacctcctgaccctcgtaggcaacaccaccatcatcctggtgtcccggctggacccccacctccacacccccatgtacttcttcctcgcccacctttccttcctggacctcagtttcaccaccagctccatcccccagctgctctacaaccttaatggatgtgacaagaccatcagctacatgggctgtgccatccagctcttcctgttcctgggtctgggtggtgtggagtgcctgcttctggctgtcatggcctatgaccggtgtgtggctatctgcaagcccctgcactacatggtgatcatgaaccccaggctctgccggggcttggtgtcagtgacctggggctgtggggtggccaactccttggccatgtctcctgtgaccctgcgcttaccccgctgtgggcaccacgaggtggaccacttcctgcgtgagatgcccgccctgatccggatggcctgcgtcagcactgtggccatcgaaggcaccgtctttgtcctggcggtgggtgttgtgctgtcccccttggtgtttatcctgctctcttacagctacattgtgagggctgtgttacaaattcggtcagcatcaggaaggcagaaggccttcggcacctgcggctcccatctcactgtggtctcccttttctatggaaacatcatctacatgtacatgcagccaggagccagttcttcccaggaccagggcatgttcctcatgctcttctacaacattgtcacccccctcctcaatcctctcatctacaccctcagaaacagagaggtgaagggggcactgggaaggttgcttctggggaagagagagctaggaaaggagtaaaggcatctccacctgacttcacttccatccagggccactggcagcatctggaacggctgaattccagctgatattagcccacgactcccaacttgcctttttctggacttttgtgaggctgtttcagttctgacattatgtgtttttgttgttgctcttaaaattgagacggggtctcactctgtcacctagggtagagt

SEQ ID NO: 430 - protein, 314 aa, Homo sapiens
MDGTNGSTQTHFILLGFSDRPHLERILFVVILIAYLLTLVGNTTIILVSRLDPHLHTPMYFFLAHLSFLDLSFTTSSIPQLLYNLNGCDKTISYMGCAIQLFLFLGLGGVECLLLAVMAYDRCVAICKPLHYMVIMNPRLCRGLVSVTWGCGVANSLAMSPVTLRLPRCGHHEVDHFLREMPALIRMACVSTVAIEGTVFVLAVGVVLSPLVFILLSYSYIVRAVLQIRSASGRQKAFGTCGSHLTVVSLFYGNIIYMYMQPGASSSQDQGMFLMLFYNIVTPLLNPLIYTLRNREVKGALGRLLLGKRELGKE

SEQ ID NO: 431 - DNA, 1363 bp, Homo sapiens
  source
  (1)..(1363)
  CDS (201)..(1163)
atcccagtaacagtatgcgagaatgtgtttgccattttgtaccagaaagcactttgtgctctaaacatgtagatagttgccaaacatgtaagtgaatatttatttctgaatgccatgtcattttactttctcttaagggaagtcaacattattacatgaacatttcagatgtcatctcctttgatattttggtttcagccatgaaaacaggaaatcaaagttttgggacagattttctacttgttggtcttttccaatatggctggataaactctcttctctttgtcgtcattgccaccctctttacagttgctctgacaggaaatatcatgctgatccacctcattcgactgaacaccagactccacactccaatgtactttctgctcagtcagctctccatcgttgacctcatgtacatctccaccacagtgcccaagatggcagtcagcttcctctcacagagtaagaccattagatttttgggctgtgagattcaaacgtatgtgttcttggcccttggtggaactgaagcccttctccttggttttatgtcttatgatcgctatgtagctatctgtcaccctttacattatcctatgcttatgagcaagaagatctgctgcctcatggttgcatgtgcatgggccagtggttctatcaatgctttcatacatacattgtatgtgtttcagcttccattctgtaggtctcggctcattaaccactttttctgtgaagttccagctctactatcattggtgtgtcaggacacctcccagtatgagtatacagtcctcctgagtggacttattatcttgctactaccattcctagccattctggcttcctatgctcgtgtgcttattgtggtattccagatgagctcaggaaaaggacaggcaaaagctgtttccacttgttcctcccacctgattgtggcaagcctgttctatgcaaccactctctttacctacacaaggccacactccttgcgttccccttcacgggataaggcggtggcagtattttacaccattgtcacacctctactgaacccatttatctacagcctgagaaataaggaagtgacgggggcagtgaggagactgttgggatattggatatgctgtagaaaatatgacttcagatctctgtattgattgagcattaacaacataaaaagctgttcctgaaaactatctggaaagatataaatatgtgttttctgtatagaagtcacaaaaacagtgtttatcaatcttgtttaacttgtaaagcaatagaattcaggcttcttaaatctgtgttcccctggcattttaatgcttttacttgccctcttgaatactctgaaatgtga

SEQ ID NO: 432 - protein, 320 aa, Homo sapiens
MKTGNQSFGTDFLLVGLFQYGWINSLLFVVIATLFTVALTGNIMLIHLIRLNTRLHTPMYFLLSQLSIVDLMYISTTVPKMAVSFLSQSKTIRFLGCEIQTYVFLALGGTEALLLGFMSYDRYVAICHPLHYPMLMSKKICCLMVACAWASGSINAFIHTLYVFQLPFCRSRLINHFFCEVPALLSLVCQDTSQYEYTVLLSGLIILLLPFLAILASYARVLIVVFQMSSGKGQAKAVSTCSSHLIVASLFYATTLFTYTRPHSLRSPSRDKAVAVFYTIVTPLLNPFIYSLRNKEVTGAVRRLLGYWICCRKYDFRSLY

SEQ ID NO: 433 - DNA, 1339 bp, Homo sapiens
  source
  (1)..(1339)
  CDS (201)..(1139)
tctcttccttgcctaatttataaattaaagtttataatatgcatttatggatataaaaatagtttatatagggttcagtatcaaccccagtttcaggcatccactgggagtcttgtaatgcagccactgtggataaaagtgaattactgttcttaatttacccttttgtctcccttcaggatggattgtaggaattccccatggaaaattacaatcaaacatcaactgatttcatcttattggggctgttcccacaatcaagaattggccttttcgtattcaccctcatttttctcattttcctaatggctctaattggaaatctatccatgattcttctcatctttttggacatccatctccacacacctatgtatttcctacttagtcagctctccctcattgacctaaattacatctccaccattgttccaaagatggtttatgattttctgtatggaaacaagtctatctccttcactggatgtgggattcagagtttcttcttcttgactttagcagttgcagaagggctgctcctgacatcaatggcctatgatcgttatgtggccatttgctttcctctccactatcccatccgtataagcaaaagagtgtgtgtgatgatgataacaggatcttggatgataagctctatcaactcttgtgctcacacagtatatgcactctgtatcccatattgcaagtccagagccatcaatcattttttctgtgatgttccagctatgttgacgctagcctgcacagacacttgggtctatgagagcacagtgtttttgagcagcaccatctttcttgtgcttcctttcactggtattgcatgttcctatggccgggttctccttgctgtctaccgcatgcactctgcagaagggaggaagaaggcctattcaacctgtagcacccacctcactgtagtgtccttctactatgcaccctttgcttatacctatgtacgtccaagatccctgcgatctccaacagaggacaagattctggctgttttctacaccatcctcaccccaatgctcaaccccatcatctacagcctgagaaacaaggaggtgatgggggccctgacacaagtgattcagaaaatcttctcagtgaaaatgtagacatacgttctgtgttagagtcaaagcgctaggttcatatcaacttagtagtgtacagcagtgaagaaaaacattattacatgcccagtgtgtcaaacagaagttaatctagaagaaatttgtcttttaatttagtcttgacaatattataatacatattaatacatattctaagacatctattttgattttgtttgtgt

SEQ ID NO: 434 - protein, 312 aa, Homo sapiens
MENYNQTSTDFILLGLFPQSRIGLFVFTLIFLIFLMALIGNLSMILLIFLDIHLHTPMYFLLSQLSLIDLNYISTIVPKMVYDFLYGNKSISFTGCGIQSFFFLTLAVAEGLLLTSMAYDRYVAICFPLHYPIRISKRVCVMMITGSWMISSINSCAHTVYALCIPYCKSRAINHFFCDVPAMLTLACTDTWVYESTVFLSSTIFLVLPFTGIACSYGRVLLAVYRMHSAEGRKKAYSTCSTHLTVVSFYYAPFAYTYVRPRSLRSPTEDKILAVFYTILTPMLNPIIYSLRNKEVMGALTQVIQKIFSVKM

SEQ ID NO: 435 - DNA, 1339 bp, Homo sapiens
  source
  (1)..(1339)
  CDS (201)..(1139)
atttcgtgagacagtgttgaaagaacatatttcgttcagattctatatttcttgaccttttagtttcctacttctattcatgctgtattgatcacccaactacagaagttaccacaatcacatgatttataaggcactgagtaaagttttaccaaattaatacgctggttttgtggtactaggtaaaaagcatacacatcatggcaagggagaattcgaccttcaactccgacttcatcctcctgggaatcttcaatcacagccccacccacaccttcctcttctttctggtcctggccatcttttcagtggccttcatgggaaactctgtcatggttctcctcatctacctggacacccagctccacacccccatgtacctcctcctcagccaactgtccctcatggacctcatgctcatctgcaccaccgtacccaagatggccttcaactacctgtctggcagcaagtccatttctatggctggttgtgccacacaaattttcttctatacatcactgcttggctctgagtgctttcttttggctgttatggcttatgaccgctacactgccatttgccaccctctaagatacaccaatctcatgagccctaaaatttgtggacttatgactgccttttcctggatcctgggctctacggatggaattattgatgttgtagcaacattttccttctcctactgtgggtctcgggaaatagcccacttcttctgtgacttcccctccctactaatcctctcatgcagtgacacatcaatatttgaaaagattcttttcatctgctgtatagtaatgattgttttccctgttgcaatcatcattgcttcctatgctcgagttatcctggctgtcattcacatgggatctggagagggtcgtcgcaaagcttttactacttgttcctctcacctcttggtggtgggaatgtactatggagcagctttgttcatgtacatacggcccacatctgatcgctccccaacacaggacaagatggtgtctgtattctacaccatcctcactcccatgttgaatcccctcatctacagcctccgcaacaaggaggtgaccagagcattcatgaagatcttaggaaagggcaagtctggagagtgagttacctaataaacttcatgttttgctgtgtgctaaatcctttttttaaatggtcctatttttccattaagccttgaaaatgggattcattgtgtacataaatctgcaatgacatatttatgtgcacctatataatttatttcagataaactattataactatttattattttatattcatttctgctatgaccacaatg

SEQ ID NO: 436 - protein, 312 aa, Homo sapiens
MARENSTFNSDFILLGIFNHSPTHTFLFFLVLAIFSVAFMGNSVMVLLIYLDTQLHTPMYLLLSQLSLMDLMLICTTVPKMAFNYLSGSKSISMAGCATQIFFYTSLLGSECFLLAVMAYDRYTAICHPLRYTNLMSPKICGLMTAFSWILGSTDGIIDVVATFSFSYCGSREIAHFFCDFPSLLILSCSDTSIFEKILFICCIVMIVFPVAIIIASYARVILAVIHMGSGEGRRKAFTTCSSHLLVVGMYYGAALFMYIRPTSDRSPTQDKMVSVFYTILTPMLNPLIYSLRNKEVTRAFMKILGKGKSGE

SEQ ID NO: 437 - DNA, 1336 bp, Homo sapiens
  source
  (1)..(1336)
  CDS (201)..(1136)
tgaggaaataattgtaaaagcaatggactaatccacacaatttaccatgactaaaggaaggtaactgaaggttggtgagaaggccttatgcatgcatataaactgcccagtagagtatgtcacagtatgtgtttgaaaactgaattgataaataagcttgtaccttctttggaattctcagataaggcaaattatccaggatggtgtgggaaaaccagaccttcaactccatcttcatcctgctgggaatcttcaatcacagtcccacccacaccttccttttttctctggtcctgggcatcttctcactggcattgatggaaaatatttccatggttctcctcatctacatagagaaacagctccacacccccatgtacttcctcctcagtcaactgtcccttatggacctcatgctcatctgcaccactctacccaagatgatcttcagctacttgtctgggaagaaatctatctctctggcaggttgtggaactcagatattcttctatgtgtccctgcttggagctgaatgtttcttgttggctgtcatggcttatgaccgctatgtggctatatgtcaccctcttcagtacaccatcctcatgaatccgaaactctgtgtcttcatgactgttgcttcctggaccttggggtctcttgatgggatcatagtgcttgcagctgtcctgtcattttcttactgcagctctctggaaattcatcactttttctgtgatgttgctgcccttttacctctatcctgcacagaaacatctgcatttgaaagactacttgtcatttgttgtgtggtaatgctaatctttccagtttcagttatcatactttcctattcccatgtccttcgagccgtcatccacatgggctctggggaaagtcgtcgcaaggccttcactacctgctcctcccacctgtctgtggtcggactctactacggtgctgctatgttcatgtacatgagaccagcttctaaacatacgccagaccaggacaagatggtgtcggccttctacactattctcacccctatgctgaaccctctcatttatagcctccgcaacaaagaagtgttcagggcactacagaaggtactgaagaaaagaaagttaatatgaccttatcaaaatctttttgagtgcctactgtggtcaacactcattcaaaaaaactggaatctcttaaattattctatttctatttctggtaatttgtattaatattttccacttcttttcaaaattatctattcagtatattattacatatacatcgtttgtatactaagctagatttggatgttagtataagtggttta

SEQ ID NO: 438 - protein, 311 aa, Homo sapiens
MVWENQTFNSIFILLGIFNHSPTHTFLFSLVLGIFSLALMENISMVLLIYIEKQLHTPMYFLLSQLSLMDLMLICTTLPKMIFSYLSGKKSISLAGCGTQIFFYVSLLGAECFLLAVMAYDRYVAICHPLQYTILMNPKLCVFMTVASWTLGSLDGIIVLAAVLSFSYCSSLEIHHFFCDVAALLPLSCTETSAFERLLVICCVVMLIFPVSVIILSYSHVLRAVIHMGSGESRRKAFTTCSSHLSVVGLYYGAAMFMYMRPASKHTPDQDKMVSAFYTILTPMLNPLIYSLRNKEVFRALQKVLKKRKLI

SEQ ID NO: 439 - DNA, 1339 bp, Homo sapiens
  source
  (1)..(1339)
  CDS (201)..(1139)
tataagtgagacactgctgagagaacatatttctttatgattccataattcttaaactttgagttttataattctggccatcctgtattgatcaccaaactacagaatttaccataatcacatgctttataaggcactgggtaaatgtttatcaaattaatgaactgtttttgcggtgctaggtaacaggcatattcatcatggcatgggagaatcagaccttcaactctgacttcctcctcctgggaatcttcaatcatagccccacccacaccttcctcttctttctggtcctggccatcttttcagtggccttcatgggaaactccatcatggttctcctcatctacctggatacccagctccacacccccatgtacttcctcctcagccaactgtccctcatggacctcatgctcatctgcaccactgtacccaagatggccttcaactacttgtctggcagcaagtccatttctatggctggctgtgccacacaaattttcttctatatatcattgcttggctccgaatgctttctgttggctgttatgtcttatgaccgctacactgccatttgccaccctctaagatacaccaatctcatgagacccaaaatttgtggacttatgactgccttctcctggatcctgggctctacagatggaatcattgatgctgtagcgacattttccttctcctactgtgggtctcgggaaatagcccacttctgctgtgacttcccttccctactaatcctctcatgcaatgacacatcaatatttgaagaggttattttcatctgctgtatagtaatgcttgttttccctgttgcaatcatcatcacttcctatgctcgagttattctggctgtcattcacatgggatctggagagggacgtcgcaaagcttttactacttgttcctctcacctcatggtggtgggaatgtactatggagcaggtttgttcatgtgcattcagcccacatctcatcattctcctatgcaggacaagatggtgtctgtattctacaccatcgtcactcccatgctgaatcctctcatttatagcctccgcaacaaggaagtgaccagagcattaatgaaaatcttaggaaagggcaagtctggagattgagttacctcataaatttcatgttttgctgtctgctaacgtcttctttttattgtctctctttttctattaagtcctaaaaatatcactaattgtgtgcattgctcaacatattgatgggtaccagtataatttatttcagataaactattttagattttttaatattcaattcagttatgactacaatataaggcattttc

SEQ ID NO: 440 - protein, 312 aa, Homo sapiens
MAWENQTFNSDFLLLGIFNHSPTHTFLFFLVLAIFSVAFMGNSIMVLLIYLDTQLHTPMYFLLSQLSLMDLMLICTTVPKMAFNYLSGSKSISMAGCATQIFFYISLLGSECFLLAVMSYDRYTAICHPLRYTNLMRPKICGLMTAFSWILGSTDGIIDAVATFSFSYCGSREIAHFCCDFPSLLILSCNDTSIFEEVIFICCIVMLVFPVAIIITSYARVILAVIHMGSGEGRRKAFTTCSSHLMVVGMYYGAGLFMCIQPTSHHSPMQDKMVSVFYTIVTPMLNPLIYSLRNKEVTRALMKILGKGKSGD

SEQ ID NO: 441 - DNA, 1381 bp, Homo sapiens
  source
  (1)..(1381)
  CDS (201)..(1181)
tagtgcatgattgaataaaataatttatttaatttatttaattacagtaatgtatccacttggacccaattttatcaccacctgtgcatttgctgacaaggatttcatcttgcttttccaagaaacgaacatgaggatataattggataaacttaattttcacaggctgttgcatttagtacatataaacaatagctaaaatgtcagggttgccttcagatatggatctatacaagcttcaattaaacaattttactgaagtcaccatgtttatattaataagcttcacagaagaatttgatgtgcaagtcttcctatttttattatttttagcaatctatctattcactctaataggcaatttagggctggttgtaccgatcattggggatttctggcttcacagcccaatgtactattttcttggtgttttatcattcttggatgtctgctattctacagttgtcactccaaaaatgttggtcaatttcctggcaaaaaataaatctatttcatttcttggatgtgcaacacagatgtttcttgcttgtacttttggaaccacagaatgctttctcttggctgcaatggcttatgatcgctatgtagccatctacaaccctctcctgtattcagtgagcatgtcacccagagtctatgtgccactcatcactgcttcctatgttgctagcattttacatgctactatacatacagtggctacatttagcctgtccttctgtggatccaatgaaattaggcatgtcttttgtaatatgcctcctctgcttgctatttcttgttctgacactcacgtaatccagcttctattcttctactttgtgggctctattgagatagtcactatcctgattgtcctgatctcctatggttttattctgttggccattctgaagatgcagtctgctgaagggaggagaaaagtcttctctacatgtggagctcacctaactggagtgacaatttatcatgggacaatcctcttcatgtatgtgagaccaagttccagctacacttcggacaatgacatgatagtgtcaatattttataccattgtgattcccatgctgaatcccatcatctacagtttgcggaacaaagatgtaaaggaggcaatcaaaagattgcttgtgagaaattggttcataaataagttatagttttaaaattgagtaaagttgcaaataatattgggtgtcagtccacatctctatggtcagaaagtagagaagaaaatgtgtttcttttagttaacagtgcttgtaacttctagaatattttcaaataaagcatcaatcagcctactaattcaccattttagaaatatcaatatattgtatcatgtataaaatatggcttg

SEQ ID NO: 442 - protein, 326 aa, Homo sapiens
MSGLPSDMDLYKLQLNNFTEVTMFILISFTEEFDVQVFLFLLFLAIYLFTLIGNLGLVVPIIGDFWLHSPMYYFLGVLSFLDVCYSTVVTPKMLVNFLAKNKSISFLGCATQMFLACTFGTTECFLLAAMAYDRYVAIYNPLLYSVSMSPRVYVPLITASYVASILHATIHTVATFSLSFCGSNEIRHVFCNMPPLLAISCSDTHVIQLLFFYFVGSIEIVTILIVLISYGFILLAILKMQSAEGRRKVFSTCGAHLTGVTIYHGTILFMYVRPSSSYTSDNDMIVSIFYTIVIPMLNPIIYSLRNKDVKEAIKRLLVRNWFINKL

SEQ ID NO: 443 - DNA, 1556 bp, Homo sapiens
  source
  (1)..(1556)
  CDS (201)..(202)
  CDS (402)..(1356)
tatttacagcctcaaaaaattaagtaattaaataaacaaagttttcactccaaagtaaatttctgacaaaagaagttggaggtggggggagagagagcactgattaaggaaaaacattaaattcaataaaaaagacgcagattctctagattcttgtatggaaaaaaggaactataagactaatcatgaaataaattcaaatgtgagtcaataatgtggaaatcaagctaatgacaagaaaaatattcatgaactattttcaagaaatatgaagaactttctctaccatatttaacatcatgtaggtattttcacaagactcttactgatagactttatcgtgcttataatggtttataacatgtgtttatttttgcggaggaccagagtcactgcaccagtcctgcctggggacccacgaaagtggccaacaatgtcactgagtttatattcctgggactttcccaagattctggaatgcgatggatattctttgtcttatttctcctcttctacatcgtgatcatggtgggaaatttgctcatttttcttatggtcttttctgacccccaactacacacacccatgtatttcttcctcagtaacctgtcttttgtggacattgcctattcctcggccacagcacccaagatgattgcagactttgtttctgagaaaaagactatttcctactggggctgtataactcagatgtttaccttccacttttttggttgtgctgagatttttgttttgactgtcatggcttttgatcgctatgctgctatctgccaacccctccgttacactgtcatcatgagtgctaatgcttgtactgtgctggcatcactgtcctggttgggggccctgggtcattcctttgttcagaccctcctgaccttccagctgcccttctgtaatgctcaggttatagaccattacttttgtgatgtccacccagtcctaaaacttgcctgtgctgatacaactctgataaatatgttggtagttgccaacagtggtctcatctccctgggttgtttcctcattcttttggcctcctacaaagtcattctgcttagtcttcaaaaacagtctgcagagagccgacgcaaagctctctctacctgtggatctcatctgactgtagtaactttcttctttgttccgtgtatctttatttatctccgtccatccactactttcccattggataaagctgtgtctgtgttctataccaccatcaccccaatgttgaacccactcatctatactctgaggaatgaggatgtaaagaatgccatgaggcagctatggagtagcaagatctccttgaaggaaaaacagagaggatagtttgtcagaattgcaaaatcagagaattagtggataccttcaatgatccctaatttattaataattaaaaaaatagttcctaaaaatgcagcttttataggttgtctaaacaggaaataatttgaggctattttagacaggctaaacttaaaactttccatacttggcaaggtttatcctctcttacttctagagtaaac

SEQ ID NO: 444 - protein, 318 aa, Homo sapiens
IPAWGPTKVANNVTEFIFLGLSQDSGMRWIFFVLFLLFYIVIMVGNLLIFLMVFSDPQLHTPMYFFLSNLSFVDIAYSSATAPKMIADFVSEKKTISYWGCITQMFTFHFFGCAEIFVLTVMAFDRYAAICQPLRYTVIMSANACTVLASLSWLGALGHSFVQTLLTFQLPFCNAQVIDHYFCDVHPVLKLACADTTLINMLVVANSGLISLGCFLILLASYKVILLSLQKQSAESRRKALSTCGSHLTVVTFFFVPCIFIYLRPSTTFPLDKAVSVFYTTITPMLNPLIYTLRNEDVKNAMRQLWSSKISLKEKQRG

SEQ ID NO: 445 - DNA, 1381 bp, Homo sapiens
  source
  (1)..(1381)
  CDS (201)..(1181)
tgggactacaggcgcccgccaccgcgcccggctaattttttgtatttttagtagagacggggtttcaccttgttagccaggatggtctcgatctcctgacctcatgatccacccgcctcggcctcccaaagtgctgggattacaggcgtgagccaccgcgcccggccggaacacattttataaaagagtcctgactgataatgtgtcccttgaccttgcatgtcactggcctaatgaatgtctctgagccaaattccagctttgcttttgtaaatgaatttatactccaaggtttctcttgtgagtggacaattcagatcttcctcttctcactctttactacaatatatgcactgactataacagggaatggagccattgcttttgtcctgtggtgtgaccggcgacttcacactcccatgtacatgttcctgggaaatttctcctttttagagatatggtatgtctcttctacagttcccaagatgttggtcaacttcctttcagagaaaaaaaacatctcctttgctggatgttttctccagttttatttcttcttctctttgggtacatcagaatgcttgcttttgactgtgatggcctttgatcagtaccttgctatctgccgtcccttgctctatcctaatatcatgactgggcatctctatgccaaactggtcatactgtgctgggtttgtggatttctgtggttcctgatccccattgttctcatctctcagaagcccttctgtggcccaaacattattgaccatgttgtgtgtgacccagggccactatttgcattggattgtgtttctgccccaagaatccaactgttttgctacactctaagctcattagttatttttggtaacttcctctttattattggatcctatactcttgtcctgaaagctgtgttgggtatgccttcaagcactgggagacataaggccttctctacctgtgggtctcatttggctgtggtatcactgtgctatagccctcttatggtcatgtatgtgagcccaggactcggacattctacagggatgcagaaaattgaaactttgttctatgctatggtgaccccactcttcaatccccttatctatagcctccagaataaggagataaaggcagccctgaggaaagttctggggagttccaacataatctaaggcatattagattattcctccatgatcagatcagtacagtctaacaaagagaaatcagaattatatagttattgaaatctaaaaaatatggacctagtgatattgactatatcagcctatgaaattaaacacctgttggaccccttacaaattaaagttgccaaatcatatagataaatggaagcgtgtggtttcccttt

SEQ ID NO: 446 - protein, 326 aa, Homo sapiens
MCPLTLHVTGLMNVSEPNSSFAFVNEFILQGFSCEWTIQIFLFSLFTTIYALTITGNGAIAFVLWCDRRLHTPMYMFLGNFSFLEIWYVSSTVPKMLVNFLSEKKNISFAGCFLQFYFFFSLGTSECLLLTVMAFDQYLAICRPLLYPNIMTGHLYAKLVILCWVCGFLWFLIPIVLISQKPFCGPNIIDHVVCDPGPLFALDCVSAPRIQLFCYTLSSLVIFGNFLFIIGSYTLVLKAVLGMPSSTGRHKAFSTCGSHLAVVSLCYSPLMVMYVSPGLGHSTGMQKIETLFYAMVTPLFNPLIYSLQNKEIKAALRKVLGSSNII

SEQ ID NO: 447 - DNA, 1339 bp, Homo sapiens
  source
  (1)..(1339)
  CDS (201)..(1139)
gtttgaccaggaagaacagggaatgagaaggagctgctggatggtgatgagccttggaaagggaggctgggcgagcagagacagaagagaaacacctacctgctgtgacctcacaaacacccaggctgagttttgataagacaggttgaatcacactggggtgacagcctcatccctccaggtacaaacaagaacaggccatggttaaccaaagctccacaccgggcttcctccttctgggcttctctgaacacccagggctggaaaggactctcttcgtggttgtcttcacttcctacctcctaaccctagtgggcaacacactcatcatcctgctgtctgcgctggaccccaagctccactctccaatgtactttttcctctccaacctctccttcttggacctctgtttcaccacgagttgtgttccccaaatgctggtcaacctctggggcccaaagaagaccatcagcttcctggactgctctgtccagatcttcatcttcctgtccctggggacaactgagtgcatcctcttgacagtgatggcttttgatcgctacgtggctgtctgccagcccctccactatgccaccatcatccacccccgcctgtgctggcagctggcatctgtggcctgggtcattgggctagtggagtcagtggtccagacaccatccaccctgcacctgcccttctgccccgatcggcaggtggatgattttgtctgtgaggtcccagctctaattcgactctcctgtgaagacacctcctacaatgagatccaggtggctgttgccagtgtcttcatcttggttgtgcctctcagcctcatccttgtctcttacggagccattacctgggcagtgctgaggattaactctgcaaaagggcggaggaaagcttttgggacctgctcctcccatctcactgtggtcaccctcttctacagctcagtcattgctgtctacctccagcccaaaaatccctatgcccaagagaggggcaagttctttggtctcttctatgcagtgggcactccttcacttaaccctctcatatacaccctgaggaacaaggaggtaaccagggcattcaggagattgctggggaaggaaatggggctcacacaaagctgagggagagctgcttaatgtgctttaaaagagaggagattctatgtgcttttatcagaaagtttgagttccctgcccctctgccttcttcacacccattacattgtgggaatggatgaaagccacatgtctgtgtgtgtgcatgtatgtgtgcaagagacagcgactgaaatgtagtaaagggaggtatctttatgcgaaaa

SEQ ID NO: 448 - protein, 312 aa, Homo sapiens
MVNQSSTPGFLLLGFSEHPGLERTLFVVVFTSYLLTLVGNTLIILLSALDPKLHSPMYFFLSNLSFLDLCFTTSCVPQMLVNLWGPKKTISFLDCSVQIFIFLSLGTTECILLTVMAFDRYVAVCQPLHYATIIHPRLCWQLASVAWVIGLVESVVQTPSTLHLPFCPDRQVDDFVCEVPALIRLSCEDTSYNEIQVAVASVFILVVPLSLILVSYGAITWAVLRINSAKGRRKAFGTCSSHLTVVTLFYSSVIAVYLQPKNPYAQERGKFFGLFYAVGTPSLNPLIYTLRNKEVTRAFRRLLGKEMGLTQS

SEQ ID NO: 449 - DNA, 63155 bp, Homo sapiens
  source
  (1)..(63155)
  CDS (201)..(246)
  CDS (1119)..(1317)
  CDS (7750)..(8041)
  CDS (10301)..(10493)
  CDS (10581)..(10762)
  CDS (11390)..(11601)
  CDS (15029)..(15153)
  CDS (61937)..(62955)
  modified_base (3192)..(3192): a, t, c, g, unknown or other
  modified_base (16147)..(16246): a, t, c, g, unknown or other
  modified_base (18790)..(18889): a, t, c, g, unknown or other
  modified_base (21048)..(21048): a, t, c, g, unknown or other
  modified_base (21066)..(21165): a, t, c, g, unknown or other
  modified_base (33549)..(33648): a, t, c, g, unknown or other
  modified_base (50114)..(50213): a, t, c, g, unknown or other
  modified_base (54694)..(54793): a, t, c, g, unknown or other
  modified_base (57161)..(57164): a, t, c, g, unknown or other
  modified_base (57166)..(57168): a, t, c, g, unknown or other
  modified_base (57175)..(57175): a, t, c, g, unknown or other
  modified_base (57179)..(57180): a, t, c, g, unknown or other
  modified_base (57182)..(57186): a, t, c, g, unknown or other
  modified_base (57188)..(57191): a, t, c, g, unknown or other
  modified_base (57198)..(57198): a, t, c, g, unknown or other
  modified_base (57223)..(57322): a, t, c, g, unknown or other
  modified_base (59045)..(59144): a, t, c, g, unknown or other
  modified_base (60650)..(60749): a, t, c, g, unknown or other
catttagtttgctgcctttttactattataaatcaaactgtagtcgatatccttatatatcatgtttgtgtggatcttaattgcttccttgagataaatactttgaagtaaaatcacatgatcaaagggtatacagatttttcatatattggtggattgtgttctgaaaatatttctgtgaatttatactctgaggggaaatgtttgagaggcgcaaagagcaagacgagggaccaggaatccatggtgagttgacctggagaaagactgggggacacctctaggagaggcctggcaagaaagggaggagaaggagctctcaggaagaaacccagggacataagcctcaccagtgacaaacacagcaatgtgagctgagggcaacacttcgccttaaagtgtagattaaagaaaatgatgcatacaaaaaatgttcattgacctcttacgggctttacaaaagtttctaaggtagtttattatcccctagtcacagaggcaggaagggaggcacagaaattaagtaagtttcctaccaccacgctaatgaaagtggcagaacacagacaaaaaatgatgtatgccattccaaatctcatggttttccactcaactttttctatactctgaaggagagaggttggcctgatgtcaccttttttatactctgtgatgaagcaggatgcccttcctcacctttggggcaagagaagctcccacaagagaggccgaagtgagaatgattgaagctgacatatgttaaacaagaaaggaacaatttctagaaaatgaaatgactcttttaaatgcaaaacccactattatattattatatattatttctaggtataaaagaggcttttatgagtctcttttcaaaaggattgcttagctcctagtccagatccataaattgcaagcgagtgcgaggttctctgactgattgagacatgacaattatatagcaaatagcagcaagcggagtcccctgggatgaggcacagtcactgtaaagctctatcaaggtgcctcattaaaacttgtataatttcaacactggtcacttcccccaaactcaccttattaaaatggtcgccagaggaaatgcttggttctagaatttcttgcatttttatgggctgaattgggctctgaagccaaagaagagaaagaagaagaacggacctgccggttgctgggcaagtgtgtagatgccgaaaaccattcccttgttattggaggactgtttcctattgactccaggaccatcccagcaaatgagtctattttggagccagcatcagcaaaatgtgaagggtaagccattcttttagctttctttttacatcagttgcaggtggtgggtgtagggggttagagtctggaactggcacccgtgatactagcctggaccccgaccctatctctttgatgcaggataggtacttcctgttactaggcctcagtttcccttaggtggacattctaggattatttagaaactggaaaagcttggtctcaagtgggtcattttccacttctgtatctgagacagaaaaaaaagtggattttatatgatgcagaacattgctcctcagagggtggtctgtgggccagcagcatcagtttcacccaagactgttagaaatgtaaaatctcaggctacattcccagacctgttgaatcaggatctgcatttgaacaagacctcctggtgattcatgtacacattaagatctgagaagccctaatgcagagttgcagtgttgcaggtttattattcattgttatagactaaactctcatcaagtgaaaatacacagtgtgggaacactaacttatttctgagctactgttaatggcaagattctttcagctgctgtgagggttctgccctgcactcccctaactccaagttgtcatgtaaagaaatgggatccatgactgataatcagaatttgctagtaatccattataataaaggcaaacatgtgttagatcaccccccaacttcagctataaaaagaacactagaaattaaaaataaaacatttatccaccattctatgcgcataacaaagcagatcttttcattttcctatatgctttcttagccctttataaaaatgcatccataatttgtgcatagttgtgaccacagcacagacacaattttatatttagcattttatattgtgtaggaagcatttctatgatgctgcgtggctattaaaattgtaaatgcatattgtaaaaaaatttaaataatttcttacacattaaatctttgctaattacagctactgtcctttgattatattttatgccccatatttgagataccattagtggatggaacaaccataatgttgttggcagaaaggattgtaatcagtctctacttatctttttcctagatcttttaattcttttcttactgtgaagcaaaaagaagaaagataagaaaggcttttgtttacagctacattatggtagactcagttcattatttatcatagtttttctcttcttcaatccttaataacataaaatgaaaacgtaaagtttggcaaaatatatgccctaatatttcataaacagaatcatttaatttgttgtctgttctgcattggaacttctgaaggttattttcctagaaggttaaatggaaaagccaatatacatgttttaaaattaaactccactcctcctcattaaaaataatttgacatatacattgtggttgcaatagtgatgagaagtaactacatcccattttgaaaataattcacttatcaggaatattttgggatttgcataatcaataccatcaggatttgagtggctactgcttggctttacaatatgcattttatatatgtgtacatgaaagaaaatacaatgtgcttttaataagttaataagtgatataagacaaacctacccaatacaggtatgtaaaacaaatagtagttgcaggagttaggaactgtgaaaacaggcaaagtaccaaatttctaagctgtgacttcttgtttattgtcaggaagaagtggagagtaagatacaagagagcactaagagcaccacagcctttaagttggcttttagtcctaaaaattctacagtttattggcaagtgacaggggcagacagtgactattagttattcacccaaaaggatgagttatntttcagttggtccttcttgctataagggaatggaaatgtggggaaggtagacagagaggggaggacaggacatttttgaagagaatttagggagagagcttgcctgatgaactaccatagtggaagatcagaagagtcagagaatagtacaagaggcagaggcatttggaattgacaacaagaaagtggtaagtgctaacagttgagaaagagaaagattaacatggaaaaatgtattgtatggaaacaataagatttaccttcttcagaaagttgtaaggagttggctctgttttctctcatattttgagagatcacatataaagtttttctcttgaaaatataacaagtaagaaaatggaagaaagccagtttgtcccataggatggaggccaggaatgggtacagcttcaatattcacccagaaggggatatctgggagcaggaaacagaaaaggtcgacactgaggccagagagtcagcagggcctgtggagatgagggcctgagctcagaacctgcctcagagaggtatcagtaagctgattttaacctcttcataaaattgtgagaaaataagcaatagcatttattcacttcatgtatttgttatttgattttcttgacactctggacattaagaaaatttaaaaaaaaattggatctgggcctgtttttctgggatgaagctcttgggaagagaatgtttcttcagtgctaactcattcttaggtacagaagacatcccatttaatcttaaaaacagctggttgtagggacatggatgaagctggaaaccatcattctcagcaaactatcgcaaggacaaaaaaccaaacaccgcatgttctcactcataggtgggaattgaacaatgagaacacttggacacaggaaggggaacatcacacaccggggcctgttttggggtcggggaaggggggagggatagcattaggagatatatctaatgcaaatgatgagttaatgggtgcagcacaccaacatggcacatgtatacatctgtaacaaatctgcatgttgtgcacatgtaccctagaacttaaagtataataaaaaaagtatatatatatatatatatatatatataaacagctggttgaagatgttatgtccacatttcagatgaggaaactaaggctcaagaaagttaaatggcttacacaggtcacatggaaagcatagggcagagttgtgggtttatttcaggctctcagaatcagccaagtgttttgcatgtccaccttaagaatattttccaaatggataaatgctccttgaaaaaaggattctgggttcggataaaattgggtaactaccaagacatcataaaacatttaggatacgacaagcattgtgaatgtctaagaaagggctaagcatgcagcactttccaaatttatttgatatcataactcttcatttggggaactctgcactgcctcacattgcctcacgtgtagaaagttggtttagttggtgcatgtgcaagtgcaatgagctgtacagaggaggtaggtagtagaagcagtaaagcaagttgtctctacaatagacaggagttctggggtatatcagagctctttgggacacaaagagcacctgccatcaggattccatcacaatagaagagaaggagtggaagatgagttagtggttggggtctgcagggcagatttcacaaaaggatgaactaagctgagtggtctcccatttctaaaatttctatttctttccatttctaaaatagcttctatttctttgctgagacttgtatttttacatttgctttaagagggttttcccttaccttatggaacagtgttgtaatagctgcttcaaaatctacgtctgatcatttggcagcccagtcatctcagggttggtgtctactgattgcctcttctcttaaaagtggttgcatgtggtccgggcaatctaaaaagccagttcctggttctcaatgtggatccgttttgcaagggtgcaaggcattgtgtgtattctgcttgtctccaagcttgatttgtctgaaacccaaattgctcatctttgtgttataagactcaaatgttcttcagcattttaatgaatccatcctaaatatatgttatgaatatcagaaacatttcatgtcttaaaagtttttgatatagttcttcaaaattagagcctatataattcattttcacgtataggagtcaactgtttcctcccatctctacctcagtgttttctgagcctctctactcctccacgagacgcaacttctccagtgggagagttctcacaggaggcctggcctacaaggtacttagcagccaggctgagcctaagctggataatttgactttggcattgttaaccttcacctataactgatatagaaattcaagttggagtttggagaaatttcattctgaaacccacaattttaacaataggctaattttggccagccatcagttaaagtatggccagactttaactatgactttaactgatcttaaatatggccagagaggaagatttgctattatttggaaaacgttgcttagaaaagagaaaggcagcaaaatggaaggaggaagggagtattttaattttgttttcattaatctaaacaaaggtaggacatagagaaatttcctgaggaaaaaatgtatgcattgtataataatactgtgaatatcataatggaaatcaatgaatcgaagaaaaatcaccccaaattccacctttccagtaattatcttgtgctcatttaaaaaaatttccctgttaatccttatccaaatgttagtataatttatacatgtagttttaattatagtatggaaacaactttgcatactgcacgtttcacaatattatacgtatactgccatgtaatttctctaatagttttaaaataatgaaaaacgtttccatcatgtaagttctttccagtttttcaatattataaataattctgtaatgaacaattggggcatattgctttttcctttgggaaaaacagtttgttcaaataaattttcatggatggaggaattacagccagtgcatatttttctagttcttgaaatgtattgctattctagtttaaaaatgatattgctatatttatttcaaaaatgtatattgccattagtgtaaatttggaaactaagtatcttaggatgataaagcccttcatgttctggcaccttctggttttccagtttcccctttcattgtgccacagccactcccaccctgtctcttccaaacatactggtctttgcattccttgaatgtgacatgttctcttgttgtaacgccgtcgggcatgctgtttgcagcactcttcccctgttcttctgtcgtcctttaagcctcagcttggctgttaattccttcagagctgggtgccccttctttgtatttcatagctcccaggcttaacccatcactgtttttatcattttgtgctgaaactgcttggctacttttctatttctttgcttagacaatgctgtgtttatcttgttcccgactgtatttacagtgtctatcaccagaggaactcaataactacatattaaatgaaaaacgaaacaaaactaaaaacccaattaaagaaacatggagaaaaattccaccctgccaacagggctatttgctatcacatattaaatttaaaaagtacttattgaatagaagacatagagttagatactatagccacagaagattgtaaggaaagaaggtcttggggaaattgctctcaaataggttaagatttggttaacactgggaagatagagtttgcaattaaatgttaaatgtttttcttaatggagaaggaattaaaaagtaaatgtggtgatggactgcaagagaaatacattccccttttagtggctaggaaatggaaagggggaggtattttatttatggttatatctaggagtggtaggaaaaagacatcttcaattaaaaacctcttaacgttaacaatgaaattacggatagaaaaattattgtaattggagtcatagtatatataaattttatgtactgcttttaggtgctcctagcataagtatttccttgtatttacataacttttataattataattaatgtccagaaaaaagcaaaagaaggtaagtaggagagagaggagactcatacgacaccagggacttccaattaatggggaaaatgtattgagggattattggaggccctgtttggtggatagaattatgaatataagaatatttttgtgaaaagatataggagtttaaagagattatagcatatgaaagatatacagagtgagaaaacatccaaaaattgtacttttcagcccaaatcaatcaacaatgaatatgattcatacttgaatctttcaagtttgtaatatcatttaagaaaaactaacatactcagaaaagtgaggtgcccgctgatgttctggcaaaatgctttaaaagctgcttttcccctcaaagatccacctaatcacctacaaagtctatttctttttcaggtttaactttcagagattccgctggatgaaagccatgatccacatgatcaaggagattaataagaggaaggatattttgcccaacatcactctgggctatcagatctttgatacctgttttaccatctccaaatcagtggaagcagtcttggtatttcttacagggcaggaagaaaacaggcccaattttagaaacagcactggagcatttccggcaggaattgttggagcaggtggatcattcttatcagttcctgcttcaagaattctagggttatattatttgcctcaggtatctccgattattgtgctgggtactaacttaaaaaacaacaacaacacaaaccatgcttgtggaaactgcagcagatagcaaggtgctcaggtgaggttgagttaagttgcagagacaaacagggatggtggtgatgctgctgtccctaattactatgttcagtcaggccttagcaagtgtgaattgatgtctacttagaggcgacttgagactcttctacgtcccttggcatgctactttaatttttggcttgagattgtgacccagtgatttgttttttgacaactcactagtcataatactctatagcactgtgtggagcacagtgtaggtgatcaataaatatgtgttggttggtcaattgatggtataagaaactcactttgtttcttgcctatattaatgcttattattcatgaccgttttgattcatgcactaacatgctgaagcgggcctgggaattatgcaagatggctagggttttgaggatgctaactttacaggttattttaaattcggagacaatgacacatttcaacataagaagagattattttaggaaaaattgattattaaggaaatataaatatagctctatcattgtttctaaggatggatcattatagtatcagttgtcatgacttattaatgtgaatgatgataagcttatttgtgttgctgaagtaatgaaaatttgaaataattgtataaagtagcatttccagagtatttcttataaaactgcatatacggatgtagagggaagaggaaagtactgagaaaaagaaccaagaagagaggttgggtgacacaactgacaccttaggtgtgggcttcgtgcagctcaaactgctgctgctgtgagctctgtcttccaggtactggctggaaacctctagatagattttctcattaaacgcttgtagtaaatatccaacaaaggtaaaagaaatctgtatgatgaacattttcacatttgttatctcattgaatacattgagcaatcttaaaatgtagatttcattaccctgatttcacttatagggaatctgaagttcagaaggtttaagtaacttctctaagatctcacagtgataaaatatatatccagaattagatatcaggtgtctctgcttcttaaataagattatttcctacatagggcttccaatgttgctgcttgcatggttccaaagaagaatgtaaactttagcctttggagtgaaaataggacatggggtagaagaaacaggaaacaagaatattctggcactcatgaagaaattgacaatcttgagctatggaattataatatgggcgatcctattgaaggtggtgtgttaatgttatatcatgagatgggaatgtgatgggatagggaaaaatgtgtccatatgttcttaactgtagggtcattgaggttgagggtaagctacagtggaaatgcatataaagtggtgaggaattcatgatcatttgacctctattcttaaattcccactattggaaaatacatacagagatcactggcaaaatgggaaaaagtgtctcttcatttatctagacaaatgcctataaaattagggcttccatctctgttggatgacagggcttagatgcgaggctaaagtggtgctttctaccacctttctcaagttaagtcttgggatctacatactcataagtttttctcctggcagagaaaaacaaggaaagaaaagtggtgataggagggagggaagggaggtggaagacgaggggtggggggagagagagagagagagagagataagaattgggcttgccaaatggattgtgggtctactcactccatcatccatgtggatgagaagtaaaatctaaggaagagcctggatggcttgattcactccccttgtctgtggggtgcatagagaaaaaagcaaatggcctccttttcactgctgtgatcccacttgtgaaaagtagggcattgaatgttgtattaataatcagctcctccgatttccttggggtatgaggaagtggatttgaaagagtccatagggaggcccaaagtgttccctccaacactctaccctcccatccactgagcaaggaaaggaccagaaatccttttgtctaaagaaagatgtgaaaataaagggagaagaactgttaagttccctccctccccaataaaaatattctgaaaatgtgtaatttgagatttggctattgctttctaatagctgcatgaatattttcaatagtaggtgggctatacctctacctgcgtgattcttagtgacaaataccagtttccatcttatcttcgtgtaatagccagcgataagatccagtcgaaggctgtggtaaaacgtatccaacactttcactttctcactctgtcgcccaggctggagtgcagtggcgccatcctggctcatggcaacctctgcctcccaggttcaaacaatcctcctacctcagcctcctgagtagctgggattacaggtgtgtgccaccatgccagactaatttttgtatttttagtagagacagggttttgccatgttgcccaggctggtctcgaattcctggcctcaaattatctgactgcttcggcctcccaaagtgctgggattacaggtgtgagccactgtgcctggcccagtactatagagctttggataatccagttccatatttacttccggatgaactgtagagttacagtaaatcgatagggtagtgaaaaagaattggcaatttcatcttccatgtgactctcagaatggaagaaccaggaaaagtgagagagatgaaagtgacgtcagcatagccagagaatgctttttgtttgctgacacaggactttcttttggaggaaagggtgtcttttttcatcctgtttatttttcacgtatcttccctcttgagctcagatctgagatccccaaacagtcttccaaatcatgctgggaaagcatctaaaaataagtgaaaaaaagcctcaagatttctgagttcctatgctgtaccagacacctatgagatctttgtctgtcagactattcctctctgctttctatgtgtagcaataaacatctatagacttatacatgctcacaaaagaatatagatatgcacacatacacagtagtttattggtctatctttaagcagcatttgaatatattttgggtagatgtaaaaatagccacttgtcagtgtttaccactgtaggggccagagctctctgcagcattttatgcctttgatctagaacctgctctgcccaatacagtagtgcttaaccacagataggttgttttttgtttgtttgtttttgttttttttagacggagtctcgctctgttgccatgctggagtatagtggtgagatctcggctcactgccacctctgcctcctgggttcaagcaattctcctgcctcagcccccctagtagctgggactacaggcgcacaccaccacgctcagctaatttttgtatttttagtagagacgggttttcaccatgttagccaggatggtcttgatctctcaatctcgtgatccacccgcctcggcctcccaaagtgctgggattacaggtgtgaaccaccacgcccggccacagacagctttaaaatgcaaattaattaaaataaaataaaaggaaaattcagctcttagtcacattaactacatttcaagtgttcaatatccacatgtagctaggagctaccatatagaacaacagagatatgtaacacttctgtcattgcagaaaggacagagctgccctaagtctaggctataagccatcttatgtggcccagagctctctcagaatggtgagctacttgatgaatgggcttgagacttcacttttgtattctttttggtaggtatatagtaggtccccaatataccgttttacatgaaaaggaagatgttattctttgcatatacatggttcaaagaatgcttgctctactgaaaattgacagaaaaatagtaaaatctaatagtagatttttcttttaataatcttcattagggtatagtaatttatttttcttatcttttactataaaattgggattgtttgtataatgaaattgcttcaaatgtaattcaatacaaatttactaagcatctactataaatccaactctgggttaaacattgcaaaaataaggccactgcccctaattaactgagcaaatatttgttgagaacagtagcatatgtgcataggaactgcggatacgtcagtgtgcaaaacagaacaaatcccagcctaatgggattaacatttcaatggaaggaagtaggcaacaaacaagacaaatagagacattatactgtatcttaaaggatgttaatgtcagggagaaacaaatagcaggactgagatagggagtgctgtgggagtgttgcactgaaattccatatagcgtagtcagggaaggcctcgctagagtgacatttgaacagaaattcaaatgaaagtgtgttcatgcattatctaggggaagaatatttccagcacagggaacagcaccttctaaaccctgaggcgcgtgtggctggcactttggaggaacagaaaagaagtcaatgtggctggaaagagtgaaagagagggagagcaggaaaggaggtgagagaggttagagagggacagatcatgcagggccctgttggcttttgaaggactttggttttcacactgagtgagaagggaaaccctgaaaatcttgacagaggagggccatgatctgactcaggtatcattgtttgccatactgcaaatcagtggaaggagtggggtggaggggcaagaacagaaccaaggagactgttaaaagaccataaaatcatccaaaataatgaaggtagcttggcccaggatagatgtgatggaggtgccaaaaagtcattagattctggatatcttatggatatcttatagtagaagacatcaaatctgctgacggattgaacctggaagtgttacatgaaacaattagaggacaatacaaataatgatttaagtcataatggtaaactgagtctggtggttggtgagaaggtggacttgagtggaagagagggtccatacaggcaagtaatatcaggttggagatgatggataggaatggtggtgttgatgacagaaatgaggaatagggtttatgggatagttttgtacgtgttgaacttgaggtgatggtggaatcttaatgtaggaacatatgggaagtttagaatatggaattaaatagagatcaggtgggaaaggttggtgttagagatcaaaatttgggagtacttctatagagatactggttgaagacaagagaatgaaggacctgctttacagtaagagagaaaaccagaggaccaaggaccaaacccaggacccaagggaagccaaggtagcttgcgtttcaaagaggggctgatcaaaagtgtcaagtattgaagaaagctgaaggaaaatgtggccagaggaaaatctctcagacatggcaagaagagttttagtgaggtgagtgagttggcagctagatcacagaggttgagaagggaaggaatactgagaaatggaacaaaaaggtatcagctcattgttaatgatactaatgggccaggtgccgtggctcgcgcctgtaatcccagcactttgggaggccgaggcaggtggatcacaaggtcagaaattcgagaccatcttggctaacacggtgaaaccccgtttctactaaaaatacaaaaaattagctgggtgtggtggtgggcacctgtagtcccagctactcgggaggctgaggcaggagaatggcatgaacccgggaggcggagcttgcagtgagccgagatggtgccactgcactccagcctgggcaacagaggaaaaaaaaatgataatagtaatcataaggtaatatcgagagttctttccagaagactggatcagagcaaggaattctagttcattctgtgatgattttattgttcatctttcagaatttgagaatgccttgctatcactccttcctgtaatagctactccttaaggtgcatttaaaatatgattttacagatacatatgtataaaacatataagaagcttatctattgtgtatacatacttctgtaatgttatgtaccataacctagctcagagattggtaatattttctatgttatttaattcagatttactctggaaaactcaacatatgaaaattctgatttctaaaataaatataagtgtaatcatgcatcttccaaaatgattctttgcttaatggaaaagcattttgtttcttaaacaggaaactccctaatggattaagaaacaaactatttacaaaccttgcatttattctgggtttcaaggtacacatccatgtagaatgtaaaaggaggcctgtgtttactactgagattttgaaattcgtttagcaagaaaatatttcaatgctatgccttgtctgcttttccttttgccctccccatttttctgataaatcagatctttcactgttcttttctactgacccttcatgacacagctttgattttaagactactttgggatgaccttgcagagggaaaatattttttaggctttcaagatgattcttggaatcataggtccttcacaagcaggaacagacctgtcaaatgatctcatccccagagtcctgtaggcatggagcctggtctggatccccaaggttagaaagaagaggcttagaattagctttgcatttctagacttaacaccgagactctcctttagcaaaattcttctctacgttctccatgttgttattttctttgttcattatcttcactcaggcatcctgggtttcccaggaaatcgcaaagcttccatggaaattcaaatggaaactttctcagcctcatgagtactagagacaaagggctttgttaatacatcatgtttgtctttgctagcttccccattcagtgtgtactgatgtgtgtcctcctgggactcggaaggggattcgttcagagggaaccaatatgctgctttgactccatcccatgtgctgatggacacgtgtcacggaaaccaggttgagatggtaatttcttcattgatatgaggatgctattagatcaaacatgtttttgcaaagaaggcctaaggagccttctttataaataggtatgaataacttataacaaaaataattaaaatccatcaaattattggatgttttgtgcactgtgaaaaaaacatagtattgtgtttcagttctaaagctgctacagttgggaaaatacctacaaccttgaagttaatagaggaaaatgcaaaataaaatatatgaaatgtgaaatatgagtaggattcataaaaaatatttaaaattatttgtttctgaaataaattaaatgctagttatattcataattggaagacaggggacttatagtactatgttttattgaattagctctaatttggagttataagatctaaaatttcatctctaaaggcaattggcttaaggtcataagtactcaaagtttgtaagacatatgatttctgtaactactgctctatgaattcttcactatggcctgccaaattgctgctctttatgaccagaattttaattgggtttagtgtgctcggtcttgtgaaacatgttggagcaggtttatttttatctctaccttctgttaaagataacacaaagtgtacttgtcttttgtcaaatggccctcaatagcaattcttttctttttttttttttttttgagacggagtctcgctctgtcgcccaggcgggactgcggactgcagtggcgcaatctcggctcactgcaagctccgcttcccgggttcacgccattctcctgcctcagcctcccgagtagctgggactacaggcgcccgccaccgcgcccggctaattttttttgtatttttagtagagacggggtttcaccttgttagccaggatggtctcgatctcctgacctcatgatccacccgcctcggcctcccaaagcaattctttataaaagaatttgagggccaggcgcaggactcggtttgannnnnnnnnnnnnnnnnnnnnnnnnnnnnnnnnnnnnnnnnnnnnnnnnnnnnnnnnnnnnnnnnnnnnnnnnnnnnnnnnnnnnnnnnnnnnnnnnnnnaagcaataagattcttaagtatctatatttttgtaaaatattccaactcttaaatgtcaaaacagaaaagacaacactttcaatattaaggagatatatatatatattttgagacaaggtctcgttctctcacccgggctggagtgcagttgacacgatcacagctcactgcagctgtgacatcctgggctcaagtgattctcccgcctcggtctcccaagtagctgggactagaggtgcacacctggctaatatttgtgtttttttgtagagacggggtttcaccgggttagccaggatggtctcgatctcctgacctcgtgatccacccacctcggcctcccaaagtgctgggattacaggtgtgagccaccttgcccagcctgcttgagcattttcacaataattttaaaaaggtcgttgaacacctaatagtaatgatatacataattcttggtactctcccataaacaaaataagcactataaataagcagttcaatctattatatcctcactactactcatgataaaatagaagttgttttccaaaagaatcaaaagatgagattttcttacttagccagatacatttttagtccactgaaactttcttcttattcagagtatcaatcatcctaatgcaattagataaagacatcttgacaaaaggttcgtgttttccacaccatttatgtagccaaattaagtgggaattttaaaaagttttctctaataatgttattttttaaaaaagaatgttttggcaggtttcatattacctaaaagaacagtaatatatacatatggaatggcattctgaaatataaaaaaaggaattaatggttagaatttgacacactacttgaaaagtgaggttaacataagattcctagctgcttttcttataatctatataaattcattagaataactcactaataatctaccaaaaaaacaaaaagcaaaaacaaaaacagctgtgtggtgcttaatatagcttttgataaaaggagtattaagagacagaatgtcagttttgaaatataggagttcgagattagaaacctaatacttttgttatgaattatgctaaaacggtaaaaaaattttcaaaatatagttgtctcaaatacactcttctcagataacagaaggccaggcaagggcactgacttgaagggaaacaaaccacagtaatatgactgcctgaaagtaactatggaattcagtttctcaaagtgattacttcttctaatcttcatattgatgactcactagtacatttactttgatgggtttaatcaactctgataacatagttccaaacacttaaaaggacctgatttatgtattaaataaaggttaatttgttcttgagaaattgacaaaagatttggtcaaacgtaaatgaatatgcaataagtcacataagtctgtgtgtatatacatatatgactttaattttataagtgcatgtgtatacgcacacctttagctcatttaaataaaaagctatccaatgttttatgtccattatgtcccccgttaacattgagcaaaatgttaacccctactatatatgcaagggaaataaattaagttgttatatagaaacccttgacactatatgcaatttcttatgtcccatattctgataatatctgtcctcttggctcttacttcttggaatttctcataaacacggaagcttcatgacaaattgtgtaaatcatcatttcctcctttatgaagtatattgaagacaaaagggattaaagtcatttcacatttagcaaagctattttatggcaacattgttacaacacaaaatagacattgcagtttacaattaacaattacacagtgatttcataacaatactacttactccaattaacaaaatatttctttataaaaaatatgttcaaaaggaggtttacattcacttcttcgtttaatatcaaggttgttaacaatggtcttaggagatgcaaagacgaaaaactacttaccttaaaaatctgtattcttgaagatatatactccacttgaataagatactgctcaaggtttaggcttcctggagaactcagaggattttgtagttgtacttaatatactcaatagccaaatttcctaaactttcataattttgctaaccaagggcccttaacaaagttaaaagacaccacagggttcaaaagtgaacaaatatgttgtttttgttttaagacggagtctcattcttgtcacctaggctggagtgcagtggcgcaatctctgctcactgcaacctccatctcccgggtttaagtgattctcacacctcagccttccgagtagctgggattacaggcgcgcgccaccaagcccagctaatttttacatttttagtagaaatggggtttcaccatgttggccacgctggtctcaaactcctgacctcaagagatccgcccgcctcggcctcccaaagtgctgggattacaggcatgcgccactgtgcctggtcacaaatatgttaatgagccaataagatgannnnnnnnnnnnnnnnnnnnnnnnnnnnnnnnnnnnnnnnnnnnnnnnnnnnnnnnnnnnnnnnnnnnnnnnnnnnnnnnnnnnnnnnnnnnnnnnnnnnggggaggggattggtccggcacccctttccgggttaatgttcccccccccctccaaacgggattcggcggccccccaaccagttattttcatttagtaaaatgggtctccctgtggcacccggttcaaatcgtacccaaggaccgccgcccggcctccaaaggctggaatacaagcatgcgccactggcctgtcccaataatgtaatgacccaataaagaggtgctgctcaaatgatcctaattcaggaaacttaggttgcagctaggtaatctctagttctctaaagaataaacccaaatgacaggatttatgtgttgatgcaataatagctcagtctgtttcatggacctagctagaggtcagaattggagccggtggctatagcacaggggtggctttctcctctctgaaggaaaagtaaagaagtaagaagaaagaggttgaaagaacagcctacacagttgttgcccagatctcaaaattagcaacaagtatgtcagctgtcctaattattaccaaacaggtcctgggagtgtctgacacacaacataatataggtgcaatcagttccagaatctggttcctggatctgaactaatttagctataagaccttcagcaagaccatctctatggcctgcatctctctcctataggtttgacaaagattcacctatgagtttgatgaagacaggctaggtatggccctcaataagaatttattctgactgggagatttaaaactgtaaatgcttgccgggcgtggtggctcacgcctgtaatcccagcactctgagaggccgaggcgggcggatcatgaggtcgggagatcgagaccatcctgtataacacagtgaaaccctgtctctactaaaaagtacaaaaaaattagccgggcgtagtggcgggcgcctgtagtcccagctactcgggagactgaggcaggagaatggcgtgaacccacgaagcggagcttgcagtgagccgagattgtgccactgcacttggggacagagcgagactctgtcttaaaaaaaaaacaaaacaaaactgtaaatgcttgagttctacctcctccagattctaattttatttaattggacatctggttattgtattttttaactcctcaggttatgtaataatacgcatccagtgttgaggaacactgacaaaaaggttagagttcagtgagacactgaggcctcttcagtacataaaaatagggttggaagttagcatcttgacactctttgggggattctatatctcttcacttgccattaagtgaaacgttcagaaatttaagagtcaacaatgccaccattactgctgtcaaagtccttcagtgattaaaaagataccagaaagataccctgatcccttgatcatctggtggtgttaaactacttcagtaagaacaaaagatgtgctttccaagggtggagacatccaacttgtattcagttccccattacattctggatttgggtcaatgaaagaagcatccattggggtgatagctaaggcgtgtcctcgccacatatcaatgagatttctggaggggagtagtgtgggaaagtggttataacattgcgcaagcagatgtcagagaatttctgaaagacagggctatctctagaaactcactgtaagtaaggagacaattaacacttttgaagcccatttatccctgatggtcaattacacactaagaacttccttttttttttttttttgagactgagtctcgctctttcaccaggccggagtgcagtggcactatctcagctcactgcaagctccgcctcctgggttcaggccattctcctgcctcagcctcccgagtagctgggactacaggcacccgccaccgcgcccagctaatttgttgtatttttagtagagatggggtttcaccgtgttagccaagatggtctcgatctcctgatctcgtgatccacccacctcggcctcccaaagtgctgggattacaggcatgagccaccgcgcccggccaagaacttccttttaagatttgccctgaagggccctagagcatttcctcttccatgcagagaatcagaaagcttggattctagctctagctcccaacaattagctgtatgtaattgatgatgggtgacttcattagtgncaaagcccaatgatgaannnnnnnnnnnnnnnnnnnnnnnnnnnnnnnnnnnnnnnnnnnnnnnnnnnnnnnnnnnnnnnnnnnnnnnnnnnnnnnnnnnnnnnnnnnnnnnnnnnncacaatggagtggtaattggtttctccttgagtgccgggggttatcccttagccaagaattccacactgaaggttaggactatgaaaagttctaggataggaaatgcagattatattcccatcattcaggctttagtcccctgtccccagcaagtgatgccccttatctgagtcaaatattatcttaatgctttttcccataaagtcagttttgtctgaaattaatatagctttagccatttctttttttttatttacctggtatatgtttttccattctttaattttcactcctactatccctaggtattagtaatgcctgttgtgaatagactatacctttcatgtctactattctatactaagcagattttagttttcaatctagtttgactgtctatgtcttaactaggaatgttatagtccttttaattaattataggttatcaatatagttgaatttcattctacaatctttttctgtaattatctatttaacccattttttactcttactcctttcttgctgtcttttgaactggtgatttctcccagctcatttatttcctctttaccggttttgaagttaaatcctctatttctattcttgcagtagttgtccttaagtgttaacaaggatacttaaaagataatcaatcttctgtccttctggcaaataacacagacatctttgaattccttagctcaaatcaatccctttgtggcttacatgttacttcagctaaacattgttacacattttctaataaacaagaacaagtagatatcatttttacctctactctcgattttataatcatttttatcattttatacagtccatgtttgtttcagttttagtcatttaccattttccttgcttagcattccttcttgtatctcatgactttctcctggcatcctgctgcttctcctcaagtcagttctttaaaacaatggttctcagccgggcccagtggctcacgcctgtaatcccagcactttgggaggccgaggcgggtgatcacctgaggtcgggagtttgagactagcctgaccaacatggagaaaccccgtctcaactaaaaatacaaaattagccaagcgtgatggcacatgcctgtaatcccagctactcgggaggctgaggcaggagaatcgcttaaacctgggaggcggaggttgcagtgagccaagatcgtgccattgcactccagcctgggcaacaagagcaaaactccatctcaaaaaacaaacaaacaaaaaaaaaaacaatggttctcaaccttaactgcacaaattacttggaatgcccaggtcccatctcagaccaattaaattctagggctatatgtcaagaatagtatacttcaaaagcttccccagatgattctaacatacagccagggttgaaaatcattgcctttagtttcttcagtaagggactgttggtagtaaattctatttaatctcgaaataactttattttgcccttgtttttaaaagacagtttagctgttcactacagttaattattttctcttggtattttgaagtcttgcctttactgtttcagtataatttcctgggtaggtaattgatctgttctccgcagctgctctgtctttggcagtctttaatttctctaagatgtgcttactaggtgtcaaattctttccctttattctgcttgagatgtgttacatttcctgaatctgagccatcatgtcttttaccagtgtggaggaattaatacatttttttctattatttccttctggacatatgttagcacttgccttatccttccatcttaaccttttctacccatattttctttatgatgatttgtcctaatttctggataatctctaaacaactttcttttagttcattaattctctctttcagctgtttttcagttattattttcattcccagaacttagattattttcaaatctgcccagttatttttagtagtctcttatacattattcttattatgaatagcttatttctatttactttacatattgcttgttaattccagtaaagtcttgagggtcttgttctgacagttttttcctttctcattcatggtgccatacttctatatgtgatttgtattttttattataacctcatatttgttggaaatctatctatgagaatcctttgggacctaggtgaagatattctaaagagaatctgcatttttccttgcctaactcccataagcactaccaacccagatccactttaaaattatttcgttgcaattttcagaccacacacattacataaattaaaaccccaaatctgtagaataaagtagactggggaatttttccattcatcttcaatttggagctaaagggttgcatagtgtgaagatatctgatccaatctctggcccttcttggacccagtctcatactcagacacctgtacatgaatgaaattgtaaaaacccaaatcctagaccacaaaggattagtagctgtcctcagaggagcagacagctttggtttcttgaaatgatgctcccaataaattcctgactcaaaggatttcccttactatcttgaaatacacataaaagagtgctttaaaatactttatctgacatttttagagactcaggatatccagtcttgtttggctggaaagaaaaatatgcatataagaatatctgtggaatattttctccacagtcatttcaaaggttatattacaccaaattttcaaataataaaaccctaaaaaattcattataaatgctggtatataataagaatccgttcaatttcttgtaatgattagctgtatcaaatattacctttttaacacttgcagaaaaatcagctactattttcaaaatattgttggtttcaggaaagtccttacaaatataaggttcttcagcacatattactctgattgccaggccaggacctaaaggtaggagtaataatagtatttaacattaatgttatatttctaatataaaaatctaatataaaaatgccactagtttcaaaacataaaacctttccaaaattaaaatccatctgcccatcataagtatccaaatgtagctattagtttcccattcaactcagcattttttagaatgcttcaacattctaaaaatgttgtaacatttagaatgctgcaacatttaaattatgcatacgttttagtctgcataactttttggcatattaatctctgtccctaagtttcttcatctataaaacagggtaatactatcatagtttccattgtgaggctcaaataagacagtatgtttaattctctccctatcattcctatctccctttttttaagagatagagtcttgctctgtcaccaaggctagagtgcagtggtgcaattattgctcactgcagcctcaaattcctgagctcaagcagtcttcccacctcagcctcctaaatagcttggattacaagcaccggcagccatgcctggctaattttttcagtaaagataggggtttcactatgctgttcaggctggtcttgaactccagaagctcggcttctggaaatgctgaaattacaggcatgagccactgactgcacttggcctatcctatttttacagtccatgtattaagtatcacaaaattatccagtaaatatttttagtttataacatatgtgctcatccaaagtttttaataagggaattttccaacatatacataaagaggacagtataattaactaccttacttatcatccagcttcaactatcaatctaattttaggaatggtattatactgttaaaatatacacataatctaataaataatgtgagtttttaataccaaaaaatgtgaactggtatttctattttattttgacagactctcattctgtcacccaggctggagggcagtggcacgatctcagctcactgcaacttccacctcccaggttcaagagattctcctgccttaccctcccctagcagccaccagtgtacctagtacaggcatgcaccaccatgcccagctaattttttgtatttttagtagagatcgggtttcaccgcgttggccaggctggtctggaactcctgacctcaagtgatctgcctgcctaggcctcccaaagtgctggaattacaggcatgagccactgtacccaacctctattttaccaaatacttaaaagttgataaaaacacaaggtgtgcatagatctatggaaaactggatcctgctgctttactacaacagaaaaggcatcacttgagatgcctagttataggcaaaacctcagctatgtccaattaattccctagtccattctttacctttagaataaacagcatacttaagatagtttttaaagcagtaaaaccatttttgccaatgaagtcttacataatagaaaactcaacatacaaaatagatttttaaaacatcaagtgagtctagatgaaataatgaccaaggacatagaacacttggcttccctccattacattcacagatcattcttttcttttttttttttctttttttttttttttaagatggagtcatgctctgttgcccaggttggagtgctgtggtgtaatcttgtctcactgcaacctctgcctcccgggttcaagcgattctcctgcctcagcctcccgagtagctagaattacaggcacatgccaccacacctggctaatttttctatttttagtagactcagggttacaggcatgagccaccacaccggtccacagaccattcttcgccggcatgcaggttagggactaaagatctcaatctgattacttgatttgagaacaagtgctaatcaccacataggttatacatgtgtaaagctgtttatggagccaatatgatcattaagagtataaactctgagataaaaattattggggatatcattctggctccactcctttcaatctgcataacttttggcaaattagtcgctgtccctaagtttcttcatctgtaaaacaggataatagtagtttccactgtgaagattaaataagacaataaaatgtatttagcagagtgcctagcacatagaaagtacttaagaaatgttggctattattatgcttttcaattcaattaggtcattctcccaaatcatcccctaatcactattacagtgagctagaacctgatgtacagacttgcccaacctctcaagaactagtaacaaaaacaggttaagacttgcagtcctaactttaaacaagtatcacctctaatttttttctatatgacagcaaatgaagtattatttgttcaggaattagttacattgtgccaggaattctctgcacagaataagtggttcatccattcaaacaagtcagacataggacaaggattttaaagagctaaatttaaatcctcacatcttccatggaacgcactgcggtatggtacaaataatataacaaatcctagctctactactaggactgtgtggcaatattattaaaatatctttatgtcttggttttctcatctgatggcaacatcagatgccagactcccaaggataatgtaacacttaaatgcagatacaatggaaaatgagtatttaataaaatgaagtaaatacagtagatactcaaaagatttcaattattccctaaccatcctttcctttctctcatgttacatattccctgagatgacagattatttcagaattgtctgaattgatttttcttcaacatgaaggtctaaagatgaatcaaacaaaattcagttctaatttttacctggaaatggatgcctggaaactaactcttctggaagtccaagttctctgcccaaaattctcacttcatctttatgaaaatctttcagaggttctattacttttccctacagggaggaaagaagccaaccaatataaactagtaaccaagatgacatggaaaacaaagcgtaataaattattggcttttcctgttaccacttttcttagactaacagattattactaaaaatgcatcttttaaagtatttgttcctaagtgcctataaggaattagacgaatatcttatgggtattatttctctttgaagcacattttaaacataagctttttaaatataaataaatcagggtaaaccaatccatcatctctgatctaattctcattagaatacaaagcaattagaaaatatactagtgttccaaaattataattctccaaatgttatcattgagaaaatgaagacaactcacagaactagagaagacatttgcaagtcgtatatctgataaaagacttgtaaccagaatatataaagaacatttacaactcaataataaaaaaataaataagtcaattaaaaaataagcaaagctaatgggtactaggcctaatacctgggtgatgaaataatctgtataacaaacccctatgacacaagtttacctatgtaacaaacctacacttatatcctcgaacttaaaattattttttaaaaaaaggagcaaaggatacgaatagacatttctccaagatacacaaatggccaataagcaagaacatgaaaaaatgctcaacatcattagctattagggaaatgcaaatcaaaatgagatataccacttcatatacactaggatgactaacatttttatttacttttttttaagacagagtctcgctctgtcgctcaggcgggagtgcagtggcataatcttggctcactgcaacctctgcctcccaggttcaagcaattctcctgcctcagcctccagagtagctgggactacaggcatgcaccaccaaacctggctaatttttttgtatttttagtagatacagggtttcaccatgttggccaggctggtctcaaattcctggcttcaagtgatccacctgcctcagcctcccaaagtgctgggattataggcatgagccactgtgctgagccagatgactaaaatttttaaaagtcagataacacaaccataaaaaaatagaaaataacaaattgtaagcatttggaaaaattggagtcattatgtacttttggttagattgtaaaatggtgcaattgctatggacaataagttcctcaaaaaaattaaaaagagaactaccatatgatccagcaatcccaattctgggcatatatccaaaagataaacaaaaatggataggcaaaatgtgttatatacatatagtagtacattactcagtctgttttgtttgtttgtttgtttttttgagacagagtttcactcttgttgcccaggctagagtgcaatggcagtcttggctcattgcaacctccgcctccagggttcaagccattctcctgcctcagcctcccaaggagctggcattatagatgcccgccatcacgcctggctaatttttgtattcttagtaaagacggggtttcatcatgttgaccaggctggtctcaaactcccgaccccaggtgatccacccgcctcagcctcccaaagcgctaggcatgagccactgtgcctggcccatttttcagtcttaaaaaagaaggaaattctgtcacatgctacaacatgaatgaaccttaaggacattatgctaagtgaaataagcaagtcacaaaaaggcaatactgtatgattccacctatatgaggtatttaaagtagtgaaacatagaaacagaaagcagaatggtggttaccagagggtgggggccagaaaaaagggagagttgttttttaacgggtatagagtttgttttgcaagatgaaaagttctgaagatctgttttacaacaatgtgaatacacctaacactactgaactatatacttaaaaatagttaagatgaggctggatgcagtggctcacacctgtaatcccagcactttgggaggcagaggcaggcggatcacctgaggtcaggagttgaagaccagcctggccaacatagtgaaaccccatctctactaaaaatacaaaattagccgggcctcgtggcgcatgcctgtaatcccagctacttgagaggctgaggcagcagaatctcttgaaccgggaggcagaggttgcagtgagccgaggtcgcatgactgctctccagcttgggcaatagagtgagactctgtctcaaaaaaaaaaaaaaatcagagttaagatggtaagctttatgttatgtgttttttacaataagaaaagagataacaacaagtcttggtgaggatgtggaaaaatttgaatctcatagattgctagtgcgaatgtaaaattgtatcatcattttaaataatagtttggcaattcatcaaaatgttaaaccttaagacctagcaattctactcccaggcatataccaaaagaaataaaaacacatatccacaaaaacttatgaccagtattcatggcggcattacttataacagccaaaaagtggaaataacccaaaagcccatcagctgatcaaaggataaatacaatgcattatacccataagatggaatattatctggcaataaataggaataaagttctgatacatgcagcaacatggatgaaccttgaaaacattacggtaagtaaaagaagccagtcataaaagaccacatattgtaccattccatttatataaaatgcccaaaataagcaaatctatagagacagaaaataaattagtggttggtaattgcctagggctggcaagaaaggaggaaaggaggagctggggggtgggggcaggatgacaatgacaacaacaggtagaacgaggagtgactgctaatgggtataaggttcctttttagggtaaggaaaatgttctaaaattagatgtggtgatggttatgcaattctgtgaatattagagggaagaggagggaagaatggaagactttccatgtatctactttatgaaaaagttttcataaacttttacctcctctctcaactttctgatgagctctgtgtcattgtgatgggttttgatgagttcagctttgccacttgcaacaagggatgcactttcaattagatcaggccgtaaagtaccttgggcaaggaaaacctcctctggtttcaagttcatttctccaattacttcattggcaatctataatcaacaggagtaaaacagccttgtaagagataactttttttaaaagcaaaagtttatactttcagctaaatctcttagagtcctttagaaatactgatcagaaaataaaatccaccaatctccaaaataaactccttaatgaacatgtcctctaacacgattcaaaaaggtacatgaggccaaacacagtggctcacgcctgtaatcccagcactttgggaggctgagtggggtggatcacttgaggccaggagttcgagaccagcctggccaacatgatgaaacaccatctctactaaatatacaaaattagtggccaggtgtggtggctcacgcctgtaatcccagcactttgggaggcaaggcaggcagatcacaaggtcaggagtttgagaccagcctgactaacatggtgaaaccccgtctctactaaaaatacaaaaactagccgggcatggtggcacacgcctgtaatcccagctactcaggaagttgaggcaggagaatcgcttgaaccctggaggcaaagtttgcagtgagccaagattgcaccactacactccagcctgggcggcagagtgagactccatctcaaaaaaagaaaaaaattagctgggcatggtggtgcatgcctgtaatcccagctactcgggaggctgaggcaggagaatcgcttgaacccagcaggtgaaagttgccgtgagccaagatcgctccattgtactccagcctgagtgacaagaacaaaactccgcctccaaaaaaaaaaaaaaacaaaaacaaaggtatgtgaacattccattcaagagcttgaaattagccattgagataatcaatgaattaaagtctatgataagctgaatacatctactcttaaagacatctattcttaaaataatagcctggcaatgtaggcaaacatgtttattaaaacataaaacagttggctgggcatagtggctcacacctgtaatcccagaagttcgggaggctgaggcgggcggatcatgaggtcaggagatccggaccaacctggccaacatggtgaaacccccgtctctactaaaagtacaaaaattagctgggcatgatggtgcacccctgtagtcccagctacttaggaggctgaggcaggagaatcacttgaacccagaaggcagaggttgcagcgagccgagatcgtgcaactgcactccagcccagcctggtgacacagcaagactctgtctcaaaaaaacaaaaaaaaaaccaaacaacaacaaaaaaacataaaacagtttctactggtcaatataatgacaatatacaataaaactctcagccacataagaaaaaggattaaaattagctaatttggttatttgatatagtgacaaggaaaaacaaatactaagattcacatcaaaaatagtacatgttgaggatattaaaaacaaaggtaccttaacaaaagtatccccaatgatttttcttttctcttcaggacttgtggtcatatttaacgttttgctaattcttttccgtggggttctatcttcatctgatattggtagggttgttgttccattgtagaaagaatgagcagcatttatcactggaggaaaggggagaagcgttttaaattggtataacatgttttttaatcaaaaataacaagtcaaaatacagaaagaaaagctatttctttcccagtctgaagagcagtcctttgatctcccctaaatctgcctacaaatttcaataaactatcaatattcaagaattattggccgggcccggtggctcatgcctataatcccagcactttgggaggccgagacaggtggatcacgaggtcaggagatcaagaccatcctggctaacatggtgaaatcccatcactactaaaaatacaaaaaattagctgggtgtggtgacgggtgcctgtagtcccagctacttgggaagccgaggcaggagaatggtgtgaacccgggaggcggagcttgcagtgagcagagattgtgccactgcactccagcctgggtgacagagagagactccatccccaaaaaaaaaataagaaaagaaaaagaactatcaataaatcctgagtaacagaattcagatacaggcactcattaaattttgtttctgtgagaatctcctggcatttagatctagggccatgacatcacaaattatgctgattagggccggcacggtggctcacacctgtaataccagcactttgggaggccaagttgggtggatcacttgaggtcagcagtgtgagaccagcctggccaaaatggcaaaaccacatctctactaaaaacacaaaaattagtggggcgtagtggcacatgtctgcaatcccagctactcagaggctgaggcaagagaattgcttaaacctgggaggcagaggttgcagtgagccgaggttgtgccactgcattctgccctgggcaacagaacaagactctgtctcaaaaaaaaaaaaaaaatttatgctgattgttttccctctcttcagtgcttcaccagagcaacaagcagaagccacagcaagaagcttagccccaaagaagtcaaaagcaccggctcctaaacggagtcaaagctgttggaatcacaccctagtgtcttgtaaaactaatatttatgaacatacatttaacaatccttggctttttatttaatgacaagaaactaaaaactaagatctctatttgctaataaaacttagctactggaggccttcaccgtaagatgacaaggcagctggctatttcattgtggaaaagccagtgaatttgtaggtctttcctgtacctggtcaactacccagagaagacatatctactctcctgcctattggcattctggcagttaaacagaggaagtggtaggaagagggaatcaccattcagcatagagaattttacttaatcctgttcttaatgtagagtcttacctccaccctcaactatgcctggtattagtaggctcaagcccagaacctctcgtttagcccctctagagaatacatccacagtgttctgatggggaaggagagcacagtttgctcctgtgctaaggaaaaggatctgcttctcagatttttaactaatccctgttttaggctaacccagagaccaatgtcccaaaaagaacccaatgcttcaaattcctgagcctccccagaagtctacagcacaaatcagcttgctttttattggcttccttcccaccccaccccaaggttgtnnnnnnnnnnnnnnnnnnnnnnnnnnnnnnnnnnnnnnnnnnnnnnnnnnnnnnnnnnnnnnnnnnnnnnnnnnnnnnnnnnnnnnnnnnnnnnnnnnnntacacagcttttcacaactcagggaaataccaaatacaatgccactggctaaaaaccagtaaaatacataagatagtagtagataataaaagagtgaataccttatttcttaaaactgaaaaaatgcctctttggtttttctcagccacataccctattacagagagtcaaagcctgcacaacagaagaggatcaggagaagctgatgcaaattaccagtctgcattcactgaatgccttcttgctgccaattaaaactgtaggtgtgcaggtgagttgtgtgaattcattcaccagtgatatacttttttttttttttcttttcttgagacggagtctcactgtgttgcccaggctggagcgcagtggcgtgatctcagctcattgcaacctccgcctcctgggttcaagcactctttctactaatcttgaaataaggattacttaggaaaatgaaatatgtgagtatatataccaagtttagagaaataaggtaattttttatagaatgtttagggagtgaatagttaatggaactaaatagtcaggctgagattttgtagttttggaacatctatgaactctaaccaaaggtaaatattgaaagcaaccctttcctatagggttggcatgcttacttctgccttgtagggcagggatcaagaggtcatttatcctaggtgtgaaatatactgtggttttagaagtctttaactgcaggaaggcctccagatgagtaagttacaccatttaggtgttgttctcagcttgtgtattccctgtactagggaacacattctactgatgttgtgtttattctgcctttctagttgtaaaagaacatgagaataatatagttctcaattataaaatgctacttgcaaaatgactaataactaataagatagtatgttaatttctcctcttttttctggagacagggtcttgccctgtcgcccaggctggagtgcagtgatgtgatcatggcgtactgtagccctgaattcctgggttcaagcgaccctactacctcagcttcccaagtagctgggactacaggcaagcaccatcatgcctggctaatttttaaatttttttgtagagatagggtctccctgtgttgctcaggctggctttgaaattctggcctcaagtgatccttcactttggcctcccaaagtgttaggattggaagcatgagacactgtacccggccttctttatatgatcctcaaatgagtttttggggagcaaaagtgtgggagggtagggaagagaaaggttattttcttctatttcaagtttgtggttaaatggagacactagaagaggtgtcagtagttcaactcgaaaatggtataagtgccagttattgggttaatgtgtttataatgtcctcttacagtaaaattatgtgtagaatatacatatgtaactaacctgcacattgtgcacatgtaccctaaaacttaaagtataataataaaaaaataaaaaataaaaaaaaagaaattctgtttcagagattattcttctaaaacctaataagcattttttctaaatatatgaatctgtcagtttaaattcccctttgctctgaattcatgcagttctgcctgtaaataaaacaagataaaaattgattgttgccaggcgcagtggttcatgcctgtaatcccagcactttgggaggctgaggcaggcggatcacctgaggttggaagttcaagagcagcctgaccaacatgcagaaaccccatctctactaattagccgggtgtggtggtgcatgcctgtaatcccagctagtcgggaggctgaggcaggagaattgcttgaacccaggaggcggaggttgcggtgggccaagattgcgccattgcactccagcctgggcaacaagagtgaaactccttcttaaaaaaaaaaaaaaattgattgttatttttaaagtaaactaaaatattttatttcatgaaagtgatagagccagctattgggttaaggaactcttgccttctttttaaaggccaaatgttgtaagctgcttatgttgttttaaaatcactattgaaataaccttacttggagttactgatactttctttcagtggtttatggattatctcattcatacataaatttattttgaaatttgcaatgatacttacaggcagtattaccctaatatataaaaatagaattgtggacaggttatttaattcttaaaagtttctgagttttaagtagatttgttatagagaacttcaacgtctgtgtgctaactgctgctacaaagggagttgaaatagttccccactcttctttttagagaagtgttacaaaaaatagatacttgagataatctgatgaatgagtgatttctttcttgaaaatgaaacttattcaggctctactacttttcccaccaaaataaaattttcttttgttattggataactgactttagtctcttaccctttgaagcttagacccttgcaagcccagataaaaatgatggttcatagttagtataacaatgcattttattttctaaataccaaagtaaaccgtatttgtaaaaaatgaaaatacattaaaaaaaattctttgtatttctactctccagttaagttttgtatgtgtctttccagaaacactttaaaaagaaaataaaagaggggatttggggtacacattgtcaacttttttcttttaactgaacatcatgaacttacctttctgtgcctttccaagtagatggttcttaactgttccctcatattctatgcataccatcatttatttaactattcttctaaccaatgggcatttaaactgttctgttttttattattataggcatcccatcagttatccatgtatttatgtaggatcattttatgtgcatgtgcattttacactttttttttttttttttttttttttgagatggagtcttgctctgtcacccaggctggagcacagtggcttgatctcagctcatggcaacctccacctaccaggttcaaacgattctcctgttgcagcctcctgtgtagctggggttacaggcacacgccgccatacctggataattttttgtattttagtagagacggggtttcaccacgttgcccaggttggtctcgaactcctgagctcaggcaatccacccgcctcggcctcccaaaagtgctaggattacaggcatgagctaccacgcccagcccattttacacttttatagatgctatcacattagcattcacatatgttgaattttcacattcttagtacctgccactttgggcattaggtacttctctaatctgttactttttaaaattgcttttcataaaaaaagcaaattacttggattaaacaggacacaggaaaagagaataaattatcagttttatttacttattttaaaattaactttttttttttattatactttaagttttagggtacatgtgcacattgtgcaggttagttacatatgtatacatgtgccatgctggtgcaccgcacccactaactcgtcatttagcattaggtatatctcccaatgctatccctcccccctccccccaccccaccacagtccccagagtgtgatattccccttcctgtgtccatgtgatctcattgttcaattcccacctatgagtgagaatatgcggtgtttggttttttgttcttgcgatagtttactgagaatgatgatttccaatttcatccatgtccttacaaaggacatgaactcatcattttttatggctgcatagtattccatggtgtatatgtgccacattttcttaatccagtctgtcattgttggacatttgggttggttccaagtctttgctattgtgaataatgccgcaataaacatatgtgtgcatgtgtctttatagcagcatgatttatagtcgtttgggtatatacccagtaatgggatggctgggtcaaatggtatttctagctctagatccctgaggaatcgccacactgatttccacaatggttgaactagtttacagtcccaccaacagtgtaaaagtgttcctatttctccacatcctctccagcacctgttgtttcctgactttttaatgattgccattctaactggtgtgagatggtatctcatagtggttttgatttgcatttctctgatggccagtgatgatgagcattttttcatgtgttttttggctgcataaatgtcttcttttgagaagtattgatgggacatatctcaaaataataagagctatctatgacaaacccacagccaatatcatattgaatgggcaaaaactggaagcattccctttgaaaactggcacaagacagggatgccctctctcaccactcctattcaacatagtgttggaagttctggccagggcaattaggcaggagaaggaaataaagggtattcaattaggaaaagaggaagtcaagttgtccctgtttgcagacaacatgattgtatatctagaaaaccccactgtctcagcccaaaatctccttaagctgataagcaacttcagcaaagtctcaggatacaaaatcaatgtacaaaaatcacaagcattcttatacaccaacaacagacaaacagagagccaaatcatgagtgaactcccattcacaattgcttcaaagagaataaaatacctaggaatccaacttacaagggatgtgaaggacctcttcaaggagaactacaaaccactgctcaaggaaataaaagaggatacaaacaaatggaagaacattccatgctcatgggtaggaagaatcaatatcgtgaaaatggccatactgcccaaggtaatttacagattcagtgccatccccatcaagctaccaatgactttcttcacagaattggaaaaaactaaagttcatatggaaccaaaaaagagcccgcatcgccaagtcaatcctaagccaaaagaacaaagctggaggcatcacactacctgacttcaaactatactacaacgctacagtaaccaaaacagcatggtactggtaccaaaacagagatatagatcaatggaacagaacagagccctcagaaataacgccacatacctacaactatctgatctttgacaaacctgagaaaaacaagcaatggggaaaggattccctatttaataaacggtgctgggaaaactggctagccatatgtagaaagctgaaactggatcccttccttacaccttatacaaaaatcaattcaagatggattaaagatttaaacgttagacctaaaaccataaaaaccctagaagaaaacctaggcattaccattcaggacataggcatgggcaaggacttcatgtccaaaacaccaaaagcaatggcaacaaaagccaaaattgacaaatgggatctaattaaactaaagagcttctgcacagcaaaagaaactaccatcagagtgaacaggcaacctacaaaatggaagaaaattttcgcaacctacttatctgacaaagggctaatatccagaatctacagtgaactcaaacaaatttacaagaacaaaacaaacaaccccataaaattaacttttaagctgatacttaaacacgttgataagtaaatgtttatgaattgtttttgtctcccacttaagaattctttatccactcaaaaaacacaggcagatcttgtctgccaaattataatttttcataattttattttatttttttgagatggggtcttactctgttgcccaggctagagtacagtggcatgatcactgctcacgatagcctcgacctcgttgggctcaggtgatcctcctatctcagcttcctgagtagcagggactacaggtgcatgccaccacactgcccagctaatttttgtatattttgtagagacagggtgttgccatgttgtccaggctggtctcaaacttctgggctcaactgacccacccacctcggcctcccaaagtgctaggattataggtgtgagcttctgtacctggccttgtctgccaaattaaatatgctggttatccacagttgtgcaggtaatgggaatgttgaatactttttttttttttgagacagagtttcactctgtcacccaggctggagtgcagtgatacgatctctcagctcactgcaacctccacctcccaggatcaagcagttctcctgcctcagcctcccgagtagctgggactacaggttcatgccaccatgcctggctaatttttgtatttttagtagagatggggtttcatcatgttggccaggctggtcttgaactcatgacctcaggtgatctgcccacctcggcctcccaaagtgctgggattacaggcatgaaccactgtgcccagcctaaattcttgatattaccatgatactttatgtatgtcttagctgattcaggtaggatttaatatgggattttaatttggaatttatttataccattaaagaagcatttagtatatactttcattcaaaatttccaaaaatccattaataatgtcaccatgcataagatatttttcaatgcatcttttcttttttttttaaaaaaaaaaaaaagctttgtcaagttaaactggtgtatcttttgactattaaaaattattgattatctttttattttcagggtgactgtcgttcctacagttacgtgtgtggaatctccagtaaagatgaacctgactgggaatcacttatttttctggctaggcttatacctcgcatgtgtcacaacgttaacaggtgtgtttcacaggagctagggtgggggcttgtgtaatggaaggatgtatttcttaagggctttcaattaatggaagaccaaaaggctcaaatgtagatataggtaggtcatgtagataagagtaaatggctgtgtttgtaattcaaatatgcacataggttgcagttaagtagatatttaatattatcttgtgttttgactcttcatcacaatgtagtcatctgttaaaaattatttaaaggagaaagatttttattttagtgtaaaatattaaaggcagctgtaaaacatcttctaaattagtggtttatattagctgttggttttatggtaacatgttttattccagaaggattgaaaaaagtatgtccaggttacagaattacaaataaagtaacacacacacacacacacacacacacacacacacacacccctacaaaacaaacaacccccactccaaacaaaaatggagacttggttaatttagtagtaaccccaaggaaaaaaatcaaagaaaagaaataggcatgtgccagatagcattaaaatagttacatttaaatatataatttacatttagattaatttccctttaatttgcatattaacttcttacattggatatatcaacagctgatttataatctatttctaatcctcaatttcatcgtaccatatatagttcaaaaattcacttattttgtactagattgctaattaaatgttcttacttcacagttattctctctgttcagttttcttcatgggtgttaggcagttaacaaccaaaaagaattacttgaggtttcattttactcaaattgctgcagaaatcagaagcttaccttttaatgttaagctagcagagtctgtatagttcgagataaggagttacagggaagccatgtttttaccgatgggaacatgctcattcaaaggcttactcaaatgaactgaaaaccgtcaaatacagaagcatctttaaaatgctgaaaaatagaattattactatcttcaataatgggggccaggcatggtggctcacgcctgtaatcccaccactttgagaggccaaggcgagtggatcacttgagcccaggagtttgagaccagcctgggcaacatggtgaaactccatctctacaaaaaatacaaaaattagccaggcatggtggtgtgtgcctgtagtcccagctactcgggaggctgaggcagaagaatggtgtgaacccgggagacagagcttgcagtgagctgagattgcaccactgcactcaagcctgggcgacagagcgagacttcatctcaaaaaaaggaaaaagaaaaaaaaaagaatcttggtgaactttagatttatttgctggggtctttttgatgaattggagtttaaaaatattcttccctgtttgccggtttttttcctaatttggataagggaatctttgtacagggagggactgttccagttttactgtcatatatagtgtgggtaaatacctgtcccagtacactctagtgattacttttgtttgtaagaaatgagaaggtgaaaagagcaggttcatggcattctcttaactttctcctgtaaagatcttttatgaactttaggaactgtattgtttagaaaaattataacttactgtctatacgtgggacaaaaaccttgcttctgttgtagtatgtttggaaggagacaataaagtagttggtgataccggtggttttgtgctaatatggttttctattgtgtattttacctaagtacatattaagaaaagaagaaaaaacattaaactttaccatgatagtttccggggagatttattttctttgctaaaaacaggactaacgaaaagtgaatagggagaactagctaagtggcactcatatctctaccctgattccctcttgttttctgggtgaagattgtgaaacagatcccttcaaaccagtggccagctacacttcaagttgttaaaattgtctgattctaatttcctcaagttatgttccaaactgtactctcattaactcaagatatttgtggtgtatcttcatgtctttcaaacagacatttatataaaacactaatgaatcatttttttggaaggaagtagtaggatactaagtcctatttcaatggcctttttaatgaagtgcaaatgagaatctctctagaatgattgtttctcaagtagagaaaaaaagatgagtttactaattttgggaaattcactgtagtttcctcttggagatttccagtgcatgttagcatagtatattaatagtttctgaagtcttgtcataaagacacctatttttaaattttaattgtgtatttgtttcctaggactacccataacaaatcaccacaaactaggaggcttaaaacaacagacatttattctctcacagtttaggaggccagaagtctgaattcagtgttggcagggtcatattctctctgaagactctaggggaggatccttccttgcttcttcctactatcgagtggtggcagcatagtccagtctgtctttgtgttcacatgaccctcattcccctgtgggtatctgtgtatccaaatttcccagcacttggaaggataccagtcattggattagagcccatcctaatccagtattacttcattttaacttgattacatttgcaaagaccctttttctccccagagattctgggtgggcatgaagttttggggatactcttcgacccagtacattaagtgaaaagagagttgtaataatcacttatatctttgcacattctgagatacagaatattccagagaacacactttgaggaaaacacgtagaacacagaccttcctataatcttatatcttgtcctatccatctggggagttgaagtgggcaggagaagggcctgaaactaagtgggaaatggaaagaatgttactgttctaagtgccttgcttctcatactaaaatgtaatttctacatttgaaatgtaattgctgtattatttttacctctttgtttccagagttgtttatatatttggcccaccagttaaagaacctcctacagatgttactcccactttcttgacaacaggggtgctcagtactttacgccaagctgattttgaggcccataacattctcagggagtctggtaagttgctcatgtttttgattactaccctctgaaactagtttttggaagcttgatattaagagtaggaggatgtggcttttgctttttagatgcttttgtttttattatttaaatctttgaatgttctatgatgttgcttttttttcttgagacggagtctgtcttgctctgtcgcccaggctggagtgcagtggcacaatcttggttcacttcagcctctgcctcctgttacaagtgattctcctgcctcagcctcccgagtagctgggattacaggcacccgccaccacacctggctagttttttgtatttttagtagagatagggttttgccattttggccagctgatctcgaactcctaacctcatgtgatcaggtcaggagtcaggtcaggccagccttggcctcccagagtgttgggattacaggcgtgagccactgcacctggcctataatgttgcttctaaataaaatatattcccctttgtggccatttgtggacatgcacagagcagcagaaaatttgaatttccagacttagatgttcccagctgagtttgaacaaggtgacgctatgccttcttgttttcagctctcataatgtgaacaagtctttttcatggtctccttgatgctatatcttttgcatttttatgtcttttgttggtgattttgctgtttaaaatggatctcaactatagtgttgaagtgctgtctgggttcctaagcacaggaatgctgtgatgtaccttacagagaaaatctgtgtgttagataaacttcattcaggcatgagttaaagagctactgattgtcagttcagtgttaatgaatctataataaatattaaatacagtgtcttaaatcagaaacacataaaacaaggttatatattaatcagttgatgaaaatattacaaccagaggcttgcaggaacctaaccctccatttcccctgggagaaatggttcagtattcgctaattcgttgtttgcagtgtagaatataactatactgcaaattataatagagaataatgagactggactgtttctgtttacagcacatcagtgaaacatcactgatgtgatcaaattctgttttttgcatttgtgattaagtccatttaaaatgctctgcgagtagctgaaatcaatgcatgatgacagtcttaactacgctgtgtgtgtatatgtgatttcagatattgcctgggaggatttaattgaactgagttagagtgcttttctatggtgtggtgattggttctacatatacctttctctagggtatgctgggaaaatcagccagatgccggtgattttgacaccattacattttgatcgggacccacttcaaaagcagccttcatgccagagatctgtggttattcgaacctttattactagtgacttcatgactggtatacctgcaacacctggcaatgagatccctgtagaggtaatttatatatttttttctaatgcacgttctcagtacctcttacattttataatatggtgaatggaataggctatgccagtgctgtatttcttatgttggttttctgttcataagataggcttttttttttaaattttcacatatttgattaatacactggggcagaaaaaggctttaaattatatatgctctccaattgtgtgattactgtataaaaagtaattgattataattttatctaatcctgccaatttctactttacaaacagtattccccaaataaaaaagaaaactctaggagtgaagaagagtttgttagaaataaggatgcaatttgatagctttatggccagacacccaagaattgcctaaatgttctccctactaccaattccaactcaatttttgatccttctttgtcttcaccagaacattccaaaggagctacttgcataatagcaagtgaaaatcaaagtgagactctattagttgggccactgcctccagtgcactaacacgaagctgtcgtgatagctaggtagatgggttggttcggaacgtggcttagagtcatttttctcttaggctcaaatttgtcaaatttgacaagtgagcaggctatcctctcctgtatacttgataatgattattacagtgtactctgtgccaccttggtggcccttagagttgtatgtttaagctgcagataatttgcagagcattggctgaaacacataaaatcacatgcttggatgccacagcaatgtcaaatcgctatatgttcttaagcacttgtggctcagtcacaaacacaacttgcagactagcacctgtttgtggatcacactttgagtagtactgagtttaagtcactaatattttaaaccttaataacttacacctatccctgcagaggggaataggttcattatataagattaatcagaaaccatcccatatacatggaggacaatagtgaaaatagtcaaattttaatttcaaattacaaatgtaagccctctaggactgctggacatgcagtggatgctgacttttctctataattttttttaataggtggtattaaagatggtcactgagattaagaagattcctggtatttctcgaattatgtatgacttaacatcaaagcccccaggaactactgagtgggagtaataaacttcttgttctattaaagtaccgtgtgcagtttaaattgattagaaatcattcccattattgacatgcagtactgtgaaaagagttactggagcagctacatcacatctgagttctccacagcaaaaatctacggcttaagagctgagttggggataaccaaaagggactgaagagtttgtacgggtaaataatcaaagcaccattgcctacactcagacagattgatactgcttttgcctttgcctcacttattctttatgtataaattcactgttgatgtctctgtgaatatgtatgaaggtgggtgaatttgggggtaattatgggcttctgtctccttaccagtttctaagaactgttagaaacgcccattatttaccagtgttacttactacttatatatactttttggagaatcagttttcttataagtaatcttatttctccaaagggtgaaaaagagatgaacatatcagataaaggtataggtgggctattccagccacttttgaaggacactgagggtataaaatgtaagctaccataagatggaaaagcaccaggaatttgttgatgtacttttgaattttatttcacagccttgggaggaagaaactatgagtggtctcagatgtctatgaatggtcttaaaatgttttcaaaccatgttccacatagatgccatgttattcaatgtcagcttgtttattagtaaggagctttatcctcctagccttatattaccagccccccacagccttgcatagaaagtttctgttatctccttagaagaaactggctcaatgacgtttctggtgtagtgcagatagaggtcaagaggagcattttcatctcttcttttgctggtcagagaaacggttctgagatcacagaagctatgatgcatacctacagcttacaaaagggagaggaaaaatgtttatatcatctagtaaacagtagtaaaaggagcttttaaatctaatctatagcacatattattcattgctcagacacctgagaacagtcttgatacatgcaagatgtttgccaaactttgtaatcctttctactagctataagagaggatttaagaactggtgtaggacttgttgccatcaccaccagtttttaacagatcttttataacattcacataagtactgtagacagtagtagacttaaactctccgtttctctcagtattttagctaagaatgttaccatatttttctcttaacaattccatctcaggttgctgctgcttgtctagtttaaaaggtcagatctattaatcaggaatgaaattttatttgggattcagtgttagacaaacaacaaaatgatgcgtggcagaagtcatctttttattctggctggtccagggaacaagaaaactgctgctggaccagcaagggaagagtttctgtctgtcttaacagaaatctgtccccaagacaaaggggtacttgactcctacaaaacttaaagggtacattctctatctgatgaggaggtactcattatggccttctggaaagaggctatgttagtgatctggtctttacagatttagagtcatgttatttgaaagctagaatagacaacctataaaatgcttaccaacatgtgtcagtacacgtttatgtttatatgaaaaaaaatttctagccacagtgtcttatgattttgtattgaagcaaacagtaggaattttggaaaaatagagagtaagaatgtgtgttctatggaacactgctccactgagaaggtccatgtaaaaaggattaggtggtcatataagtttggggaacataagctcacttgtcctttcctggagattcatggtatataatattcaaagctctgagaaattctgaagttaaaaacaattgttaaattctgcttaaattagtgttttcctgatatttgttttttgaacaccttttatataatcccttctaatatatacttagtatatacttaatataatattgggaaaattgttactccaaagcacatcttgacatgacatagtttcttaaaaatccaaattttctggaactcagaaatttcctaatatttagcacactgtcttcttttgcacagcactttttgctttgtgccatatagcattactctgtaccttcacagtatttcatctgagccactgaggaaagttaaaggttgcacttccattttacagttaagaaaacaagctcaccttaggcatggttacttaattaatttcagaattaaatttcaggtttccttagtccagattgtcctgatgtgtattctgacacctaaaattatataaacatttatgggatgcttattttactaagactagaatggtggctacctggctaataacattcatcattggttattctgggcatatcatgactttattcccgttgcttaccatctacctgggacacatctctctttgattaaatatattctttttctttgtactttttaggtagacagagaatgtagatcattgaaagcattatttattcctaagattggcaggcacagaatcatttttaagaaccaaatacccagtcctgccttaaaggccacatctatgatcatcagctctgttagaaataacagcctggcataattcctaaatacaagtctgtagatatatccaggagatagggttacactgttttctaaccttttttaaatcccttaatcttgaggtaaactgcatgcatttagtcaaacaagcatcataaaatttgtttcctcactgtttgggcttaacctcctgatagcctgttttactgaataacttgaccctaacctgtagagaataagagcattcaaattaggaaggcaggactatccatctttagtgcttttcctgccgttaaacaacaatgtgaacttggtcaagtcatttctgttctttatctgtgacatgaggtaactgtattaaattttcagcatcaaatccagctataaatttgtattttgtaaacaagagaaagtaaagcaggagacagaatggagaagctggatagtgttttttttttttttttttaaggttcttttatcatcagatatgacacaaagggaaacatcaaaatgcaccgtaaagttaaatcctagttacctttttttgaagctgttggcaaggtttgaccacttggggcatcttctgctgtgagatgacacttgaaaaacacccatcaaagttttcctggtaggaatctctctttactgcgtgtttttttgaaaagctgacagagaatatgctttggctttgacactaatgaagtcacccatcatcaattacatacagctaattgttgggagctagagctagaatccaagctttctgattctctgcatggaagaggaaatgctctagggcccttcagggcaaatcttaaaaggaagttcttggccgggcgcggtggctcatgcctgtaatcccagcactttgggaggccgaggtgggtggatcacgagatcaggagatcgagaccatcttggctaacacggtgaaaccccatctctactaaaaatacaacaaattagctgggcttggtggcgggtgcctgtaatcccagctactcgggaggctgaggcatgagaatcgcctaaacccgggagatggacgttgcagtgagcagagattgcgccactgcactccagcctaggggacaagaatgagacaccgtcttaaaacaaaaacaacgtaattgctcacttttgaaccctgcggaggcgtttaaacttgttcaggggccttagtttagcaaattatgacagtttagggcattaggctatctggtatattaaagtacactcaaaatcctctgagttctccaaggagcctnnnnnnnnnnnnnnnnnnnnnnnnnnnnnnnnnnnnnnnnnnnnnnnnnnnnnnnnnnnnnnnnnnnnnnnnnnnnnnnnnnnnnnnnnnnnnnnnnnnntcgtgcttggttttctcttcgtgggttcccaagtggagtacttgctcaacttcagttgttcgcagcattggaccttgttatgctctctttgcatctcccaatgtcgatggtaaagattggtactcccttgtttgagatttcttaaagtttgaaatcaagccgcttcttgttgaggctctgctgtacgacaggcgaatccaaagggcttcgtatgacagcaggcgggtgccgatacagtgagctgcccggatcaaaagagggacagcaccccctcatggaagagtcactgtttctgggaggacagagcatagcttcctcagccagggacacatggagcagatgctgtggacagataaatcaatcacccagactggcagtgcaaactccatcataatgaagccaacaggacagaggatgagcttagatccgggcctctatcccccgaggccatgcccatgcctgagagaagtttatggtcccagtgtgaaggaaaagtagagggaataaaatccctaagagattgagtttatatgaaaagtgactgaattacctagtagtaaccagattacattttctattctcagagaaaacagaaacttacaagccatattaattattataattgtcacataatggtatgtgaatatgaaaggtataaataaatatacatttaagtatattcaacatatattataaatatgtataatatgggattaatatatatgcctcttttccaccgattgggacaccaccttcatcctgtgtcaaatatgatgcatactgacatctgtttctcagaaggttgattccattcatctgtctactagctgagatggtatttagcaggtctaggcccagaaactcaggtttgctcagtcttgcagctttcattttgattgcattccgattctgtattttcctgcagtccttttcctagaagctgcccactccctaaatcctgtggggttttcaggtatcctccattaataagcctacatcatcctcgcatcctcagcaactgtgtatctgttgattgacaatgattaggggtgtgctgaaaccagctcctaccagaccacaagagccacttctgtgcatctcctcccccaattccacattcagtaatgtcacattgatactttgatatttgctatggtgaaagtatttacaccacagagatcagcagatgctataaatgtggactttgtttttagagagccagcttgccagcataccatggattagaaagtctctgaaaggccccaaggtccaggactcttcaacagaactaactatactataacaattgtattaaaaatctaaaatggatggtataattatctgaatacttagtttcactgcatcaacacccccataaaaatgtaatttgaaaatgtgtgagctaaggtgttctatgtatagtccttttttctctttctctccttgataggcaggattcttaaagactactaaatattagatatcatctgcattaaaatcaggaggaaaataaagacaagttttgacctagaacaatgtgatactttggattgtaaaagaggaataaataacatcttgtatcagattctgtcccaggaggtcttacgttattaaatataactgcttcaaaaattagtatctctgcccctgggagatctggttcttgttctgctactcccagaacaagatctgcaaagccaattggccaatagcctgtgtcagattaaaaccctctcttgacttccctggaaaagcctagacaggtctcagttagaatcaccgcagacagccttatatatctggagcacaaagccaaccaaaggtagccctgcagcgtgggcctgtgtgtgagtggggaccttgcacagccatcagaagactccacagtggtgggctctccatcttttcagtttcaaatattcctcactcatcatggccctctattgaggcagctccttcaaacaccctcacctttatccagtctctatggaccacacaagtcctcaaaatttgtctctaaaatcatagactagtagactcagccagagtctcaggggtattttgctttcgttttccttttacagataaggcccagagaaaggtggtcatttgcccaaagtaacagcagatccccgtgccaaagttagaacaggaattcaggactgccaagtcccagcccagggccctttctactgaaattctgcccttctctcttccactatctcccttgaagttggaagggagaagtagcatccttgggggaagagaagcagcatctttactatctgtgttctacagcagtcacaggttttggggatccctaaatccatgagaatgtcaagggtcccccagaagcttaactaatgcacaaagatttcatagagtttaatttttagtgtgactattccttttaattaactgattgagtcatttttctcaaactttctaatatctcccccaaataatagctgaattacaaagccacaaaatggagagtatttaatcaagtgcttccttttagaaataattcaaggaaaaataaacaggatgtcttacttcattcacctaattgggttaatctcccaataggccctccttccattatgcaagtaacagaaaagaaaacagaatcctctgtttttcaatgttaataataaatcattcctaaacaacagaccttaaggaatcatttcaccctcaagctagctagctcaagctttaaaaaaagactgttacattacttaatttttttttcaaatttctttttagaacacacatcataaattataaaaataggctttcgtgtggcaatactaacattttaatggaagaatagtgagtctatgccttcatttctttattatttgacttatatttagacgattcccattgtctgaatgggataagctaaggtggttcatttttatatcatatacagaattgccaaattacaatactacattctgcgtggtgtgtgtgtgtgtgtgtgtgtgtgtgtgtgtgtgtgttagaagtcccagaaaactgtctccctcaccttacagacaagagaaatgaaatacggtgaggtcatgggcatacccaaagtcatggagctaattagcctcggagccagaaatagaacctacgtctcctgactccccagaatgcatgctgctgatcattctcacagagtgaataaagcatccttcatcaccaatttctattagttttcacttgctatatgaaaattatagtaccactatttctaagaaatgtttagccctcataattatacacccttagtttatacattgtgtaacatcagaatagatataccttgtcaatgactcttcttcacctttaaaatatcatagttgttatagggcagagggaatagagcccaggtttaggagtcagaaacagaatttaaaccccaattctgttgtttataagattggtaaagttgtgtaagttacttgagatacttaagtcttttgagactccattttctcatccaaaagtaggataattaataactacttttgtaagattagtgcaaatccccaaagatagtgtctggatttgtggtaggagggtcttttttgatatttgaaatctaccaattttctggtctaaatttattaactcattaaatatttattaggtgcattttatatgccagacattgttctaggtgctggagatagaatagtgaacaaggcagacaatattctgccttctttctggtaaagggaagacaggcaacataaaaataagaatatatataaggaaacaattataacatacttaagtaaacaacataatatcagaggatagaagttcctatgaaggaaatagcaggatgctggaaacccttgggatggggaaggattgtaacttagtagttaaggaaggccactctgagggaatgacatttgacttgaaacctaaaatatgagatatttttctccctgggaaaagatggagaaaaaacatctcaggaacaggaagagcaaatgcaaagaataaaagcaagaataaagttgacatatttaagaaacaagaaacgactagagaatgatctgagaagacaaagtgttgggcaaagtccagatcatgaggactttttaggctacagaaaaaagttggatctgatactgtgagtggtgagaagctgtggagggtctaaggaagagaggcgtagtaggtattagtctcaactactattgggaagactttggagactttgggccaggatccacgaaggtcgtggtgccaaaaaggcagtcctggcagtgcagaaaaagaggagacagacactgttaagcaacaaattgaagggttgaaacgaaaacacttcttgatcttcgcgtctgctgtaaatacatgtctctctctttgaatgatagataacatagaaaataagaagacgagaataataaagaacatgagagaaaaacgagagacacaggaaaagagaacatcatgaagagagaaannnnnnnnnnnnnnnnnnnnnnnnnnnnnnnnnnnnnnnnnnnnnnnnnnnnnnnnnnnnnnnnnnnnnnnnnnnnnnnnnnnnnnnnnnnnnnnnnnnnttgcgctcgtacccaatggaaggtaacaaatctctttttcaccccatcaggagcatttgtgggggatgctatgcttaaactgacagtactgccatttctactctactgtggctgccccaagtggctctgggcactgcaaacctgaatccttggagagtttgctgtttgcagacttaagtaagcttctatctcgccactcatttttttttgaggtggagtttcactctccttgcccaggctggagtaaaatggcgtgatcttggctcactgcaacttccgcctcccgggttcaagtgattctcctgcctcagcctcccgagtagctgggattacaggcatgtgccaccacatctggctaattttgtatttttagtagagatggggtttcaccatgttggccgggctggtcccaaactcctgacctcaggtgatctgcccacctcggcctcccaaagtgctaggattacagaggcaagccaccatgcccggccatatcttgatactcttgtgattgtcttcgagctcctcccagttcagaaaaacttcctatttccatccttatgagatctctctggtgcttctctgctttctggttcatgatttaaaatcctgtgccccaagtctttcaggcttttgctctttgaacccaaagcttttacctcttgaaatattcagctcttaaaaaatctaaaggactttgccttcaagattgctgcttccactctgaatttatagagcttacttttgtattcaaagacaagaatttggatattttttatcattttgtttgtatttatctgttttgaaatcctttcttgcttggtgcagtaagccaacatgaattttaggtgtcaaaaaaaaaaaaaaactgtgcaaagcataaagatcacagaggtgatttaaaatgtttgatcccaggataagaaacggttttctaacttaaaagcaatagaaaaaaatcacaggaaaaatagcaatagttttgattacatcaaaactaaactttttagtgttaagaaagcacataatattgaactaaaaaaataataggctgggaagtccattacccaaatatgagagacaaatgattaatatacttaatatataaagattcataaaaatcagttataaacacaaatgccccataaaataaatatgcagagcacataaacataagaagagatactaatgactaataaaatcttaaatatgcaaattaggagaataaatatgttaaaaatatttaggtacattctcatattgctaaaatgtgtgcaaattgatataattctttctggaaggcaaattgaagccaggatctttgaaaaaattcaggccaggtacagtggctcacgtttgcaatcctagtattttgggaggccaaaatacttggcttgagccaaggagtttgagaccagcttgggcaacataatgagaccccatctctacgaaaaatagaaaaaattagctgggcatcgtggtgcttgcctgtaggtgcagttactcaggaagctgaggcaggaggatcgcttgatcctccccagggaagtcaaggctgtagtgagctgtgatttcaccactgcacaactccagcttgggtgacagagtgagaccctgtctcaaaaaaaaaaaaaattcaaactctttaattttggaattctacttctaggaatttggaagttaaaaaaaaagatggatataaggtaaaaataaaaagttggtgagataatagttcataaatatggaacattcatttgcagaatattatataactgttaacatatttctagagtttaaatgactacttttcggtagagaaaagaagaatgaatggtcatatattgcttttgtaattagaaaaaaagtattattaagctaaggacagacaactgtaccttttgggtaaactttgaagaagtttctataaaatgctattttctttcaatattctagtgattagactatttagctctctgtcaataagataacctctataatctataagcataaaataatacaagctgtgaacaatggtacttaaaattacatgggtgagaagatttcaaaaaatgttaaaaatgaacaccttttaaaatataaatctttgacatctgaaagaacggtctcaaatcttcagcaagctatcgagtgaccccatctatctgtcaaattgagcagcatttgtgttttgctttaccctttacaagacatgtgtgcgctcatggtatcatttctttgttaatcctcacaacactctggggcaggaataactgttatcattcttcaatgtaccagtagaaagctggctcatgggtcaagtaacttgtcaaaggaccaaaacacctcttaagtgtagaaacatgattcnnnncnnnggaggcncgtnngnnnnncnnnnctgactncactggacgatgtaagggggtctgnnnnnnnnnnnnnnnnnnnnnnnnnnnnnnnnnnnnnnnnnnnnnnnnnnnnnnnnnnnnnnnnnnnnnnnnnnnnnnnnnnnnnnnnnnnnnnnnnnnnttttcagatttgaagctccgttttaacttttgagaatgtgatgccatctggaagtggtatcccattttaaagctgagacagtgattcatgatttcctgacccatatatactgtttactagttttatttttccttcttccaagacattttctacagacaggagacagatggctgaaacactgtaacatccaaggctgcttcattgcacgactccaggagctcctttcacatcataaactgtgtgaagggcactgtctggaattgtgcagtgcctagcctgtgcagctgtacatggccctctgccttttgttgaggtactcagctcaggtagtgttagttctgaagatggtggccagcataggaatctgaatcatcacatcctgaatttcactccatctactatagccatagcaccctctctaaggcctaggtgatatatatagcacagaagatactctaagaaaacaaatatttgattattagccaagctacaactctcttcccctaactcagtggttttcaaccctgggcacactggcaatgtctagagacactttgggttgtcacaactgaggatcttgtaggtagaatccagggttgctactaaacattccaaagggcataggatagccccctcacaacaaagaattaactggatcaaactgtccttattaatgcagagccctaaatggacaccctttctgatgagttgggctgatccatgtgtgaaatcttgaggattttcttggttctttcagtcaggtctggaataggaacagcttaggggctcttttcccttaagtccacactcgatagtttcctcttgaaaattttccattccctttgtgagaaaaagaagtagaggtccttcctgcagagagcttatctaaatcattcacccaatgccttttttccctgtaaggtttgatgtagcaaactccttagggcagaaaaagcacatggctggagtagaagtgatggccttgagcatgccctgagagttctctctactttcatccctgaggcacttccgcagggggagaagaaggcatgcactcctgtaaggagatggagaacctgacctgaagcaggtccttgacatatctgttgctcctctagttttatctaaaaaatatatgtgaatttttattctagtctgtaatatatccatgttaacttttataaaattgttttaaattatcagatactttccacattttgtttctctaagcctttgaataaaatgaaaactccatgaacatgcatgtatttaccctgttgctttgcttgtataaccatctagagtttttctccatggcccttcttctgggggcttggcaaaaggtccttggaccttgaactcctaaaggatcctagttgtaagaatctgaggactcctagaccaagccaaagtggtgatcacaggcatagaggtgtcgagcacagatgaaggtctggcctgtgtatgtgtcttaaggaggatcaatttcagcatctctgctctgcatacaggagccatgaactagattgtgtatcatatgaaagagaggagcctgagagagccacttccaacaaggtctagccaacagacactcaggatgggactgagaagttttgacttcaatgattcctctggtcctgagaagtgggaggcaaactaaagtagaagctactagacaggggcaagggatgcagcttgtggaaagacatacagtttgtggcannnnnnnnnnnnnnnnnnnnnnnnnnnnnnnnnnnnnnnnnnnnnnnnnnnnnnnnnnnnnnnnnnnnnnnnnnnnnnnnnnnnnnnnnnnnnnnnnnnntgcgggccgtgcgttttgctgggtggttactttgctggtttttggtcgctttggttgtagtcgtgtttttttcctccatgtccatcttttggtgctttccctacgtttcccattttttaaccggtcggtggtatatgcgggtttctacatatccaggtttcgacatcgctggggacctggacattatcccctgcaggttacaggagactagtgtactagctctttctctctattctcgtgtaggtgcaatctgtagctaactttaggttgtacagaactgaaatgtataatattcctgaattcacagtacgcgatcatttgcaggactcagccaattcactccaaggaatatacctaactaaatatacctaactaaactatgcctgtatgtgtaccaaaaagatgaatactagaagatttgcagcagcattaaactactcagatgtccatcaacagtagaatggatcgataaactgacatatactcactcaatgcaatagtgtacagcaataagaatgaatgggctgctttgtagagaaaagagtatggggtggtaagattggaagccgggaagtgatttggaaattggtagtgattactgtcatctaggtaatagctcatgatggcttggctgggaacagagctctcaacaatttggggtgagtttaaccgtcacatcagatttgctggcatcctttagacatctgacacttgcacatttgaagcacatgttcacataaaagggtacacattagaaagctacaaatttaaaaacctaacatcacttcccaaaataatcctatcgagagatgacaatgtgttagcagacctcgctcactctcagtggctccttggacttggcgtctgctctggccacacttgaggagcccttcagcctgccagtgcactgtgggagcccctctctgggctggtggaggctggagccagctcccttggcttgcggggaggtgtggagggagaggcgctggtgggaactggggctgcgggcagtgctcgcagtgccagcacgagttccgggtgggcgcaggctcagtgggccccacagtcagagcggccggcccctgggcagtgaggggcttagcacctgggccagcagctgcagagggtgcgccgggtcccccagcactgccagcccgccggcactgtgcttgaattctcactgggcctcagctgcctccccacggggcagggcttggttcctgtaccccaccatgttgtcccctctgcctagctcctctgcaccagctcccctgcatcttctgtggggtatgaggttcactgctcccacccttccggcgcgtcactacactatatttaaccatgatgtttagcctctcgtgcgatatatggatgtgtcattatacaggcgttgaaaaaaccgcgcttggcgggtctcaagttatgccaagtcttcggcgaggctatacgcggagaatgtcgccccacctaccgttctgtacccatacaggaacggtatcgggtttnnnnnnnnnnnnnnnnnnnnnnnnnnnnnnnnnnnnnnnnnnnnnnnnnnnnnnnnnnnnnnnnnnnnnnnnnnnnnnnnnnnnnnnnnnnnnnnnnnnnttcttctctttcttcttctcctcctgctctttcttcttcttcctcgttctcctcctccttcctcttcctccccctccttcttcttctctttcttcctccttcctcctcctcctcccccctcctgcttcctcctcctcctccttcttcttattcttccttcttctctttcttcttctcctcctccttcttctgcttcttccttgttttcttcttcttcctcctcctctttctccccctcctcctccactgatgccccttcccttcccttcccttcccttcccttcccttccctcccctcccctcccctcccctccccttcccttccctctgagtcggagtcttgcactgtcgcccaggctggagtgcagtggcaccatcttggctcactgcaaactcagcctcctgggctcaagtaatcctcccacctcagcctcccaagtaactgggactacaggcacacactatcactcccggctgattttttgtattatttggcagagacaaggttttgccatgttgcccaggctggtctcgaactcctgggctcaagtgatccacccacctcagcctcccaaagtgctgggattacaggcctgggccactgtacccagccttgttttccttcttatcctcagttactctctacctattccttcaaatctgcatctggggggtgaagaagggaaaagctctgagtaagcaaagacaaaattctctttcataagggtgatattgaatgaaagacagaaaacatttgtattttaatcaaccttattcctgttacaattctctcaattgttttgcctcagtagctttaattttttttttttttactttttttttcatttgtggattgtttttgggtttacgaggatacataccactcttctcaattagctaactggagtagtaagaaagaagcttgttactggaaaaggccaatgcagaaaagcctgaaactgagaagcgagactgactttccaaaactgaaaataattctcaatctgtaacattatctgtacactctaaggtcattttatcactatttcttttgagatattatatattctatacaaagggattttcaacaagtccccactctagaactatgagggctctgggatattcacagtggaaggggacaattggatttctttacagtcaattctctgttcttcgttcaataggtgaaagggagtgtgaacaatgtggtgaagactattggtcaaatgcacaaaagagcgagtgtgtgctgaaagaggtggaataccttgcttatgatgaggccctgggattcacacttgtcattctttctgtctttggggcatttgtggtcttggcagtcacagctgtgtatgtgatacacaggcacactcccctggtgaacgccagtgactggcagctgggctttctcattcaggtttctctgatcatcatgctgctgtcgtccatgcttttcattgacaagccacacaactggtcctgcatggctggccaggtcactctggcactgggcttttctctttgcctgtcttgccttcttggaaagactagttcactgtttttagcctacagaatttccaaatccaaaactcaacttacatccatgcaccccctttatcggaaaatcattgtgctaatctctgttctagcggagattggcatatgtacagcctacttgatattggaacctcccatggtatacaagaacatggaatctcaaaatacaaagatcattctgggatgcaatgaaatttccatagagtttttgtactcgatgtttggaattgatgccttcttagccttgctatgctttcttacaacttttgtggctcgccagttaccagataattactatgaaggaaaatgcatcacctttgggatgcttgtctttttcatcatttggatgtcttttgtccctgtttatttgagcaccaaaggcaagttcaaaatggctgtggaaatatttgcaatcttggcatccagccatggcttgttgggttgtatatttgctcctaagtgcctcattattttgctgaggccagagaggaacaccagtgaaattgtttgtggaagagtctccaccacagataattgcatccaactgacctcagcttttgtgagcagtgagcttaacaataccacagtgtcaactgttctggatgacagagttttgatttacatgtgtcctttgaagctgcaatgatgatgtggttcaacattccctttcaggatgctcctacagcagctgcctaatactctcaggtaacattgaggatttgggttctggtggtgtagtcttagcatggtatatcaaatcttgtactgtaagatagcatttagcatgaatcagaataccttttactattgaaattaaaaactattttattcaagcatttcaaaata

SEQ ID NO: 450 - protein, 755 aa, Homo sapiens
MFERRKEQDEGPGIHEFLAFLWAELGSEAKEEKEEERTCRLLGKCVDAENHSLVIGGLFPIDSRTIPANESILEPASAKCEGFNFQRFRWMKAMIHMIKEINKRKDILPNITLGYQIFDTCFTISKSVEAVLVFLTGQEENRPNFRNSTGAFPAGIVGAGGSFLSVPASRILGLYYLPQVGYTSTCVILSDKYQFPSYLRVIASDKIQSKAVVKRIQHFHFLTLSPRLECSGAILAHGNLCLPVETGFCHVAQAGLEFLASNYLTASASQSAGITGVSHCAWPSTIELWIIQFHIYFRMNCRVTTESRSVAMLEYSGEISAHCHLCLLGSSNSPASAPLVAGTTGAHHHAQLIFVFLVETGFHHVSQDGLDLSISFPIQCVLMCVLLGLGRGFVQREPICCFDSIPCADGHVSRKPGERECEQCGEDYWSNAQKSECVLKEVEYLAYDEALGFTLVILSVFGAFVVLAVTAVYVIHRHTPLVNASDWQLGFLIQVSLIIMLLSSMLFIDKPHNWSCMAGQVTLALGFSLCLSCLLGKTSSLFLAYRISKSKTQLTSMHPLYRKIIVLISVLAEIGICTAYLILEPPMVYKNMESQNTKIILGCNEISIEFLYSMFGIDAFLALLCFLTTFVARQLPDNYYEGKCITFGMLVFFIIWMSFVPVYLSTKGKFKMAVEIFAILASSHGLLGCIFAPKCLIILLRPERNTSEIVCGRVSTTDNCIQLTSAFVSSELNNTTVSTVLDDRVLIYMCPLKLQ

SEQ ID NO: 451 - DNA, 1192 bp, Homo sapiens
  source
  (1)..(1192)
  CDS (201)..(992)
  modified_base (826)..(925): a, t, c, g, unknown or other
agagccttgctggctttttttttttttttttttttttttagagatttcgtagtttcctggtaaccattcagtcatctatttcaacaccctgacatgacataaaggcaggcgtggaaccacacgttcaccacacagacacacacctccttgctggagcattcactaggcgaggcgctccatcggactcactagccgcactcatgaatcggcaccatctgcaggatcactttctggaaatagacaagaagaactgctgtgtgttccgagatgacttcattgtcaaggtgttgccgccggtgttggggctggagtttatcttcgggcttctgggcaatggccttgccctgtggattttctgtttccacctcaagtcctggaaatccagccggattttcctgttcaacctggcagtggctgactttctactgatcatctgcctgcccttcctgatggacaactatgtgaggcgttgggactggaagtttggggacatcccttgccggctgatgctcttcatgttggctatgaaccgccagggcagcatcatcttcctcacggtggtggcggtagacaggtatttccgggtggtccatccccaccacgccctgaacaagatctccaatcggacagcagccatcatctcttgccttctgtggggcatcactattggcctgacagtccacctcctgaagaagaagatgccgatcccagatggcggtgcaaatttgtgcagcagcttcagcatctgccatacccttcagtggcacgaagccatgttcctcctggagttcttcctgcccctgggcatcatcctgttctgctcaannnnnnnnnnnnnnnnnnnnnnnnnnnnnnnnnnnnnnnnnnnnnnnnnnnnnnnnnnnnnnnnnnnnnnnnnnnnnnnnnnnnnnnnnnnnnnnnnnnnccaggtgcattggttcatgcctgtaatcccagcactttgggggagccaaggcaggcagatcacctgacgtaaggagtttgagaccagcctggacaaaatggtgaaaccccacttctactaaaaatacaagaaaaattagccaggcatggtggcgcgccgattgtagtcccagctactgggaaggctgggagaagaagaattgcttgaacccggtatgcggaggttgcagtgaaccaggatcacaccactgcactccagcctagatga

SEQ ID NO: 452 - protein, 263 aa, Homo sapiens
  MOD_RES (209)..(242): Variable amino acid
MNRHHLQDHFLEIDKKNCCVFRDDFIVKVLPPVLGLEFIFGLLGNGLALWIFCFHLKSWKSSRIFLFNLAVADFLLIICLPFLMDNYVRRWDWKFGDIPCRLMLFMLAMNRQGSIIFLTVVAVDRYFRVVHPHHALNKISNRTAAIISCLLWGITIGLTVHLLKKKMPIPDGGANLCSSFSICHTLQWHEAMFLLEFFLPLGIILFCSXXXXXXXXXXXXXXXXXXXXXXXXXXXXXXXXXXQVHWFMPVIPALWGSQGRQIT

SEQ ID NO: 453 - DNA, 17929 bp, Homo sapiens
  source
  (1)..(17929)
  CDS (201)..(557)
  CDS (2665)..(3501)
  CDS (9075)..(9287)
  CDS (14036)..(14159)
  CDS (16621)..(17729)
caaaatgatcaaaaaattcaccaagaaaaggttaaatcctgtagcatagactccttttaagaaactgtgggttcttatattacccttcataaatattatcatgaaaaattgtttttaaataaaatttagatcatttaagagataagcttcactcatccagaaattgctatgaggagatgtaggcaaaatgagatacagccatgtccatagaagagttatgttctgatttcaaaaaatacttgtttcccaacagctttgaaatatcagtttttcttcaaactcttgccatgatacacagcattgagatgatcaacaattcaacactcttacctggagtcaaactggggtatgaaatctatgacacttgtacagaagtcacagtggcaatggcagccactctgaggtttctttctaaattcaactgctccagagaaactgtggagtttaagtgtgactattccagctacatgccaagagttaaggctgtcataggttctgggtactcagaaataactatggctgtctccaggatgttgaatttacagctcatgccacaggtaggttttgtgctacctccaaacattgcttttgatcacatttgttattatgaaaggatcagggaaacctgaggaaactagttagggagtcacttttactttaacttttctttctctttagttaaagaaaggatgcacaccattacagagagtatagtgaaaaagtactaagggagtaattacccctcagtctatcaggtctagtatctgagaaagcagcaagtgcagagttggaatgcccaaagaatagcaaaaaggccaatctggctagatcagctgaagcaaaaggaaacatagtaagagatgcttttgtagagacaggcaaagcctgggtcatgtagcatcttgtaagccctgggacggtttgcatgttgttctgaatatgatgggaaggctttgagcaaagactgtagaactatttatttccctggaatgcaagccaataaccagaaaataagcaaaaagatctctgaaaaaaaaaatcagatatcacagcactgtgtactaagttattgaacattactcagagtcaattaagtctctttggctttcattttgaaatcacactactttgtaactctctacgtcactgatttctaatcttaaggaagaagagaagccaaaagttagaaaagaaaaaggcttatattcagatgataaagaaatgaccatctgatagaagtgagcagacagaaaatatatataacataatgaatgtgtataagaattcaaaatatataacattttggaggtagagtaaataaatacatatacaaataaagactattagcattccattatattatagcctagtgacatcggtaataaaaaatttaatccaaaacgattaaacaaaaagaactatttatcaaatacatcaaagataaggctttggcttaaaatttctagactatgtatgatactagttaggtgatacgtaaggaaagcagacttttttaacaacaactggctaatgcaaaaatgcaatttctgtaatagacggcagaaaaggtaaggggacattctatgggtaacactaattttaagaaagctcagctcttaacaatgtggctgagcatagcaacatcaggtacttggaagggaacttaggtttactgaaagtccaccatgtgctcgcatctatttaaattttctcctttaatcttagcaagaatcttataactttacagtaaagaaacattaaataacgttcccaaatttattggagttgggattctaacagtttatctggttcccaagcctattgtctttccatcacaccacatggcagctgtaagtagttaaaaaaaaaaaagaaggaacgaaagaaaagaaaaagaaaaagaaatactgagcaagtgacatgttactattgcatctatagaaggtaataattcaccaaagctatgaatcaggcaaaactttgtgtacattaagtaggtcttccaaaaatgctgatatttatttgacttcatcaggagtcagaaaatcacagcctgcggaccaaatgtggttctcatgctcttgagctttcaggctaaaaatagtttttacatttctaaaaggttgtaacaaaaaaatagatatgacagagactatatatgaccaaaaagcttaaaatattttatatctcgttctttacaggaaaattttgttgacccctggacaagatgattatttgactgattaactttacctagaataaaattacccaaattatgaattagacaagattttgcacacactgatgttccaaactgcattttgcttatatgatggaccgcatttacctctaagtatttaaataatatccacccttggcccctggccaaagatataagataaatatagaagaatatagacgtgtaaatggaaaatgagatacagcctgaattctcagagggcctatactaaacaaaatatgaaataattagaaagccatgattctaaaccatcatcaggggctaagtaaggagaaggatgaaaaagactagagaatttaaggaaagtcatgaaaatttacagcaatcaaagaaaggaacacctactgtgaacagttacctggagttcatcaacaccataactaaaatattctgtctatttccaggtgggttatgaatcaactgcagaaatcctgagtgacaaaattcgctttccttcatttttacggactgtgcccagtgacttccatcaaattaaagcaatggctcacctgattcagaaatctggttggaactggattggcatcataaccacagatgatgactatggacgattggctcttaacacttttataattcaggctgaagcaaataacgtgtgcatagccttcaaagaggttcttccagcctttctttcagataataccattgaagtcagaatcaatcggacactgaagaaaatcattttagaagcccaggttaatgtcattgtggtatttctgaggcaattccatgtttttgatctcttcaataaagccattgaaatgaatataaataagatgtggattgctagtgataattggtcaactgccaccaagattaccaccattcctaatgttaaaaagattggcaaagttgtagggtttgcctttagaagagggaatatatcctctttccattcctttcttcaaaatctgcacttgcttcccagtgacagtcacaaactcttacatgaatatgccatgcatttatctgcctgcgcatatgtcaaggacactgatttgagtcaatgcatattcaatcattctcaaaggactttggcctacaaggctaacaaggctatagaaaggaacttcgtcatgagaaatgacttcctctgggactatgctgagccaggactcattcatagtattcagcttgcagtgtttgcccttggttatgccattcgggatctgtgtcaagctcgtgactgtcagaaccccaacgcctttcaaccatgggaggtactaactcacacatccaagaaaaactcttctaccatcattttccccatttcctcccttgttttaatttgcaaagatttatattaattgctcttaatcctattccttttataaatagacactttcagtgtttaaataaccagcatttctatcatagtgccttactcttcaagataacagagttgtgttttatcttcacttcctactctgacctaccaaagttgtattcttttatttctcatgaaaattcttttgatgttgctattttccttgagtcatataaattatcgcttttaaatgctcttaaaaaacacaagagttagagcagacacgtttaataatccttttgttttttactaaatatgatggatgaggaaactaaagctggggagtaccagaaatacaactgcagtctgggtcttctgactccaccttccttgcttttcactgtctttggtggtttataatcccaacacctatagttaagactctcagttaggatggaggtagagtaaataaatacatatacacataaagactctaatggtctttatgtgtatatgtatacacgtaaaggacttggactccagttttcttcaaaggaatgttgttaggtcaattatgatattccaggtttaaagaaaccagcaattgtgtgtaaaagagctttttccctttcttctctttgattagtttggggaaacttaaaatttaatatggctttaatttagtgagaattttccattgtgctttctcaaatgcccttgaacaaggcattgaaaagtaaattgcttcttttaataatgatgttttacttattagaaataaatgtctcaataatatgtattcaaaggcaaacttgtatgtcctgaggcagaatcatgttacaaaatatataagttttaaatttgtaagagaaaagaaggtaaaagaaatgagacaattcttctgatcatacaagtgggtatctagaacaagttttttctacttttgtcatttttttttttactttaaacacccaaaactaccatattcgaggtctgatatgaccagttaacatttgggaggatcatgcaatggtgggagggtattttaaattgctcacttttaaactacttttcaccttatgaatacaaagccaaaaatctaataaggaggtaaaactagagattaggaccttttctcaattgcaaacactcttttaatatatatatagttatgtctgatgactttaagacacctatatgaaagcattctctttgtagtataaaactttaatgatggtggtaaaaaccataaattatcttttttagatcatcattattcactatattccaagttcagtacaatgttttctaatatatttcaaggcttttggcctggtgcactgcagaaaaactgttttaatttttaaaattagactacagtaataataccaccacatagaattttagaaataagagattgagaaagagaaatagagaacagttgtggagacagatgacataaagtggagcgggggatggttatataaagaacctcataaggacaaagaaatgcaaatagcaagagttattcaccccctgaagatctggggaaaaatagagaaagtattttaaattaggaataagtctcaaacacttcaaggataagatttgagaagaaattatctaagcagagtctcctaaaatgttttatttaaacactaggagcctggagtcattctttttgccctcagagcctgttaatctagaaacaaacagaaacagattagaaaggaagaacagggggatgacttgctcctttgatcaagacgtgagtgagccacatcaagtcagtgctagagtcagtaagacaaacaatacaaagagttatccttttataaagaaatctctgtagacttaaactttaaagatcagcaacatttagggtccctagtcaatgatacattcttaaggattactttgtaccctagcaaaattcactaatatttaaatagcactttctaaatgattttagatgcaaataattttaaaggggttaatttttcccagtgtttgaggatagcacttattttggccctatatgtggtcatatttgtgagccatactcagggacaccacagtcgtgcttgttttacttcagcagatttttaatgttcctcagatgtgtgtggaggataccacctccttgctgtgactagagatttcggtttttttgtttgtttgttttcctttacttctgatgatatataaggtagtaagtgatgtatgagaaaagaaagaatgcctaatagttgaacttctattcatatatttatttagcaaatgtttggtgtctcaatgtttcaggcagtgtgttgagtggtgaagatattacggagaacaggacagaattccttccctaaaggaattatctgtccattgatatatacaatcaaacaagtaaggggctgattacaatgaaggatggtacactacagtgtttcacataaacacaagatggcagagaagtacataagtgagacagctaatccagtattaacaattcagagaacattctccaaaaaacatgacctctatgtgaatgcaaggaagggtagcagttagccagaacagaaatattccagcaaagtcccagaaaagggagaaaagaaagcacagcatctttaggaagcaggaaatcatggcatatgactggagtcttgcatgagagctgtaatggactaactgaatgagtgagtgaaagacatattattagagccttgtccatcagggcatctcaaactttgatgtgcagttgactttcctgggaatcttattatcatgttaattcagtggttccacagtgggattgaaaagtctacatttttaacaatgtcccagatgatgctgatactgctagtatagagactcccccttaaatggaaatgttgcaaactatgttcaaaggtttgaacttgacagaggatagggcagctaattaaagacattttcaggcagaagagtgatatgatattttttccatccaaggtgaattgattagagggacacaagactgaaggaagaaacaccaatttggtaaatcagacataagataagaatgcctacaggtatgaaaataaggatgaaaagatgtatatatggatatttaagagggaggatgaagaatatttggagatcaattggatgtaaatgatgacagagagcatcaaaaatgttgcagatgattccaatattggacaactggtgtcatttgtcaagctggaaacatagagaaaagtggaggtctggtgggagtaagaaatatttagcattccattttggagatgttgaatttgatgaatttatgagacatgtattgtaagtgtagcaaggtagttgcatattagtccagaagtcaagagagacatgagagtaattttggcatggtaagataatagtaactaataatttttaaaacatatggttctaggtactgatatacaccacctctaatctttataaaatatggtaggccgacaggactcatcttccttaaattccatcttgaagaagtagtaagaagaagtgtttctagtgaccaagacttgtcagagtttagagatggagggaaccttaacagtaaagacctgtcccgtggtgattcacacagttagcaatgaaactgctgccccagccttagatcaatgtgttttctgcttcacaaaagaaggtatcgtctgggcatcaggacacagaggcaaggatgtttcctctgctcttctctaacttagccatgaagatacctctttccacagtaaccttacttaatgaggtagagcaagcatcagcacagttaggacaatgaaaaacaatatcaaccatatcactttaattggtgtgattcctggccatgtgtgcttaaaaactaggcattatcatacacaggtgaataagataataattgaaatgcaaatcccattctctaaattttgtagtgtcaattgatagtgaatttcagagtctccatgaaaatttttttaaatgatatgaaaaagcagttaacagcttaataactggagtggtaatgtttaagattaaccttacttcaaagcaaatgttttattatatttaatgagtaatgaaaatactgttgtatttgcttccaccctgtttcctgtaagagcaagcataaaattgtggaagtttatttacattatacaattttatgattatttacagaacaaatacatgtgagaactttagcctataaagcctaattaagcacaggaaaaaagaggtagaaattatagttcaaacacttgtgtggaagaggatgtgctccctaaagaactgagttactggggtttacatgtgtatattgcttaaggaaagaacagaagaaacaaaccagtcaacagatagaagtgagaacattggaggtaggcccttgcatattcttttatttttgttctctcctcttttttttcttccaggcaattgctagaataaaattttgttagtgaattccaccatgttagatctgatatcctgcttctttaaagtaacactaattaattgatattcattaaaagagctaagacatctgtggggacataaatacacacacgtagacattctgctaaagtaacatttctcattgatgttaccatcatagctaatctatttacttgaaaatataacttattttttatattctattgacaaaaaattgaaacactcataaaaagttaactcaaaagaaatagaatagaataattgtcttcaaatagaataatttctgccttattctatagattttatacccaacaaaagccacacagaaccatagatttagataataaatgggccattatgaaagcattcagagaggatatttacttgacatacttatatattaagttaatggtgaagccagaacagcagcctgtttccctacattccagcctattgttcttccactacagcacaacctcagtatggctatcccatttgtaaacaaaatattttttgtcctaactctatagtatacaagctctcactgtgcaaattaggtagcaagacaggtaatttatccttatatttctttcttctcaagttaaaaaataaatcattttgtgaattagcttagaaatataatttagagatcactttactacatactcaatcattgaaacaaacttaagaaccattggagataatcagatagaaagtaattgtacttgcattgatgagagatggaaccagagttagatcccaggtgtctataccaggggacccattctaaaattctgtaggataaacgaagatacttagaaacaaccatctatagaaattaacttgctttcccaaatttatatagcaaaagttaggcagaaatgaggctaggacccaagtgaaattcattctcaaattgttgccagatagttaagaattctccaaccagtgatttataatcttttttccctcatttttaagtgatatgctttataaggcagtgttatcattagaataatggatacatttgcaacatttatattaagtgcttatctctgtttttattttttatagttacttggtgtgctaaaaaatgtgacattcactgatggatggaattcatttcattttgatgctcacggggatttaaatactggatatgatgttgtgctctggaaggagatcaatggacacatgactgtcactaagatggcagaatatgacctacagaatgatgtcttcatcatcccagatcaggaaacaaaaaatgagttcaggaatcttaaggtaaccttgttgtaggccgttttgtagcactcaaagcaattggtacctcaactgcaaaagtccttggcccccactcttcatcatactcatctggccaaacacaatccctgttaatcaagtttctgcctaatcagtgtagctcctatttagctgaagttggcaaaagaggaaagaaaaagaaagaaagaaagagagagagagagggagggagggagggagagagagaaagaaagaaggaaagaaggaaggaaggaaggaaaaaagaaagaaagaaagggagagagagaaagagaggaaggaagggagggagggagggaggaaggaaggaagagagagagaaagaaggaaagagagaaagaaagaaagaaaagaaaagagagagagggagggaggggaggggaggggagactgctgactagtctcattttaaattcatgatctctagcctccagtgggctcttaatgctgcagggcaatcagattattgccctagttcatgaactcaccttcctagatggctattttatgccttctcttctctcctctgagatcagtacatctttcctgttctcatttcagttaactctattttctgttctaacaaaactgaaacatcagaagagaattccagtggccactgtcacatctgtgccagtacccctgccttccatctggcactatagacagactgtctgtgcccctagtcaaggtcagctcctccacttcacctctgggtcccaacctctttcacttattcaaagacattacttggtaattttataccctctctcctttattctcaatcattctttcttctacattatacacataatgagataaataggtcattatttctctcatcttaaaacaaagaacctttgttgttcccccaagtctttctttgtatactctatttctctttacagtaaaactccctgaaacagttgaatacatttaatgaccccaatttctctcctcctatactcttttgaatcctcttcaatccatcgaaattgtttctgtctagctcaccaaagttaataaagccaaatattaacatatatcacttaccagctaattattctcccctcaatgaaatattttatttgtttgcttccatgacactacatttccttgattttcttcctgtgtatcttgccactaattctctgtctcctttgctagttcctcatcattcacactacctctaatcattcaggtgcccaggactcagaactgctcctctttttatctacacctttccttagtgatcttatccaggtttggggctttaaatgatatcattatatgggagtctgatgactattagatttttatcttctgacttctaacccaaataaatatacaactgcctagttgacatctctacctggatgcgtagcagtcaacttaaatctccaaaacagaactgatattctctcccaacctactcacctctcaataaacagcaacccccttctcctagttgctcatgagaaaacctgctgggattcttgtcacctctctttcggtcacactccataaccaatgagttttactttcaaaatgtgtccagaagctgaccactttttactacctactccactgctgttacaatcacttctcacccagattattgtagaaggttttctgcctcccctcttattcctttggtctgtttctttttttttttttttttccaagatggattcttgctctctcatccaggctagtatgcagtggcgtgatctcggctcactgcaacttccgcctcccaggttcaagcattttgctggtctcagcctcccgagtagctgggattacaggtgtgtaccaccatgcccggctaatttttgtatttttagtagagacgaggtttaaccatgttgaccaggctagtcttgaactcctgaccctgtgatccacctgcctcggcctcctaaagtgctggaattagaggcataacccaccgcgccagcccccttcagtctgttttcaaaacagagacacaagtggtcctgtaaaacatagtgctctgctcagaatcctttgatgacatcctatttctctgagagtaaaagccatatctttaaaaattctacacaacctacccccagtacgaacctgaccttatctcccaccctccccttactctacagccctcctgcgatcccacaggcttttcagtcttccatgcatgcttcccttctcatagcccaaggactttgcccctgctatttcctttgcctataataattttctctgatgttcatgtggttaattttcttattcctttctgtcttttctaaaatgtcaccacctcagtgagagcttccctggacacttatttaaaaattgcaacatcaacctagtagttcttattcactgtcctatccttatttttctccttaacacttataactttctgtcattctgtacattttgcttattttaactctgtcagtcttgtcaactagaacttaagttcgacgagctaaatatttgtgtttcattccccactgtggcttcaacaattagaacagtgcctaacatatagataggcactcaacaaatatttggtgaatgaaagaatgaacacagtaatgctgtaaaccattttccttaatttgatttcccctggctgtaaaagttttagtaaagcaagatacttcttccttgaaagacagaaacgtagccattcttctgtgttctcaaactttcactgtcatcatcttcattttccttaccattatcctcacaactacattacgaacccagcactctgctaaacactgtaactcatactgaaacttttaaaacatgctctgattcatttcctttttgaatgcagagatggttattatttttgcaagaaacactgttgttatcaatacttatctccagactctgtagggaattcacttaatgaagagaaggtgacagaatgacaggtaattatgtgaggctcttagtgactaaatggaagaggctgaccactacaaacagagagacaagtcttcctttctgatggagacacctataattatttcaaggatacagtaaaaaccaacaatatctgaaatcatttaggtcagatttccggatttgtcaatttgcaggctagttagggtattgacatttctggtaagtcaccagaactcatagtccaaaacatcagataatcctaaatcaattgaaatctaaagtaattagtacaagattttagactgtctttgctcttgatcagagggagagaggggaccctaacaatgtctggctttatctcggaaatgtccaacaatgatagactggattaagaaaatgtggcacatatacacaatggaatactatgcagccataaaaaatgatgagttcatgtcctttgtagggacatggatgaaattggaaatcatcattctcagtaaactatcgcaagaacaaaaaaccaaacacctcatattctcactcataggtgggaattgaacaatgagaacacatggacacaggaaggggaacatcacactctggggactgttgtggggtagggggaggcgggagggatagcactgggagatatacctaatgctagatgacgagttagtgggtgcagcgcaccagcatggcacatatatacatatgtaactaacctgcacatcgtgcacatgtaccctaaaacttaaagtataataataataaataaataaataaaatccttttgtgtcctctgagcaccctccaggagagtagatacgttaaaagtttgccctggggaattcccaaggcatatatactgcctgctgaaaacccaggtcagcaataactggagagaagaagaaaaccagtgcttgcagacccagggcctactgaatcttttcatttctctctcagacagatcatttgcatcttccagagaaagactggatagcttagtacttcagttgtgttccagagtaggaaattatggataagagaatcttgagaaagactcatttaaccattctgctctgctccaagggtaaaagtgacatgacaaagcagatttctctcacaagatatgctgtgagaaagggactatgaatggagaataacatagctgaaatgcaaagaattaccagctacggttccataaaagtagaacgctgcagtgattcaaattgtgacatgcaaattataacttgaattctcaagattatttaaatagtatatatttaggcctgtcttttaaatctaatattctaatattaaattagagtattaaattttaaattttattttaaactcaaaatgtttcttttttttttattttttggagttagacaggacatgctccttgacagcatgataaaaactttctttcaaagattataaaaatctagccatttgctattttcttatctagtggaacccttcattcaacatgggattgaaactttccaaaccgtcattattttctttagttctagtactacacatttctccctctactagggactttctgaaagggctaatttccataatttgcttacagaagttattaatgcaacaaaaactgtgttcttcgtaaagcagcttctccatcttaaaatcctgtttacatttcccacgatggcaaaaagattctataatcctatgaaaaaagaccaaaatagtatttagtaaatatatctttaagttaagccgaggataatcgattaggataattttttttacaaatttacttgtgattttttttttcacttttaatatagcaaattcaatctaaatgctccaaggaatgcagtcctgggcaaatgaagaaaactacaagaagtcaacacatctgttgctatgaatgtcagaactgtcctgaaaatcattacactaatcagacaggtaatcacagtcactccacatacacctgaatcattcctcttaggctttttttttctttgcatgaattttattttggtttgtttttcatttgaaaaaatttaaaaagcttcccatgctcctgtgaaattaaattccagtgaaatttcattttatcttggaatttgctctattatgtcaacaggtgcacagcaaataaataatagagatgtaaaagttactttacttccaagggaaaatgttatcgcttcgctcatattttttaaagtatgcaactcttaaagtgatgcaagttctctgtcaattttgtccatgtatccctatacagatgtgcttggcttgtaactgaggtacaaaaaaaatacaaataagtaaatgttgaattaactaaacataatagaaacccagaggcacccggagttaagaaacaggtgtgcacatcctggcacttttattatttctaccaggaaacaaaagttaaacctaaaagaaacttctgtgagacaagggaccaactatcaacagggatgagatgctagtaaatgactgtttgccaaccctatctttaaaaatttcacaaaatgaaagcaaaatacacaaattaaagtacaagagtgaggtcagcagccttaggagcctaaaaagaaactatgagcactttccctggagttaagcctaatttaaaagcatcagatgttgttgtttattagagcattcccattcatcttgtagaaaagctgagaactccggaactggaatagtccccaaatgcctattctttttgcttactggcttcaagaagagaagtataccaatgaaaatattccaagattcatgttctgttatgtgtcacacaaaaaatgccatttattccaacctgagagtatcaaaactttatatgtatctgcattttattatctcacatttaaaattttcccgttccttggtatgtttaataatgtttatattagtggaattgagcatttaaattatcaataaataaaaatgctataccactgcctaaaaaattagataattagcgagggagtttttcaggcaacatggtaactagcaactaccttccaagtgagagaaataaaaacaccaaggagtatgtaacatttattttccataaagacgtacgggaccctttaaaggctgtatctgggttttcttttggtaacagggtaagtcgcttccaagaacaaatggagaaatgtagaagactgaagacaacttggaggataagctaggagttaggaaagcctaaaaggataccatctgctgttcctctctatctctctaacacacagctcccatacctagatgaggccattaaatgtccactggacgaatgaaatgacagacactagcaactgtggttacagggcaaacagaaaagaacagattttttaggggaatagagttcggaaagaggaggaggctggaagggtcatgaagtttataaacagaaatacaaccttactttgaggttaataaagaagagaacacaaaattttaaagagttgtacaggctgtggggtgtcatcagatgaatgccctgacagaggccctttgattgcagctgagactcaccaactttgggtggctggaatggggagcaaatgtaatatcacttctagagacaaaactctaaaatcaagtatttgtgctgccctgcagccagaataagcataaatacttttcaaagttaacacttacagtgtgagaggctctgatttacccactacttggagaaaaaataaactttaattcttcatcaattgccatcgattacaattttgcattatctcacttttagaaagagacttcaagctttcagagtgacctagccatattgcctctgcttttgaaagacctgcacccttattcacgatagcaactcccatacattgagggtctactatgtgtaatggtctgtgtgaagcattttacatttattatctcattaagtacggcatcacaatacggcagagtcttttcattttattattttttgagatatgggagattctgaaataggctcagaaagttcagttagtttgttcaagtttacaggaattataagtggaagagataagaaaagctacgtctgattccaaaaccttattcttaagagtgctggaaccatcatctataatagcaaatgcataagaagctagcatctattctgagtatattcatttcctaaacattcacaatccagctggctttttttctttctctattttctctttcttttcctttttcctcacttttaccctttctctctcactttctttgagttttagcatgttttattttaataagtaaccaatgtaacaatcatctatatctattctctagtcagaactattaaagaagacgaatctcatttgtagtattgtggactatcacctagtttaaatgttgacaatgtaactgcgtctcctctgtcttttagatatgcctcactgccttttatgcaacaacaaaactcactgggcccctgttaggagcactatgtgctttgaaaaggaagtggaatatctcaactggaatgactccttggccatcctactcctgattctctccctactgggaatcatatttgttctggttgttggcataatatttacaagaaacctgaacacacctgttgtgaaatcatccgggggattaagagtctgctatgtgatccttctctgtcatttcctcaattttgccagcacgagctttttcattggagaaccacaagacttcacatgtaaaaccaggcagacaatgtttggagtgagctttactctttgcatctcctgcattttgacgaagtctctgaaaattttgctagccttcagctttgatcccaaattacagaaatttctgaagtgcctctatagaccgatccttattatcttcacttgcacgggcatccaggttgtcatttgcacactctggctaatctttgcagcacctactgtagaggtgaatgtctccttgcccagagtcatcatcctggagtgtgaggagggatccatacttgcatttggcaccatgctgggctacattgccatcctggccttcatttgcttcatatttgctttcaaaggcaaatatgagaattacaatgaagccaaattcattacatttggcatgctcatttacttcatagcttggatcacattcatccctatctatgctaccacatttggcaaatatgtaccagctgtggagattattgtcatattaatatctaactatggaatcctgtattgcacattcatccccaaatgctatgttattatttgtaagcaagagattaacacaaagtctgcctttctcaagatgatctacagttattcttcccatagtgtgagcagcattgccctgagtcctgcttcactggactccatgagcggcaatgtcacaatgaccaatcccagctctagtggcaagtctgcaacctggcagaaaagcaaagatcttcaggcacaagcatttgcacacatatgcagggaaaatgccacaagtgtatctaaaactttgcctcgaaaaagaatgtcaagtatatgaataagccttaggagatgccacattccagaataaaatgtttccagggtctttgcatctaagatataaatttactttcccagcaaatatgtcatatatatttccttgccaccatctttaccaagttttagttgaacagtcactctgttcaatcacctatttaacaaatagaattgagccttcagcctgaagctcccttcatt

SEQ ID NO: 454 - protein, 879 aa, Homo sapiens
MSIEELCSDFKKYLFPNSFEISVFLQTLAMIHSIEMINNSTLLPGVKLGYEIYDTCTEVTVAMAATLRFLSKFNCSRETVEFKCDYSSYMPRVKAVIGSGYSEITMAVSRMLNLQLMPQVGYESTAEILSDKIRFPSFLRTVPSDFHQIKAMAHLIQKSGWNWIGIITTDDDYGRLALNTFIIQAEANNVCIAFKEVLPAFLSDNTIEVRINRTLKKIILEAQVNVIVVFLRQFHVFDLFNKAIEMNINKMWIASDNWSTATKITTIPNVKKIGKVVGFAFRRGNISSFHSFLQNLHLLPSDSHKLLHEYAMHLSACAYVKDTDLSQCIFNHSQRTLAYKANKAIERNFVMRNDFLWDYAEPGLIHSIQLAVFALGYAIRDLCQARDCQNPNAFQPWELLGVLKNVTFTDGWNSFHFDAHGDLNTGYDVVLWKEINGHMTVTKMAEYDLQNDVFIIPDQETKNEFRNLKQIQSKCSKECSPGQMKKTTRSQHICCYECQNCPENHYTNQTDMPHCLLCNNKTHWAPVRSTMCFEKEVEYLNWNDSLAILLLILSLLGIIFVLVVGIIFTRNLNTPVVKSSGGLRVCYVILLCHFLNFASTSFFIGEPQDFTCKTRQTMFGVSFTLCISCILTKSLKILLAFSFDPKLQKFLKCLYRPILIIFTCTGIQVVICTLWLIFAAPTVEVNVSLPRVIILECEEGSILAFGTMLGYIAILAFICFIFAFKGKYENYNEAKFITFGMLIYFIAWITFIPIYATTFGKYVPAVEIIVILISNYGILYCTFIPKCYVIICKQEINTKSAFLKMIYSYSSHSVSSIALSPASLDSMSGNVTMTNPSSSGKSATWQKSKDLQAQAFAHICRENATSVSKTLPRKRMSSI

SEQ ID NO: 455 - DNA, 31808 bp, Homo sapiens
  source
  (1)..(31808)
  CDS (201)..(377)
  CDS (18675)..(18871)
  CDS (24568)..(25585)
  CDS (28354)..(28502)
  CDS (29754)..(30164)
  CDS (31440)..(31608)
tgagtttatgacaaatgttgctgatacaccctccttttgtttttacagtaattgacccaggactcattttcaggaaagcctgaaaatgagtaaaatagtgaaatgaggaatttgaacattttatctttggatggggatcttctgaggatgcaaagagtgattcatccaagccatgtggtaaaatcaggaatttgaagaaaatggaaatgtttacatttttgttgacgtgtatttttctacccctcctaagagggcacagtctcttcacctgtgaaccaattactgttcccagatgtatgaaaatggcctacaacatgacgtttttccctaatctgatgggtcattatgaccagagtattgccgcggtggaaatggaggtgagtagtgcttcatacgtttattgaatagtagtttatgctctgttctagaataaactagtaaaaataagtctatttttaaacagagccgatttcttcaagttgtgtacaagttgtgttttgaaaagtccttttgaaaattaaatccctctactgacttatgttttgtgtacctttgtggccctgtttagtagattcgtttgaatagggttcattttatataatgaagtatggttacacatgatttctaaataccttgtacctagaaaatattttgctttcctgaatcaagtatgatagttcttctagaaatgcgaattctgaatatttttctacttcactgaacatgtaatatttattgcctggactaaaactgaagaaatttacaagtttttataagtagttgtaatattcacttggtacagtttttctgaaataaataaattatcagaatattttgttgctgtagactgtattttaaggctatcacaaagtcactaaaaagtgactttgttttctaagcatagcacttatatgttctttataagatacttgttaaaagaaaccacttgggaggagtacagtgacactaaagattgccttaggtgccttagttacctgtctctggtttagagatatgcaaattactagggagtgtgagaagaaagctacctgtacagacaggaacctgccttcccatacagatttgttaggttgttaagtctcctgaaggaaactagacacatgcattgtttttgtagtttttctccagaaaaacagaatagtaaaggcttttttccctcagattgttgctaagagaggaaatccctacaaatttaatatatatactatttttaaaattgattagatttgattttgcagctttgaaagttttctattgttgttcagttgaatagttgtctgactgcctcattgtggactcatgtctggaataggaaagcttataaatactaagtagatgttatttaaaaggatagtacagattatattattgttatctttcagtggtttttttcaaactgatgctagatgtccttttgaactgaacaaatgatgcactgagactttcattaatcagaaccattttgatggttcaatctgattcaatatgaagtatatagtgagaacactgtgaagcaataattacatcattcattcacttttttgctgatgataatatgttttgtagtgttcatgttttaatagtgttcctaaattttttaaatctaatttcctttgtatgtggtaactacatacattttaaggtttttgttttttcttttagagatggggtcttactatgttgcccaggctggtctcaaactcctaggctcaagtgatccgtcctgcctcagcatcccaaagtgctaggattacaggcgcgagctactgcacctggctgaccattttaagtttgaatgctaacagtgaccttataaattcatatcacctagactcaagagagatgcatccctgctattaaatgcctgtaattataagatggtagcaactagctttgttctgcacgtctttttaaaaccaaattttttttactttcaaaaaaattactttttaatttacctagcttctttcccaagtagttttgtgcctggatattatcaagaaggctttttgttcttacctcttttatatgattgctaatactaccaatctcttcattatataattttccacttataactaacctttctcatagcctttactaatgaagttttttttttgctataaatcatacttcagtaaatttaaggatacaaaagaagagagccatcaagcagtcacaataccagcattaacctaagtctatagaagaaaggaaagagaaatgaaaaggcaaaaataatgtcaacctggctcagacttttaatccctatatgtaatttcttagtgtatactattgtgtttttcctactgcccctttcctatttatccttatacagtagtattctcttttagttcctgtatttgaatgtccaaaatcctataagttgagagttgtaagtgaccctaaagatcatatagagcttcttaaccttttttatgacattaaccccttctcaagataagagaagttttaatatttaaataaataaaatgtgtaggattacaaagaaaacaaattatattgaaatatagctcaggtaaagaaccccagaacccttcattatacagatgaagaaactgaaacccagaaaagctgcgatttgtccctttgagcactctaatctgatagtcttctctgtctacatggaccataatgtcatctttaactggtttttttttaggcccttgtcctgattggataaacaagataatatttcttatgatttagaatgcaatgtgtaaatttcagactttgctacttatttgcaaacttcatttagataaaaattaaactgggtgattgttttacctctgtttagctctgtctctctttttccttcttacaagtgccttgaatacaaagtcttgttagaccaaaaataaaatctctgtggcgcacacctgtagtcccatctactctggaggctgaggtgggaggatcacttaagcccaagagttggaggctgcagtgagctatgatcgttccactgcactccagtctgggcaacagagtgagacttcaactcaacaaaacaaaatgaaaacaacaaaaacaaagcaaaagttaactccctaatcttcagtctctctagtggtgccacaatgattttattataattcaaatttgtgcagtccactttagggttaaaatccttcatcattttccctaaagctggggaaaaaaagacctgattctagagcactccaggcccttcatgtgggaccctggctgcttgtccagtctctcatcttgtaccttcccacattgcacactctgcttcagccaactgacctatttggagaattcaaatccatattactgtccatcacctctgtatctttacacacactctatcctctggtgagccgtctgtctacctacctttcttcacctgctcaattccttcagttctcagttaaagcaataactgtttttagcgaacccttctttcacctttctcctgagcaaatttaatcaccccactctacacccttacagtacttataatgtacagttgttcttatgctattttacagtgaatctacatgtctctagattgagagtttgttgaaggtagggatggtgtttttttttcatctgtatccctaatactaagtacaatgcctctgagcatggtagaggctacataaaagctaaataaagaaaaaggtaggattttatgtcccaataaggtagcaaagggaattttccctccaaatctttacattccacttctatcatctacagtgtccaagtcaaagacatactaatatttttaggtggtttacatatcattctttttcattctgtctgagcctagctgtaatgaaatatatcagttgacatcctctattttgtttcccacattagctctacacatattcattagaatttgcttaaagaatttgatttttaaccatttctagttatttatatgaagtaaaggaattcaacttttgatcggaccgttggattataagctatatgagtcagttttttttttcaaacattgtactttagtccttaagtgtatattccagttgagtactaaattatagctgcttgtaacttggcttttactaaaaatgtgttttatagcttctctaaagatcagattgggttttacacctccaacccgattacctttagtttctgctggttcctattgaatttccaggattcactgtgaattagtgttaggatgaggggctgaaaaattgcctgatggctatggcaatgaattgtactctcttagtcactgagaattccgtataagtcaaaagatctatctcactccttttttgttcctagttttcattttgtaacagctagcctgttttatagaatttaagcatttatggtcatttttaatctgtgattatatgagatggtttagagcagtggttcttaaactttagttcatagaccagcagcttgtgagcttgttggaaatgcaagctcacagactcctatcccaacttactgaatcatgatctctgaagatggagcgcagctgtggtttcacaagctgcccaggtgtttcttttgagtgttaaagttcaagacccactggtttagaagtttggattgcaaatttttactgtaaaagaccaaattattttgactttccagaccatacagtctccgtcacagctattcaactttgaaattgtagcacagaagcagtcagacaatatgccaacaaatgagtgtggctgtgtctcaataaaactttatttacaaaaacaggcagtgggctatatttggcccaggggctacagtttgctgaaccttggtttaaagtacttgaaaatgttttaaggatagtatagaatgaaataagtggacattattgtgcattcttatgttaatacattaactgagttatttgttacttactttccacataaattttttaaagtaaaatttatcacaaaccaaaaggatctgactgggacatcttggttctttagttttgtttcagagattgcttaaaatgagggacttcagttttttcctaattttattatgtgaacctgaaatcatttgtattacaaagagttaatttacaattctgcatagtaacggggctttgtaatgaaaaggatgtacagtctaactctcccaagtggaaaaacaaatggctactggttttccattgtgttccttttgtttcatatctagagcattgtgagattgaggtcccttgagagactgatttcatccagaaagagctgagactgatctagggaaaatggaaacaggaatgttgtatttttctttttcaattgccttcattgaggtctaggcaaaagccaggtcacgtattgtgtttggagcagcaagtggtcattccctttttaaacagtctaaagggaagtgggccaaaagaaaaaaaacaactttcctttccacctgttaatatgtgctgttagaatgtctctattcagttaaaaataaatggagaaaaactggataaacagacttttaaggaaaatatctatttctgttgtatagtggcttttaagcatttttattttcctgcttttagaagagtccagtcccttcctgctttcacctttcttccatattctctacccttgtatgtccatacacaaataaagaaaatgtttagtgagattaacctgtttgtttttcaggaaagactatctgaaaataactgtagctattctgaaagtaagacattaatcatataaaatgaaataaatagtgagaagtgttccaagccagttgcgtgtataatgactactgttgtgttttaaaggtagaaaccttccttcgtgatgttgcattgcagtagcagggaaagtcccttgactccttcttttgaaactgcagaataagggcaggcctgtatgtgaagagaaaggatatttctcctgggaggctctgctgataagcacaaggttcctagtccattccttagtattccatgggaagactgttgtgattatttcctttccccaagaatgtggcatgtaaataatgaagctttattactctaggttatatatttgtcatgtgttcattcatatttattgaatatgtacctgaatatgtagctttcccagaattacagtttttcaagttctaaggtttacattaaaaaagtaatttattctagacacattcctttgtagtatcaatcagttaatatgtacatttgtctaatttccaaaggtactctcttctggagaaatgatttaaattttctaatggtccctcacaagaaatagtttaaaaataacaagttttccattatggaaataatgtaaattcctgctttttgttctcttgtattccaggctccactttacattttttaaagaagctgacttgcctgagattgatcacattcgtgaaaataggtagcaaaatttgcaccactttcctatacagtagtccattgacattctcaaagaatttactcaagacttttgtaaccacttaaacagtatttgcccagtgaagtctaactgaaaacatttaagggcccctttagactttagtgagcctgttgttttgctaaggttcatcacttttttttttttttttttttttttttgagacagagtctcgctctgtcacccaggctggagtgcagtggcgccatctcgctcactgcaagctccctctcctgggttcacgccattctcctgcctcagcctcccgagtagctgggactacaggcgcccgtcaccaagcccggctaatttttttgtatttttttagtagagacggggtttaaccatgttagccaggatggtctcaatctcctgacctcaagatccgcccacctcggcctcccaaagtgctgggattacaggcgtgagccaccgcgcctggccccaggttcatcactttttttaatgacattttaaatttccttcactcagttttaatcaccatcactgtaaatcgactttgtttttggtgccaatttagagcaagaaatatagcttttctcactgcatgggagttactgtgtatgtcaccatgagtagaaagcacaaatcctgagcttaggatcagaggctttggagtcacttggtcttgttcactggtgatgtggcttgcttccatgtaccagtgggattctgattcatgcttcagaaaagtgacaaacgtttatgtatcccatattttcagtactcagggaagcaaggcactgccaagatactgccacaggaccactctgcttaggttatgctttatatatttttaagaaaccaaatagttccttcttttgacccctctcaattaaaattctagcccagactttcccttcaggatcttacagtgccaccaaccccaggcccatattatggttcctttcattatcatattattatagcatcaggagctagctggtcctttccctgtatatttcactgagactagctggtgtttattcattcaacaaatatttgaatgcctaaataaataaatatttgaagcactgttcagatacttgacatacagtaatgcacaaacagacctatatgccctcacagaatttatattctagtggagggaatgtaaaacaacctatctgtttttgtcattgtactttcagttctactttttgacaaaggcttattttcttagattacttttttgcccttgtttactcatttccaaaaaatacttttagacttattttaatattattttgccctggtcattctttcattgattttatatagctcttaattcttttaactctgaagaaggagcctcctttccttgtgttctaaggtgtgttttttttttttcatgtcctttccatcttagggtacccagactggttaagcagaaaaggaattgattataagagtagcaggtagctcatagaatcgccaggtgggctagaattcaagctcaggctgtaaggaaacatgctacagctaagatgctggcacaggtatggtctacttgggaacttataagcaagggatttcagtgaggacaactcttggatggaaattatccaggatacttcttaacctgacactagatagttggttgatcctgctggaacatgataccatattgagggcttaaggttggttactgctctgcttctggcaaatgaactactcagcagtagccagatcaccccaagaaggaaaagtctatgctattggatctgggcactcttctgccaccatggccgttttgttcctgagcctgttaagcctatactggtgcaactagagaaaaggctgattgacatccacagagtagattatttagtctacacatttaagagcctcctctgtcttggggcctttgggttttcattcacatgcaaaaaaaattttttttgagattataggcccattttggagaagtccagtcacacactgcttttccggactcctaataccagttctgtagaactcttccaagctcttgttgcttgcaagtccctatcttgttgtaccattagctatagcccatgaatcaatataacttcttacctgagaccatctttctactgataacatagacagtgattgaagttctgcctgctagggccacctctgaatggagttataatcctatagtagctcacttacaatagctggggccagctattgtaagccaggctgtaattgtttcttcatgagtcatttggtgagagggaactctgcttgaagacgtaggtgtgttttaaggaaagaattataatatggcagaagcaggcattctgagaatgcaagcaatatgctactttcccatatctttgagatctatccagccacttgaagatggaatgcagttggtccctgacatcatgagtaggtgagttcagtaacactcaattcatgagaggtaacttgacctgatgatctctagatgttctctcctgtttagtttctatgaggaactagtagcaaaagccaaggtcccttttaattatgtagggttaatctcctcatctgcacttgtatcttactatggcatctagggtacatgtctatggcctcatcagctttatgtctttgataagttagattagtgtgatgtcctgtgaagtcggtgatatgtttcactgactgaaattgaggcacagagctgaagagctgatgatgttcccctaaagctgaagctcttaagctttggtgtgcatcagaatcatctgaaggacttgttaaaacacagatcactggctccatccctgagttcctgaatcaataggtctgggatgggatggaaaaattccacatctaacaagttcctaggggatgctgatgctgctcactcaggggccacttgttgggaaccactgctctaaggcaagttggcaaagatatgctgctgtccctactgggtgagaacaaattgcttttgtagaagaaagaactggctagcttagagaggcatacaaagtgcctgagctttactatttgctacaggaaagagaccacatctggagaatcaccttagccaattgagttgaggttgcttaagacaatccactggaaagttgaaatgagcaggtggtaggaactgttacccctgaatatgtttctagtggtgttgccaatctctgaaaatccccttgatctgcagtattgtttttgattttctttcatggtagggagggagacctctaatggtttttgtttggcccctaccataataacatttatccaggaaacaaatatgcctattgtgtttttgctaaatacagctattttaggtgtacatacatggacttggaaaattgcagtgggttggatttaggtctcactgaacccctgtcagaagcccatttatcatcttacctccaaaagcccagtctctcagaagctagcacactgaatctagaatctctgagaaataaccccatgtcagtatgtcttagccccatctaaaattgtattctttcctcttcaattcgtaaccctcagaaaccaatataaattaacagtcttacaactagtttgtaggtctttttttcagatttgattttgacttgatgctcccaaggcgtgctggggtgaaactctagttacaggttgagacattgaagactggtgggatggggcagggggctatttattttcttcttacagaaagggtctaccttgagagctgcaggttcagagcactctgcgatatcctgagccttgtcatgtgtccccactacagaactctgggtctcagtttcctagttacaatatcaccaggtctcttatgtgaatgggaagcacattaaactgatataatttagccacctgcagatcaaactgtgcttggttttcaactccttgagccttaagtcctttttgtccttttgtgtgtgtgtttcattttttttaaagacagggtctcactctgttgcctgggctggagtgcagtggcacaatcatagctcactgcaacctggaactcctgggctcaagtgaacctcaggcctcagccccggaagcagctgggactgtagggctgtgtgcattgacaacctgctatttttttttaagagacagggtcttgctatgttgccccggctggtctcgacctcctggcataaaccagtccttccaccttggcctcccaaagtgctgagattacaggtgtgagccaccatgcccagcctagtgttttagttcccaccttgagtcaaaaattcagagatgccagtttgttattctcttcctaaaccaagcagtaccattagaagtcctcaccctaccctacaatctgataactcatgctcgttatattattttctggttctctggcagcaggcactcatttgatctcccacagcctcgtgttcatggggcatatcattctattatgtacagagaagctaagctaaaaccaagataagtggttacaaggataatttaattcactttgccatgggttgccagatttccatctttaaatactaacaggatgctcactgcctttggccttagaccagaaacccagttctagagttcctcctgttttgctgagatcacttgcaaaccattctttatgttttttttctgtactagttggtcttcttgattacaaacaacagaaaccaattctgactaagcagaaaattgatggattttggacagcttgtaagatcaatgggaaggcaggagaaccgggttcaaaatgtaaggaggagcaaagggaactggggcatagctaaggtcataccataggattagtttgtcaccagtgccaataccattggatacttcctgagccattgtcactggatgcttatttggccactgcaaggattactgatcgcattgcagcttcctcaaataatctgactatatctgttcttttgcataaccctctccccaggaatcacaatacccagagtatacagatggccaagcttagattaggtgcctatgttttcattgccaggctgtatccctgcatccctcttagcttccatagtgtcttacctacttttggattcccccaaatagtaaatattcactctagagcacagtgtaaaacagtgttactctctgggaacagtggttcatacctgtaatcccagcattttgggaggctgaggcaggagaatcacttgagctcaggagttcaagatccgtctgggcaacacagactctatctctacttgggaggctgaggcctgaggctcacttgagcccaggaattggaggctgcagtgaactatgattgtgccactgcactccagcctgggccacagagtgagaacctgtctcttaaaaaaaaaaaaaaaaaaaaagtgttaacttaccaaggagaaaatttcaccatagcacctacagttgttttgaaattgatctccagttcttctactcaattctttgttaccctcttcataaacttttgagccatagaagttaggtatcataaatctccttagtgatcatcgagttcatcactgtcactttactgatggatactctgagactcagaaacagaaaactacctgccaaaggtagcacaggtagttaaactaaatagttagaattaaagtattagaattaaataagaattagaacttagttagaaataaaatgctagcattatttccagtgaaggattatagaaaatactctatgtattttgattctcatttttcatttatcttactgttggctcaggctgtttttcacgatagagatgtgaattgccttctcacttgccctcttctttctcatctctgccagtactaatagtaactgctatttccagggatttctgccagggactgaccatttccttaaaggagcctaccttttatttcttgatttttgaaactgtaattaataacgctgttttagttattgaatggtagaatctcagaaccaatattaatagttattagatgagttttttgagaatgaaatttgaaaggaggagtttataagtgagatcatgaaagcactgggttactaagagagttgaagaaggtggtgtcactaaaggtgagtaaaaggaacagactgatgcaaccaggtttgatatttgctcaattcatagatttgcactttaattcatgagtttaattcacaggtttggcacttaacgtgctaaatcctagtttaatgatgtgatgaaattcatagcataaaattaaggacataagaaatatctcaatgagtcatgttagatttggtttctgagaatggtacccaggacattttgaggaagaacataaaacatttcaatcacaatttttacttcaaaagactgtgaaaatatgttcatcccagttatgtttcaactgattggtataatgagttcaatactaggctgactacccattatttaaagtgctgtgatttgttctgaaagtactccatatgatggaatacttgctcttgcttcaggagataacgcatcatctggaatgtgatcaacatagcttgaggttttatagtctttgatatgtatcctgtgaacatttattttttttaactgaagagtttctttcatgtggaagagtcccaatcctcttgatatattttcttcccttcatcctcattggcatttttgcctgtcgctgtgctttgggaaagggtaattttcagggagaaatgggtagcagcacagagtgaaggttaaagaggacatactctggagtcctaggaacataggttcatatcctagttctgcttcttactactattgtgactatacaagttacttaacctctcagagcctcagttgcctcagctgcaaggtggagagaagaacaggttgtgataaaggaaaatggtatatgaaaaagcacagtgcctggtttatggtaagtaccaaataagccaaagctctgatttattatcagtagccatagaattggtaaaagtagcattcgatcaggaataaagatacctaacttctaattcagagtacattttggaatgtgagtaacaattttaataagaaattggcttcagttttctcacttgatccaagggcttagattaggtcagtggttttccaattgtgatctctggaggtgctctgaggtcactggtagcaaaggggaatggtgagaagtatctcagcagggagagcttccttttcagcccaagaaactatgcctttatttatttagtatatcggcctccttttatcttcttatttaaagaaaatgtttcttggcaaagtgtgcatgtgtgcacacacagacacacatacacttcgaaaataattaacttaaaggttttctctcaagtcccttccaagtctaaaattctttaagtctattcatctgcaactgaacttggaagttggtagcccacactggatctgacctgagacttgatttttctgtgtgtgtgtgtgtgtgtgtgtgtgtgtgtgtgtgtgtgtgtgtcagggaaggggggggccctgtttcaaatgtatagattaaagtgccaaaatctaaaatttgggaaattacacataacaatctaggttctgttttcttaggaaaaatggatatacctgacaattctatgcccccatttccaaataatagtctgctggagttgagtagcagcagcttcccaaatactccctatcgtcttacaggcattttcatttacctgcctggcctctgaaggtatctgagttttcagcattcagtttatcctctacacagtgcaggaacatcaacattattggattagccaactttggcactgtaaaagaattaaattagggaagtgacttgtgttttccatgtaagaaaattgtttttgtatagcaaaagtacatgtattgcattcattttgcctgcccttgaactatataattacttcttaagtgctgaccaccagttaatcatggcttctgagttagaagaattaaataaacatagtgtgttttaattctttccaccaaaggatctgattaccagatagtcaaaaaatttaggaactaggcttttttgggacagtaaacaaagagtttaccacagtttactagttgcccgcagctccccttctcctacctcaggctcagaggaggatttgcacactgtctgggcactctctccccttcacgatggaggaaactgagaaaagtactgtgctgtttgcactccaagttcctgtgaggtgacaaaggatccaatctcagagcatcattcaaataaaagcaataacatatgtcaaccatggcaaccctgtctctgctcagtcacttgccccatcaggacaggggaacttcccactggtccaacatccttcatagctattgtcctctaattgttgggtgtgggttctgtatatgccctttaagtcagacttgttaattgtagtctgtaatcaaggcttatatttacctattaatttttgtctgcttgaccgttcatttactaaagaagatatattgaaatttctcatgaccatggaagtgtccatttctccttatagttttattgctttttgtttatatgttttaaggctatttttaaggtgtatacagtgctcagcaatgcatttcaaagtatatgtgttgcactttatccagaacctgaatgttttgtggcaggagatatttagttggccatactgatgaaagaagttgtcattccttctttttatctttcaaaaatttcccaaagcttatagggagccctttctttatttttttaatgcagttatggatttgttttttacctttaaaccttttctttcatttcaatggcatttcgagtggaaggagatgctaatatatagagtcagtgtatttcccttgaatcagaattttcatcttctctcactctacttattctccttaggtaatttcagccagttatttcaattaccacttttatactgatgacttgtaaatccatatccttaatttaaagtctcacttctacgtagctttatttaactgcctgctagtagatatttcacactcaaatgtgcacttcagactgtccatcaactggtaaatggttaagaaaattatggtacagccatacagtggaatattactcagcaattaaaaggaatgaactactgatgcatcagacaacatgactgaatcacaaaacaatgatgctaagtgaaagaagccagacaaaaaagaaaacacactatatgattccacttacgtaaaattatagaaaataccactccgcagtgacagaaggcagatcagttgttgtcaggcgtgagagttactgagggggtgaggaggatggaagagcaggagggatgacaagggagccagaggaaacttctggtggtgagggatacatttattaccttgattgtgataatcatttcaaaacttatcaaattgtacactttatacatgttcagtttatcatacatcagctatacctgaataaagctggaaaagaaaaccctcaatactaaaaggctttgaacagaaaaataacagtccttgcccacccttttccacccatatcccagtcctgcccttgagaggcagcctctttgaactgttttaggtgttcctctggtatgcaggccacattctaactaacaggtttactctgttggttatagattaatcagtttagcactttaggccgtttctgtttattctttcctattagggtaattgataattcatttctcttaccctgccacttttacttctcctcctgatacagtttttgattaaatgagtagtcagtgataatattactagaaatattaaatattgtacactgctgagtcaggtagtatactttgattacatttatttttttaataccctcccaacaattaacacagtagttgtattttcgtttgttttttatgtaacaatgtctgactatttttagatatcctaacagacttgtcatacacctagcagcaattttcctagtgctcaaaataacatatactctgtcaatctcaatccccgctcctttcccttggagacctttcttcttcagccatctgcccttctgtcaaatgtgttctgattacttctggactagatttgtagttgtcacatggagaatttctcttgtcattcttcagtgttgaatcagctaattcctgggtcccatattattttccttccttgtttattcatatattccttcaatttgtttcaggaatattacatcttctagttgcttcctaaacagggatacttgaaagtttaaattttgtattccttacagtgccaaaaatgtcagtagtctactctctaaatgtttgggtggatctagaattctaggttgaaatgcatttttctttagaattttatagtcattttttcattttcttctagcttctgatattgtcaaatattcacagtttaatttagttacatgtattctgtttttttcccccctctggaaacatttatgaccttctctttgtcttgatgctctgaaatgttttattgatatgctttgtcagtgttcatttattgttttggagaatcatgcatttattctgtaaatatagagaaatggccatgtagcagacactgctttaggcactggagatagaacagtgaacagaatagacaaaatcctttccctctttgaatttacactctagtggtaaaggcaaaaattaaataaactagtacataatgaaatgccagatagtaataaggatttaagagaaatgcaaaccatggtaatgggaaagataagagcaggataattttagataggatgggcaggaatgcctctttgaggtgaattgagtggagactcaaatgagggcacaagactcactatctgggtgaagaggtgaggggaacagcaagtgcaaagactctgagacagaaatacacatggaactataagaagtagaagtccagtttagtggcaatggagtaaataagagacaaagtggtcagaaatgaaactggagacatagcggggaacacggaaatttaaaggctcatgggaattggaaaagactttggaatttattttattggagtctttgaacaaggataaacttacgttttaaagaatcgcattggttggaaaattgactgtaagattagcaagtgtgggaagtagtgagacctgttaggaggccattttagtagttgaggtgaaagataatagtggcttagactgggtggtaatagtgagaaatggtcagatttggaatatactttaaagggagagccaacaggatttgctgatgggttggagatggagtgaaagaagagaggagtaaagaataagttgtaagaccagcctggccaacatggtgaaacttcgtctctactaaaaatacaaaaattagccgggcgtagtggcatgcgcctatagtcctagctgcttgggaggctgaggcaggagaattgcttgaacctgggaggcagaggttgtggtgagctgagattatgccactgcactccagcctgggcaacagagcaagactctgtctcaaaaaaaaaaaaaagaaagaaagaaagaaaaaagaatgagttgtaagattcttggcctgagcaacttggtaaatggtggcattatttactgagatggagagtactaagggagtgtttgggaggcagagatacggtgggattgagttgtattttgcatactttgggttcaagatgcccattaacagccaaatggagttgtcccggagcagatgctcattcaagtctgtggttcacagtagacatggggactggatgagtttcccttgagagtcagtagagatagagaagaggtcttggggactgagctctggagcatttcaatgatcataattgggaaatggaagaggactagaaaaggaacagccagtgagacagccagaaatccaagagaattcgtgtcctagaagacaagtgcaaaaggggcctcaagaggaagctaggagtcactgtgtcgattgctgttaagagctgagtagaagggatgttcagaatttaccatcagatttgacaatgtggagtttgttggtgactctggcaagtgatttcactggaataatccatgtcttcttgaaaaatatatgattgaataaaatagtagtatcccattgtgtatgaagagttcataagtctgatagagggagatttaaagattcttttgcagtataagtgaaaaagcatatactttaaacagtaaatatattaattttattcatttgttattaaaatgttttctaactgtatcttgatgtctttaatagcattttcttcctctcgcaaatctggaatgttcaccaaacattgaaactttcctctgcaaagcatttgtaccaacctgcatagaacaaattcatgtggttccaccttgtcgtaaactttgtgagaaagtatattctgattgcaaaaaattaattgacacttttgggatccgatggcctgaggagcttgaatgtgacaggtaaacaatgtttttcatggaaagctactaatggtattttactactggtactagctctctgggatgttagtgacaagctttcattatttaattccataaatgtttattacacacttaatatatgtcaggcactatggtgctaagtgctgtggacacaaaggtgggcaaaaaacagacttggttcttgctctcagggaacttacagtgaggtgagagggacagacagtaatcaaataattatgcaaataagtgcaaaattatgactgtgatagatacaacaaaggaaaggtagataattctatgagaatatataatgatacctttgacctaaactggggaaaggggaaagaaatgactgttgagctaaagtacgaagggtaagggtaagacagaggtaactaggcaatgagaggagggaagagcatttcgggcagtgggaatagcttatttagagaccctgcagggcccctgaacagggagtgagggagcatggcatatacagggaattcaaaagctagtatagctggagtgatgagagtgagaaagaatatggtgcaagataaggaaagagagagaagcagcagtcagaccacccagggcccatctttcatatttttatgctgaaagcagtgaggtctttaatattttaagacaggaatgggtagcacaatcctgtgagcttctgtgtagagcatggcacctgtgtcagtctcctgagggttgggcagcactctggcagtttctgttaggaatccaggacacttccatcctccaactctgtcagccaggtggatgggagagagaaggtagagaactcacgccttttcttgagtgcctcagatgggaagtgttataccttttccacatgcattcctgttggcaagatgtcagtcatgtggttataactgaaacaaatagggaaaatagtaaatgtgtgtcctgaaggaaaaaagcattcaaggcagaggacatgtcaggtgctgccagtcaaaaagaacattaccttatgctatttcactagagtgactggggcaaaggacagatcacagtaggtgaaggagtgaagaggaagtaaagccagaaacagagttcttagggaagctggctataaaagaggaaagtttatgagtttaatgggaaagaactattttaagaactactaggaaaaaggaagaggcaagcatacatggggtagaagaggtcatcaatagtagttttctaagaaggagataggatcccaagcatagatgacattttggccatggatgggaggaacatctgttgtaacagtaggaaaggataggatggctgtggatataggtaggtttgtgtgtttggtaagagttgttgcaataatttctttctgatggtttctatttccattgtgacatagtaagagtcaaggaggtcctctgttgtgagtctgggaaagaaggatatgtgttcgagagaagtggtcatcatggagcatgggagaatgagtcaattagagaggcttcgtaacattttaggtaaatcaggcgatcctgaatgtgtggatctcatctggcctgttgagaacttctccagctgtggtgggatgcttggggctaagcacagagaaggcagatagttgtgctcatctgtggttggggttttgtcagatggattcagtgcaaagataaaggtgcactaaaaaatgaaggataatgagaagggtgttactgaaacaatagcctatgaaagtctaaatagatggggagcgaaatgaagagagaaatgaactaatgtatggagacaagctggaggagatctatcccaatgaggtttttttttaaaggcataatgaggattttttaaaaaatgaattgcaaggataggagcttgcagacgaagggcaggatgcttgagttgatttttggagatagtgtgtacttgcaggttgtggcagggttccttgtgtgactttgattacaggtggccactgcgggttagggatagtcattggagatgaggaggctaaagagccgagaagccagagtgtggatagcttattcttggtcaagtcaccaaggatgatgacagcaaaaggaaaggagacaaaactgatgattcattcaactcatatttcttgtactcttactgtgtgccaggactgttctaggcactagagttacaacaggcaaaaattcctgccatcatggaccttacattttagtggagggaaggagaagattcagtaaataagttatatttatatgagaagacggtgaggcctgtggagaaaatacttgctctttcattatgagattgcctactcagtttcaaagcaggggaggttataacttaaaaaaatttacactggcacctatgcttaatttctaactctgttggagttttggtcttcgtaacttgatttttggagaaacggaattaatctaaatcaaatttattcgtgtttgagaatgcttgatacattgaattgggaagtagaattcattttttaaaattatttaagccctatattaaaccatgtcccattaatataaagcaaacccattaacatccttttatacaatgttagttgggtcagctgcacataaaaataattctagtatggcctatactggagaatattttttcatttctataaataagaccttcaggcttttgtggcatcttatttactttgaaaacacacacaaagaaagaggggaacctctgattaaaacacaaaatctagctcattgaaagatttctagcataatgaaagatttaacataactgtggtaaaaacatgaaggctgcatctattatttgagaaacggcagaactgtgtggttatggcatgcattaggctcttggttccccaggagaatgcctttgccttggaagaaaaaggtgcattcattctttgaggtctgtagtttcctcagctcatcagagcacaggcacattcttttctacgtgaagagttttgtaaactgaactttgttttcagttccggctccagccatcctcgggtagcttgccaatagatgaatcccactcgtttgacccatgacgctccttcttttcatttctccctctttccccacagcagtgcatgtccaccataccacctgagagtctgtggaatctaattttctgttatacttctttccttacactcattttcctgtctttattatgatagtctaactttttctcctcaaaggtatagctgccttgctttcatgaaaacacactttcctattgtgatttatcagaggcctttccatatctcagccactatgctatgacagattttataattaataagtgcatttcaaagtgaaaacgttacaaacatgcttaacagatgtttttataacatgaaatattctactgcgttaagatcaaaatgctgactatacttgttccgtataccttcagaccactgttaatgtaatattttggcaaggtgaatggtcttttttggatataaaaatctcagcataagccaggcatggtggtacacagctgtattctcagctatttaagaggattgcttgagtccaggaaatcaagaccagcctgggtaacatagtgacacccagtctccattaaaaaaaaaaaaaaaaaaagaatctcaggcatatacaggcatatatttaaaagaaatattctatctggacctttccgtgatagtgaataaacttgatgaatactgactgacttgatcatttgcaattagagttcatgtggagaaagtaagattttaagcacaattaacttatgaatgaatgtatccattcactgaccttttccacattagtcttgattaatttttttttcctattctctagacagtggaggctgctaatttattctactgatacagtgagacctcatataataaattggggaaagaaactggttagctttttgttttatatttaggctgaagaaactatagaacctatgtggaacttacacacttctggtagatacataatcattttcaagaacaattgagtaacatatagtaaaatggcagatgcttaaccctgcatcctaggaaatcccctcccatagaaactcttacacagagagtcgtgcacaagaatattgattgtagattattcctaattcttttaatgggaaaaaatctaaaagtccatcatagaagaatgattagtaaattgtgatgtacttacacactggaatactaccatacagttgataaaatgaatgtagttgacccacatctgtcgacatggataaatctagaaaatatagtgttaaattttaaaatgtaagttatagcatgctatatacagcatggtgtcatttatataaagttcaaaacctgaaaaacaatactttataaggttatagttagtaaataatgtaataaaaatattttaaaatgcttgagagtaaacaccgaatttgtggtaatgaatacttctgaggagagagagaaggaactaagaccagaaagggtccccactgtatctataatgttatattgctttattttaaaagatataaagcaaaattgacataatattatgttttaataaagctggtagatttttttttgtatttcattttatgggcatatgttttagtctgttcttatctaaggtatatttaaaatgctttctcatttaaaacctccagtacttttttttttttccttgagacagagtctctctgtctcccaggctggagtgcagtggctcggtcttgtctcactgcaacctccgcctcccaggttcaagtgattctcctgcctcagcttcccaagtagctgggattacaggcacctgtcaccacgcccagctaatttttgtatttttagtagagatggggtttcgccatgttggccaggctggtcttgaacacctgacctcaagttatccacctgcctcagcctcccaaagtgctggaattataggcatgagccaccgtacctggccaaaacctccaacactttttaaaccattatagatcccccaaaataatactggtatgtacaaactcaacttagtgataaagagatggaaatatctccatctatcactcaggactgtccataaacaagggaggcaaagagcccaacctgaacaaaatggtgatgttcattaagctggtcctcagcctgcctcttgctggtatacttgcctttctttaaaaacttgaactctatcctgtcaatccagggaaggatctcatttcattcattttaattatcatcactttagttatatggttgctttacttttcttatggacattagaaaataaaagtgaatagacaagatatatttcatatgatataaagacatatttcatatgctataaagagacaagccagtacttatctggagcctaccaattaagataaattcttttaaatatttagtcttaaaaacagaaattattttaaaattatgaattggctaattttttccaagtaagtgcattttcatgttcacctgctttgtatttaatataaattattgtgttgaggccccattaacagccacaagtttttagtcaacttcaaaaatttctactcaactcttatctgtaatccatttagatttgtatctcttcccatcaatcatgaatacataaggtaatattttatagttggaaagcattgcttaatatattgaatcaataaaaatattgatttcatatatttaatttttataatctttacagattacaatactgtgatgagactgttcctgtaacttttgatccacacacagaatttcttggtcctcagaagaaaacagaacaagtccaaagagacattggattttggtgtccaaggcatcttaagacttctgggggacaaggatataagtttctgggaattgaccagtgtgcgcctccatgccccaacatgtattttaaaagtgatgagctagagtttgcaaaaagttttattggaacagtttcaatattttgtctttgtgcaactctgttcacattccttacttttttaattgatgttagaagattcagatacccagagagaccaattatatattactctgtctgttacagcattgtatctcttatgtacttcattggatttttgctaggcgatagcacagcctgcaataaggcagatgagaagctagaacttggtgacactgttgtcctaggctctcaaaataaggcttgcaccgttttgttcatgcttttgtattttttcacaatggctggcactgtgtggtgggtgattcttaccattacttggttcttagctgcaggaagaaaatggagttgtgaagccatcgagcaaaaagcagtgtggtttcatgctgttgcatggggaacaccaggtttcctgactgttatgcttcttgctatgaacaaagttgaaggagacaacattagtggagtttgctttgttggcctttatgacctggatgcttctcgctactttgtactcttgccactgtgcctttgtgtgtttgttgggctctctcttcttttagctggcattatttccttaaatcatgttcgacaagtcatacaacatgatggccggaaccaagaaaaactaaagaaatttatgattcgaattggagtcttcagcggcttgtatcttgtgccattagtgacacttctcggatgttacgtctatgagcaagtgaacaggattacctgggagataacttgggtctctgatcattgtcgtcagtaccatatcccatgtccttatcaggtaaaagctatcacttggattatgtctctatttacatttaatgtagaaaatgtttcatggaaatatacttgtcatggatgtaaaagttgatttcaggtgagaaaatacaagagccataggtaaggatttcctatacatcaactgaaactgggatgaatgtttcatgacttccttcctcaagctttagcttcagttgtatagtaaagcacttcctttattctctgaaaaattaaattgagctgcaaaggcagattaatagcaataaagagcagagtcagaagaacagaccttgacattgggagaaaaacagaagtcacttttgtcgcattggcaattatttttaattttttagttagtagtaaaaaatcttatttggatatatttaatttgatcatattatcttatagctttttacatagtatatacttacaaaaacagaatttgctttttgcctgactcatctgtcatttctcaattgaaaaaaacacagttgtaacaaaatatgctttatctatttctgattcttatgattagtataagggtggtgtttttaaaattaataaaagtaaatttctgaaaatataaaatttcttaaagcattttagttgaagttttgtaaatagaaatttggttttgttttagtagattttagacattattcctgactctgtgcggtattaactgcattgaacatgagcactgccatcacagtgtatcaaattaagcaatgggaatgtcaaactatttcatataatagcttatatttcagaaagttactgctttataacattgtggaatctattttttatgttggtatgtggggatactagttttacttgccttatacgttgtccataatctattatccatagtttgtttttactatatacttaataagaggctgtgtcttaaagtgatcctgctatattaataatgactcctagtttcctcagtctttttggcaaggttggggagaggaaactattacatattattaaaaagtttaagatctatggttttcaagtttaagatctgtagttattatgttttatgtaagaaactgtaaaatataatagaattagaaaattataatcttcaagtggagaaggatataatattcctgtagttgtagaaattataaaagattgctaaatttgactaagtaaaaaaaaatttttttaaagattctgcgtgacaaaaaaaaaaaacaaacaatccataatcaatgtcaaaagactaactgggaaagtttatttgcatatgacatcatagctgaaaggctaatttctctaatttataaagagttgctacagatcaataagaaaaaaaccatccatctgatataaaaatgagaaaagagtaggaaaaaggttcacaggaaataaaaatgaaaaaactattcttaaacatgtgaaaaagttatagtaaaataaatgtaaaattaaaattaaattatatttccatgtatgatacggcaaacatcttaaaggtgttctaaccactgtgtggtgaaacaataaatagcaaaatacatattttcagactttgctattaagagttagttcaaccttctgttgaagcaatttcgcagtatgtacagatgtataatgtgtgtacactgatactgcccttctgggaatttatagacagatttgcttacaaatatgagaaattaaataataccaagatagtcactacaacattatttgcaaatgacaatagattggaagtaagtatctattaacagggatagtagaataagttatggttcactcacacaatgcaacagcctttacaaagaataaagagctctggccgggtgcggtggcttacgcctgtaatcctagcattttgggaggctgaggagggcggattgcctgagctcaagagttcaagaccagcctgggcaacatggtaaaaccctgtctctactaaaatacaaaaaaattagccaggcatggtggcgtacacttgtagtcccagctactcgggaggctaaggcgggagaattgcttgaacgcgggaggcggaggttgtagtgagctgagatcacgccactgcactccagcctgggtgacagagtgagactccatctcaaaaaataaaaataaaataaaaaataaaagaaataaagagctctatttgtattgatacagaatggtctccaagaaatattagtaagtaaaaaaggcaagaaatgcagagtatgtaatatcgtgacccttgtgcaatgtttaaggttagaatttcaaagtttatgcctgaataaaaagtataatttcaattcttaggaaattttcgcattttactgatacttaatttactttaaccaagtttttataatataaatattaataatgtataaaagctgtaaaatatttgttatgatgagtttaaatgtatttttgtggtagattatagtgggggaaaataggtacatatttagaggcaaatattctggcaattataagaggctactgtatctatcgagaaaaaaatgcgaggaaatcatgccaagatttaggagattattcttaaatatatttcagtattttcccctttctagagatttggtacataaagtttctttgttcagcatttagataaaaaatgtgttgcacttagagcatgcttcattatattatttcaaacctttttagtaaaacagttgaagatttataacttttgttcgttttatattgacaatatagacttctttccactttaagtgcatcactgaaaatattattattcactattttttgtaggcaaaagcaaaagctcgaccagaattggctttatttatgataaaatacctgatgacattaattgttggcatctctgctgtcttctgggttggaagcaaaaagacatgcacagaatgggctgggttttttaaacgaaatcgcaagagagagtaagaaactattgaattgtctgacacaatttttaaataaatagatcaaaataccaaggaactgttcaaatcaacgtactagagtttcattatatcaactattatttcaatttgatttgccaactgaagtttggaaattttttttatgaaagagacgtgctttatttttgcatttgttacaatagtctttgacatatactatttatcatatagtatatgtctgtgacatatactattctatttgaaatatgaatgaatgatttatgaaaggcatattttcttttcatgatttatagtatatccagtattattactgctgtcattggattcattattttgggtacagcattttaaataattttatcctttttatcaaggataaaagattaagacttaagtatatataaagaaacctataaagtatgattcaaatataagtgatgtgttatggtcattatttactaactttaaatcttattacacacagctatgacctaaactttcacttatttgtcttacttaagatgttaaaattcaaacttatggaatattctataacaaaattgatttatatttatgagtaattcattttagttttatatatatatatatatatatatatatatgcacacacactatatacaaggtactatagctttttaaaaattgttccccattggtttgcttaactcatttcagaactgtagaccatttcacaaataagtttctgaagtctgaagaatcgtattcaactggatttttttgcactattattatatgtctatctcatatttatatactcacactaatttcagtgtaacttgctaatttttaacgttagaaagaaaagacttatatttaaatgaagaccgttaattatattctctatccttttcttctggtttacttttatattacatatttatatattatacaaatacagtattatgtatagtacgtttatgctgttttgagcctccttgccctcatcctttgattcttgcctttttaatttcttgccagtttactatttatactgacaaaagcaacttagagtgtatacacaaaagattttataaaatcagtttatgtcctagtatttataatcccagattttataatataaaccatagaattttcaactttagtgactaaggatttttggcaaaagatatgtgatatcctttatatcctctactttatagccacacttctaatttgagtaaatcctctccttcaattttcttatagtccaatcagtgaaagtcgaagagtactacaggaatcatgtgagtttttcttaaagcacaattctaaagttaaacacaaaaagaagcactataaaccaagttcacacaagctgaaggtcatttccaaatccatgggaaccagcacaggagctacagcaaatcatggcacttctgcagtagcaattactagccatgattacctaggacaagaaactttgacagaaatccaaacctcaccagaaacatcaatgagagaggtgaaagcggacggagctagcacccccaggttaagagaacaggactgtggtgaacctgcctcgccagcagcatccatctccagactctctggggaacaggtcgacgggaagggccaggcaggcagtgtatctgaaagtgcgcggagtgaaggaaggtgagatttgattttatgtaaaatcatcactattttaaatactgcattacacattttttattaaagcataacacatttggaaagcattttgtgatatattatgtctgtactcttaccccaaggaagtttgggttcagcctataaatatgctatttagtagtttaattcttagctttgagaacagctttaatataggtggttcaagtaggaatgttcatttctgtggcaattgttaagagttccttgtacatttaagtaaatgcaatttacccaaaatacaggctaagttttaattaatactacattataattctgtctaaaaagtgtcaccttatacaaaattataatgtgtcattttatctaaaattattttattttctgaacatgaaaagatattgacattatctttaatgaattttctcaaatggccataggtgaccaaaacacaggtaagccagaatgcagacagctaattgcattaagatctcaaggttatcttacctagtcctctcagactaggctaaatgcaccttctctgtgatcctatggcagctttcatatatttggattgtaattagatacatgctttatcttctcgtagatttgtaaccttctcaatgggagagctaaagtcttactcatctttatgttcccagtttcttacatggtactgatccatggtgggaaatcaataaaacatttgttaaactgaggacaggaatcctgccttattctattccccacaagattccatgttcagccctatatatataagtagtgcttgatgaagtttctgaagtaagtgaaaattatattttaaacaattatttggccaggcacggtggctcacgcctgtaatcccagcactttgggaggccaaggtgggcagatcacaaggtcaggagatcgagaccattctggctaacatggtgaaaccccatctctactgaaaatacaaaaaattagccgggtgtggtggcacccacctgtagtcccagctactcgggaggctgaggcaggagaatcgcttgaacccaagaggtggaggttgcagtgagctgagatcacactattattgcactccagcctagcaacagagtgagactctgtctcaaaaaaaaaatttgtattttgaagtgttaaagtacacctgaagactgttagctatttattctctgataaaggtggacactggttaggggtgaaactcatgaaaaatggcatcatatttgtgtttgtggatgtgtgtgtgtcaactttttttcttttatctaggattagtccaaagagtgatattactgacactggcctggcacagagcaacaatttgcaggtccccagttcttcagaaccaagcagcctcaaaggttccacatctctgcttgttcacccggtttcaggagtgagaaaagagcagggaggtggttgtcattcagatacttgaagaacattttctctcgttactcagaagcaaatttgtgttacactggaagtgacctatgcactgttttgtaagaatcactgttacgttcttcttttgcacttaaagttgcattgcctactgttatactggaaaaaatagagttcaagaataatatgactcatttcacacaaaggttaatgacaacaatatacctgaaaaca

SEQ ID NO: 456 - protein, 706 aa, Homo sapiens
MEMFTFLLTCIFLPLLRGHSLFTCEPITVPRCMKMAYNMTFFPNLMGHYDQSIAAVEMEHFLPLANLECSPNIETFLCKAFVPTCIEQIHVVPPCRKLCEKVYSDCKKLIDTFGIRWPEELECDRLQYCDETVPVTFDPHTEFLGPQKKTEQVQRDIGFWCPRHLKTSGGQGYKFLGIDQCAPPCPNMYFKSDELEFAKSFIGTVSIFCLCATLFTFLTFLIDVRRFRYPERPIIYYSVCYSIVSLMYFIGFLLGDSTACNKADEKLELGDTVVLGSQNKACTVLFMLLYFFTMAGTVWWVILTITWFLAAGRKWSCEAIEQKAVWFHAVAWGTPGFLTVMLLAMNKVEGDNISGVCFVGLYDLDASRYFVLLPLCLCVFVGLSLLLAGIISLNHVRQVIQHDGRNQEKLKKFMIRIGVFSGLYLVPLVTLLGCYVYEQVNRITWEITWVSDHCRQYHIPCPYQAKAKARPELALFMIKYLMTLIVGISAVFWVGSKKTCTEWAGFFKRNRKRDPISESRRVLQESCEFFLKHNSKVKHKKKHYKPSSHKLKVISKSMGTSTGATANHGTSAVAITSHDYLGQETLTEIQTSPETSMREVKADGASTPRLREQDCGEPASPAASISRLSGEQVDGKGQAGSVSESARSEGRISPKSDITDTGLAQSNNLQVPSSSEPSSLKGSTSLLVHPVSGVRKEQGGGCHSDT

SEQ ID NO: 457 - DNA, 1375 bp, Homo sapiens
  source
  (1)..(1375)
  CDS (201)..(1175)
gcaagtaaaagactcccctccctcaggcaagattggcctctgtcattagagaggtaagatgtatgtttttgcccacatgatgatatgattcaaggcaagaagacaacaatcatcacctttacccaacactgacagggaacatgagaagtatcttttttatttttcaactgcgacaaaatctacaaaacctgttaggataaatggctgaagttaatatcatttatgtcactgtattcattctgaaaggaattaccaaccggccagagcttcaggccccgtgctttggggtgtttttagttatctatctggtcacagtgctgggcaatcttgggttgattactttaatcaagattgatactcgactccacacacctatgtactatttcctcagccacctggcctttgttgacctttgttactcctctgctattacaccgaagatgatggtgaattttgttgtggaacgcaacaccattcctttccatgcttgtgcaacccaactgggttgttttctcaccttcatgatcactgagtgtttccttctagcctccatggcctacgattgctatgtcgccatctgtagtcccctgcattattcaacactgatgtcaagaagagtctgcattcaactggtggcagttccatatatatacagcttcctggttgccctcttccacaccgttatcactttccgtctgacttactgtggcccaaacttaattaaccatttctattgtgatgacctccccttcttagctctgtcctgctcagacacacacatgaaggaaattctgatatttgcctttgctggctttgatatgatctcttcctcttccattgtcctcacctcctacatctttattattgccgctatcctaaggatccgctctactcaggggcaacacaaagccatttccacctgtggctcccatatggtgactgtcactattttctatggcacactgatctttatgtacctacagcccaaatcaaatcactccttggacacagacaagatggcttctgtattttacacagtggtgatccccatgttaaaccccctaatctatagtctaaggaacaaagaagtgaaagatgcctcaaagaaagccttggataaaggttgtgaaaacttacagatattaacatttttaaaaataagaaaactttattaaacaagcaggaaataaatcaaactttttcttgtaattatttcccaatgaactgaaaatgtagctgttactttaatggaccttgacattttctgcaagaaccaggcagatcatgaaaaatcagtacgaattaaagcattcaattcaggccatcacagtcttggcagaccactgaaaccacgttcaaatacaaacagagacac

SEQ ID NO: 458 - protein, 324 aa, Homo sapiens
MAEVNIIYVTVFILKGITNRPELQAPCFGVFLVIYLVTVLGNLGLITLIKIDTRLHTPMYYFLSHLAFVDLCYSSAITPKMMVNFVVERNTIPFHACATQLGCFLTFMITECFLLASMAYDCYVAICSPLHYSTLMSRRVCIQLVAVPYIYSFLVALFHTVITFRLTYCGPNLINHFYCDDLPFLALSCSDTHMKEILIFAFAGFDMISSSSIVLTSYIFIIAAILRIRSTQGQHKAISTCGSHMVTVTIFYGTLIFMYLQPKSNHSLDTDKMASVFYTVVIPMLNPLIYSLRNKEVKDASKKALDKGCENLQILTFLKIRKLY

SEQ ID NO: 459 - DNA, 3699 bp, Homo sapiens
  source
  (1)..(3699)
  CDS (201)..(485)
  CDS (2329)..(2441)
  CDS (2544)..(3202)
  CDS (3297)..(3499)
  modified_base (1981)..(1981): a, t, c, g, unknown or other
  modified_base (2005)..(2005): a, t, c, g, unknown or other
gtccacgtgcccgtctctccctgcgcaaaattccaagatgagcaaatactgggctcacggtggagcgccgcgggggcccccctgagccggggcgggtcgggggcgggaccagggtccggccggggcgtgcccgaggggagggactccccggcttgcgacccggcgttgtccgcggtgctcagcgcccgcccgggcgcgccatggggaaccgcagcaccgcggacgcggacgggctgctggctgggcgcgggccggccgcgggggcatctgcgggggcatctgcggggctggctgggcagggcgcggcggcgctggtggggggcgtgctgctcatcggcgcggtgctcgcggggaactcgctcgtgtgcgtgagcgtggccaccgagcgcgccctgcagacgcccaccaactccttcatcgtgagcctggcggccgccgacctcctcctcgctctcctggtgctgccgctcttcgtctactccgaggtgagccgcgtccggccgcacgagcatcctcacctgctcctcggttccccgtccctgtccctacggaggacccggcgcgacccggcccctttctggtgcggagcttccagctggggcggcggcaggggcgctgcgccttgtccctcggcgatacacccaccgccgccacctcgcgaccttccacccgctgcgctgtctgtcccccgaccctcgttcctcttctccttccccgtctgtcttggcgtctgttatccaggagatgcccgtccttctatccagggaccccggaaacaggcgactttgtcaagcccagtcccctccgtagctggatttcacctccagggcagccagctggacagacaggcagatgcaggctcagccccctggctgccgtgggacacacacacacacacactgccacagccactgcccaccacacacacctagtgcagatgctggcacacccccagaaggaggctcacagctcgcaggggagacctgggctggacaaaacccaggggaggggagggtgtgtggggaccaggcccctgctgagaaccctggggggaagcctgagggggaattgggggatggagcccacactccacaccaggtctggccctcgagtgggtcggccttggtgccagcccctctgcggccagagaaaagcagcttagggctgagctggagacgcggtgtccccgactgtgggggagggggactcgaggtttccccttgatggacacagtgaatccaggcggctggggcagagaccagcagcacgggacacgcgtgacctgtgctcctttcgagccgcagacgtcacagtgacgacgtttaagctcctaatctccccaaatcggcgggaaggattagaggggctgcctgctcctttgcccttggagagagtcactccacgtggagtcctacgctgggcactgggcacggtcttcatatttttaattataatttatcttcaagacaattatgatgtggatactatcatcacccttgtcttacagatgaagaaacagaaatgaattaacgtgcccgagtctcccacagagaacttagccaacagagcttccagcttcgcttctaggcccagcggggaccctgcctaccccaggctggggaggggctccctttgagcccgatgatatcaggcccgcccccagggaattccccaggccgttctcatgtttgtaacaaaagggagaccaaggccagaagccgtgattcacgcctgtaatcccaggactttgggaggcaaaggcaggaggatagtttgagaccagcctgggaaacataccaggcctggtctctacaaaaaattttaaaatatcagccgggggtggtggctgcggctgttgtcccagctattcgggggagctgaggcggcagaatcgcttaaacctgggaggcggaggttgcagtgagttgagatctcaccactgcacttcagcctgggcaacaagagcgaaactccgtctcanaaaacaaaaagaaaaacaaatcanccgggggtggtggcgcgcggctgtaatcccagctactctggagactgaggtgggaggatcgcttgagctcaggaattccaggctacagtgagccatgatggagccacagcactccagccgcggtgacacagcgagaccctaactcaaaacaaagggagatctgcgtggggaaggggtgtttccctgcccggtcctctggcctctggctcacagccgggcccccttctccgtattcagccctggaactacccataagagtgggggcgggtcacaagggcccgcggtggctgggaaacctcagggcctgtggtgtcgccgcgcaggtccagggtggcgcgtggctgctgagcccccgcctgtgcgacgccctcatggccatggacgtcatgctgtgcaccgcctccatcttcaacctgtgcgccatcagcgtggacaggtgcgccgccctccccgcccgcgccccggcgcccccgcgccccgcccgccgccctcaccgcggcctgtgcgctgtccggcgccccctcggcgctccccgcaggttcgtggccgtggccgtgccgctgcgctacaaccggcagggtgggagccgccggcagctgctgctcatcggcgccacgtggctgctgtccgcggcggtggcggcgcccgtactgtgcggcctcaacgacgtgcgcggccgcgaccccgccgtgtgccgcctggaggaccgcgactacgtggtctactcgtccgtgtgctccttcttcctaccctgcccgctcatgctgctgctctactgggccacgttccgcggcctgcagcgctgggaggtggcacgtcgcgccaagctgcacggccgcgcgccccgttttcccagcggccctggcccgccttcccccacgccacccgcgccccgcctcccccaggacccctgcggccccgactgtgcgccccccgcgcccggccttccccggggtccctgcggccccgactgtgcgcccgccgcgcccagcctcccccaggacccctgcggccccgactgtgcgccccccgcgcccggcctccccccggacccctgcggctccaactgtgctccccccgacgccgtcagagccgccgcgctcccaccccagactccaccgcagacccgcaggaggcggcgtgccaagatcaccggccgggagcgcaaggccatgagggtcctgccggtggtggtcggtgggttcctgtcctgaggggcggggaggagaggagggggggggtacgaggccggctgggcggggggcgctaacgcggctctcggcgcccccaggggccttcctgctgtgctggacgcccttcttcgtggtgcacatcacgcaggcgctgtgtcctgcctgctccgtgcccccgcggctggtcagcgccgtcacctggctgggctacgtcaacagcgccctcaaccccgtcatctacactgtcttcaacgccgagttccgcaacgtcttccgcaaggccctgcgtgcctgctgctgagccgggcacccccggacgccccccggcctgatggccaggcctcagggaccaaggagatggggagggcgcttttgtacgttaattaaacaaattccttcccaaactcagctgtgaaggctcctgggggctgatggggagtggggaagaggggtttctgcctcagtggccccaggccccccagccagttaacctctttctcc

SEQ ID NO: 460 - protein, 419 aa, Homo sapiens [sequence omitted]

SEQ ID NO: 461 - DNA, 1387 bp, Homo sapiens
  source
  (1)..(1387)
  CDS (201)..(1187)
gaaggcctattggacagtttggatgaggaactcaatagagacttagtaaacgtttattgagtataaatggccgtggaagatataacgatgtagatgtgctctgtgacataatggatgtatttatttttctgttcactatttcattacagtccctgttctcctgagctctcatttctgatataagcttgaaagaagagtaaatgagaccaagcagcaatgttacagaatttgtcctcctgggcctcactcaagatcctgatgtgaaaaaaacattatttgtcatgtttttactcatatacattgtgacaatggtgggaaacctcctcatttgggtgactactattggcagcccctccttgggctccctaatgtacttcttccttgcctacttgtcacttatggatgccatatattccactgccatgtcacccaaattgatgatagacttactctgtgataaaatcgctatttccttgtcagcttgcatgggtcagctcttcatagaacacttacttggtggtgcagaggtcttccttttggtggtgatggcctatgatcgctatgtggctatctctaagccgctgcactatttgaacatcatgaatcgactggtttgcatccttctgttggtggtggccatgattggaggttttgtgcactctgtggttcaaattgtctttctgtacagtctaccaatctgtggccccaatgttattgaccactctgtctgtgacatgtacccattgttggaactgttgtgccttgacacctactttataggactcactgtggttgccaatggtggaataatttgtatggtcatctttacctttctgctaatctcctgtggagtcatcctaaacttccttaaaacttacagtcaggaagagaggcataaagccctgcctacctgcatctcccacatcattgtggttgccctcgtttttgttccctgtatttttatgtatgttagacccgtttccaactttccctttgataaattaatgactgtgttttattcaattatcacactcatgttgaatcctttaatatactcgttgagacaatcagagatgaaaaatgctatgaaaaatctctggtgtgaaaagttaagtatagttagaaaaagagtatctcccacactgaacatatttattcctagttctaaggcaacaaataggcggtaaaatactgcagtcaattcaacagattctgtagggatgcttctctctatctacataaagccatcagaaaagtagtataaattatccactgagactagaataaatctaaagagaaatttggagaatgaataaaatcacaggtactgaataaaaggtcttggtacaagtaaaaataaaaccaagctcaccttgtaactttattt

SEQ ID NO: 462 - protein, 328 aa, Homo sapiens
MRPSSNVTEFVLLGLTQDPDVKKTLFVMFLLIYIVTMVGNLLIWVTTIGSPSLGSLMYFFLAYLSLMDAIYSTAMSPKLMIDLLCDKIAISLSACMGQLFIEHLLGGAEVFLLVVMAYDRYVAISKPLHYLNIMNRLVCILLLVVAMIGGFVHSVVQIVFLYSLPICGPNVIDHSVCDMYPLLELLCLDTYFIGLTVVANGGIICMVIFTFLLISCGVILNFLKTYSQEERHKALPTCISHIIVVALVFVPCIFMYVRPVSNFPFDKLMTVFYSIITLMLNPLIYSLRQSEMKNAMKNLWCEKLSIVRKRVSPTLNIFIPSSKATNRR

SEQ ID NO: 463 - DNA, 1414 bp, Homo sapiens
  source
  (1)..(1414)
  CDS (201)..(1214)
acagggtctcttttgagattaaagagagagaagtggcaaatttaggatgttagaataattttcatttaaaagtagatccttgtttttattaccctatcattaatgttttctgttttcctttatcagcgagttactgctcatttgattcatattgccaaactgaactctcttgttttcttgcaagatgaaaggagacaaccatgaatgagccactagactatttagcaaatgcttctgatttccccgattatgcagctgcttttggaaattgcactgatgaaaacatcccactcaagatgcactacctccctgttatttatggcattatcttcctcgtgggatttccaggcaatgcagtagtgatatccacttacattttcaaaatgagaccttggaagagcagcaccatcattatgctgaacctggcctgcacagatctgctgtatctgaccagcctccccttcctgattcactactatgccagtggcgaaaactggatctttggagatttcatgtgtaagtttatccgcttcagcttccatttcaacctgtatagcagcatcctcttcctcacctgtttcagcatcttccgctactgtgtgatcattcacccaatgagctgcttttccattcacaaaactcgatgtgcagttgtagcctgtgctgtggtgtggatcatttcactggtagctgtcattccgatgaccttcttgatcacatcaaccaacaggaccaacagatcagcctgtctcgacctcaccagttcggatgaactcaatactattaagtggtacaacctgattttgactgcaactactttctgcctccccttggtgatagtgacactttgctataccacgattatccacactctgacccatggactgcaaactgacagctgccttaagcagaaagcacgaaggctaaccattctgctactccttgcattttacgtatgttttttacccttccatatcttgagggtcattcggatcgaatctcgcctgctttcaatcagttgttccattgagaatcagatccatgaagcttacatcgtttctagaccattagctgctctgaacacctttggtaacctgttactatatgtggtggtcagcgacaactttcagcaggctgtctgctcaacagtgagatgcaaagtaagcgggaaccttgagcaagcaaagaaaattagttactcaaacaacccttgaaatatttcatttacttaaccaaaaacaaatacttgctgatactttacctagcatcctaagatgttcaggatgtctccctcaatggaactcctggtaaatactgtgtattcaagtaatcatgtgccaaagccagggcagagcttctagttctttgcaatccctttattgagctcctccactggggagatataagaatggga

SEQ ID NO: 464 - protein, 337 aa, Homo sapiens
MNEPLDYLANASDFPDYAAAFGNCTDENIPLKMHYLPVIYGIIFLVGFPGNAVVISTYIFKMRPWKSSTIIMLNLACTDLLYLTSLPFLIHYYASGENWIFGDFMCKFIRFSFHFNLYSSILFLTCFSIFRYCVIIHPMSCFSIHKTRCAVVACAVVWIISLVAVIPMTFLITSTNRTNRSACLDLTSSDELNTIKWYNLILTATTFCLPLVIVTLCYTTIIHTLTHGLQTDSCLKQKARRLTILLLLAFYVCFLPFHILRVIRIESRLLSISCSIENQIHEAYIVSRPLAALNTFGNLLLYVVVSDNFQQAVCSTVRCKVSGNLEQAKKISYSNNP

SEQ ID NO: 465 - DNA, 1294 bp, Homo sapiens
  source
  (1)..(1294)
  CDS (201)..(1094)
tttaagcgagtgtggctggtttttattttctagtgtactttgcaactaatatttctgtatactcccttttaggtgattgggagattttaacttagatctccagcaagtgctacaaggaagaaaagatcctgaagaatcaatcaagttttccgtgaagtcaagtccaagtaacatccccgccttaaccacaagcaggagaaatgaagcacattatcaactcgtatgaaaacatcaacaacacagcaagaaataattccgactgtcctcgtgtggttttgccggaggagatatttttcacaatttccattgttggagttttggagaatctgatcgtcctgctggctgtgttcaagaataagaatctccaggcacccatgtactttttcatctgtagcttggccatatctgatatgctgggcagcctatataagatcttggaaaatatcctgatcatattgagaaacatgggctatctcaagccacgtggcagttttgaaaccacagccgatgacatcatcgactccctgtttgtcctctccctgcttggctccatcttcagcctgtctgtgattgctgcggaccgctacatcaccatcttccacgcactgcggtaccacagcatcgtgaccatgcgccgcactgtggtggtgcttacggtcatctggacgttctgcacggggactggcatcaccatggtgatcttctcccatcatgtgcccacagtgatcaccttcacgtcgctgttcccgctgatgctggtcttcatcctgtgcctctatgtgcacatgttcctgctggctcgatcccacaccaggaagatctccaccctccccagagccaacatgaaaggggccatcacactgaccatcctgctcggggtcttcatcttctgctgggccccctttgtgcttcatgtcctcttgatgacattctgcccaagtaacccctactgcgcctgctacatgtctctcttccaggtgaacggcatgttgatcatgtgcaatgccgtcattgaccccttcatatatgccttccggagcccagagctcagggacgcattcaaaaagatgatcttctgcagcaggtactggtagaatggctgatccctggttttagaatccatgggaataacgttgccaagtgccagaatagtgtaacattccaacaaatgccagtgctcctcactggccttccttccctaatggatgcaaggatgatcccaccagctagtgtttctaatagctaggttctatgtgaacagtcttattgtaggggcaacctcttaactttgtga

SEQ ID NO: 466 - protein, 297 aa, Homo sapiens
MKHIINSYENINNTARNNSDCPRVVLPEEIFFTISIVGVLENLIVLLAVFKNKNLQAPMYFFICSLAISDMLGSLYKILENILIILRNMGYLKPRGSFETTADDIIDSLFVLSLLGSIFSLSVIAADRYITIFHALRYHSIVTMRRTVVVLTVIWTFCTGTGITMVIFSHHVPTVITFTSLFPLMLVFILCLYVHMFLLARSHTRKISTLPRANMKGAITLTILLGVFIFCWAPFVLHVLLMTFCPSNPYCACYMSLFQVNGMLIMCNAVIDPFIYAFRSPELRDAFKKMIFCSRYW

SEQ ID NO: 467 - DNA, 1414 bp, Homo sapiens
  source
  (1)..(1414)
  CDS (201)..(1214)
  modified_base (641)..(740): a, t, c, g, unknown or other
ctcgcgccttaactcccaacatacatgagaaacttcctgataggctcctgtcatccgtgatgcccgtaacaccacaacacccaacagccagtgctcaaaacattttgctgaacatgtgatcattgataaataaatagagaatccctaatagacggatccagccagtgagctgcagtttgagtttgtgtcctgttgaccccatggctgtaggctcagggtctccaggagacaaagctctgggctcccctgctccccactggaccctgccctatacccggtcctgcccaacccagagagcctggaccttgtctcacagagcactcaccgtgcagccttcagggaagcggtcaggagtgcagcgcaggaagtcaggccagccccgctccctctccacgatggcacaggggcctcgggtggcctggcagagggtacggctgggcagctccacccggtcattctcacacttgggcatgtatacggcacacagcaggggctggatcactgcccagcagcggggggcattccggaggcctgggggtggcaacagcattgcagtgaaggcccctcctcactctgacccacagacgcagcttcacccctgtcctccaggcctttgccacactgcagcccatcactggtcnnnnnnnnnnnnnnnnnnnnnnnnnnnnnnnnnnnnnnnnnnnnnnnnnnnnnnnnnnnnnnnnnnnnnnnnnnnnnnnnnnnnnnnnnnnnnnnnnnnncagagccagggcccccaggctcgtgtgtctctcctccctgtcagtgcccccagaggaacaagccaaccctgtggctggttgaggcagagatctcccccagagctgcagaagcgcctgggccggaagaagaagaggaggaagaggaagaaggaggtgtgcccgctggcgccgccccctgagcttcacccccctgcccctgcccccagtaccattcctcgactgcctcagctgccccggcagaaatgcctggtggctgcaggtgcctggggagctggggactcttgccgacagggagcgtggaccctggtctccaacccattctgcccagagcccagtccccctcaggatccatttctgcccagtgcaccggcccccgtggcatgggctcatggccgccgacagggcctggggcctattcactcccgcaccaacctgatggacacagaactcatggatgcagactcggacttctgagcctgcagagcaggacctgggacaggaaagagaggaaccaataccttcaaggctcttcttcctcaccgagcatgcttccctaggatcccgtcttccagagaacctgtgggctgactgccctccgaagagagttctggatgtctggctcaaagcagcaggactgtgggaaagagcctaacatctccatggggaggcctcac

SEQ ID NO: 468 - protein, 337 aa, Homo sapiens
  MOD_RES (148)..(180): Variable amino acid
MAVGSGSPGDKALGSPAPHWTLPYTRSCPTQRAWTLSHRALTVQPSGKRSGVQRRKSGQPRSLSTMAQGPRVAWQRVRLGSSTRSFSHLGMYTAHSRGWITAQQRGAFRRPGGGNSIAVKAPPHSDPQTQLHPCPPGLCHTAAHHWSXXXXXXXXXXXXXXXXXXXXXXXXXXXXXXXXXQSQGPQARVSLLPVSAPRGTSQPCGWLRQRSPPELQKRLGRKKKRRKRKKEVCPLAPPPELHPPAPAPSTIPRLPQLPRQKCLVAAGAWGAGDSCRQGAWTLVSNPFCPEPSPPQDPFLPSAPAPVAWAHGRRQGLGPIHSRTNLMDTELMDADSDF

SEQ ID NO: 469 - DNA, 1897 bp, Homo sapiens
  source
  (1)..(1897)
  CDS (201)..(899)
  CDS (992)..(1160)
  CDS (1567)..(1697)
cagtgatctatgattgtaccattgcactccagcctgggtgacagaatgtgaccctgtctcaaaaagaataataataataatcattccataaaaagtatcaaatggagaaataaatcatcagtggggtctcggaggggaccaggggctgcagtgacaggcaacctggggccctgacacagggtcattcctgttccaggaagatgaatgcttccagatgcctgtctgaggaagtggggtccctccgccctctaaccatggctgtcctgtctgcctcctttgtcgtcggagtgctgggcaatgggctggtgccgtgggtgactgtcttccgcatggcccgcacagtctccaccgtctgcttcttccacctggcccttgccgatttcatgctctcactgtctctgcccatcctcgtgtactatattgtctccaggcagtggctccttggagagtgggcctgcaaactctacaccggttttgtgttcctcaccttctccaccagtaactgcctcctggtcctcatctctgtggaccgttgcatctctgtcctctaccccgtctgggccctgaaccaccgcactgagcagagggcgagctggctggccttcggggtgtggctcctggccgccgccttgtgctctgcgcacctgaaattccggacaaccagaaaatggaatggctgtatgcagtgctacttacagttcaacttggagaatgagactgcccagatgtggactcaggaggtctttgggagacaaatggcggtgatcatggcccacttcctgctgggcttcctggggcccttagcaatcataggcacctgcgcccacctcatccgggccaagctcttgcgggagggctgggtccatgccaaccggcccaagaggctgctgctggtgctggtgagcgctttatctgctggttcccatttaacgtgatgctgttggtccatctgtggcgacgggtgatgctcaaggaattctaccacccccagatgctgctcatcctccaggctagctttgccttgggctgtgtcaacaactgcctcaacccgttcctctacgtcttcgttggcagagatttccaagaaaagtttttccagtctttgacttctgccctggcgagggcgtttggagaggaggagtttctgtcatcccgtccccgtggcaacgccccccgggaatgatggaagacttcagctggaagctggaagccgtccttcttagtttgcttgtggcctcttaccttgactggcttctaaaaccctgccaaatcctgcctcttctttcaggaagtcttccggcaacccctcatctaaagctctgtggtagagacagctacttactccccagtgtccattcttccctttctttttatctttttccttttttattttttggagacagagtcttattttgtcacccaggctggagcgcagtggcacagtcttggctcactgcagccttgacctccagggctcaagccatcctcctgcctcagcacccccgccccccacccccaaatagctgggactacaggcatgtgccaccaagcctggctaatttgtagagatggggtttcatcattttgcccaggatggtctcaagctcctgagttcaaatgatcctccagccttggccccccaaaatgctgggattacaggtgtgagccacagcgcctggcctcccctttgcttgtagtaagactcctgtttgtttcaaacgaggcacatgcttaactagaaaagaaaaaaaagactacatttcccagaatcctttgcatgtcgtacagccatgtgactgcttctggccaataaaatgtaagtggcagcaatcaatgtaacttccttgaagagccattaaatggaagaggcctgtcctccatttccccatctccccct

SEQ ID NO: 470 - protein, 332 aa, Homo sapiens [sequence omitted]

SEQ ID NO: 471 - DNA, 2464 bp, Homo sapiens
  source
  (1)..(2464)
  CDS (201)..(559)
  CDS (1517)..(2264)
ccacgagcttgctcacacagtgacactcagcgatgactttggctctgctctcccctcctccatctcccacgagcttccagcccagaacacctggccagacccaggtcgggggagttagatcccggggtcaagcaaccagaactgggggctcttgcctgaggattccagcttctcttcccaggtgcccgtctgatggggagatggctgatgcccagaacatttcactggacagcccagggagtgtgggggccgtggcagtgcctgtggtctttgccctaatcttcctgctgggcacagtgggcaatgggctggtgctggcagtgctcctgcagcctggcccgagtgcctggcaggagcctggcagcaccacggacctgttcatcctcaacctggcggtggctgacctctgcttcatcctgtgctgcgtgcccttccaggccaccatctacacgctggatgcctggctctttggggccctcgtctgcaaggccgtgcacctgctcatctacctcaccatgtacgccagcagctttacgctggctgctgtctccgtggacaggtgcgctgtgcctggggcctggctgggcagggctgtgggggcgggggttgggggaggagtcctgaacagatcctcactggccttaggaaggagagagtgggggaccagaaagggaggtgggtgggaggaaacaaaagctccctgacccctcgcaagcagcctctgggcacctgcagggcgtgcttgaggggactgtcctgcccttcccctcctccactgtgaacttccagaggacgcctctgagtctcaagtggcagcacagggtctggcacatagtaagtgctctgtaagcgcgaaatgaatcgcaaaagaagctcacgaatgcgttcatcagtttttttgttttgttttgttttgttgttttttttttttggatcttggctcactgcaacctctgcctcctgggttccagcgattctcctgccacagcctcctgagtagctgggattacaggccaccacacctggctaattttttgtatttttagtagaaacggggttttgccatgttggacaggctggtctcgaacccctgacctcaagtgatccgcccgcctcggcctcccaagtgctgggattacaggcgtgagccaccgcgcccagcccagctattttctaactgcccacacctggccaagctgtgcacacatctgcttccacagcttgaaacttggggtcaaatccaggctcactccagctgatgaccctgggcaagtcacttctctctggacctcatctgacgcatccataaaataatcctagaaataacaagtcaccgggatcgggcccttgctaggtgcaagggcctaagcaccttgcgcgttcacacccttaatccccgccacgtcccccacggttcacaggaggcgcactgggccgcagggcccgggcgcgggacgtggcgcgggcccctgcgggagggcacctgcccgccccgctgaccaggcgccctccgcaggtacctggccgtgcggcacccgctgcgctcgcgcgccctgcgcacgccgcgtaacgcccgcgccgcagtggggctggtgtggctgctggcggcgctcttctcggcgccctacctcagctactacggcaccgtgcgctacggcgcgctggagctctgcgtgcccgcctgggaggacgcgcgccgccgcgccctggacgtggccaccttcgctgccggctacctgctgcccgtggctgtggtgagcctggcctacgggcgcacgctgcgcttcctgtgggccgccgtgggtcccgcgggcgcggcggcggccgaggcgcggcggagggcgacgggccgcgcggggcgcgccatgctggcggtggccgcgctctacgcgctctgctggggtccgcaccacgcgctcatcctgtgcttctggtacggccgcttcgccttcagcccggccacctacgcctgccgcctggcctcacactgcctggcctacgccaactcctgcctcaacccgctcgtctacgcgctcgcctcgcgccacttccgcgcgcgcttccgccgcctgtggccgtgcggccgccgacgccgccaccgtgcccgccgcgccttgcgtcgcgtccgccccgcgtcctcgggcccacccggctgccccggagacgcccggcctagcgggaggctgctggctggtggcggccagggcccggagcccagggagggacccgtccacggcggagaggctgcccgaggaccggaataaaccctgccgcctggactccgcctgtgtccgtctgtctcactcccgttctccgaaggcgggacgccaccgggccagggatggggcaatgccacgagctctctgaggggcgttgagtggagcgacttgtccccgctccacagcggagcaccagcccagtggacacccctgggtgtgaatatgaacagcacagcccgccccca

SEQ ID NO: 472 - protein, 368 aa, Homo sapiens
MADAQNISLDSPGSVGAVAVPVVFALIFLLGTVGNGLVLAVLLQPGPSAWQEPGSTTDLFILNLAVADLCFILCCVPFQATIYTLDAWLFGALVCKAVHLLIYLTMYASSFTLAAVSVDRYLAVRHPLRSRALRTPRNARAAVGLVWLLAALFSAPYLSYYGTVRYGALELCVPAWEDARRRALDVATFAAGYLLPVAVVSLAYGRTLRFLWAAVGPAGAAAAEARRRATGRAGRAMLAVAALYALCWGPHHALILCFWYGRFAFSPATYACRLASHCLAYANSCLNPLVYALASRHFRARFRRLWPCGRRRRHRARRALRRVRPASSGPPGCPGDARPSGRLLAGGGQGPEPREGPVHGGEAARGPE

SEQ ID NO: 473 - DNA, 961 bp, Homo sapiens
  source
  (1)..(961)
  CDS (201)..(761)
  modified_base (8)..(8): a, t, c, g, unknown or other
  modified_base (22)..(22): a, t, c, g, unknown or other
  modified_base (38)..(38): a, t, c, g, unknown or other
  modified_base (55)..(55): a, t, c, g, unknown or other
  modified_base (61)..(61): a, t, c, g, unknown or other
  modified_base (74)..(173): a, t, c, g, unknown or other
  modified_base (184)..(184): a, t, c, g, unknown or other
  modified_base (191)..(191): a, t, c, g, unknown or other
  modified_base (211)..(211): a, t, c, g, unknown or other
  modified_base (218)..(218): a, t, c, g, unknown or other
  modified_base (287)..(287): a, t, c, g, unknown or other
  modified_base (300)..(300): a, t, c, g, unknown or other
  modified_base (305)..(305): a, t, c, g, unknown or other
  modified_base (332)..(332): a, t, c, g, unknown or other
  modified_base (647)..(647): a, t, c, g, unknown or other
  modified_base (674)..(674): a, t, c, g, unknown or other
  modified_base (677)..(677): a, t, c, g, unknown or other
  modified_base (878)..(878): a, t, c, g, unknown or other
  modified_base (914)..(961): a, t, c, g, unknown or other
cagattcnccaggtgatgctgntggtctggggattctnccagagccgaaccggcnggtttngcaaatcaagtcnnnnnnnnnnnnnnnnnnnnnnnnnnnnnnnnnnnnnnnnnnnnnnnnnnnnnnnnnnnnnnnnnnnnnnnnnnnnnnnnnnnnnnnnnnnnnnnnnnnngcgcccgtggngataagnacacttccaatgagtccagntcaggcnagtgccaccccagaccacctaaggaacgcccagccacagagctgtccaccacagaggccaccagcgccngcatgcccgcccntcccngcagccgcgggccttcaacccagctcncagatggtccaagatccagattgtacgaagcagacaggcaatgagtgtgtgacagccattgagattgtgcctgccacgccggctggcatgcgccttgcggccaacgtggcccgcaagttcgccagcatcgctcgcaaccaggtgcgcaagaagcggcagatggcggcccgggagcgcaaagtgacacgaacgatctttgccattctgctagccttcatcctcacctggacgccctacaacgtcatggtcctggtgaacaccttctgccagagctgcatccctgacacggtgtggtccattggctactggttctgntacgtcaacagcaccatcaaccctgcntgntatgttttgtgcaacgccacctttaaaaagaccttccggcacctgctgctgtgccagtatcggaacatcggcactgccaggtaggcaggcaggagtgccctaggaggtgctggtgttgcgtgcgtgtgctggggggaccacacggctcacttgctgtggggaagagttgcaggcaccttctgcgtcacgttggggattctnccacagccaagacccagggtatccaaacacaggacnnnnnnnnnnnnnnnnnnnnnnnnnnnnnnnnnnnnnnnnnnnnnnnn

SEQ ID NO: 474 - protein, 186 aa, Homo sapiens
  MOD_RES (4)..(4): Variable amino acid
  MOD_RES (34)..(34): Variable amino acid
  MOD_RES (149)..(149): Variable amino acid
  MOD_RES (159)..(159): Variable amino acid
MSPXQASATPDHLRNAQPQSCPPQRPPAPACPPXPAAAGLQPSSQMVQDPDCTKQTGNECVTAIEIVPATPAGMRLAANVARKFASIARNQVRKKRQMAARERKVTRTIFAILLAFILTWTPYNVMVLVNTFCQSCIPDTVWSIGYWFXYVNSTINPAXYVLCNATFKKTFRHLLLCQYRNIGTAR

SEQ ID NO: 475 - DNA, 1438 bp, Homo sapiens
  source
  (1)..(1438)
  CDS (201)..(1238)
  modified_base (151)..(151): a, t, c, g, unknown or other
  modified_base (180)..(180): a, t, c, g, unknown or other
  modified_base (211)..(310): a, t, c, g, unknown or other
  modified_base (345)..(345): a, t, c, g, unknown or other
  modified_base (1011)..(1011): a, t, c, g, unknown or other
  modified_base (1026)..(1026): a, t, c, g, unknown or other
  modified_base (1053)..(1152): a, t, c, g, unknown or other
  modified_base (1188)..(1188): a, t, c, g, unknown or other
agataaactgtagttcagggattcagaatgggtgctccaggacatggggaaggaagcagtagcctctgcctgtctcaatagctctgacatccatctctacctgggagctggctttgcccgccttccgtgtctctgtgggttcagccctcanaccctgattgcagaaaagctctgctccangaagaatctcccttggacatatgtacagagnnnnnnnnnnnnnnnnnnnnnnnnnnnnnnnnnnnnnnnnnnnnnnnnnnnnnnnnnnnnnnnnnnnnnnnnnnnnnnnnnnnnnnnnnnnnnnnnnnnngaccttgcgttgcatacctgcagtttgggctctanagaatcccctgtccatcaaggtcaacaggcagctgcagacagtcaacaactacttcctcttcagcctggcgtgtgctgatctcatcataggcgccttctccatgaacctctacaccgtgtacatcatcaagggctactggcccctgggcgccgtggtctgcgacctgtggctggccctggactacgtggtgagcaacgcctccgtcatgaaccttctcatcatcagctttgaccgctacttctgcgtcaccaagcctctcacctaccctgcccggcgcaccaccaagatggcaggcctcatgattgctgctgcctgggtactgtccttcgtgctctgggcgcctgccatcttgttctggcagtttgtggtgggtaagcggacggtgcccgacaaccagtgcttcatccagttcctgtccaacccagcagtgacctttggcacagccattgctgccttctacctgcctgtggtcatcatgacggtgctgtacatccacatctccctggccagtcgcagccgagtccacaagcaccggcccgagggcccgaaggagaagaaagccaagacgctggccttcctcaagagcccactaatgaagcagagcgtcaagaagcccccgcccgggagaggcccgcccgggaggagctgcgcaatggcaagctggnaaggaggccccccgncagcgctgccaccgccaccgcgccccnnnnnnnnnnnnnnnnnnnnnnnnnnnnnnnnnnnnnnnnnnnnnnnnnnnnnnnnnnnnnnnnnnnnnnnnnnnnnnnnnnnnnnnnnnnnnnnnnnnngtaccttgcttgcgaaacctgcgttttggactctanagaatcccctctgcccattcatccaaagccatcttaccggcctgtgttgagaagcgaggcgaggttagtccccatgaataagccacctgttaacatgccacctcctcagtgccatgtgtcatcgtcccaagggggcccaaccccagtgtgtccccagcaatggagctgcagtccccacgctctattgtcagcccttggcagcctgctttgccacgcacatatgatggcttttgcggtggcagtcatcctg

SEQ ID NO: 476 - protein, 345 aa, Homo sapiens
  MOD_RES (4)..(37): Variable amino acid
  MOD_RES (49)..(49): Variable amino acid
  MOD_RES (271)..(271): Variable amino acid
  MOD_RES (276)..(276): Variable amino acid
  MOD_RES (285)..(318): Variable amino acid
  MOD_RES (330)..(330): Variable amino acid
MYRXXXXXXXXXXXXXXXXXXXXXXXXXXXXXXXXXXTLRCIPAVWALXNPLSIKVNRQLQTVNNYFLFSLACADLIIGAFSMNLYTVYIIKGYWPLGAVVCDLWLALDYVVSNASVMNLLIISFDRYFCVTKPLTYPARRTTKMAGLMIAAAWVLSFVLWAPAILFWQFVVGKRTVPDNQCFIQFLSNPAVTFGTAIAAFYLPVVIMTVLYIHISLASRSRVHKHRPEGPKEKKAKTLAFLKSPLMKQSVKKPPPGRGPPGRSCAMASWXGGPPXALPPPPRPXXXXXXXXXXXXXXXXXXXXXXXXXXXXXXXXXXTLLAKPAFWTLXNPLCPFIQSHLTGLC

SEQ ID NO: 477 - DNA, 1333 bp, Homo sapiens
  source
  (1)..(1333)
  CDS (201)..(1133)
gtttttgatgtctgcagttcctcctctggtcgaccagactattgtctattaaacagtagcaagagaggctcaggagaccactgcattctgtttctcctctgataaggtatagaatatgcaatgatttacaaataatttctctctcacacacaaacacattcaatttctctttttaaaacttagagactgttgacaagatcgtggaccctggaaaccattcctcagtgactgagtccattctggctgggctctcagaacagccagagctccagctgcgcctcttcctcctgttcttaggaatctgtgtggtcacagtggtgggcaacttgggcatgatcacactgattgggctcagttctcacctgcacacacctatgtactatttcctcagcagtctgtccttcattgacttctgccattccactgtcattacccctaagatgctggtgaactttgcgacagagaagaacatcatctcctaccctgaatgcatggctcagctctatttattcagtatttttgctattgcagagtgtcacatgttggctgcaatggcgtatgactgttatgttgccatctgcagccccttgctgtacaatgtcatcatgtcctatcaccactgcttctggctcacagtgggagtttacattttaggcatccttggatctacaattcataccagttttatgttgagactctttttgtgcaagactaatgtgattaaccattatttttgtgatcttttccctctcttggggctctcctgctccagcacctacatcaatgaattactggttctggtcttgagtgcatttaacatcctgatgcctgccttaaccatccttgcttcttacatctttatcattgccagcatcctccgcattcactccactgagggcaggtccaaagccttcagcacttgcagctcccacatcttggctgttgctgttttctttggatctgcagcattcatgtacctgcagccatcatctgtcagctccatggaccagaggaaagtgtcgtctgtgttttatactactattgtgcccatgctgaaccccctgatctacagcctgaggaataaagatgtcaaacttgccgtgaagaaaattctgcatcagacagcatgttaatgaatagaatcaatgttatgttgttacatcaagataggtctttggtttgattagatatctaacttattggatttattgttgagatttatgaaaatttagtgatgctcttttatgtaacacctctccaaaatattcctccggtctgcttccatcgaacttatattccaatgagcatatgtaaagaaatacaaagaataaaa

SEQ ID NO: 478 - protein, 310 aa, Homo sapiens
VDPGNHSSVTESILAGLSEQPELQLRLFLLFLGICVVTVVGNLGMITLIGLSSHLHTPMYYFLSSLSFIDFCHSTVITPKMLVNFATEKNIISYPECMAQLYLFSIFAIAECHMLAAMAYDCYVAICSPLLYNVIMSYHHCFWLTVGVYILGILGSTIHTSFMLRLFLCKTNVINHYFCDLFPLLGLSCSSTYINELLVLVLSAFNILMPALTILASYIFIIASILRIHSTEGRSKAFSTCSSHILAVAVFFGSAAFMYLQPSSVSSMDQRKVSSVFYTTIVPMLNPLIYSLRNKDVKLAVKKILHQTAC

SEQ ID NO: 479 - DNA, 1339 bp, Homo sapiens
  source
  (1)..(1339)
  CDS (201)..(1139)
tcttacttgtcttatttaaaaattaaactttatcagaagtatgtgtggacagaaaataatagtgtatatagggctcagtgtcaactccagtctcaagaatttactgaggggcttcaaatgcattccctgcagataaagacgaatttctgtgcttaacttacccttgtgtctcccttcaggaaagagcacacgaatgccccatggaaaattacaatcaaacatcaactgatttcatcttattaggattcttcccaccatcaagaattggccttttcctcttcatcctcattgttttcattttcctaatggctctaattggaaacctatccatgattcttctcatcttcttggacacccatctccacacacccatgtatttcctacttagtcagctctccctcattgacctaaattacatctccaccattgttcctaagatggcatctgattttctgtctggtaacaagtctatctccttcactgggtgtgggattcagagtttcttcttctcggcattaggaggtgcagaagcactacttttggcatctatggcctatgatcgttacattgctatttgctttcctcttcactatcccatccgcatgagcaaaagaatgtgtgtgctgatgataacagggtcttggatcataggctcgatcaatgcttgtgctcacactgtatatgtactccatattccttattgccaatccagggccatcaatcatttcttctgtgatgtcccagcaatggtgactctggcctgcatggacacctgggtctatgagggcacagtgtttttgagcaccaccatctttctcgtgtttcccttcattgctatttcatgttcctatggccgggttctccttgctgtctaccacatgaaatctgcagaagggaggaagaaagcctacctgacctgcagcacccacctcactgtagtaactttctactatgcaccttttgtctacacttatctacgtccaagatccctgcgatctccaacagaggacaaggttctggctgtcttctacaccaccctcactccaatgctcaaccccatcatctatagcctgaggaacaaggaggtgatgggggccctgacacgagtgagtcagagaatctgctctgggaaaatgtagaaacattttctacctaaggtctcaggactcagatacacatccatccagcagtgtatagtaattaaaatattatttcaatcctagagttcaggagctaaaagtaatcaaggtaagagaaaaaaatcactgatttctggacaaaattgttttacatatatatgtatatataactccaaacaaccttttttcttcatggcatt

SEQ ID NO: 480 - protein, 312 aa, Homo sapiens
MENYNQTSTDFILLGFFPPSRIGLFLFILIVFIFLMALIGNLSMILLIFLDTHLHTPMYFLLSQLSLIDLNYISTIVPKMASDFLSGNKSISFTGCGIQSFFFSALGGAEALLLASMAYDRYIAICFPLHYPIRMSKRMCVLMITGSWIIGSINACAHTVYVLHIPYCQSRAINHFFCDVPAMVTLACMDTWVYEGTVFLSTTIFLVFPFIAISCSYGRVLLAVYHMKSAEGRKKAYLTCSTHLTVVTFYYAPFVYTYLRPRSLRSPTEDKVLAVFYTTLTPMLNPIIYSLRNKEVMGALTRVSQRICSGKM

SEQ ID NO: 481 - DNA, 985 bp, Homo sapiens; identical to SEQ ID NO: 103
  source
  (1)..(985)
  CDS (201)..(785)

SEQ ID NO: 482 - protein, 194 aa, Homo sapiens; identical to SEQ ID NO: 104

SEQ ID NO: 483 - DNA, 1354 bp, Homo sapiens
  source
  (1)..(1354)
  CDS (201)..(1154)
aggatgtgtattgcatttatttataatgcacatattcggaaaataaatagatctaagtcactggatgtaaagacatagcttctaagcatttaacatacaatacttttttgggtaggcaggtgacattgtcactcatttaaccctatgtgatgtgttatctttctcagctatgcctcagccttggggaacacactttacatatggggatggtgagacataccaatgagagcaacctagcaggtttcatccttttagggttttctgattatcctcagttacagaaggttctatttgtgctcatattgattctgtatttactaactattttggggaataccaccatcattctggtttctcgtctggaacccaagcttcatatgccgatgtatttcttcctttctcatctctccttcctgtaccgctgcttcaccagcagtgttattccccagctcctggtaaacctgtgggaacccatgaaaactatcgcctatggtggctgtttggttcacctttacaactcccatgccctgggatccactgagtgcgtcctcccggctgtgatgtcctgtgaccgctatgtggctgtctgccgtcctctccattacactgtcttaatgcatatccatctctgcatggccttggcatctatggcatggctcagtggaatagccaccaccctggtacagtccaccctcaccctgcagctgcccttctgtgggcatcgccaagtggatcatttcatctgcgaggtccctgtgctcatcaagctggcttgtgtgggcaccacgtttaacgaggctgagctttttgtggctagtatccttttccttatagtgcctgtctcattcatcctggtctcctctggctacattgcccacgcagtgttgaggattaagtcagctaccaggagacagaaagcattcgggacctgcttctcccacctgacagtggtcaccatcttttatggaaccatcatcttcatgtatctgcagccagccaagagtagatccagggaccagggcaagtttgtttctctcttctacactgtggtaacccgcatgcttaaccctcttatttataccttgaggatcaaggaggtgaaaggggcattaaagaaagttctagcaaaggctctgggagtaaatattttatgattattaaaaaaaaatttaagtgacactgtgatgaattttttttttggtaaaaagtagcatcttttaataagaggattttttatgggctcttctcacattttcttttgattaaatatttgtacgacattttgcattatgtaaaatactatggaatatatgtctacatacatacatgaaacatatgtctataaagtcgcaac

SEQ ID NO: 484 - protein, 317 aa, Homo sapiens
MGMVRHTNESNLAGFILLGFSDYPQLQKVLFVLILILYLLTILGNTTIILVSRLEPKLHMPMYFFLSHLSFLYRCFTSSVIPQLLVNLWEPMKTIAYGGCLVHLYNSHALGSTECVLPAVMSCDRYVAVCRPLHYTVLMHIHLCMALASMAWLSGIATTLVQSTLTLQLPFCGHRQVDHFICEVPVLIKLACVGTTFNEAELFVASILFLIVPVSFILVSSGYIAHAVLRIKSATRRQKAFGTCFSHLTVVTIFYGTIIFMYLQPAKSRSRDQGKFVSLFYTVVTRMLNPLIYTLRIKEVKGALKKVLAKALGVNIL

SEQ ID NO: 485 - DNA, 1039 bp, Homo sapiens
  source
  (1)..(1039)
  CDS (201)..(839)
attattgcattaaataatttttgcgttggcttataagtgttttccttcttcctcctcctcctctcccatctctctctctctttttctctttctctctccctccctctctctctcattctctttctctcagcacttacacaatggtgaattttacacatgtctcagaatttgttctacttgggttccaagggggtcccgggatgcaggctatgctatttctgatttttctgatcctgtatggcatagctgtggtgggaaaccttggcatgattgtaattatctgggtagatgcacacctccacaccccaatgtatgccttcctgcaaagcctttcattgttggacatctgctattcctccacaattgcacccagggctctggcgaactccatgcaagaggaccacacaatttcctttggcggatgtgctgctcagttctttttcttgtctctctttggtatcacagaggctttcctcctggctgccatggcctatgaccgcttcatcgccatctgcaaccctcttctgtactctgtgagcatgtctcaccaggtctgtgtgctgttaatatcaggatcctacttgtggggtgtagtcaatgccattgctcaaacaaccatgaccttcaggttgcctttctgtgggtccaatgagatcaacgactttttctgtgatgttcccccactcttgtccctctcatgttcagatacctttataaaccaactggttcttcttggtttatgtggctccattattgtcagtacctttttgattgtcctggtctcatacatttacatcatctcaacaattctgaggatcccgaccatgcagggacgctagaaagccttctccacgtgcgcttcccacctaacaggagtgtgcttgttttttggtactgttttcttcatgtatgcacaacccagtgccatcttcttcatggagcaaagtaaaatagtgtccatattctacactatggtcatccccatgctgaatcccctgatatacagcctgaggaacaaagaggtcaagcaggctctgag

SEQ ID NO: 486 - protein, 212 aa, Homo sapiens
MQAMLFLIFLILYGIAVVGNLGMIVIIWVDAHLHTPMYAFLQSLSLLDICYSSTIAPRALANSMQEDHTISFGGCAAQFFFLSLFGITEAFLLAAMAYDRFIAICNPLLYSVSMSHQVCVLLISGSYLWGVVNAIAQTTMTFRLPFCGSNEINDFFCDVPPLLSLSCSDTFINQLVLLGLCGSIIVSTFLIVLVSYIYIISTILRIPTMQGR

SEQ ID NO: 487 - DNA, 1400 bp, Homo sapiens
  source
  (1)..(1400)
  CDS (201)..(248)
  CDS (310)..(1200)
gtaagcttcatgaatgtagagattattttccttactgctgaattcaacaaacccacagctgtgtttggtacatagtaggcactaaatgaatatctgtttaattcataaataaagagaagtacatgatccacctaaagcatatttttcatttgacttttatataagctaacacatctgactttgtcaatttcttctaggaaatgagctgtgtctttctatccatagctgttaaggttgctgagaccatggtgagtattaaccaaactgctacagtaagtaacagagtttctcttctctggattcccacagtttgaagatggtagcctcctcttcttcattccattgtttgttatctacatattcattgtcattgggaatcttattgtattttttgcagtcagggtggatacccgtctccacaaccccatgtataattttatcagcattttctcatttctggagatctggtacacaactgccacaattcccaagatgctctccatcctcatcagcaggcagaggaccatctccatggttggctgcctcttgcagatgtacttcttccattcactgggaaattcagaggggattttgttgaccaccatggccattgataggtacgttgccatctgtaaccctctccgctacccaaccatcatgacccccgggctctgtgttcagctctctgtggggtcctgcatctttggctttcttgtgttgctcccagagattgcatggatttccacactgcccttctgtggacccaaccaaatccaccagatcttctgtgattttgaacctgtgctgcgcttggcctgtacagacacgtccatgattctgattgaggatgtgatccatgctgtggccattgtattctctgtcctgattattgccctttcttatatcagaatcatcactgtaatcctgaggattccctctgttgaaggccgccagaaggccttttctacctgtgccgcccatcttagtgtctttctgatgttctatggcagtgtatccctcatgtacctgcgtttctctgccactttcccaccgattttggacacagctgttgcactgatgtttgcagttcttgctccctttttcaaccctatcatctatagctttagaaataaggacatgaagattgcaattaaaaagcttttctgccctcagaagatggttaatttatctgtagattaatgctagctcataggcacctttcactgtggatgttactctaacacaataaaccatataattaacatataattcattcattgtcacatggatattttgtgtctctttatactggttcttcccatgtacatgtatatcctgcttacacatgccaaattaagatagcatggactacctgtctagacttatacaggtgggtaaaa

SEQ ID NO: 488 - protein, 312 aa, Homo sapiens
MSCVFLSIAVKVAETMFEDGSLLFFIPLFVIYIFIVIGNLIVFFAVRVDTRLHNPMYNFISIFSFLEIWYTTATIPKMLSILISRQRTISMVGCLLQMYFFHSLGNSEGILLTTMAIDRYVAICNPLRYPTIMTPGLCVQLSVGSCIFGFLVLLPEIAWISTLPFCGPNQIHQIFCDFEPVLRLACTDTSMILIEDVIHAVAIVFSVLIIALSYIRIITVILRIPSVEGRQKAFSTCAAHLSVFLMFYGSVSLMYLRFSATFPPILDTAVALMFAVLAPFFNPIIYSFRNKDMKIAIKKLFCPQKMVNLSVD

SEQ ID NO: 489 - DNA, 1354 bp, Homo sapiens
  source
  (1)..(1354)
  CDS (201)..(1154)
actcaggtctgttaacttttcctataaggtgagagaaaaaacagcaaagtgaagaggaaaaatgttataataattaatatgccactaagctcttcagtggttataacctgtgagagtatgttggtggtttgttgcagctatctttcaaacctcttgttcttcctgtgatttattttaggcactcaagtggacagagagccatgagaaatttgagtggaggccatgtcgaggagtttgtcttggtgggtttccctaccacgcctcccctccagctgctcctctttgtccttttttttgcaatttaccttctgacattgttggagaatgcacttattgtcttcacaatatggcttgctccaagccttcatcgtcccatgtactttttccttggccatctctctttcctggagctatggtacatcaatgtcaccattcctcggctcttggcagcctttcttacccaggatggtagagtctcctacgtaggttgcatgacccaactgtacttctttattgccttagcctgtactgaatgtgtgctgttggcagttatggcctatgatcgctacctggccatctgtggacccctcctttaccctagtctcatgccttccagtctggccactcgccttgctgctgcctcttggggcagtggcttcttcagctccatgatgaagcttctttttatttcccaattgtcctactgtggacccaacattatcaaccactttttctgtgatatttccccactactcaacctcacctgctctgacaaggagcaagcagagctagtagacttccttctggccctggtgatgattctactccctctattggctgtggtttcatcatacactgccatcattgcagccatcctgaggatccctacgtccaggggacgccacaaagccttttccacttgtgccgctcatctggcagtggttgttatctactactcctccactctcttcacctatgcacggccccgggccatgtacaccttcaaccacaacaagattatctctgtgctctacactatcattgtaccattcttcaacccagccatctactgcctgaggaacaaggaggtgaaggaggccttcaggaagacagtgatgggcagatgtcactatcctagggatgttcaggactgatatacaacaggtcttgggagaggtgaaaatagcagaatcttaatagggcctcctcaaggaatcagaataggctttaagggaacataaatataatttgccaacattttctctaaatattgtctgggaccttctgatacaaatgaaactttatgaatcatttattttttacaggggttttcaaactaaggttggactagcta

SEQ ID NO: 490 - protein, 317 aa, Homo sapiens
MRNLSGGHVEEFVLVGFPTTPPLQLLLFVLFFAIYLLTLLENALIVFTIWLAPSLHRPMYFFLGHLSFLELWYINVTIPRLLAAFLTQDGRVSYVGCMTQLYFFIALACTECVLLAVMAYDRYLAICGPLLYPSLMPSSLATRLAAASWGSGFFSSMMKLLFISQLSYCGPNIINHFFCDISPLLNLTCSDKEQAELVDFLLALVMILLPLLAVVSSYTAIIAAILRIPTSRGRHKAFSTCAAHLAVVVIYYSSTLFTYARPRAMYTFNHNKIISVLYTIIVPFFNPAIYCLRNKEVKEAFRKTVMGRCHYPRDVQD

SEQ ID NO: 491 - DNA, 1369 bp, Homo sapiens
  source
  (1)..(1369)
  CDS (201)..(1169)
taatattcacattcagcttaagatttcaaaatgtattcttacgaaagagatatggaattatgcatttatccttctaaaaagctgtgcatacagatctaaactatttaaaaattaatctctgaagttccaagcatcaccagtgataaatttgcgccttgcatcctgtgcttttccagaatgtttttcatcccccacaggcaatggagccccaaaatacctccactgtgactaactttcagctgttaggattccagaaccttcttgaatggcaggccctgctctttgtcattttcctgctcatctactgcctgaccattatagggaatgttgtcatcatcaccgtggtgagccagggcctgcgactgcactcccctatgtacatgttcctccagcatctctcctttctggaggtctggtacacgtccaccactgtgccccttctcctagccaacctgctgtcctggggccaagccatctccttctctgcctgcatggcacagctctacttcttcgtattcctcggcgccaccgagtgctttctcctggccttcatggcctatgaccgttacctggccatctgcagcccactccgctaccccttcctcatgcatcgtgggctctgtgccaggttggtggtggtctcctggtgcacaggggtcagcacaggctttctgccttccctgatgatttccaggttggacttctgtgggcgcaatcagattaaccatttcttctgcgacctcccgccactcatgcagctctcctgttccagagtttatatcaccgaggtgaccatcttcatcctgtcaattgccgtgctgtgcatttgtttttttctgacactggggccctatgttttcattgtgtcctccatattgagaatcccttccacctctggccggagaaagaccttttccacatgtggctcccacctggctgttgtcactctctactacgggaccatgatctccatgtatgtgtgtcccagtccccacctgttgcctgaaatcaacaagatcatttctgtcttctacactgtggtcacaccactgctgaacccagttatctacagcttgaggaacaaagacttcaaagaagctgttagaaaggtcatgagaaggaaatgtggtattctatggagtacaagtaaaaggaagttcctttattaggtaaagaaaattgcacagaacatgcagtggattaaattcagggttaagtgaatggtagattcagacctttaaacctgaagatcattgtcagaactgcattgaattctgtaggccacaaaacaacagctttttgagggttcctcactagcaactggtcagaagataaactgcctccatcaaaccattttgaggtcagtttt

SEQ ID NO: 492 - protein, 322 aa, Homo sapiens
MEPQNTSTVTNFQLLGFQNLLEWQALLFVIFLLIYCLTIIGNVVIITVVSQGLRLHSPMYMFLQHLSFLEVWYTSTTVPLLLANLLSWGQAISFSACMAQLYFFVFLGATECFLLAFMAYDRYLAICSPLRYPFLMHRGLCARLVVVSWCTGVSTGFLPSLMISRLDFCGRNQINHFFCDLPPLMQLSCSRVYITEVTIFILSIAVLCICFFLTLGPYVFIVSSILRIPSTSGRRKTFSTCGSHLAVVTLYYGTMISMYVCPSPHLLPEINKIISVFYTVVTPLLNPVIYSLRNKDFKEAVRKVMRRKCGILWSTSKRKFLY

SEQ ID NO: 493 - DNA, 1363 bp, Homo sapiens
  source
  (1)..(1363)
  CDS (201)..(1163)
ggtgggaggattgcttgatcccaagagtttgaagttagcccgggcaacacagtgaaattgtgtctctaaaaaagaataacataaaatgaactaaaatacacttttaatgtttgctaactgatgtaattgcttcatgtctcatgccctgtatgccctgtgctcttcccacaggtggccttttgccccacccccagcatacaatgatggaaatagccaatgtgagttctccagaagtctttgtcctcctgggcttctccacacgaccctcactagaaactgtcctcttcatagttgtcttgagtttttacatggtatcgatcttgggcaatggcatcatcattctggtctcccatacagatgtgcacctccacacacctatgtacttctttcttgccaacctccccttcctggacatgagcttcaccacgagcattgtcccacagctcctggctaacctctggggaccacagaaaaccataagctatggagggtgtgtggtccagttctatatctcccattggctgggggcaaccgagtgtgtcctgctggccaccatgtcctatgaccgctacgctgccatctgcaggccactccattacactgtcattatgcatccacagctttgccttgggctagctttggcctcctggctggggggtctgaccaccagcatggtgggctccacgctcaccatgctcctaccgctgtgtgggaacaattgcatcgaccacttcttttgcgagatgcccctcattatgcaactggcttgtgtggataccagcctcaatgagatggagatgtacctggccagctttgtctttgttgtcctgcctctggggctcatcctggtctcttacggccacattgcccgggccgtgttgaagatcaggtcagcagaagggcggagaaaggcattcaacacctgttcttcccacgtggctgtggtgtctctgttttacgggagcatcatcttcatgtatctccagccagccaagagcacctcccatgagcagggcaagttcatagctctgttctacaccgtagtcactcctgcgctgaacccacttatttacaccctgaggaacacggaggtgaagagcgccctccggcacatggtattagagaactgctgtggctctgcaggcaagctggcgcaaatttagagactccagtgccttctgagaaggaagatcaagtttacatcgagcaaagtgaccttggaagacagggcacttgggatgtcgtttttcttctaatattgtttgagctcaaggtagatggaaatctgaaaggagtgtgctcatgccatttccagaccaagaaaatacatttattatttgctaattatcatagttttgttcaa

SEQ ID NO: 494 - protein, 320 aa, Homo sapiens
MMEIANVSSPEVFVLLGFSTRPSLETVLFIVVLSFYMVSILGNGIIILVSHTDVHLHTPMYFFLANLPFLDMSFTTSIVPQLLANLWGPQKTISYGGCVVQFYISHWLGATECVLLATMSYDRYAAICRPLHYTVIMHPQLCLGLALASWLGGLTTSMVGSTLTMLLPLCGNNCIDHFFCEMPLIMQLACVDTSLNEMEMYLASFVFVVLPLGLILVSYGHIARAVLKIRSAEGRRKAFNTCSSHVAVVSLFYGSIIFMYLQPAKSTSHEQGKFIALFYTVVTPALNPLIYTLRNTEVKSALRHMVLENCCGSAGKLAQI

SEQ ID NO: 495 - DNA, 1396 bp, Homo sapiens
  source
  (1)..(1396)
  CDS (201)..(1196)
agaggttagtgcttaacatgtatctgggtggggagctgcttttgctccccactggtgctctggggagccacgtggcctctctttacaccaaaactccctatccaggtccagctccactctccctctgccccagcttccctgcagccctttcctcttgctctttgatgttttgtaggcctgcagctcccaagcacagaggcatgagtggggagaatgtcaccagggtcggcaccttcatcctggtgggcttccccacggccccagggctgcagtacctgctcttcctcctcttcctgctcacctacctctttgtcctggtggagaacctggccatcatcctcaccgtctggagcagcacctccctccacaggcccatgtactactttctgagctccatgtctttcctagagatctggtacgtgtctgacatcacccccaagatgctggagggcttcctcctccagcagaaacgcatctctttcgtcgggtgcatgacgcagctctacttcttcagctccctggtgtgcaccgagtgtgtgcttctggcctccatggcctacgaccgctacgtggccatctgccacccgctgcgctaccacgtccttgtgaccccggggctgtgcctccagctggtgggcttctcctttgtgagtggcttcaccatctccatgatcaaggtctgttttatctccagcgtcacgttctgtggctccaacgtcttgaaccacttcttctgtgacatttcccccatcctcaagctggcctgcacggacttctccactgcagagctggtggatttcattctggccttcatcatcctggtgtttccactcctggccaccatgctgtcatatgcgcacatcaccctggctgtcctgcgcatcccctcggccaccggctgctggagagccttcttcacctgcgcctctcacctcaccgtggtcaccgtcttctatacagccttgcttttcatgtatgtccggccccaggccattgattcccggagctccaacaagctcatctctgttttgtacacagttatcacccccatcttgaaccccttgatatactgcctgaggaataaggaatttaagaatgccttgaaaaaagccttcggcttgacgagctgcgccgtagaggggaggctttctagtcttctggaacttcatctccaaatacacagccagcctctctgaggaggccatttgactgtttgcattattgtagtaccgcatttatttaaaaattacttccaaatctatttttctccttcaggaaaaaaactgaggttgaggttaatagcataggtattgttgttggtgttgtaataccagtactttcttgtttttgtagatgagcaaagctgtagttagtaaagcttaatgaattttcctcg

SEQ ID NO: 496 - protein, 331 aa, Homo sapiens
MSGENVTRVGTFILVGFPTAPGLQYLLFLLFLLTYLFVLVENLAIILTVWSSTSLHRPMYYFLSSMSFLEIWYVSDITPKMLEGFLLQQKRISFVGCMTQLYFFSSLVCTECVLLASMAYDRYVAICHPLRYHVLVTPGLCLQLVGFSFVSGFTISMIKVCFISSVTFCGSNVLNHFFCDISPILKLACTDFSTAELVDFILAFIILVFPLLATMLSYAHITLAVLRIPSATGCWRAFFTCASHLTVVTVFYTALLFMYVRPQAIDSRSSNKLISVLYTVITPILNPLIYCLRNKEFKNALKKAFGLTSCAVEGRLSSLLELHLQIHSQPL

SEQ ID NO: 497 - DNA, 1339 bp, Homo sapiens
  source
  (1)..(1339)
  CDS (201)..(1139)
cagaagttttctactttaaaactcagaagatcagcagatcactgctctctcctggtgctctggggagccacgtggcctctctttgcaccaaaactccccatccaagtccagctccactctctctctgcctcagctgccctgcagccctttcctcttgctctttgatgttttgtaggcctgcagctcccaagcacagaggcatgagtggggagaatgtcaccaaggtcagcaccttcatcctggtgggcctccccacggccccagggctgcagtacctgctcttcctcctcttcctgctcacctacctctttgtcctggtggagaacctggccatcatcctcatcgtctggagcagcacctccctccacaggcccatgtactactttctgagctccatgtctttcctggagatctggtacgtgtctgacatcacccccaagatgctggagggcttcctcctccagcagaaacgcatctctttcgtcgggtgcatgacgcagctctacttcttcagctccctggtgtgcaccgagtgtgtgcttctggcctccatggcctacgaccgctacgtggccatctgccacccgctgcgctaccacgtccttgtgaccccggggctgtgcctccagctggtgggcttctcctttgtgagtggcttcaccatctccatgatcaaggtctgttttatctccagcgtcacgttctgtggctccaacgtcttgaaccacttcttctgtgacatttcccccatcctcaagctggcctgcacggacttctccactgcagagctggtggatttcatcctggccttcatcatcctggtgtttccgctcctggccaccatactgtcatattggcacatcaccctggctgtcctgcgcatcccctcggccaccggctgctggagagccttctctacctgcgcctctcacctcaccgtggtcaccgtcttctatacagccttgcttttcatgtatgtccggccccaagccattgattcccagagctccaacaagctcatctctgccgtgtacactgttgtcacgccaataattaaccctttgatttactgcctgaggaacaaggaatttaaggacgccttgaaaaaggccttgggcttgggtcaaacttcacactaagacaactaaatgtcctagagtaaaatctgtagtgatgaaacaacattgtatgtggcactttgtgctctttaaattaatttttaagttaaatttaacaaacctacagaactaagtgaaatttaacaaacctacacaactgtgcacaagtaacaagccttcgtctgcatatgttttcacaaaaggactgtgctcatggaacc

SEQ ID NO: 498 - protein, 312 aa, Homo sapiens
MSGENVTKVSTFILVGLPTAPGLQYLLFLLFLLTYLFVLVENLAIILIVWSSTSLHRPMYYFLSSMSFLEIWYVSDITPKMLEGFLLQQKRISFVGCMTQLYFFSSLVCTECVLLASMAYDRYVAICHPLRYHVLVTPGLCLQLVGFSFVSGFTISMIKVCFISSVTFCGSNVLNHFFCDISPILKLACTDFSTAELVDFILAFIILVFPLLATILSYWHITLAVLRIPSATGCWRAFSTCASHLTVVTVFYTALLFMYVRPQAIDSQSSNKLISAVYTVVTPIINPLIYCLRNKEFKDALKKALGLGQTSH

SEQ ID NO: 499 - DNA, 1258 bp, Homo sapiens
  source
  (1)..(1258)
  CDS (201)..(1058)
tggcaaatttttatatttgtacattggtatacttggatttaccatgtaaataaattatattaatttttttgacttcttacaggtaaaagagagacatttaaatggaatgggaaaaccaaaccattctggtggaattttttctgaagggacattctgttcacccaaggcttgagttactcttttttgtgctaatcttcataatgtatgtggtcatccttctggggaatggtactctcattttaatcagcatcttggaccctcaccttcacacccctatgtacttctttctggggaacctctccttcttggacatctgctacaccaccacctctattccctccacactagtgagcttcctttcagaaagaaagaccatttccttttctggctgtgcagtgcagatgttccttggcttggccatggggacaacagagtgtgtgcttctgggcatgatggcctttgaccgctatgtggctatctgcaaccctctgagatatcccatcatcatgagcaagaatgcctatgtacccatggctgttgggtcctggtttgcagggattgtcaactctgcagtacaaactacatttgtagtacaattgcctttctgcaggaagaatgtcatcaatcatttctcatgtgaaattctagctgtcatgaagttggcctgtgctgacatctcaggcaatgagttcctcatgcttgtggccacaatattgttcacattgatgccactgctcttgatagttatctcttactcattaatcatttccagcatcctcaagattcactcctctgaggggagaagcaaagctttctctacctgctcagcccatctgactgtggtcataatattctatgggaccatcctcttcatgtatatgaagcccaagtctaaagagacacttaattcagatgacttggatgctaccgacaaaattatatccatgttctatggggtgatgactcccatgatgaatcctttaatctacagtcttagaaacaaggatgtgaaagaggcagtaaaacacctaccgaacagaaggttctttagcaagtgaatgcaaaatgtactggagtgtgaacacacttgatattgttgaaacttcagaattatgttagaattttggatacttttactatttttctgcattttcatatattatgttaaaataatgagatacagcatttcaaaattattgcatgtccactctagagaatttgcaagatacagggcagtaggatgaagaagacagagggg

SEQ ID NO: 500 - protein, 285 aa, Homo sapiens
MYVVILLGNGTLILISILDPHLHTPMYFFLGNLSFLDICYTTTSIPSTLVSFLSERKTISFSGCAVQMFLGLAMGTTECVLLGMMAFDRYVAICNPLRYPIIMSKNAYVPMAVGSWFAGIVNSAVQTTFVVQLPFCRKNVINHFSCEILAVMKLACADISGNEFLMLVATILFTLMPLLLIVISYSLIISSILKIHSSEGRSKAFSTCSAHLTVVIIFYGTILFMYMKPKSKETLNSDDLDATDKIISMFYGVMTPMMNPLIYSLRNKDVKEAVKHLPNRRFFSK

SEQ ID NO: 501 - DNA, 1336 bp, Homo sapiens
  source
  (1)..(1336)
  CDS (201)..(1136)
aggccatatgattcccaagccagtgatttccactctgaataagagaagggaaagagcaccagacacaacaaactgcagagcaaaataggtaataaaatgcatgatttagtattcagggaatcctgcgaaataatgttgtagcttgtgctcagtataggaggcattgcacttccttctgctgttcagacaggcaaaaggccatgggaagtttcaacaccagttttgaagatggcttcattttggtgggattctcagattggccgcaactggagcccatcctgtttgtctttatttttattttctactccctaactctctttggcaacaccatcatcatcgctctctcctggctagaccttcggctgcacacacctatgtacttctttctctctcatctgtccctcctggacctctgcttcaccaccagcaccgtgccccagctcctgatcaacctttgcggggtggaccgcaccatcacccgtggagggtgtgtggctcagctcttcatctacctagccctgggctccacagagtgtgtgctcctggtggtgatggcctttgaccgctatgctgctgtctgtcgtccactccactacatggccatcatgcacccccatctctgccagaccctggctatcgcctcctggggtgcgggtttcgtgaactctctgatccagacaggtctcgcaatggccatgcctctctgtggccatcgactgaatcacttcttctgtgagatgcctgtatttctgaagttggcttgtgcggacacagaaggaacagaggccaagatgtttgtggcccgagtcatagtcgtggctgttcctgcagcacttattctaggctcctatgtgcacattgctcatgcagtgctgagggtgaagtcaacggctgggcgcagaaaggcttttgggacttgtgggtcccacctcctagtagttttccttttttatggctcagccatctacacatatctccaatccatccacaattattctgagcgtgagggaaaatttgttgcccttttttatactataattacccccattctcaatcctctcatttatacactaagaaacaaggacgtgaagggggctctgtggaaagtactatggaggggcagggactcagggtaggaggtgaaaaaatgagcagtaaaattttctgtaatagctcttcaatcacagatctttccctgttccttggagggcagttggtcagtaggaaagccctcagtcatcctcagaattggtttttgtttttgttttttggtggcggggggaacagagtttcactcttgttgcccaggctggagtgcagtggcacgatcttggct

SEQ ID NO: 502 - protein, 311 aa, Homo sapiens
MGSFNTSFEDGFILVGFSDWPQLEPILFVFIFIFYSLTLFGNTIIIALSWLDLRLHTPMYFFLSHLSLLDLCFTTSTVPQLLINLCGVDRTITRGGCVAQLFIYLALGSTECVLLVVMAFDRYAAVCRPLHYMAIMHPHLCQTLAIASWGAGFVNSLIQTGLAMAMPLCGHRLNHFFCEMPVFLKLACADTEGTEAKMFVARVIVVAVPAALILGSYVHIAHAVLRVKSTAGRRKAFGTCGSHLLVVFLFYGSAIYTYLQSIHNYSEREGKFVALFYTIITPILNPLIYTLRNKDVKGALWKVLWRGRDSG

SEQ ID NO: 503 - DNA, 1723 bp, Homo sapiens
  source
  (1)..(1723)
  CDS (201)..(220)
  CDS (593)..(1523)
tagataaaagcaaagataatatttcattggttacagttatacagttacacagttatacagttgccttatttggtctatcccatgaggaagtcctagttactaattacgtttttgttggctgcttctgattggttgagcttaagttctgtgtttctttaacataggcatttacaagaaataccacaaataaagtttcagacatgcttgcaaatcaagcaaggttaaggtcacttaggaggcccaactggctctgtctgctcaaggattcttctggcctcgtctccattttacatgaactgttgcataaataaacacagagtacctgaaacaacggaggtgatcattctgcctaccgagtgttggccacgccaagcttggagtgttgctcttattcttagggagtttatttttaagtaatctcatctgtaaatgggattacaatccacaaactgaccttgtatatgattccattccttctcccagcccagccccacactccaaggttttccctttgcttataaggggtagtcacccttttttatttcgaccttccaaacattctgggagttttcctcctttaggccaactacagcgcagaggagcgctttctcctgctgggtttctccgactggccttccctgcagccggtcctcttcgcccttgtcctcctgtgctacctcctgaccttgacgggcaactcggcgctggtgctgctggcggtgcgcgacccgcgcctgcacacgcccatgtactacttcctctgccacctggccttggtagacgcgggcttcactactagcgtggtgccgccgctgctggccaacctgcgcggaccagcgctctggctgccgcgcagccactgcacggcccagctgtgcgcatcgctggctctgggttcggccgaatgcgtcctcctggcggtgatggctctggaccgcgcggccgcagtgtgccgcccgctgcgctatgcggggctcgtctccccgcgcctatgtcgcacgctggccagcgcctcctggctaagcggcctcaccaactcggttgcgcaaaccgcgctcctggctgagcggccgctgtgcgcgccccgcctgctggaccacttcatctgtgagctgccggcgttgctcaagctggcctgcggaggcgacggagacactaccgagaaccagatgttcgccgcccgcgtggtcatcctgctgctgccgtttgccgtcatcctggcctcctacggtgccgtggcccgagctgtctgttgcatgcggttcagcggaggccggaggagggcggtgggcacgtgtgggtcccacctgacagccgtctgcctgttctacggctcggccatctacacctacctgcagcccgcgcagcgctacaaccaggcacggggcaagttcgtatcgctcttctacaccgtggtcacacctgctctcaacccgctcatctacaccctcaggaataagaaagtgaagggggcagcgaggaggctgctgcggagtctggggagaggccaggctgggcagtgagtagttggggaggggagaaagtattaagccagaacccaaggatggaaataccccttagtgagtcagtttagacttcaggctgttcatttttgtatgataatctgcaagatttgtcctaaggagtccaatgggggatatgttttcctcccgtgaggaaatgtttagttcttgagggaaaaatccctaaatcctctatatac

SEQ ID NO: 504 - protein, 316 aa, Homo sapiens [sequence omitted]

SEQ ID NO: 505 - DNA, 1849 bp, Homo sapiens
  source
  (1)..(1849)
  CDS (201)..(249)
  CDS (742)..(1649)
tttctttctttctttctttgagatggtgtctggctctgtcacccaggctggagtgcagtggtgcaatctcagctccctgcaacctccacctcccaggttcaagcaattctcctgcctcagcctcccaagtagctgggattacaagcgcctgccaccagacctggctaatttttttttttttttttgtatttttagtacagatggggttttaccatgttggccaggctgcttttgaactcctgacctcaagtaatccacctgccttgccctcccaaagtgctaggattacaggcgtaaactgccaccatgcctggaccaatccactttgtctatccaagggtcatgtatggctagaaaaatttactacttctccatttttaaaaaagttggaaaattttgagtgttaattccctcagcttctgaaagtaattttttacatcctgcccaattgaaaaaaagtgatgcaaaatgttggtaaatcatcacagccaggagccaaaaaaaaaaaaaggaactctcccaaatactgggtgctcctcagaccaaataatgatttaatccatacctattaaaattttgggtcaagcatcccacatatccaaggaagtttccattctactattttacaaatcattcaattttgaaggactatatctctgctattcacaggcattcatctttctctcaacaggtaatatgtagctgcaggtgtggaaaacgataatacaagttctttcgaaggcttcatcctggtgggcttctctgatcgtccccacctagagctgatcgtctttgtggttgtcctcatcttttatctgctgactcttcttggcaacatgaccattgtcttgctttcagctctggattcccggctgcacacaccaatgtatttctttttggcaaacctctcattcctggacatgtgtttcaccacaggttccatccctcagatgctctacaacctttggggtccagataagaccatcagctatgtgggttgtgccatccagctgtactttgtcctggccctgggaggggtggagtgtgtcctcctggctgtcatggcatatgaccgctatgctgcagtctgcaaacccctgcactacaccatcatcatgcacccacgtctctgtggacagctggcttcagtggcatggctgagtggctttggcaattctctcataatggcaccccagacattgatgctaccccgctgtgggcacagacgagttgaccactttctctgtgagatgccagcactaattggtatggcctgtgtagacaccatgatgcttgaggcactggcttttgccctggcaatctttatcatcctggcaccactcatcctcattctcatttcttatggttacgttggaggaacagtgcttaggatcaagtcagctgctgggcgaaagaaagccttcaacacttgcagctcgcatctaattgttgtctctctcttctatggtacaatcatatacatgtacctccagccagcaaatacttattcccaggaccagggcaagtttcttacccttttctacacaattgtcactcccagtgttaaccccctgatctatacactaagaaacaaagatgttaaagaggccatgaagaaggtgctagggaaggggagtgcagaaatatagtaaggggtgattaaactttgggattgtattttgacccatcttctatatatgttgttagacctagcaaatataggaatgttttggcattgcaggctgaagaggcatttaatgagatgggggaattcaatggtttagctaggtcaagaaaataggggctaggagcagtggctcctgcctgtaatcccagcactttgggaggt

SEQ ID NO: 506 - protein, 318 aa, Homo sapiens
MGFYHVGQAAFELLTSSFILVGFSDRPHLELIVFVVVLIFYLLTLLGNMTIVLLSALDSRLHTPMYFFLANLSFLDMCFTTGSIPQMLYNLWGPDKTISYVGCAIQLYFVLALGGVECVLLAVMAYDRYAAVCKPLHYTIIMHPRLCGQLASVAWLSGFGNSLIMAPQTLMLPRCGHRRVDHFLCEMPALIGMACVDTMMLEALAFALAIFIILAPLILILISYGYVGGTVLRIKSAAGRKKAFNTCSSHLIVVSLFYGTIIYMYLQPANTYSQDQGKFLTLFYTIVTPSVNPLIYTLRNKDVKEAMKKVLGKGSAEI

SEQ ID NO: 507 - DNA, 1345 bp, Homo sapiens
  source
  (1)..(1345)
  CDS (201)..(1145)
tttatcttcaaaagatatatattcttcatgaagtatttgacatcaacatcgtgtagaaaatagtagagtcaggttatggagttgaggagcaggagaggaatgttttttcaacctgaaatgtccttaatctttttaggataagcggttgttctctctcttttgctctctagatttcacaaggaacaagggcttagaactaaatgttgatgaattactctagtgccactgaattttatctccttggcttccctggctctgaagaactacatcatatcctttttgctatattcttctttttctacttggtgacattaatgggaaacacagtcatcatcatgattgtctgtgtggataaacgtctgcagtcccccatgtatttcttcctcggccacctctctgccctggagatcctggtcacaaccataatcgtccccgtgatgctttggggattgctgctccctgggatgcagacaatatatttgtctgcctgtgttgtccagctcttcttgtaccttgctgtggggacaacagagttcgcattacttggagcaatggctgtggaccgttatgtggctgtctgtaaccctctgaggtacaacatcattatgaacagacacacctgcaactttgtggttcttgtgtcatgggtgtttgggtttctttttcaaatctggccggtctatgtcatgtttcagcttacttactgcaaatcaaatgtggtgaacaattttttttgtgaccgagggcaattgctcaaactatcctgcaataatactcttttcacggagtttatcctcttcttaatggctgtttttgttctctttggttctttgatccctacaattgtctccaacgcctacatcatctccaccattctcaagatcccgtcatcctctggccggaggaaatccttctccacttgtgcctcccacttcacctgtgttgtgattggctacggcagctgcttgtttctctacgtgaaacccaagcaaacgcaggcagctgattacaattgggtagtttccctgatggtttcagtagtaactcctttcctcaatcctttcatcttcaccctccggaatgataaagtcatagaggcccttcgggatggggtgaaacgctgctgtcaactattcaggaattagccttgctctgaggacttttacatggtaaagcacttagtatggattctagaataatctgaaaagaacttgctcatctttgaactgcatcataattattgccattatcaaatgatttgcatgcaacaaaatacttttaagttacagctacggtttttagtatgcttagttgttacttgaaactcagtctattatttttaaga

SEQ ID NO: 508 - protein, 314 aa, Homo sapiens
MLMNYSSATEFYLLGFPGSEELHHILFAIFFFFYLVTLMGNTVIIMIVCVDKRLQSPMYFFLGHLSALEILVTTIIVPVMLWGLLLPGMQTIYLSACVVQLFLYLAVGTTEFALLGAMAVDRYVAVCNPLRYNIIMNRHTCNFVVLVSWVFGFLFQIWPVYVMFQLTYCKSNVVNNFFCDRGQLLKLSCNNTLFTEFILFLMAVFVLFGSLIPTIVSNAYIISTILKIPSSSGRRKSFSTCASHFTCVVIGYGSCLFLYVKPKQTQAADYNWVVSLMVSVVTPFLNPFIFTLRNDKVIEALRDGVKRCCQLFRN

SEQ ID NO: 509 - DNA, 1315 bp, Homo sapiens
  source
  (1)..(1315)
  CDS (201)..(1115)
tatcattggtgacacaatcccttctataacactggatacttacaatcagtaattaacttaatgtgtagctcaatcactaatgttaaaagtttatcttttaaaaatgactaaattcataaaataatgtctaggtgttttttgacaatctggtcctaagtgatctttttctttttcacagggaaatgggggaaaatcagacaatggtcacagagttcctcctactgggatttctcctgggcccaaggattcagatgctcctctttgggctcttctccctgttctatatcttcaccctgctggggaacggggccatcctggggctcatctcactggactccagactccacacccccatgtacttcttcctctcacacctggctgtcgtcgacatcgcctacacccgcaacacggtgccccagatgctggcgaacctcctgcatccagccaagcccatctcctttgctggttgcatgacgcagacctttctctgtttgagttttggacacagcgaatgtctcctgctggtgctgatgtcctacgatcgttacgtggccatctgccaccctctccgatactccgtcatcatgacctggagagtctgcatcaccctggccgtcacttcctggacgtgtggctccctcctggctctggcccatgtggttctcatcctaagactgcccttctctgggcctcatgaaatcaaccacttcttctgtgaaatcctgtctgtcctcaggctggcctgtgctgacacctggctcaaccaggtggtcatctttgcagcctgcgtgttcttcctggtggggccacccagcctggtgcttgtctcctactcgcacatcctggcggccatcctgaggatccagtctggggagggccgcagaaaggccttctccacctgctcctcccacctctgcgtggtgggactcttctttggcagtgccatcatcatgtacatggcccccaagtcccgccatcctgaggagcagcaaaaggtcttttttctattttacagttttttcaacccaacacttaaccccctgatttacagcctgaggaacggagaggtcaagggtgccctgaggagagcactgggcaaggaaagtcattcctaactggtgtgacatttgactctccctcctcagtcatctcctggaatcttggtaccaaataccacctaagttcactactctctttatatctgagactgaatgaaccaagagactctgcaaagcattcctttttcctgcctgggaagtatttagtttttgatgcatttgttatacttaacattttttaatttaagcacttattg

SEQ ID NO: 510 - protein, 304 aa, Homo sapiens
MVTEFLLLGFLLGPRIQMLLFGLFSLFYIFTLLGNGAILGLISLDSRLHTPMYFFLSHLAVVDIAYTRNTVPQMLANLLHPAKPISFAGCMTQTFLCLSFGHSECLLLVLMSYDRYVAICHPLRYSVIMTWRVCITLAVTSWTCGSLLALAHVVLILRLPFSGPHEINHFFCEILSVLRLACADTWLNQVVIFAACVFFLVGPPSLVLVSYSHILAAILRIQSGEGRRKAFSTCSSHLCVVGLFFGSAIIMYMAPKSRHPEEQQKVFFLFYSFFNPTLNPLIYSLRNGEVKGALRRALGKESHS

SEQ ID NO: 511 - DNA, 1333 bp, Homo sapiens
  source
  (1)..(1333)
  CDS (201)..(1133)
tgtagacttgggatgacaacatgtacctcaagctatgtatgtgccgaccacagtagcagggacatgtcacctgattctcaggttggaaatagtttcttaacctaatttttcttccttctctcttgagagcaggaccatgtggagcaatgccacctctcttttaatctctgggcttcaaaacaagcagaatcaaggactaaatgatggacaaccactctagtgccactgaattccaccttctaggcttccctgggtcccaaggactacaccacattctttttgctatattctttttcttctatttagtgacattaatgggaaacacggtcatcattgtgattgtctgtgtggataaacgtctgcagtcccccatgtatttcttcctcagccacctctctaccctggagatcctggtcacaaccataattgtccccatgatgctttggggattgctcttcctgggatgcagacagtatctttctctacatgtatcgctcaacttttcctgtgggaccatggagtttgcattacttggagtgatggctgtggaccgttatgtggctgtgtgtaaccctttgaggtacaacatcattatgaacagcagtacctgtatttgggtggtaatagtgtcatgggtgtttggatttctttctgaaatctggcccatctatgccacatttcagtttaccttccgcaaatcaaattcattagaccatttttactgtgaccgagggcaattgctcaaactgtcctgcgataacactcttctcacagagtttatccttttcttaatggctgtttttattctcattggttctttgatccctacgattgtctcctacacctacattatctccaccatcctcaagatcccgtcagcctctggccggaggaaagccttctccacttttgcctcccacttcacctgtgttgtgattggctatggcagctgcttgtttctctacgtgaaacccaagcaaacacagggagttgagtacaataagatagtttccctgttggtttctgtgttaacccccttcctgaatcctttcatctttactcttcggaatgacaaagtcaaagaggccctccgagatgggatgaaacgctgctgtcaactcctgaaagattagctgttctgtaagtcagttttaggtggtccaagcctcagggttaattattaagtcacctagaaaattctaactcctcttttctcttatcctctcattacaaaagtcaaagagtgtgtacaattcgccatcacaccatggaagtagattaggctggtaataatgaaatccattgtctgtccaggagactctcatagccttag

SEQ ID NO: 512 - protein, 310 aa, Homo sapiens
MMDNHSSATEFHLLGFPGSQGLHHILFAIFFFFYLVTLMGNTVIIVIVCVDKRLQSPMYFFLSHLSTLEILVTTIIVPMMLWGLLFLGCRQYLSLHVSLNFSCGTMEFALLGVMAVDRYVAVCNPLRYNIIMNSSTCIWVVIVSWVFGFLSEIWPIYATFQFTFRKSNSLDHFYCDRGQLLKLSCDNTLLTEFILFLMAVFILIGSLIPTIVSYTYIISTILKIPSASGRRKAFSTFASHFTCVVIGYGSCLFLYVKPKQTQGVEYNKIVSLLVSVLTPFLNPFIFTLRNDKVKEALRDGMKRCCQLLKD

SEQ ID NO: 513 - DNA, 1342 bp, Homo sapiens
  source
  (1)..(1342)
  CDS (201)..(1142)
tttgttatctttctttattgccgtttctttctgcttttctgtttatcactcgctggctacttgcctttctctctctattctctgtctctgtccctgtttcttctgtttcaagttcaatggttctctgtctctatctctctgtttctgcctctccgtctgtcttttgtttctcttgcatgcagggccccatactgtggatcatggcaaatctgagccagccctccgaatttgtcctcttgggcttctcctcctttggtgagctgcaggcccttctgtatggccccttcctcatgctttatcttctcgccttcatgggaaacaccatcatcatagttatggtcatagctgacacccacctacatacacccatgtacttcttcctgggcaatttttccctgctggagatcttggtaaccatgactgcagtgcccaggatgctctcagacctgttggtcccccacaaagtcattaccttcactggctgcatggtccagttctacttccacttttccctggggtccacctccttcctcatcctgacagacatggcccttgatcgctttgtggccatctgccacccactgcgctatggcactctgatgagccgggctatgtgtgtccagctggctggggctgcctgggcagctcctttcctagccatggtacccactgtcctctcccgagctcatcttgattactgccatggcgacgtcatcaaccacttcttctgtgacaatgaacctctcctgcagttgtcatgctctgacactcgcctgttggaattctgggactttctgatggccttgacctttgtcctcagctccttcctggtgaccctcatctcctatggctacatagtgaccactgtgctgcggatcccctctgccagcagctgccagaaggctttctccacttgcgggtctcacctcacactggtcttcatcggctacagtagtaccatctttctgtatgtcaggcctggcaaagctcactctgtgcaagtcaggaaggtcgtggccttggtgacttcagttctcaccccctttctcaatccctttatccttaccttctgcaatcagacagttaaaacagtgctacaggggcagatgcagaggctgaaaggcctttgcaaggcacaatgatgagcccagggcccaggggaacctggcctgcctccattgagcagttctgtggggagggagacctccagcaagtgggaagaacactgctgagtttctttagtttttttccctctgagcaataactacagtgagccctgagtgctgcactgtctggcccaaagctcttatggaccaccatggaagagttccctacatcccct

SEQ ID NO: 514 - protein, 313 aa, Homo sapiens
MANLSQPSEFVLLGFSSFGELQALLYGPFLMLYLLAFMGNTIIIVMVIADTHLHTPMYFFLGNFSLLEILVTMTAVPRMLSDLLVPHKVITFTGCMVQFYFHFSLGSTSFLILTDMALDRFVAICHPLRYGTLMSRAMCVQLAGAAWAAPFLAMVPTVLSRAHLDYCHGDVINHFFCDNEPLLQLSCSDTRLLEFWDFLMALTFVLSSFLVTLISYGYIVTTVLRIPSASSCQKAFSTCGSHLTLVFIGYSSTIFLYVRPGKAHSVQVRKVVALVTSVLTPFLNPFILTFCNQTVKTVLQGQMQRLKGLCKAQ

SEQ ID NO: 515 - DNA, 1334 bp, Homo sapiens
  source
  (1)..(1334)
  CDS (201)..(452)
  CDS (499)..(1134)
atctgaaggtttgaattactttacaataaaaagttaaaaacaaaaacagaaagaaacactgagggaaaaggtgagtcaagtaggcacaaatatatacatgcttcctctgagctcattttgaaataaataactcattttctttgattctccaaccctgacctttcatcacactctggtcctttacaaagtatcattaaggaatgggggacaaccaatcacgggtcacagaattcatcctggttggattccagctcagtgtggagatggaagtgctcctcttctggatcttctccctgttatatctcttcagcctgctggcaaatggcatgatcttggggctcatctgtctggatcccagactgcgcacccccatgtacttcttcctgtcacacttggccgtcattgacatatactatgcttccagcaatttgctcaacatgctggaaaacctagtgaaacacaaaaaaaactatctcgttcatctcttgcattatgcagatggctttgtatttgacttttgctgctgcagtgtgcatgattttggtggtgatgtcctatgacagatttgtggcgatctgccatcccctgcattacactgtcatcatgaactggagagtgtgcacagtactggctattacttcctgggcatgtggattttccctggccctcataaatctaattctccttctaaggctgcccttctgtgggccccaggaggtgaaccacttcttcggtgaaattctgtctgtcctcaaactggcctgtgcagacacctggattaatgaaatttttgtctttgctggtggtgtgtttgtcttagtcgggcccctttccttgatgctgatctcctacatgcgcatcctcttggccatcctgaagatccagtcaaaggagggccgcaaaaaagccttttccacctgctcctcccacctctgtgtggttgggctttactttggcatggccatggtggtttacctggtcccagacaacagtcaacgacagaagcagcagaaaattctcaccctgttttacagccttttcaacccattgctgaaccccctcatctacagcctgcggaatgctcaagtgaagggtgccttatacagagcactgcagaaaaagaggaccatgtgaatgaggggagaattttggttcagttgatctacctttatgagatgtggtttgcttgtgcaatacaactcagaaaaagtccacaagaagaggcttcatttaagaatgaaaattatctagattttggccctgaaaatgggaacaaatttcatgggtatgcccatcttcttatattaagtagccttgttaggatacagaatagc

SEQ ID NO: 516 - protein, 295 aa, Homo sapiens
MGDNQSRVTEFILVGFQLSVEMEVLLFWIFSLLYLFSLLANGMILGLICLDPRLRTPMYFFLSHLAVIDIYYASSNLLNMLENLMALYLTFAAAVCMILVVMSYDRFVAICHPLHYTVIMNWRVCTVLAITSWACGFSLALINLILLLRLPFCGPQEVNHFFGEILSVLKLACADTWINEIFVFAGGVFVLVGPLSLMLISYMRILLAILKIQSKEGRKKAFSTCSSHLCVVGLYFGMAMVVYLVPDNSQRQKQQKILTLFYSLFNPLLNPLIYSLRNAQVKGALYRALQKKRTM

SEQ ID NO: 517 - DNA, 1339 bp, Homo sapiens
  source
  (1)..(1339)
  CDS (201)..(1139)
atgctcatttttcacatggataaactgaggcctagagaggataaagggattgcccgacgtcacagacagtgagtgtggcagtgctggaaaagatcctgacagtccacctcgtcccagaaagggctctgtgagcttccccgcaccctgtaccctctctccttccatcccagctgtggaccatctcttcagaactctgcagcatggagccgctcaacagaacagaggtgtccgagttctttctgaaaggattttctggctacccagccctggagcatctgctcttccctctgtgctcagccatgtacctggtgaccctcctggggaacacagccatcatggcggtgagcgtgctagatatccacctgcacacgcccgtgtacttcttcctgggcaacctctctaccctggacatctgctacacgcccacctttgtgcctctgatgctggtccacctcctgtcatcccggaagaccatctcctttgctgtctgtgccatccagatgtgtctgagcctgtccacgggctccacggagtgcctgctactggccatcacggcctatgaccgctacctggccatctgccagccactcaggtaccacgtgctcatgagccaccggctctgcgtgctgctgatgggagctgcctgggtcctctgcctcctcaagtcggtgactgagatggtcatctccatgaggctgcccttctgtggccaccacgtggtcagtcacttcacctgcaagatcctggcagtgctgaagctggcatgcggcaacacgtcggtcagcgaagacttcctgctggcgggctccatcctgctgctgcctgtacccctggcattcatctgcctgtcctacttgctcatcctggccaccatcctgagggtgccctcggccgccaggtgctgcaaagccttctccacctgcttggcacacctggctgtagtgctgcttttctacggcaccatcatcttcatgtacttgaagcccaagagtaaggaagcccacatctctgatgaggtcttcacagtcctctatgccatggtcacgaccatgctgaaccccaccatctacagcctgaggaacaaggaggtgaaggaggccgccaggaaggtgtggggcaggagtcgggcctccaggtgagggagggcggggctctgtacagacgcaggtctcaggttagtagctgaggccatcgtatgccaatgccagtgaagacatggcagggctggggctacaggtctggtatcttcatcccagcaaggcagcaccaagtcccgctgatcctgccacagaacagcccccaaatcaccctctgctctcagcatcaccctggccttcac

SEQ ID NO: 518 - protein, 312 aa, Homo sapiens
MEPLNRTEVSEFFLKGFSGYPALEHLLFPLCSAMYLVTLLGNTAIMAVSVLDIHLHTPVYFFLGNLSTLDICYTPTFVPLMLVHLLSSRKTISFAVCAIQMCLSLSTGSTECLLLAITAYDRYLAICQPLRYHVLMSHRLCVLLMGAAWVLCLLKSVTEMVISMRLPFCGHHVVSHFTCKILAVLKLACGNTSVSEDFLLAGSILLLPVPLAFICLSYLLILATILRVPSAARCCKAFSTCLAHLAVVLLFYGTIIFMYLKPKSKEAHISDEVFTVLYAMVTTMLNPTIYSLRNKEVKEAARKVWGRSRASR

SEQ ID NO: 519 - DNA, 1351 bp, Homo sapiens
  source
  (1)..(1351)
  CDS (201)..(1151)
gtacatcaacctgctcccccccttacatcaataaacacactatcctgtgatttcttgtagtaaaattgcatttataatagtgaaaataagtttgagagtattttcctaactaaatgaatatcacactttattcatttctttatgtcctcagattaaatgaagggaatagtactggaagaaatatagatgaaagaaagaaaatgcaaggagaaaacttcaccatttggagcatttttttcttggagggattttcccagtacccagggttagaagtggttctcttcgtcttcagccttgtaatgtatctgacaacgctcttgggcaacagcactcttattttgatcactatcctagattcacgccttaaaacccccatgtacttattccttggaaatctctctttcatggatatttgttacacatctgcctctgttcctactttgctggtgaacttgctgtcatcccagaaaaccattatcttttctgggtgtgctgtacagatgtatctgtcccttgccatgggctccacagagtgtgtgctcctggccgtgatggcatatgaccgttatgtggccatttgtaacccgctgagatactccatcatcatgaacaggtgcgtctgtgcacggatggctacggtctcctgggtgacgggttgcctgaccgctctgctggaaaccagttttgccctgcagatacccctctgtgggaatctcatcgatcacttcacgtgtgaaattctggcggtgctaaagttagcttgcacaagttcactgctcatgaacaccatcatgctggtggtcagcattctcctcttgccaattccaatgctcttagtttgcatctcttacatcttcatcctttccactattctgagaatcacctcagcagagggaagaaacaaggctttttctacctgtggtgcccatttgactgtggtgattttgtattatggggctgccctctctatgtacctaaagccttcttcatcaaatgcacaaaaaatagacaaaatcatctcgttgctttacggagtgcttacccctatgttgaaccccataatttacagtttaagaaacaaggaagtcaaagatgctatgaagaaattgctgggcaaaataacattgcatcaaacacacgaacatctctgattgggtccctatggttttaccagagatgtgcccctggcagagctcatcagagaaattcgagacaacatacaacctcttagaactctgatcggatcttatctctatataatttcacagttatgagctgcatacacagagtgattgcctattaataatagtaggtttcaatttgcatttgttaatatttcctttttgtgttt

SEQ ID NO: 520 - protein, 316 aa, Homo sapiens
MQGENFTIWSIFFLEGFSQYPGLEVVLFVFSLVMYLTTLLGNSTLILITILDSRLKTPMYLFLGNLSFMDICYTSASVPTLLVNLLSSQKTIIFSGCAVQMYLSLAMGSTECVLLAVMAYDRYVAICNPLRYSIIMNRCVCARMATVSWVTGCLTALLETSFALQIPLCGNLIDHFTCEILAVLKLACTSSLLMNTIMLVVSILLLPIPMLLVCISYIFILSTILRITSAEGRNKAFSTCGAHLTVVILYYGAALSMYLKPSSSNAQKIDKIISLLYGVLTPMLNPIIYSLRNKEVKDAMKKLLGKITLHQTHEHL

SEQ ID NO: 521 - DNA, 1357 bp, Homo sapiens
  source
  (1)..(1357)
  CDS (201)..(1157)
tatttctcttcctgcattgttaattcttttcattccatttccgtatattccttcctcctcttccctattttctctttcttcaatacttttatgggtccgtggcaaatttttatatttgtacattggtatacttggatttaccatgtaaataaattatattaatttttttgacttcttacaggtaaaagagagacatttaaatggaatgggaaaaccaaaccattctggtggaattttttctgaagggacattctgttcacccaaggcttgagttactcttttttgtgctaatcttcataatgtatgtggtcatccttctggggaatggtactctcattttaatcagcatcttggaccctcaccttcacacccctatgtacttctttctggggaacctctccttcttggacatctgctacaccaccacctctattccctccacactagtgagcttcctttcagaaagaaagaccatttccttttctggctgtgcagtgcagatgttccttggcttggccatggggacaacagagtgtgtgcttctgggcatgatggcctttgaccgctatgtggctatctgcaaccctctgagatatcccatcatcatgagcaagaatgcctatgtacccatggctgttgggtcctggtttgcagggattgtcaactctgcagtacaaactacatttgtagtacaattgcctttctgcaggaagaatgtcatcaatcatttctcatgtgaaattctagctgtcatgaagttggcctgtgctgacatctcaggcaatgagttcctcatgcttgtggccacaatattgttcacattgatgccactgctcttgatagttatctcttactcattaatcatttccagcatcctcaagattcactcctctgaggggagaagcaaagctttctctacctgctcagcccatctgactgtggtcataatattctatgggaccatcctcttcatgtatatgaagcccaagtctaaagagacacttaattcagatgacttggatgctaccgacaaaattatatccatgttctatggggtgatgactcccatgatgaatcctttaatctacagtcttagaaacaaggatgtgaaagaggcagtaaaacacctaccgaacagaaggttctttagcaagtgaatgcaaaatgtactggagtgtgaacacacttgatattgttgaaacttcagaattatgttagaattttggatacttttactatttttctgcattttcatatattatgttaaaataatgagatacagcatttcaaaattattgcatgtccactctagagaatttgcaagatacagggcagtaggatgaagaagacagagggg

SEQ ID NO: 522 - protein, 318 aa, Homo sapiens
MEWENQTILVEFFLKGHSVHPRLELLFFVLIFIMYVVILLGNGTLILISILDPHLHTPMYFFLGNLSFLDICYTTTSIPSTLVSFLSERKTISFSGCAVQMFLGLAMGTTECVLLGMMAFDRYVAICNPLRYPIIMSKNAYVPMAVGSWFAGIVNSAVQTTFVVQLPFCRKNVINHFSCEILAVMKLACADISGNEFLMLVATILFTLMPLLLIVISYSLIISSILKIHSSEGRSKAFSTCSAHLTVVIIFYGTILFMYMKPKSKETLNSDDLDATDKIISMFYGVMTPMMNPLIYSLRNKDVKEAVKHLPNRRFFSK

SEQ ID NO: 523 - DNA, 1357 bp, Homo sapiens
  source
  (1)..(1357)
  CDS (201)..(1157)
tccctctctccattcataattccctcttttctgtccacttttctttatgctctctcttctttctttggtcttttccttttttatttttctttttcctggggattatgatacatattcattgatacatgcttgaaagtaatcagagtaagataaatatttgtcttaacatgctctctcttacaggttaaatagagagtaaaatggaatgggaaaaccacaccattctggtggaattttttctgaagggactttctggtcacccaagacttgagttactcttttttgtgctcatcttcataatgtatgtggtcatccttctggggaatggtactctcattttaatcagcatcttggaccctcaccttcacacccctatgtacttctttctggggaacctctccttcttggacatctgctacaccaccacctctattccctccacgctagtgagcttcctttcagaaagaaagaccatttccctttctggctgtgcagtgcagatgttcctcggcttggccatggggacaacagagtgtgtgcttctgggcatgatggcctttgaccgctatgtggctatctgcaaccctctgagatatcccatcatcatgagtaaggatgcctatgtacccatggcagctgggtcctggatcataggagctgtcaattctgcagtacaatcagtgtttgtggtacaattgcctttctgcaggaataacatcatcaatcatttcacctgtgaaattctggctgtcatgaaactggcctgtgctgacatctcagacaatgagttcatcatgcttgtggccacaacattgttcatattgacacctttgttattaatcattgtctcttacacgttaatcattgtgagcatcttcaaaattagctcttccgaggggagaagcaaagcttcctctacctgttcagcccatctgactgtggtcataatattctatgggaccatcctcttcatgtacatgaagcccaagtctaaagagacacttaattcggatgacttggatgctaccgacaaaattatatccatgttctatggggtgatgactcccatgatgaatcctttaatctacagtcttagaaacaaggatgtgaaagaggcagtaaaacacctactgaacagaaggttctttagcaagtgagtgcaaaatgtactggaatatgaacacacttgatattgttgaaacttcagaattatgttagaattttgggtacttttactatttttatgcattttcatatattatgttaaaataatgagatacagcatttcaaaattattgcatgtccactctagagaatttgcaagatacagggcagtaggatgaagaagaaagagggg

SEQ ID NO: 524 - protein, 318 aa, Homo sapiens
MEWENHTILVEFFLKGLSGHPRLELLFFVLIFIMYVVILLGNGTLILISILDPHLHTPMYFFLGNLSFLDICYTTTSIPSTLVSFLSERKTISLSGCAVQMFLGLAMGTTECVLLGMMAFDRYVAICNPLRYPIIMSKDAYVPMAAGSWIIGAVNSAVQSVFVVQLPFCRNNIINHFTCEILAVMKLACADISDNEFIMLVATTLFILTPLLLIIVSYTLIIVSIFKISSSEGRSKASSTCSAHLTVVIIFYGTILFMYMKPKSKETLNSDDLDATDKIISMFYGVMTPMMNPLIYSLRNKDVKEAVKHLLNRRFFSK

SEQ ID NO: 525 - DNA, 1357 bp, Homo sapiens
  source
  (1)..(1357)
  CDS (201)..(1157)
ccctctctccattcataattccctcttttctgtagacttttctttatgctctctcttctttctttggtcttttcccattttatttttctttttccttgggaattatggcacatattcattgacacatgcttgaaagtaatcagagtaagataaatatttgtcttaacatgctctgtcttacaagctaaagagggagtaaaatggaatgggaaaaccacaccattctggtggaattttttctgaagggactttctggtcacccaagacttgagttactcttttttgtgctcatcttcataatgtatgtggtcatccttctggggaatggtactctcattttaatcagcatcttggaccctcaccttcacacccctatgtacttctttctggggaacctctccttcttggacatctgctacaccaccacctctattccctccacgctagtgagcttcctttcagaaagaaagaccatttccctttctggctgtgcagtgcagatgttcctcagcttggccatggggacaacagagtgtgtgcttctgggcgtgatggcctttgaccgctatgtggctatctgcaaccctctgagatatcccatcatcatgagtaaggatgcctatgtacccatggcagctgggtcctggatcataggagctgtcaattctgcagtacaaacagtgtttgtggtacaattgcctttctgcaggaataacatcatcaatcatttcacctgtgaaattctagctgtcatgaaactggcctgtgctgacatctcaggcaatgagttcatcctgcttgtgaccacaacattgttcctattgacacctttgttattaattattgtctcttacacgttaatcattttgagcatcttcaaaattagctcttcggaggggagaagcaaaccttcctctacctgctcagctcgtctgactgtggtgataacattctgtgggaccatcttcctcatgtacatgaagcccaagtctcaagagacacttaattcagatgacttggatgccactgacaaacttatattcatattctacagggtgatgactcccatgatgaatcctttaatctacagtcttagaaacaaggatgtgaaggaggcagtaaaacacctactgagaagaaaaaattttaacaagtaaatgagaaaggtgagagtaattttataatcacaatatggaaatcaattagagaaaccaaggttaaacagataggttctcgttgctgtttcacattcatctctcgaagttctaaagctccaaaatacacttctctgattgcgatacataatgaaaagaagtaaataaataaatttcagtgtttggaaataagtttctattct

SEQ ID NO: 526 - protein, 318 aa, Homo sapiens
MEWENHTILVEFFLKGLSGHPRLELLFFVLIFIMYVVILLGNGTLILISILDPHLHTPMYFFLGNLSFLDICYTTTSIPSTLVSFLSERKTISLSGCAVQMFLSLAMGTTECVLLGVMAFDRYVAICNPLRYPIIMSKDAYVPMAAGSWIIGAVNSAVQTVFVVQLPFCRNNIINHFTCEILAVMKLACADISGNEFILLVTTTLFLLTPLLLIIVSYTLIILSIFKISSSEGRSKPSSTCSARLTVVITFCGTIFLMYMKPKSQETLNSDDLDATDKLIFIFYRVMTPMMNPLIYSLRNKDVKEAVKHLLRRKNFNK

SEQ ID NO: 527 - DNA, 1363 bp, Homo sapiens
  source
  (1)..(1363)
  CDS (201)..(1163)
ctctgagacaggttaggattcctactctagtggcctgggttttacaggaagaaattgtccccaaacttatattgttgcatccaaaaacagaactgcaataatacagaatatgattcttaaaagtagctctcacagacactgtattaacatattcctgttctatcattcacagagttctgttggagatcagtatatgtaatatggaaaggaccaacgattccacgtcgacagaatttttcctggtagggctttctgcccacccaaagctccagacagttttcttcgttctaattttgtggatgtacctgatgatcctgcttggaaatggagtccttatctcagttatcatctttgattctcacctgcacacccccatgtatttcttcctctgtaatctttccttcctcgacgtttgctacacaagttcctctgtcccactaattcttgccagctttctggcagtaaagaaaaaggtttccttctctgggtgtatggtgcaaatgtttatttcttttgccatgggggccacggagtgcatgatcttaggcacgatggcactggaccgctatgtggccatctgctacccactgagataccctgtcatcatgagcaagggtgcctatgtggccatggcagctgggtcctgggtcactgggcttgtggactcagtagtgcagacagcttttgcaatgcagttaccattctgtgctaataatgtcattaaacattttgtctgtgaaattctggctatcttgaaactggcctgtgctgatatttcaatcaatgtgattagtatgacagggtcgaatctgattgttctggttattccattgttagtaatttccatctcttacatatttattgttgccactattctgaggattccttccactgaaggaaaacataaggccttctccacctgctcagcccacctgacagtggtgattatattctatggaaccatcttcttcatgtacgcaaagcctgagtctaaagcctctgttgattcaggtaatgaagacatcattgaggccctcatctcccttttctatggagtgatgactcccatgcttaatcctctcatctatagtctgcgaaacaaggatgtaaaggctgctgtcaaaaacatactgtgtaggaaaaacttttctgatggaaaatgaatactgatttatactacatgacttaatattcaatgctgctgcagacataaaattcagaaagataaaattaccatgtgaaaacaaattttgccatgtggcattcaaaaccatatggtagaaatatttttgggccaggcacagtggctcatgcctataatcccagcactttgggaggccaaggaaggtgggtcacctgaggt

SEQ ID NO: 528 - protein, 320 aa, Homo sapiens
MERTNDSTSTEFFLVGLSAHPKLQTVFFVLILWMYLMILLGNGVLISVIIFDSHLHTPMYFFLCNLSFLDVCYTSSSVPLILASFLAVKKKVSFSGCMVQMFISFAMGATECMILGTMALDRYVAICYPLRYPVIMSKGAYVAMAAGSWVTGLVDSVVQTAFAMQLPFCANNVIKHFVCEILAILKLACADISINVISMTGSNLIVLVIPLLVISISYIFIVATILRIPSTEGKHKAFSTCSAHLTVVIIFYGTIFFMYAKPESKASVDSGNEDIIEALISLFYGVMTPMLNPLIYSLRNKDVKAAVKNILCRKNFSDGK

SEQ ID NO: 529 - DNA, 1351 bp, Homo sapiens
  source
  (1)..(1351)
  CDS (201)..(1151)
ttctctaaatgtctcttgggtatttccttgcattcccagtgagattcagagattcttattggcaaagaccatttatttttcttttctttttctcccagcacagttctggccacacagatgcatatctgtaaattgatctaataaataaatactgacacatggaaggtttttatctgcgcagatcacacgaactacaagggatgggaaaaccaggcagagtgaaccaaaccactgtttcagacttcctccttctaggactctctgagtggccagaggagcagcctcttctgtttggcatcttccttggcatgtacctggtcaccatggtggggaacctgctcattatcctggccatcagctctgacccacacctccatactcccatgtacttctttctggccaacctgtcattaactgatgcctgtttcacttctgcctccatccccaaaatgctggccaacattcatacccagagtcagatcatctcgtattctgggtgtcttgcacagctatatttcctccttatgtttggtggccttgacaactgcctgctggctgtgatggcatatgaccgctatgtggccatctgccaaccactccattacagcacatctatgagtccccagctctgtgcactaatgctgggtgtgtgctgggtgctaaccaactgtcctgccctgatgcacacactgttgctgacccgcgtggctttctgtgcccagaaagccatccctcatttctattgtgatcctagtgctctcctgaagcttgcctgctcagatacccatgtaaacgagctgatgatcatcaccatgggcttgctgttcctcactgttcccctcctgctgatcgtcttctcctatgtccgcattttctgggctgtgtttgtcatctcatctcctggagggagatggaaggccttctctacctgtggttctcatctcacggtggttctgctcttctatgggtctcttatgggtgtgtatttacttcctccatcaacttactctacagagagggaaagtagggctgctgttctctatatggtgattattcccacgctaaacccattcatttatagcttgaggaacagagacatgaaggaggctttgggtaaactttttgtcagtggaaaaacattctttttatgattagacatctagacggtgatgtctaatcttgatcaacccctccctgtcttccatcacttcagtaattctactactgtcatgttgatattaggggaaggttatccgttgactctgagttagggatgtaaaaaaaaaaaaaagagtgtttcattcttttattaggctgtggaatgagatgttctgtctcagcctctttcctg

SEQ ID NO: 530 - protein, 316 aa, Homo sapiens
MGKPGRVNQTTVSDFLLLGLSEWPEEQPLLFGIFLGMYLVTMVGNLLIILAISSDPHLHTPMYFFLANLSLTDACFTSASIPKMLANIHTQSQIISYSGCLAQLYFLLMFGGLDNCLLAVMAYDRYVAICQPLHYSTSMSPQLCALMLGVCWVLTNCPALMHTLLLTRVAFCAQKAIPHFYCDPSALLKLACSDTHVNELMIITMGLLFLTVPLLLIVFSYVRIFWAVFVISSPGGRWKAFSTCGSHLTVVLLFYGSLMGVYLLPPSTYSTERESRAAVLYMVIIPTLNPFIYSLRNRDMKEALGKLFVSGKTFFL

SEQ ID NO: 531 - DNA, 1345 bp, Homo sapiens
  source
  (1)..(1345)
  CDS (201)..(1145)
tattaggttggtgcaaaagtaattgtggtttttagcagtacttttaataatgatgatgttaatgaaaaatccatattatcttggaaaagtcataagcacttaatccctttatcagcacagtgtgtagtttacactggggcacaacagtgactatatgtccaagtctatagaactaattctttttgttcttatggcaacagatggacaacagcaactggaccagtgtgtcccattttgttctcttgggcatttccacccacccagaagagcaaatcccactcttccttgttttctcactcatgtacgcaatcaatatttctggcaacttggccatcatcacactgattctctctgctccacgcctccacatccccatgtacatcttcctcagtaacttggccttgacagacatctgcttcacctccaccacggtccccaagatgctgcagattattttctcccctacaaaggtaatttcctacacaggctgtttagcccaaacttatttcttcatttgcttcgccgtcatggaaaacttcatcctggctgtgatggcctatgacaggtacattgccatctgccaccctttccactacactatgatcctgactagaatgctgtgtgtgaagatggtggtcatgtgccatgctctctcccaccttcatgccatgctgcatacctttctcataggccaactaatcttctgtgcagataacagaatcccccacttcttctgtgacctctacgctctgatgaagatctcctgcaccagcacctacctcaacacccttatgattcacacagaaggtgctgttgtaatcagtggagctctggccttcattactgcctcctatgcctgcatcatcctggtggtcctccggatcccctcagccaagggcaggtggaaaaccttttctacctgcggctcccacctcactgtggtggccatattctatggcaccctcagttgggtctacttccggcccctttccagctattcagtgaccaagggtcgcattataacagtcgtgtacacagtggtgactcccatgctgaaccccttcatctacagcctgaggaatggggatgtcaagggaggcttcatgaaatggatgagcagaatgcagacttttttctttagataaaaccccaaacacagttcagaggtttacctatggttctggagaaataatgttgtgcctcacagatctgctttctttagaactttccagaaatatctaaattagctatatatcatgtgttttctcactggatattgcccagagaaatctattaaatccaaagtacataaaacaaaaaggaaccaccatgtacttagtgtaaa

SEQ ID NO: 532 - protein, 314 aa, Homo sapiens
MDNSNWTSVSHFVLLGISTHPEEQIPLFLVFSLMYAINISGNLAIITLILSAPRLHIPMYIFLSNLALTDICFTSTTVPKMLQIIFSPTKVISYTGCLAQTYFFICFAVMENFILAVMAYDRYIAICHPFHYTMILTRMLCVKMVVMCHALSHLHAMLHTFLIGQLIFCADNRIPHFFCDLYALMKISCTSTYLNTLMIHTEGAVVISGALAFITASYACIILVVLRIPSAKGRWKTFSTCGSHLTVVAIFYGTLSWVYFRPLSSYSVTKGRIITVVYTVVTPMLNPFIYSLRNGDVKGGFMKWMSRMQTFFFR

SEQ ID NO: 533 - DNA, 1333 bp, Homo sapiens
  source
  (1)..(1333)
  CDS (201)..(1133)
gcaggcaactgagattaaaatatatattaatttctaaatatcccacattaatggaaagaaaccacaatccagataattgtaatgttttaaattttttctttgctgataagaagaataaaaggagaaattttggacagattgtatcagatgttggaagaatctgttacagtgttagtttatctttaggtgaacccacaactatgggaagaaataacctaacaagaccctctgaattcatcctccttggactctcctctcgacctgaggatcagaagccgctctttgctgtgttcctccccatctaccttatcacagtgataggaaacctgcttatcatcctggccatccgctcagacactcgtctccagacgcccatgtacttctttctaagcatcctgtcttttgttgacatttgctatgtgacagtcattatccctaagatgctggtgaacttcttatcagagacaaagaccatctcttacggtgagtgtctgacccagatgtactttttcttagcctttggaaacacagacagttacctgctagcagccatggccattgaccgctatgtggccatatgtaatcccttccactacatcaccattatgagtcacagatgctgtgtcctgcttctggttctctccttctgcattccacattttcactccctcctgcacattcttctgactaatcagctcatcttctgtgcctccaatgtcatccatcactttttctgcgatgatcaaccagtgctaaaattgtcctgttcctcccattttgtcaaagaaatcacagtaatgacagaaggcttggctgtcataatgaccccgttttcatgcatcatcatctcttatttaagaatcctcatcactgttctgaagattccttcagctgctggaaagcgtaaagcattttctacctgtggctctcatctcacagtggtgaccctgttttatggaagcattagctatgtctattttcagcccctgtccaactatactgtcaaggatcaaatagcaacaattatctacaccgtactgactcctatgctaaatccatttatctatagtctgaggaacaaagacatgaagcagggtttggcaaagttgatgcacaggatgaaatgtcagtaaaagacctaaggtcttaagagaataccacagatctcttgccctggactataggttattaatgggtatgtgattctgaaatgattattagattctgaaaggatagtaccttcaatgatggtgtttcattccttacagaagaatgtttattgcatgtattgaagctactcctgaatataatgcctacaaactaagttggatca

SEQ ID NO: 534 - protein, 310 aa, Homo sapiens
MGRNNLTRPSEFILLGLSSRPEDQKPLFAVFLPIYLITVIGNLLIILAIRSDTRLQTPMYFFLSILSFVDICYVTVIIPKMLVNFLSETKTISYGECLTQMYFFLAFGNTDSYLLAAMAIDRYVAICNPFHYITIMSHRCCVLLLVLSFCIPHFHSLLHILLTNQLIFCASNVIHHFFCDDQPVLKLSCSSHFVKEITVMTEGLAVIMTPFSCIIISYLRILITVLKIPSAAGKRKAFSTCGSHLTVVTLFYGSISYVYFQPLSNYTVKDQIATIIYTVLTPMLNPFIYSLRNKDMKQGLAKLMHRMKCQ

SEQ ID NO: 535 - DNA, 1327 bp, Homo sapiens
  source
  (1)..(1327)
  CDS (201)..(1127)
ctgtaatattggggtgtttatcttaatcaatatgccctaatgcatctctatctttcatgcagtgatgtgaggtgtggaagaaacacgggagcagccttcctcaggacacctcttgtttatctctctagctctgaaatcacatgaagctgtggatggagagtcacctgatagtcccagaaacccgtcccagcccaaggatgatgagtaaccagacgttggtaaccgagttcatcctgcagggcttttcggagcacccagaataccgggtgttcttattcagctgtttcctcttcctctactctggggccctcacaggtaatgtcctcatcaccttggccatcacgttcaaccctgggctccacgctcctatgtactttttcttactcaacttggctactatggacattatctgcacctcttccatcatgcccaaggcgctggccagtctggtgtcggaagagagctccatctcctacgggggctgcatggcccagctctatttcctcacgtgggctgcatcctcagagctgctgctcctcacggtcatggcctatgaccggtacgcagccatctgccacccgctgcattacagcagcatgatgagcaaggtgttctgcagcgggctggccacagccgtgtggctgctctgcgccgtcaacacggccatccacacggggctgatgctgcgcttggatttctgtggccccaatgtcattatccatttcttctgcgaggtccctcccctgctgcttctctcctgcagctccacctacgtcaacggtgtcatgattgtcctggcggatgctttctacggcatagtgaacttcctgatgaccatcgcgtcctatggcttcatcgtctccagcatcctgaaggtgaagactgcctgggggaggcagaaagccttctccacctgctcttcccacctcaccgtggtgtgcatgtattacaccgctgtcttctacgcctacataagcccggtctctggctacagcgcagggaagagcaagttggctggcctgctgtacactgtgctgagtcctaccctcaaccccctcatctatactttgagaaacaaggaggtcaaagcagccctcaggaagcttttccctttcttcagaaattaacttgtgtcttctgaagtttttgtccttggagactgcagttttagtggagtctgatgagcaagtttctggactgggaggtaaatagacttgttttttctaacccagcagaacctgtgcatggatgagctgggagtgctggttccctgagacttggtgatggggggattgcggtaggtgtgacccaccagcctctgagacac

SEQ ID NO: 536 - protein, 308 aa, Homo sapiens
MSNQTLVTEFILQGFSEHPEYRVFLFSCFLFLYSGALTGNVLITLAITFNPGLHAPMYFFLLNLATMDIICTSSIMPKALASLVSEESSISYGGCMAQLYFLTWAASSELLLLTVMAYDRYAAICHPLHYSSMMSKVFCSGLATAVWLLCAVNTAIHTGLMLRLDFCGPNVIIHFFCEVPPLLLLSCSSTYVNGVMIVLADAFYGIVNFLMTIASYGFIVSSILKVKTAWGRQKAFSTCSSHLTVVCMYYTAVFYAYISPVSGYSAGKSKLAGLLYTVLSPTLNPLIYTLRNKEVKAALRKLFPFFRN

SEQ ID NO: 537 - DNA, 1339 bp, Homo sapiens
  source
  (1)..(1339)
  CDS (201)..(1139)
atgtcctgtctttttctaaggcattttccaaatctctgcactgctgaaatacttccttattaagtagcacttccacttaataagcagaagaaactttattcaagtgacttactgcaatggctgcagccaaatgataccatgttaggttttcttgtaggaatatgaagacttttagttcctttcttcagatcggcagaaatatgcatcaaggaaaccaaaccaccatcactgaattcattctcctgggatttttcaagcaggatgagcatcaaaacctcctctttgtgcttttcttgggtatgtacctggtcactgtgattgggaacgggctcatcattgtggctatcagcttggatacgtaccttcatacccccatgtatctcttccttgccaatctatcctttgctgatatttcctccatttccaactcagtccccaaaatgctggtgaatattcaaaccaagagtcaatccatctcttatgagagctgcatcacacagatgtacttttctattgtgtttgtcgtcattgacaatttgctcttggggaccatggcctatgaccactttgtggcgatctgccaccctctgaattatacaattctcatgcggcccaggttcggcattttgctcacagtcatctcatggttcctcagtaatattattgctctgacacacacccttctgctcattcaattgctcttctgtaaccacaacactctcccacacttcttctgtgacttggcccctctgctcaaactgtcctgttcagatacattgatcaatgagcttgtgttgtttattgtgggtttatcagttatcatcttcccctttacactcagcttcttttcctatgtctgcatcatcagagctgtcctgagagtatcttccacacagggaaagtggaaagccttctccacttgtggctctcacctgacagttgtattactgttctacggaaccattgtaggcgtgtactttttcccctcctccactcaccctgaggacactgataagattggtgctgtcctattcactgtggtgacacccatgataaaccccttcatctacagcttgaggaataaggatatgaaaggtgccctgagaaagctcatcaatagaaaaatttcttccctttgatgccctggacctctacattcttttagtccacataatcagataaatgattcagcccagagcgtatggcacagttgtgatggttcaacttttgatgaacttgcaggtatctgtctcctattccaacctctgaaggggttggagcttttccacttagctcttgtcttggaaacaaaacctgtaactgccatggtaagtcacaa

SEQ ID NO: 538 - protein, 312 aa, Homo sapiens
MHQGNQTTITEFILLGFFKQDEHQNLLFVLFLGMYLVTVIGNGLIIVAISLDTYLHTPMYLFLANLSFADISSISNSVPKMLVNIQTKSQSISYESCITQMYFSIVFVVIDNLLLGTMAYDHFVAICHPLNYTILMRPRFGILLTVISWFLSNIIALTHTLLLIQLLFCNHNTLPHFFCDLAPLLKLSCSDTLINELVLFIVGLSVIIFPFTLSFFSYVCIIRAVLRVSSTQGKWKAFSTCGSHLTVVLLFYGTIVGVYFFPSSTHPEDTDKIGAVLFTVVTPMINPFIYSLRNKDMKGALRKLINRKISSL

SEQ ID NO: 539 - DNA, 1339 bp, Homo sapiens
  source
  (1)..(1339)
  CDS (201)..(1139)
tgtggcattttccaaatctctgcactgctgaaatacttccttattaagtagcacttccacttaataagcagaagaagctttattgctcatcagcttaaaggaagtgccttactgtaatggctgcagccaaatgacaccatgttaaattttcttgtaggtgtatgaagactttgtgttcctttcttcagatcagcagaaatatgcatcaagaaaaccaaaccaccatcactgaattcattctcctgggactctccaaccaggctgaacatcaaaacctcctctttgtgcttttcctgagtatgtatgtggtcactgtggttgggaacgggctcatcattgtggctatcagcttggatatataccttcacacccccatgtatctcttccttgcctacctatcctttgctgatatttcctccatttccaactcagtccccaaaatgctggtgaatattcaaaccaacagccaatccatctcttatgagagctgcatcacacagatgtacttttctattgtgtttgtcgtcactgacaatttgcttttggggaccatggccttcgaccactttgtggcgatctgccaccctctgaactatacaactttcatgcgggccaggttcggcactttgctcacagtcatctcgtggttcctcagtaatattattgctcttacacacacccttctgctcattcaattgctcttctgtgaccacaacactctcccacacttcttctgtgacttggcccctctgctcaaactgtcctgttcagatacaatgatcaatgagcttgtgttgtttattgtgggtttatcagttatcatcttcccctttgtactcatcttcttctcctatgtctgcatcatcagagctgtcctgggagtatcatccacacagggaaagtggaaagccttctccacttgtggctctcacctgacaattgcattactgttctacggaaccactgtaggcgtgtactttttcccctcctccactcaccctgaggacactgataagattggtgctgtcctattcactgtggtgacacccatgatgaaccccttcatctacagcttgaggaataaggatatgaaaggtgccctgagaaagctcatcaatagaaaaatttcttccctttgatgccctggacatctacattcttttagtccacataatcagataaatgattcagcccagagtgtatgacacagttgtgacggttcaacttttgatgaacttgcagatgtctgtctcctattccaacctctaaggggattggagcttttccacttagctcttgtcttggaaacaaaatctgtaactgccatggtaagtcacaa

SEQ ID NO: 540 - protein, 312 aa, Homo sapiens
MHQENQTTITEFILLGLSNQAEHQNLLFVLFLSMYVVTVVGNGLIIVAISLDIYLHTPMYLFLAYLSFADISSISNSVPKMLVNIQTNSQSISYESCITQMYFSIVFVVTDNLLLGTMAFDHFVAICHPLNYTTFMRARFGTLLTVISWFLSNIIALTHTLLLIQLLFCDHNTLPHFFCDLAPLLKLSCSDTMINELVLFIVGLSVIIFPFVLIFFSYVCIIRAVLGVSSTQGKWKAFSTCGSHLTIALLFYGTTVGVYFFPSSTHPEDTDKIGAVLFTVVTPMMNPFIYSLRNKDMKGALRKLINRKISSL

SEQ ID NO: 541 - DNA, 1369 bp, Homo sapiens
  source
  (1)..(1369)
  CDS (201)..(1169)
aataaacagcaaggaagcactagactagagcagaacaaaactgtaagatgaacttgtacatctttctcttgcttactgggtaagaccaaggtggtgtggcttgatggataatgacatctcaggaaagggatacagctatttattccattaatgtcagttttgttgcaaaggggatgactagccgctctgtgtgtgagaagatgaccatgacaacggagaaccccaaccagactgtggtgagccacttcttcctggagggtttgaggtacaccgctaaacattctagcctcttcttcctcctcttcctcctcatctacagcatcactgtggctgggaatctcctcatcctcctaactgtgggctctgactctcacctcagcttacccatgtaccacttcctggggcacctctccttcctggatgcctgtttgtctacagtgacagtgcccaaggtcatggcaggcctgctgactctggatgggaaggtgatctcctttgagggctgtgccgtacagctttattgcttccactttctggccagcactgagtgcttcctgtacacagtcatggcctatgaccgctatctggctatctgtcaacccctgcactacccagtggccatgaacagaaggatgtgtgcagaaatggctggaatcacctgggccataggtgccacgcacgctgcaatccacacctccctcaccttccgcctgctctactgtgggccttgccacattgcctacttcttctgcgacataccccctgtcctaaagctcgcctgtacagacaccaccattaatgagctagtcatgcttgccagcattggcatcgtggctgcaggctgcctcatcctcatcgttatttcctacatcttcatcgtggcagctgtgttgcgcatccgcacagcccagggccggcagcgggccttctccccctgcactgcccagctcactggggtgctcctgtactacgtgccacctgtctgtatctacctgcagcctcgctccagtgaggcaggagctggggcccctgctgtcttctacacaatcgtaactccaatgctcaacccattcatttacactttgcggaacaaggaggtgaagcatgctctgcaaaggcttttgtgcagcagcttccgagagtctacagcaggcagcccacccccatagtctgtgctatcaaaactcacaatttgcctgccaggaaagcaactattcacatctcaaatcattcaggtggaaatcagaataactgagttgcaactcagtcacacactttcccccagctttggccaaatggtctacctcactctctcccttgcaaacacttcatctagaaaatgaggaggctggattagatgatgtctaga

SEQ ID NO: 542 - protein, 322 aa, Homo sapiens
MTMTTENPNQTVVSHFFLEGLRYTAKHSSLFFLLFLLIYSITVAGNLLILLTVGSDSHLSLPMYHFLGHLSFLDACLSTVTVPKVMAGLLTLDGKVISFEGCAVQLYCFHFLASTECFLYTVMAYDRYLAICQPLHYPVAMNRRMCAEMAGITWAIGATHAAIHTSLTFRLLYCGPCHIAYFFCDIPPVLKLACTDTTINELVMLASIGIVAAGCLILIVISYIFIVAAVLRIRTAQGRQRAFSPCTAQLTGVLLYYVPPVCIYLQPRSSEAGAGAPAVFYTIVTPMLNPFIYTLRNKEVKHALQRLLCSSFRESTAGSPPP

SEQ ID NO: 543 - DNA, 1372 bp, Homo sapiens
  source
  (1)..(1372)
  CDS (201)..(1172)
caatattgccatgctgcttactattgtaatttgtttctctctttgtaagtcacgtgcagaccaaactatagatcaacatattctcagaatgtaaggaagtgttgggtgttcaatattattttaccgattggttaaatgatgattggtagctatagaccagttacagagttctgtttcatttcccctgcaggtgactgaagatgaaccctgaaaactggactcaggtaacaagctttgtccttctgggtttccccagtagccacctcatacagttcctggtgttcctggggttaatggtgacctacattgtaacagccacaggcaagctgctaattattgtgctcagctggatagaccaacgcctgcacatacagatgtacttcttcctgcggaatttctccttcctggagctgttgctggtaactgttgtggttcccaagatgcttgtcgtcatcctcacgggggatcacaccatctcatttgtcagctgcatcatccagtcctacctctacttctttctaggcaccactgacttcttcctcttggccgtcatgtctctggatcgttacctggcaatctgccgaccactccgctatgagaccctgatgaatggccatgtctgttcccaactagtgctggcctcctggctagctggattcctctgggtcctttgccccactgtcctcatggccagcctgcctttctgtggccccaatggtattgaccacttctttcgtgacagttggcccttgctcaggctttcttgtggggacacccacctgctgaaactggtggctttcatgctctctacgttggtgttactgggctcactggctctgacctcagtttcctatgcctgcattcttgccactgttctcagggcccctacagctgctgagcgaaggaaagcgttttccacttgcgcctcgcatcttacagtggtggtcatcatctatggcagttccatctttctctacattcgtatgtcagaggctcagtccaaactgctcaacaaaggtgcctccgtcctgagctgcatcatcacacccctcttgaacccattcatcttcactctccgcaatgacaaggtgcagcaagcactgagagaagccttggggtggcccaggctcactgctgtgatgaaactgagggtcacaagtcaaaggaaatgatcttattaaatgggagattaaatgtttattgaaaattttttaaatgtgcaagaagtttaagggatgtaggcaacactgttcacttttctcagctaatgaaagaacagtcttcataaatatacaacatgaaatacggtggtaaaccttcattttccctccctacaaccttccttgtgcctcctcctccccacagagaaggc

SEQ ID NO: 544 - protein, 323 aa, Homo sapiens
MNPENWTQVTSFVLLGFPSSHLIQFLVFLGLMVTYIVTATGKLLIIVLSWIDQRLHIQMYFFLRNFSFLELLLVTVVVPKMLVVILTGDHTISFVSCIIQSYLYFFLGTTDFFLLAVMSLDRYLAICRPLRYETLMNGHVCSQLVLASWLAGFLWVLCPTVLMASLPFCGPNGIDHFFRDSWPLLRLSCGDTHLLKLVAFMLSTLVLLGSLALTSVSYACILATVLRAPTAAERRKAFSTCASHLTVVVIIYGSSIFLYIRMSEAQSKLLNKGASVLSCIITPLLNPFIFTLRNDKVQQALREALGWPRLTAVMKLRVTSQRK

SEQ ID NO: 545 - DNA, 1357 bp, Homo sapiens
  source
  (1)..(1357)
  CDS (201)..(1157)
ggagtttgatatcaccaatatatgatgttcaaatgcttggtgtcctgcagaaccacttacaacattctccttatggaaaatgaaagagtgaagaatttcccagaggaagcagagggaattattttagagaactttgcagatcccctgaataatatgtccttttttcttagcaggttcattgacaaggtcataccaaccagatgaatccagcaaatcattcccaggtggcaggatttgttctactggggctctctcaggtttgggagcttcggtttgttttcttcactgttttctctgctgtgtattttatgactgtagtgggaaaccttcttattgtggtcatagtgacctccgacccacacctgcacacaaccatgtattttctcttgggcaatctttctttcctggacttttgctactcttccatcacagcacctaggatgctggttgacttgctctcaggcaaccctaccatttcctttggtggatgcctgactcaactcttcttcttccacttcattggaggcatcaagatcttcctgctgactgtcatggcgtatgaccgctacattgccatttcccagcccctgcactacacgctcattatgaatcagactgtctgtgcactccttatggcagcctcctgggtggggggcttcatccactccatagtacagattgcattgactatccagctgccattctgtgggcctgacaagctggacaacttttattgtgatgtgcctcagctgatcaaattggcctgcacagatacctttgtcttagagcttttaatggtgtctaacaatggcctggtgaccctgatgtgttttctggtgcttctgggatcgtacacagcactgctagtcatgctccgaagccactcacgggagggccgcagcaaggccctgtctacctgtgcctctcacattgctgtggtgaccttaatctttgtgccttgcatctacgtctatacaaggccttttcggacattccccatggacaaggccgtctctgtgctatacacaattgtcacccccatgctgaatcctgccatctataccctgagaaacaaggaagtgatcatggccatgaagaagctgtggaggaggaaaaaggaccctattggtcccctggagcacagacccttacattagcagaggcagtgacctgagaatctgaaagatgctacagggtattagcctgctggataggaccctcgaggtagataaaatctatgcctacttcttctccattgttcttaacctcaatcaggttctggtgacctgaactattagccacaatagaagatgggatgagtgtcttagaactgcttctaaatgcctcccagataaaa

SEQ ID NO: 546 - protein, 318 aa, Homo sapiens
MNPANHSQVAGFVLLGLSQVWELRFVFFTVFSAVYFMTVVGNLLIVVIVTSDPHLHTTMYFLLGNLSFLDFCYSSITAPRMLVDLLSGNPTISFGGCLTQLFFFHFIGGIKIFLLTVMAYDRYIAISQPLHYTLIMNQTVCALLMAASWVGGFIHSIVQIALTIQLPFCGPDKLDNFYCDVPQLIKLACTDTFVLELLMVSNNGLVTLMCFLVLLGSYTALLVMLRSHSREGRSKALSTCASHIAVVTLIFVPCIYVYTRPFRTFPMDKAVSVLYTIVTPMLNPAIYTLRNKEVIMAMKKLWRRKKDPIGPLEHRPLH

SEQ ID NO: 547 - DNA, 1339 bp, Homo sapiens
  source
  (1)..(1339)
  CDS (201)..(1139)
aaagaaccagccaaatcatcagtaaagaaggggtggccagtgcgtatttgtatgtgggtgagggaggacctgaaatagagtcaggtcccgaaggaccttacatagtcagaatcctccttattttttgtcccaactataatcaactgtgctctaagattctaaggagctttcttgcttgtctttctagggtatcaagggacatgagaaatggcacagtaatcacagaattcatcctgctaggctttcctgttatccaaggcctacaaacacctctctttattgcaatctttctcacctacatattaacccttgcaggcaatgggcttattattgccactgtgtgggctgagcccaggctacaaattccaatgtacttcttcctttgtaacttgtctttcttagaaatctggtacaccaccacagtcatccccaaactgctaggaacctttgtagtggcaagaacagtaatctgcatgtcctgctgcctgctgcaggccttcttccacttcttcgtgggcaccaccgagttcttgatcctcactatcatgtcttttgaccgctacctcaccatctgcaatccccttcaccaccccaccatcatgaccagcaaactctgcctgcagctggccctgagctcctgggtggtgggcttcaccattgtcttttgtcagacgatgctgctcatccagttgccattctgtggcaataatgttatcagtcatttctactgtgatgttgggcccagtttgaaagccgcctgcatagacaccagcattttggaactcctgggcgtcatagcaaccatccttgtgatcccagggtcacttctctttaatatgatttcttatatctacattctgtccgcaatcctacgaattccttcagccactggccaccaaaagactttctctacctgtgcctcgcacctgacagttgtctccctgctctacggggctgttctgttcatgtacctaagacccacagcacactcctcctttaagattaataaggtggtgtctgtgctaaatactatcctcaccccccttctgaatccctttatttatactattagaaacaaggaggtgaagggagccttaagaaaggcaatgacttgcccaaagactggtcatgcaaagtaaaacatgcaacacatcaaagtgagcttaatgcagataaaaacaatgaaagttgagagaggattttggagaagtttggtaaaacaggctccccccaaatcccagaagttctgattcaatgctatagtaagataaagatgcaaaagcaaaccatgatggttaaggtctcccatgagaacttgttacatgtaaatgaactagga

SEQ ID NO: 548 - protein, 312 aa, Homo sapiens
MRNGTVITEFILLGFPVIQGLQTPLFIAIFLTYILTLAGNGLIIATVWAEPRLQIPMYFFLCNLSFLEIWYTTTVIPKLLGTFVVARTVICMSCCLLQAFFHFFVGTTEFLILTIMSFDRYLTICNPLHHPTIMTSKLCLQLALSSWVVGFTIVFCQTMLLIQLPFCGNNVISHFYCDVGPSLKAACIDTSILELLGVIATILVIPGSLLFNMISYIYILSAILRIPSATGHQKTFSTCASHLTVVSLLYGAVLFMYLRPTAHSSFKINKVVSVLNTILTPLLNPFIYTIRNKEVKGALRKAMTCPKTGHAK

SEQ ID NO: 549 - DNA, 1162 bp, Homo sapiens
  source
  (1)..(1162)
  CDS (201)..(962)
ttcagttggcaccattcccaatatagatggggactggaaatgacaccactgtggtagagtttactcttttggggttatctgaggatactacagtttgtgctattttatttcttgtgtttctaggaatttatgttgtcaccttaatgggtaatatcagcataattgtattgatcagaagaagtcatcatcttcatacacccatgtacattttcctctgccatttggcctttgtagacattgggtactcctcatcagtcacacctgtcatgctcatgagcttcctaaggaaagaaacctctctccctgttgctggttgtgtggcccagctctgttctgtagtgacgtttggtacggccgagtgcttcctgctggctgccatggcctatgatcgctatgtggccatctgctcacccctgctctactctacctgcatgtcccctggagtctgcatcatcttagtgggcatgtcctacctgggtggatgtgtgaatgcttggacattcattggctgcttattaagactgtccttctgtgggccaaataaagtcaatcactttttctgtgactattcaccacttttgaagcttgcttgttcccatgattttacttttgaaataattccagctatctcttctggatctatcattgtggccactgtgtgtgtcatagccatatcctacatctatatcctcatcaccatcctgaagatgcactccaccaagggccgccacaaggccttctccacctgcacctcccacctcactgcagtcactctgttctatgggaccattaccttcatttatgtgatgcccaagtccagctactcaactgaccagaacaaggtggtgtctgtgttctacaccgtggtgattcccatgttgaaccccctgatctacagcctcaggaacaaggagattaagggggctctgaagagagagcttagaataaaaatattttcttgatgaaactagttagtttgaagaatctgatatattaatattctatatataataataataagacaccgagtgtttgtggtcaaaatttatctgtccatagaccattacccagtgtggagctttttagtcaatcaggagggaagattttcagatagaataggaaattagaagtccatcttgctttacctttaataaaatttaat

SEQ ID NO: 550 - protein, 253 aa, Homo sapiens
MYIFLCHLAFVDIGYSSSVTPVMLMSFLRKETSLPVAGCVAQLCSVVTFGTAECFLLAAMAYDRYVAICSPLLYSTCMSPGVCIILVGMSYLGGCVNAWTFIGCLLRLSFCGPNKVNHFFCDYSPLLKLACSHDFTFEIIPAISSGSIIVATVCVIAISYIYILITILKMHSTKGRHKAFSTCTSHLTAVTLFYGTITFIYVMPKSSYSTDQNKVVSVFYTVVIPMLNPLIYSLRNKEIKGALKRELRIKIFS

SEQ ID NO: 551 - DNA, 1330 bp, Homo sapiens
  source
  (1)..(1330)
  CDS (201)..(1130)
agtatttcccttttaaattatttatttagcacattcttagaagtcaaatgcctagatggagaatacatgggtaaaaacaaagaacaaattccctgaggtcctggaaatacaagaagccaaattagtcactaattataaatcatatcttgcttatttaggattctcaactctcagctggaactcatatcaacacctgagaaatggaaaatcaaaacaatgtgactgaattcattcttctgggtctcacagagaacctggagctgtggaaaatattttctgctgtgtttcttgtcatgtatgtagccacagtgctggaaaatctacttattgtggtaactattatcacaagtcagagtctgaggtcacctatgtatttttttcttaccttcttgtcccttttggatgtcatgttctcatctgtcgttgcccccaaggtgattgtagacaccctctccaagagcactaccatctctctcaaaggctgcctcacccagctgtttgtggagcatttctttggtggtgtggggatcatcctcctcactgtgatggcctatgaccgctacgtggccatctgtaagcccctgcactacacgatcatcatgagtccacgggtgtgctgcctaatggtaggaggggcttgggtggggggatttatgcacgcaatgatacaacttctcttcatgtatcaaatacccttctgtggtcctaatatcatagatcactttatatgtgatttgtttcagttgttgacacttgcctgcacggacacccacatcctgggcctcttagttaccctcaacagtgggatgatgtgtgtggccatctttcttatcttaattgcgtcctacacggtcatcctatgctccctgaagtcttacagctctaaagggcggcacaaagccctctctacctgcagctcccacctcacggtggttgtattgttctttgtcccctgtattttcttgtacatgaggcctgtggtcactcaccccatagacaaggcaatggctgtgtcagactcaatcatcacacccatgttaaatcccttgatctatacactgaggaatgcagaggtgaaaagtgccatgaagaaactctggatgaaatgggaggctttggctgggaaataactgcaatgctgagaacatcatgtatttcccaaaaggagaagtcattctttcagaaatgtgtaagagctaaaactgtccattcctcggtggctgtcaaaggaagctttttttgagacagagtctcactgtgtcacccaggctggagtgcggtggcactatcttggctctgcagtctccacctcctgggtgattattctgcc

SEQ ID NO: 552 - protein, 309 aa, Homo sapiens
MENQNNVTEFILLGLTENLELWKIFSAVFLVMYVATVLENLLIVVTIITSQSLRSPMYFFLTFLSLLDVMFSSVVAPKVIVDTLSKSTTISLKGCLTQLFVEHFFGGVGIILLTVMAYDRYVAICKPLHYTIIMSPRVCCLMVGGAWVGGFMHAMIQLLFMYQIPFCGPNIIDHFICDLFQLLTLACTDTHILGLLVTLNSGMMCVAIFLILIASYTVILCSLKSYSSKGRHKALSTCSSHLTVVVLFFVPCIFLYMRPVVTHPIDKAMAVSDSIITPMLNPLIYTLRNAEVKSAMKKLWMKWEALAGK

SEQ ID NO: 553 - DNA, 1375 bp, Homo sapiens
  source
  (1)..(1375)
  CDS (201)..(1175)
tatggattatcctaggctgacttcctctgaaaagtctttgcctagcaggtggctgggctttaactgggtgtagtttaacttgttgctgactgtttgtatgatcttctaggaaatacccactcttacaataacaaacaaaatctagctgaccacaggattcttaaagaagaaagtaaagactttatgcaggaagcaggcctatggctgtaggaaggaacaacacaattgtgacaaaattcattctcctgggactttcagaccatcctcaaatgaagattttccttttcatgttatttctggggctctacctcctgacgttggcctggaacttaagcctcattgccctcattaagatggactctcacctgcacatgcccatgtacttcttcctcagtaacctgtccttcctggacatctgctatgtgtcctccaccgcccctaagatgctgtctgacatcatcacagagcagaaaaccatttcctttgttggctgtgccactcagtactttgtcttctgtgggatggggctgactgaatgctttctcctggcagctatggcctatgaccggtatgctgcaatctgcaaccccttgctttacacagtcctcatatcccatacactttgtttaaagatggtggttggcgcctatgtgggtggattccttagttctttcattgaaacatactctgtctatcagcatgatttctgtgggccctatatgatcaaccactttttctgtgacctccctccagtcctggctctgtcctgctctgataccttcaccagcgaggtggtgaccttcatagtcagtgttgtcgttggaatagtgtctgtgctagtggtcctcatctcttatggttacattgttgctgctgttgtgaagatcagctcagctacaggtaggacaaaggccttcagcacttgtgcctctcacctgactgctgtgaccctcttctatggttctggattcttcatgtacatgcgacccagttccagctactccctaaacagggacaaggtggtgtccatattctatgccttggtgatccccgtggtgaatcccatcatctacagttttaggaataaggagattaaaaatgccatgaggaaagccatggaaagggaccccgggatttctcacggtggaccattcatttttatgaccttgggctaatgtttacaatgaagctgtgagctaggtgaattgtgcagacatttacataattttaaactagttgatctatagaatgaattgtgggaatcaggcttttttccctcctgcttaagatttcactaatagtttgcctgttggctattagaaaacattttggccattgttgcttgtaaaatgaatagcattgtatagtttgagat

SEQ ID NO: 554 - protein, 324 aa, Homo sapiens
MAVGRNNTIVTKFILLGLSDHPQMKIFLFMLFLGLYLLTLAWNLSLIALIKMDSHLHMPMYFFLSNLSFLDICYVSSTAPKMLSDIITEQKTISFVGCATQYFVFCGMGLTECFLLAAMAYDRYAAICNPLLYTVLISHTLCLKMVVGAYVGGFLSSFIETYSVYQHDFCGPYMINHFFCDLPPVLALSCSDTFTSEVVTFIVSVVVGIVSVLVVLISYGYIVAAVVKISSATGRTKAFSTCASHLTAVTLFYGSGFFMYMRPSSSYSLNRDKVVSIFYALVIPVVNPIIYSFRNKEIKNAMRKAMERDPGISHGGPFIFMTLG

SEQ ID NO: 555 - DNA, 1330 bp, Homo sapiens
  source
  (1)..(1330)
  CDS (201)..(1130)
ggagaggaaagatgaggaggtggcaaatgtataaattataatgctatataatctgctataaaatgaaaacatgcacatcatccctgaggtttctcagcaagtgcctgaatactgaatggagaagttgggaaagcatcatatgaaaccagagatgccttgaggcccatgtcatctttcctcttaggtccaatactctactcatggaaggaataaataaaactgcaaagatgcagtttttctttcgtccattctcacctgaccctgaggtccagatgctgatttttgtggtcttcctgatgatgtatctgaccagcctcggtggaaatgctacaattgcagtcattgttcagatcaatcattccctccacacccccatgtactttttcctggctaatctggcagttctagaaatcttctatacatcttccatcaccccattggccttggcaaacctcctttcaatgggcaaaactcctgtttccatcacgggatgtggcacccagatgtttttctttgtcttcttgggtggggctgattgtgtcctgctggtagtcatggcttatgaccagtttatagcgatctgtcaccctctgcgatacaggctcatcatgagctggtccttgtgtgtggagctgctggtaggctccttggtgctggggttcctgttgtcactgccactcaccattttaatcttccatctcccattctgccacaatgatgagatctaccacttctactgtgacatgcctgcagtcatgcgcctggcttgtgcagacacacgcgttcacaagactgctctgtatatcatcagcttcatcgtccttagcatccccctctcattgatctccatctcctatgtcttcatcgtggtagccattttacggatccggtcagcagaagggcgccagcaagcctactctacctgctcttctcacatcttagtggtcctcctgcagtatggctgcaccagctttatatacttgtcccccagttccagctactctcctgagatgggccgggtggtatctgtggcctacacatttatcactcccattttaaaccccttgatctatagtttgaggaacaaggaactgaaagatgccctaaggaaagcattgagaaaattctaggtaggatgatcctatgatttacttaaattgggacacttctgagagtgaaatgggatgctactaataattttgctgaaaggacatgcataggtgggtgtgtggctcacgcctataatcccagcactttgggaggccaaggcaggcagatcacttgaggttgggagtttgagaccagcctcaccaacatggagaaacccatc

SEQ ID NO: 556 - protein, 309 aa, Homo sapiens
MEGINKTAKMQFFFRPFSPDPEVQMLIFVVFLMMYLTSLGGNATIAVIVQINHSLHTPMYFFLANLAVLEIFYTSSITPLALANLLSMGKTPVSITGCGTQMFFFVFLGGADCVLLVVMAYDQFIAICHPLRYRLIMSWSLCVELLVGSLVLGFLLSLPLTILIFHLPFCHNDEIYHFYCDMPAVMRLACADTRVHKTALYIISFIVLSIPLSLISISYVFIVVAILRIRSAEGRQQAYSTCSSHILVVLLQYGCTSFIYLSPSSSYSPEMGRVVSVAYTFITPILNPLIYSLRNKELKDALRKALRKF

SEQ ID NO: 557 - DNA, 1336 bp, Homo sapiens
  source
  (1)..(1336)
  CDS (201)..(1136)
ctttacatatgataatttgattttatcaccagactaactgaaatctgaaaaacgtgaacaatgcaacaaactgcaaaaactacaaccgcatgggaagtttctgcactgcattctaggtgtttaggaagacaacaaaataaatatcccagtgctttcacatgacatggtttaaaaccaaagagaataaagaggatgattgaatggagatggaaaactgcaccagggtaaaagaatttattttccttggcctgacccagaatcgggaagtgagcttagtcttatttcttttcctactcttggtgtatgtgacaactttgctgggaaacctcctcatcatggtcactgttacctgtgaatctcgccttcacacgcccatgtattttttgctccataatttatctattgccgatatctgcttctcttccatcacagtgcccaaggttctggtggaccttctgtctgaaagaaagaccatctccttcaatcattgcttcactcagatgtttctattccaccttattggaggggtggatgtattttctctttcggtgatggcattggatcgatatgtggccatctccaagcccctgcactatgcgactatcatgagtagagaccattgcattgggctcacagtggctgcctggttggggggctttgtccactccatcgtgcagatttccctgttgctcccactccctttctgcggacccaatgttcttgacactttctactgtgatgtccaccgggtcctcaaactggcccatacagacattttcatacttgaactactaatgatttccaacaatggactgctcaccacactgtggtttttcctgctcctggtgtcctacatagtcatattatcattacccaagtctcaggcaggagagggcaggaggaaagccatctccacctgcacctcccacatcactgtggtgaccctgcatttcgtgccctgcatctatgtctatgcccggcccttcactgccctccccatggataaggccatctctgtcaccttcactgtcatctcccctctgctcaaccccttgatctacactctgaggaaccatgagatgaagtcagccatgaggagactgaagagaagacttgtgccttctgatagaaaatagaaaaaaaaatcctcagctcttcatcaccaaagatatcttatatttattatttttcccatgaagtcatattcatatattcaaatatattgtcaaaccaactacacttagtaataattaatttttctatttatgttagtaagtaactgataagcttctggtcagggagagattcacaccttctaattgaaaataaaccagag

SEQ ID NO: 558 - protein, 311 aa, Homo sapiens
MEMENCTRVKEFIFLGLTQNREVSLVLFLFLLLVYVTTLLGNLLIMVTVTCESRLHTPMYFLLHNLSIADICFSSITVPKVLVDLLSERKTISFNHCFTQMFLFHLIGGVDVFSLSVMALDRYVAISKPLHYATIMSRDHCIGLTVAAWLGGFVHSIVQISLLLPLPFCGPNVLDTFYCDVHRVLKLAHTDIFILELLMISNNGLLTTLWFFLLLVSYIVILSLPKSQAGEGRRKAISTCTSHITVVTLHFVPCIYVYARPFTALPMDKAISVTFTVISPLLNPLIYTLRNHEMKSAMRRLKRRLVPSDRK

SEQ ID NO: 559 - DNA, 1330 bp, Homo sapiens
  source
  (1)..(1330)
  CDS (201)..(1130)
cctgaaacactcacgctggtcttcctgcaaagaagaccagcaaatagcaggacgaggggaggagggcggggaggatgcatcagcagagagcccaggatgtttcactagcaccaaaggctcaagactagccgtccaagattagccttttaatggggttcttgtctcccatgcatccctgcaggcctcccacccagaggagaatggctgcaggaaatcactctacagtgacagagttcattctcaagggtttaacgaagagagcagacctccagctccccctctttctcctcttcctcgggatctacttggtcaccatcgtggggaacctgggcatgatcactctaatttgtctgaactctcagctgcacacccccatgtactactttctcagcaatctgtcactcatggatctctgctactcctccgtcattacccctaagatgctggtgaactttgtgtcagagaaaaacatcatctcctacgcagggtgcatgtcacagctctacttcttccttgtttttgtcattgctgagtgttacatgctgacagtgatggcctacgaccgctatgttgccatctgccaccctttgctttacaacatcattatgtctcatcacacctgcctgctgctggtggctgtggtctacgccatcggactcattggctccacaatagaaactggcctcatgttaaaactgccctattgtgagcacctcatcagtcactacttctgtgacatcctccctctcatgaagctgtcctgctctagcacctatgatgttgagatgacagtcttcttttcggctggattcaacatcatagtcacgagcttaacagttcttgtttcttacaccttcattctctccagcatcctcggcatcagcaccacagaggggagatccaaagccttcagcacctgcagctcccaccttgcagccgtgggaatgttctatggatcaactgcattcatgtacttaaaaccctccacaatcagttccttgacccaggagaatgtggcctctgtgttctacaccacggtaatccccatgttgaatcccctaatctacagcctgaggaacaaggaagtaaaggctgccgtgcagaaaacgctgaggggtaaactgttttgatgcaaatgttattgttccttttcaatttagtggtaattgttataaataccagagtgacagcttctgaatgctggccagctgtggatggaaaataatcacttctccacatggctgggtgaatgggcatttttccttctttcctcttccttccctcttcctttcctcttccttcctcttccttccttcctcttctttcctct

SEQ ID NO: 560 - protein, 309 aa, Homo sapiens
MAAGNHSTVTEFILKGLTKRADLQLPLFLLFLGIYLVTIVGNLGMITLICLNSQLHTPMYYFLSNLSLMDLCYSSVITPKMLVNFVSEKNIISYAGCMSQLYFFLVFVIAECYMLTVMAYDRYVAICHPLLYNIIMSHHTCLLLVAVVYAIGLIGSTIETGLMLKLPYCEHLISHYFCDILPLMKLSCSSTYDVEMTVFFSAGFNIIVTSLTVLVSYTFILSSILGISTTEGRSKAFSTCSSHLAAVGMFYGSTAFMYLKPSTISSLTQENVASVFYTTVIPMLNPLIYSLRNKEVKAAVQKTLRGKLF

SEQ ID NO: 561 - DNA, 1312 bp, Homo sapiens
  source
  (1)..(1312)
  CDS (201)..(1112)
tctgccttcttggaatgctcttcccttctacacataactaactcctactcacctttcaatttccaactcagaagcatctcagctatgcaagggctttcatgtaattcacccactgagtgaagaagtattttgtatcatttcagatcacaccacccaaattgctgcctcttgatgatgacctcttggctaacatacacaacatgactgaattcatttttctggtactttctcccaaccaggaggtgcagagggtttgctttgtgatatttctgttcttgtacacagcaattgtgctggggaatttcctcattgtgctcactgtcatgaccagcagaagccttggttcccccatgtacttcttcctcagctacctctccttcatggagatctgctactcctccgctacagcccccaaactcatctcagatctgctggctgaaaggaaagtcatatcttggtggggctgcatggcacagcttttcttcttgcacttctttggtggcactgagattttcctgctcactgtgatggcctatgaccactatgtggccatctgcaagcccctcagctacaccaccatcatgaactggcaggtgtgtactgtccttgtaggaatagcatgggtgggaggcttcatgcattcctttgcacaaatccttctcatcttccacctgctcttctgtggccccaatgtgatcaatcactatttctgtgacctagttccccttctcaaacttgcctgctctgacaccttcctcattggtctgctgattgttgccaatggaggcaccctgtctgtgatcagttttggggtcctcttagcatcctatatggtcatcttgctccatctgagaacctggagctctgaagggtggtgcaaagccctctccacctgtgggtcccatttcgctgtggttatcttgttctttgggccctgcgtcttcaactctctgaggccttctaccactctgcccatagacaagatggtggctgtgttctacacagtgataaccgcgatcctgaaccctgtcatctactctctgagaaatgctgaaatgaggaaggccatgaagaggctgtggattaggacattgagactaaatgagaaatagaggctgagtctttgtattgatacttgggtttagaatgactgttgagtccaaactgaaggagcagaataggttgaaggaaagttcacaggacctgttagttgcagattattctacctggcctctctctttaaaaagttcattttcataacttgaatagtatttctttttgtggaggtactaattttttaccaccataaata

SEQ ID NO: 562 - protein, 303 aa, Homo sapiens
MTEFIFLVLSPNQEVQRVCFVIFLFLYTAIVLGNFLIVLTVMTSRSLGSPMYFFLSYLSFMEICYSSATAPKLISDLLAERKVISWWGCMAQLFFLHFFGGTEIFLLTVMAYDHYVAICKPLSYTTIMNWQVCTVLVGIAWVGGFMHSFAQILLIFHLLFCGPNVINHYFCDLVPLLKLACSDTFLIGLLIVANGGTLSVISFGVLLASYMVILLHLRTWSSEGWCKALSTCGSHFAVVILFFGPCVFNSLRPSTTLPIDKMVAVFYTVITAILNPVIYSLRNAEMRKAMKRLWIRTLRLNEK

SEQ ID NO: 563 - DNA, 3167 bp, Homo sapiens
  source
  (1)..(3167)
  CDS (201)..(324)
  CDS (2267)..(2967)
tattaggaagaggatcacagggctatggaaaccccctgcggtcctgggagtaatatcatcctctctccctctgaaaataggaagattttcacaggggtgtgtacaccccctgcgatattgggagtaagatcatcctctccacccaggaaatgactaacaaggtcacgagggggtgtactccccctgcgatattgggagtaatgtcgtcctccccaaacctggatgttagcaacgagctcacaaagggggtgtacacaccctgcgacattggaagtaatatgatcctctccccacctggacactgggaaagataccacagcgcgggtatacgtttcctacgctgttgggagtaatatcattcttttcctttctggatattagggagaatatcacaggggtgctgtacaattacttcgacattgggagtaacatcatcctctagtttcctggatattgggcacaaaaacacaaaagggtgtacaacccctgcgatattggaaggaatagaatactctccttccctggatgttagaaaacaatatcaccatggctgaacaccccccaccataatgggagtcatgtttactctttcgcaggccatttggaacaatatcacagggggtgtttacaaacggggtggtgtacaccccctgtgatattgggagtaacatcattctctccacctccggatattaagaacaatatcctggcgggaggtggtacacccccagtgatattgggaataatgtcatcctctccttccctggatattaggaacaaaatcacaggggggtgtacaccttctgtgatattggaagcaatatcatcctctcccgcgctggatattagaaaaaaatatcactcacggtgtacacccactgtgatatgaggagtaatatcttcctagggtattacgaataatttcacagtctgtacacacatggtgtacactcactgtgatattaggagtaatatctacctagtagataacaaataacatcgcagggggtacacccactttgatattagctgtaatatttttctaagttgttacaaataagatcacagagtgtacaaacatggtgtacactcactgtgatatcaggagtcatatctctgtaatacattatgaataatatcacagggtgtacacccactgtattattaggagtaatgtctctgtaggatattacaattaagatcacagggtgtagagcaaccatgatattaggagcaatatctttctaggatattacaaataatatcacagggtgtacacccactctgctgtcaggagcaatatctccctaggatatcaaaaatcctatcacagggtgtccaatctctgccttctaggttctaagggattctcctgcttcagcctcccgagtagttagggttatccgccaccagtcccggctaatttttttttttttaattttcactggagacggggtttcaccacgttggccaggctggtctggaactcctgacctcaggtgatccatcagcctcggccacccaaagtgatgggattacaggtgtgagccatggtgctgggccaagagttatagattcaattcatttggaaacacagctcccatctttgagtgtgcatgtacctttatgaagaaatgatgtcagaaaaccgaaggatgatgataaatatgaaaagtaacaggcatgggaaaaggtcttccgattgagaactataacgtttgatttcgttttcagataatggggtcctagctcttgtgtcgtccttttacatattctacatcaatggaagttgtagcacggtgtcagaataaagtacagtgtatttcacggcttcttaatttctttcaattagactgagatctttttcttaaagagagaaggacattgtcattgcattgtatttttttctgaaaagggtaggccgtattttactgagatcaaggatttgttataagacgttttggtcttctaatattcttcagtggattttctctaaagtagtatgtacagaaagccttgtatagcaaaaaagtaaatcacgtaataattctgagatttttttggaattgtcacaactgagaaacattgctggtggtgtatggtccgcaagtgtgaaaatgttccttctgaattacttgcatcaagcattaagagctggtttttatcttttatttttccaatcctctttccttctcaaggtgtccaagacacacagagccacggaatctcacaggtgtctgagaattcctcctccttggactcccagaggatccagaactgcagccggttctcgctttgctctccctgtccctgtccatgtatctggtcacggtgctgaggaacctgctcatcatcctggctgtcagctctgtctctcccctccacacccccatgtacttcttcctctccaacctgtgctgggctgacatcggtttcacctcggccacggttcccaagatgattgtggacatgcagtcgcatagcagagccatctctcatgcgggctgtctgacgcagatgtctttcttgttcctttttgcatgtatagaaggcatgctcctgactgtgatggcctatgactgctttgtagccatctgtcgccctctgcactacccagtcatcgtgaatcctcacttctgtgtcttcttcgttttggtgtcctttttccttagcctgttggattcccagctgcacagttggattgtgttacaattcaccatcttcaagaatgtggaaatctctaattttgtctgtgacccctctcaacttctcaaacttgcctgttctgacggcgtcatcaatagcatattcatatattttgatagtactatgtttggtttccttcccatttcagggatcctatggtcttactataaaatcgtcccctccattctaaggatttcatcgtcagatgggaagtataaagccttctccacctgtggctctcaccaggcagttgtttgctgattttatagaacaggcattggcatgtacctgacttcagctgtgtcaccaccccccaggaatggtgtggtggcatcattgatatacgctgttgtcactcccatgctgaaccttttcatctacagcctgagaaacagggacatacaaagtgccctgcggaggctgctcagcagaacagtcgaatctcatgatctgttccatcc

SEQ ID NO: 564 - protein, 274 aa, Homo sapiens
MSSSPNLDVSNELTKGVYTPCDIGSNMILSPPGHWERYHSAEDPELQPVLALLSLSLSMYLVTVLRNLLIILAVSSVSPLHTPMYFFLSNLCWADIGFTSATVPKMIVDMQSHSRAISHAGCLTQMSFLFLFACIEGMLLTVMAYDCFVAICRPLHYPVIVNPHFCVFFVLVSFFLSLLDSQLHSWIVLQFTIFKNVEISNFVCDPSQLLKLACSDGVINSIFIYFDSTMFGFLPISGILWSYYKIVPSILRISSSDGKYKAFSTCGSHQAVVC

SEQ ID NO: 565 - DNA, 3147 bp, Homo sapiens
  source
  (1)..(3147)
  CDS (201)..(324)
  CDS (2163)..(2947)
atattaggaagagtatcacagggctgtggaaaccccctgcggtagtgggagtaatatcatcctctctccctctgaatataggaagattttcacaggggggtgtacaccccctgcgatattgggagtaagatcatcctctccacccaggaaatgactaacaaggtcacgggggttgtacaccccctgcgatattgggagtaatgtcgtcctccccaaacctggatgttagcaacgagatcacagaggggctgtacacaccctgcgacattggaagtaatatgatcctgtccccacctggatactgggaaagataccacagcgcgggtatacgtttcctacgctgttgggagtaatatcattcttttcctttctggatattaggaagaatatcacaggggtgctgtacaattacttcgatattgggagtaatatcatcctctattttcctggatattgggcacaaaaacacaaaagggtgtacaacccatgcgatattggaagtaatagcatactctccttccctggatgttagaaaacaatatcatcagggctgaacaccccccgctataatgggagtcctgtgtactctttcacaggccatttggaacaatatcacaaggggtgtttacaaacaggggtggtgtacaccccctgtgatattgggagtaacatcattctctccacctccggatattaagaacaatatcccggcgggaggtggtacaccccccagtgatattgcgaataatgtaatcctctccttccctgtatattaagaacaatatcgcaggggggtgtacatcttctgtgatattggaagcaatatcatcctcttccccgctggatattagaaaaaaatatcactcacagtgtacacccactgtgatatgaggagtaatatcttcctagggtattacgaataatttcacagtctgtacacacatggtgtacactccctgtgatattaggagtaatatctacctagtagatacaaataacatcgcagggtgtacacccactttgatattagctgtaatatttttctaagttgttacaaataagatcacagggtgtacatacatggtgtacactcactgtgatatcaggagtcgtatctctgtaatgtattatgaataatatcacaggttgtacacccactgtattattaggagtaatatctctgtaggatattacaattaatatcacagggtgtagagacaccgtgatattaggagcaatatctttctaggatattacaaataatatcagggtgtacacccactctgctgtcatagctagggttacccgccaccacgcccagctaaattttttttattttcactggagacggggtttcaccacgttggccaggctggtctggaactcctgacctcaggtgatccatcagcctcggctgcccaaagtgctgggattacaggtgtgggccatggtgctgggccaagagttatatattcaattcatttggaaacacagctcccatttttgagtgtgcatgtacttttatgaagaaatgatgtcagaaaaccaaaggatgataataaatatgaaaagtaacaggcatgtgaaaaggtcttccgattgagaactctaaggttcgatttcgttttcagataatggggtcttagctcttgcttcgtccttttacatattctacatcaatggaagttgtagcacggtgtcagaataaagtagagtgtatttcacggcttcttaatttctttcaattagactgagatctttttctaaaagagagaaggacattttcattgcattatatttttcctgaaaagagtaggctgtattttactgagatcagggatttgttatatataacgttttggtcttctaatattcttccgtggattttctctaaagtagtatgtacagaaagccttgtatagcaaaaaagcaaatcacgtaataattctgagatttttggaattgtcacaactgagaaacattgctggcgatgtatggtccggaagtgtgaagatgttccttgtaaattgcttgcatccagcattaagggctggtttttatcttttatttttccaatcctctttccttctcaaggtgtccaagacacacagagccacggaatctcacaggtgtctgagaattcctcctcctgggactctcagaggatccagaactgcagtcggtcctcgctttgctgtccctgtccctgtccctgaatctggtcacggtgctgaggaacctgctcagcatcctggctgtcagctctgactcccccctccacacccccatgtacttcttcctctccaacctgtgctgggctgacatcggtctcacctcggccacggttcccaaggtgattctggatatgcagtcgcatagcagagtcatctctcatgtgggctgcctgacacagatgtctttcttggtcctttttgcatgtatagaaggcatgctcctgactgtgatggcctatggctgctttgtagccatctgtcgccctctgcactacccagtcatagtgaatcctcacctctgtgtcttcttcgttttggtgtcctttttccttaacctgttggattcccagctgcacagttggattgtgttacaattcaccatcatcaagaatgtggaaatctctaattttttctgtgacccctctcagcttctcaaccttgcctgttctgacagcgtcatcaatagcatattcatatatttcgatagtactatgtttggttttcttcccatttcagggatccttttgtcttactataaaattgtcccctccattctaaggatgtcatcgtcagatgggaagtataaagccttctccacctatggctctcacctaggagttgtttgctggttttatggaacagtcattggcatgtacctggcttcagccgtgtcaccaccccccaggaatggtgtggtggcatcagtgatgtaggctgtggtcacccccatgctgaaccttttcatctacagcctgagaaacagggacatacaaagtgccctgcggaggctgcgcagcagaacagtcgaatctcatgatctgttccatcctttttcttgtgtgcgtgagaaagggcaaccacattaaatctctgcatctgcaaatcctgccccttagtcacattatttttgtgg

SEQ ID NO: 566 - protein, 302 aa, Homo sapiens [sequence omitted]

SEQ ID NO: 567 - DNA, 1345 bp, Homo sapiens
  source
  (1)..(1345)
  CDS (201)..(1145)
attcatcactttttatcttatattacagtgagctcaatatctgtctatatctatcttcgactgaaaagtgtgttgaagttgagtgccgacatgtaagacattcaatttaaagctttgttacttgaaatcatttgaactcctcttgagctgtcccctcatctggctcttgtcttagccgttgcaggtgaaccactggatggatggctgaaaggaattacaccgtagtgacggagttcttccttactgcatttactgaacatctccagtggagggttcctctcttcctcatatttttgagtttctatcttgccactatgttagggaacacaggcatgatcctcctgatccgtggcgatcgtcggctccacaccccgatgtacttcttcctcagccacctttccttggtggacatctgctactcgtccgccatcatccctcagatgctggctgtgctgtgggagcacggcacaaccatctcccaggctcgctgtgcagctcagttcttcctcttcaccttctttgcctccatcgactgctaccttctggccatcatggcctatgaccgctacacggccgtgtgccagcccctgctttatgtcaccatcataaccgagaaggcccgctggggcctagtcactggggcttacgttgctggttttttcagtgcctttgttcgaacggtcacagccttcactctctccttttgtggaaacaatgagatcaacttcattttctgtgacctccctcctctattaaaactctcctgtggggacagctacactcaggaagtggtgattattgtgtttgctcttttcgtcatgcctgcctgtatcttggtgatcttggtatcctacctgtttatcattgtggccatcctgcagatccactctgctggaggccgggccaagaccttctccacctgcgcctcccacctcactgccgtcgctcttttctttggcaccctcatcttcatgtacctgcgagacaacacaggccagtcctccgagggagaccgagtggtgtctgtgctctacacggtggtgaccccaatgctgaatccccttatctatagcctgagaaacaaggaggtaaaagaggccactaggaaagccctgagcaaatcaaagcctgctagaagaccctaaatggacccttgtgaaatatatcattccttagtttccccatcttttctgtcttttctcaatagcaccttctggagagactttcctaaataaccctatgcaaaatcgcacctgaacttcccacctccactttctgatttattattccatgtaatacttatcatcatctgacatattagatgttatatgtgtttgacattttc

SEQ ID NO: 568 - protein, 314 aa, Homo sapiens
MAERNYTVVTEFFLTAFTEHLQWRVPLFLIFLSFYLATMLGNTGMILLIRGDRRLHTPMYFFLSHLSLVDICYSSAIIPQMLAVLWEHGTTISQARCAAQFFLFTFFASIDCYLLAIMAYDRYTAVCQPLLYVTIITEKARWGLVTGAYVAGFFSAFVRTVTAFTLSFCGNNEINFIFCDLPPLLKLSCGDSYTQEVVIIVFALFVMPACILVILVSYLFIIVAILQIHSAGGRAKTFSTCASHLTAVALFFGTLIFMYLRDNTGQSSEGDRVVSVLYTVVTPMLNPLIYSLRNKEVKEATRKALSKSKPARRP

SEQ ID NO: 569 - DNA, 1330 bp, Homo sapiens
  source
  (1)..(1330)
  CDS (201)..(1130)
catagggcaaatgggactgggaaggatccaacatcattcaaatgggccactggtctggactatgtcatcagaggagaagttaatcatccatttcatttttttcttgtcagacttcatccgttcatttcagagcacctcttcctttctcacttttgattactactctctttttcactttgagactcaaaattttttcaacaatgaaaaataaaaccgtgttaactgagtttatccttctgggtctaacagatgtccctgaactccaggtggcagttttcacctttcttttccttgcgtatttactcagcatccttggaaatctgactatcctcatcctcaccttgctggactcccaccttcagactcccatgtatttctttctccggaacttctccttcttggaaatttccttcacaaacatcttcattccaagggtcctgattagcatcacaacagggaacaagagtatcagctttgctggctgcttcactcagtatttctttgccatgttccttggggctacagagttttaccttctggctgccatgtcctatgaccgctatgtggccatctgcaaacctctgcattacaccaccatcatgagcagcagaatctgcatccagctgattttctgctcttggctgggtgggctaatggctattataccaacaatcaccctgatgagtcagcaggacttttgtgcatccaacagactgaatcattacttctgtgactatgagcctcttctggaactctcatgttcagacacaagcctcatagagaaggttgtctttcttgtggcatctgtgaccctggtggtcactctggtgctagtgattctctcctatgcattcattatcaagactattctgaagctcccctctgcccaacaaaggacaaaagccttttccacatgttcttcccacatgattgtcatctccctctcttacggaagctgcatgtttatgtacattaatccctctgcaaaagaaggggatacattcaacaagggagtagctctactcattacttcagttgctcctttgttgaacccctttatttacaccctaaggaaccaacaggtaaaacaacccttcaaggatatggtcaaaaagcttctgaatctttaaagaatttaagaattatgcatcgcgacattattcacaatagcaaagacttggaaccaacccaaatgtccaacaatgatagactggattaagaaaatatggcacatatacaccatggaatactatgcagccattaaaaatgatgagttgatgtcctttgtagggacatggatgaaattggaaatcatcattctcagtaaact

SEQ ID NO: 570 - protein, 309 aa, Homo sapiens
MKNKTVLTEFILLGLTDVPELQVAVFTFLFLAYLLSILGNLTILILTLLDSHLQTPMYFFLRNFSFLEISFTNIFIPRVLISITTGNKSISFAGCFTQYFFAMFLGATEFYLLAAMSYDRYVAICKPLHYTTIMSSRICIQLIFCSWLGGLMAIIPTITLMSQQDFCASNRLNHYFCDYEPLLELSCSDTSLIEKVVFLVASVTLVVTLVLVILSYAFIIKTILKLPSAQQRTKAFSTCSSHMIVISLSYGSCMFMYINPSAKEGDTFNKGVALLITSVAPLLNPFIYTLRNQQVKQPFKDMVKKLLNL

SEQ ID NO: 571 - DNA, 1342 bp, Homo sapiens; identical to SEQ ID NO: 513
  source
  (1)..(1342)
  CDS (201)..(1142)

SEQ ID NO: 572 - protein, 313 aa, Homo sapiens; identical to SEQ ID NO: 514

SEQ ID NO: 573 - DNA, 1330 bp, Homo sapiens
  source
  (1)..(1330)
  CDS (201)..(1130)
agacttgggatgacaacatgtacctcaagctatgtatgtgccgaccacagtagcagggacatgtcacctgattctcaggttggaaatagtttcttaacctaatttttcttccttctctcttgagagcaggaccatgtggagcaatgccacctctcttttaatctctgggcttcaaaacaagcagaatcaaggactaaatgatggacaaccactctagtgccactgaattccaccttctaggcttccctgggtcccaaggactacaccacattctttttgctatattctttttcttctatttagtgacattaatgggaaacacggtcatcattgtgattgtctgtgtggataaacgtctgcagtcccccatgtatttcttcctcagccacctctctaccctggagatcctggtcacaaccataattgtccccatgatgctttggggattgctcttcctgggatgcagacagtatctttctctacatgtatcgctcaacttttcctgtgggaccatggagtttgcattacttggagtgatggctgtggaccgttatgtggctgtgtgtaaccctttgaggtacaacatcattatgaacagcagtacctgtatttgggtggtaatagtgtcatgggtgtttggatttctttctgaaatctggcccatctatgccacatttcagtttaccttccgcaaatcaaattcattagaccatttttactgtgaccgagggcaattgctcaaactgtcctgcgataacactcttctcacagagtttatccttttcttaatggctgtttttattctcattggttctttgatccctacgattgtctcctacacctacattatctccaccatcctcaagatcccgtcagcctctggccggaggaaagccttctccacttttgcctcccacttcacctgtgttgtgattggctatggcagctgcttgtttctctacgtgaaacccaagcaaacacagggagttgagtacaataagatagtttccctgttggtttctgtgttaacccccttcctgaatcctttcatctttactcttcggaatgacaaagtcaaagaggccctccgagatgggatgaaacgctgctgtcaactcctgaaagattagctgttctgtaagtcagttttaggtggtccaagcctcagggttaattattaagtcacctagaaaattctaactcctcttttctcttatcctctcattacaaaagtcaaagagtgtgtacaattcgccatcacaccatggaagtagattaggctggtaataatgaaatccattgtctgtccaggagactctcatagccttag

SEQ ID NO: 574 - protein, 309 aa, Homo sapiens
MDNHSSATEFHLLGFPGSQGLHHILFAIFFFFYLVTLMGNTVIIVIVCVDKRLQSPMYFFLSHLSTLEILVTTIIVPMMLWGLLFLGCRQYLSLHVSLNFSCGTMEFALLGVMAVDRYVAVCNPLRYNIIMNSSTCIWVVIVSWVFGFLSEIWPIYATFQFTFRKSNSLDHFYCDRGQLLKLSCDNTLLTEFILFLMAVFILIGSLIPTIVSYTYIISTILKIPSASGRRKAFSTFASHFTCVVIGYGSCLFLYVKPKQTQGVEYNKIVSLLVSVLTPFLNPFIFTLRNDKVKEALRDGMKRCCQLLKD

SEQ ID NO: 575 - DNA, 1333 bp, Homo sapiens
  source
  (1)..(1333)
  CDS (201)..(1133)
cagcctctggtaaccaccattttactttctatttctgtaagtttgacttttttagattccacatattaagtgacatcatttgatatttgtctttctgtgcctggcttatttcacttaatacaatgtccttgaggtgttgctgcaaatgacaggatttttttctttatttagattacaaacaaagtctgaaacctgaggcaatggacccacagaactattccttggtgtcagaatttgtgttgcatggactctgcacttcacgacatcttcaaaattttttctttatatttttctttggggtctatgtggccattatgctgggtaaccttctcattttggtcactgtaatttctgatccctgcctgcactcctcccctatgtacttcctgctggggaacctagctttcctggacatgtggctggcctcatttgccactcccaagatgatcagggatttccttagtgatcaaaaactcatctcctttggaggatgtatggctcaaatcttcttcttgcactttactggtggggctgagatggtgctcctggtttccatggcctatgacagatatgtggccatatgcaaacccttgcattacatgactttgatgagttggcagacttgcatcaggctggtgctggcttcatgggtcgttggatttgtgcactccatcagtcaagtggctttcactgtaaatttgccttactgtggccccaatgaggtagacagcttcttctgtgacctccctctggtgatcaaacttgcctgcatggacacctatgtcttgggtataattatgatctcagacagtgggttgctttccttgagctgttttctgctcctcctgatctcctacaccgtgatcctcctcgctatcagacagcgtgctgccggtagcacatccaaagcactctccacttgctctgcacatatcatggtagtgacgctgttctttggcccttgcatttttgtttatgtgcggcctttcagtaggttctctgtggacaagctgctgtctgtgttttataccatttttactccactcctgaaccccattatctacacattgagaaatgaggagatgaaagcagctatgaagaaactgcaaaaccgacgggtgacttttcaatgaaatccagccttccatagtgttagatgtttctattcattcagcagatataatttctttaatataattctgctcaaagatttcattctgacactacattgatataatttgtaatgtgttatattacagagaaacagtttatttcaagaaaaaatatatcattttattttatactacaaatatgtatatataatgtattacat

SEQ ID NO: 576 - protein, 310 aa, Homo sapiens
MDPQNYSLVSEFVLHGLCTSRHLQNFFFIFFFGVYVAIMLGNLLILVTVISDPCLHSSPMYFLLGNLAFLDMWLASFATPKMIRDFLSDQKLISFGGCMAQIFFLHFTGGAEMVLLVSMAYDRYVAICKPLHYMTLMSWQTCIRLVLASWVVGFVHSISQVAFTVNLPYCGPNEVDSFFCDLPLVIKLACMDTYVLGIIMISDSGLLSLSCFLLLLISYTVILLAIRQRAAGSTSKALSTCSAHIMVVTLFFGPCIFVYVRPFSRFSVDKLLSVFYTIFTPLLNPIIYTLRNEEMKAAMKKLQNRRVTFQ

SEQ ID NO: 577 - DNA, 1342 bp, Homo sapiens
  source
  (1)..(1342)
  CDS (201)..(1142)
ataacttcatcacatactctctccctcttggtttatcagatataaaatgggcaaccaaatgtatcctcgtgtaatctgttagtgacagggaacgtatgacaattttgaaagcagtgatataactctaggtaaatgctatgtctactaattatagtttcttaattttcatagctatattatgaaaagagtaaattgaagaaatggaaactgcaaattacaccaaggtgacagaatttgttctcactggcctatcccagactccagaggtccaactagtcctatttgttatatttctatccttctatttgttcatcctaccaggaaatatccttatcatttgcaccatcagtctagaccctcatctgacctctcctatgtatttcctgttggctaatctggccttccttgatatttggtactcttccattacagcccctgaaatgctcatagacttctttgtggagaggaagataatttcttttgatggatgcattgcacagctcttcttcttacactttgctggggcttcggagatgttcttgctcacagtgatggcctttgacctctacactgctatctgccgacccctccactatgctaccatcatgaatcaacgtctctgctgtatcctggtggctctctcctggagggggggcttcattcattctatcatacaggtggctctcattgttcgacttcctttctgtgggcccaatgagttagacagttacttctgtgacatcacacaggttgtccggattgcctgtgccaacaccttcccagaggagttagtgatgatctgtagtagtggtctgatctctgtggtgtgtttgattgctctgttaatgtcctatgccttccttctggccttgctcaagaaactttcaggctcaggtgagaataccaacagggccatgtccacctgctattcccacattaccattgtggtgctaatgtttgggccatccatctacatttatgctcgcccatttgactcgttttccctagataaagtggtgtctgtgttcaatactttaatattccctttacgtaatcccattatttacacattgagaaacaaggaagtaaaggcagccatgaggaagttggtcaccaaatatattttgtgtaaagagaagtgaaagataaattatacattttatagttcccctgaggatcattgtcctaaagcaggaagtatttgcagtaataatgctgcattgacttcctcctttcatttgtgttattaaaattttactataatttttctctattcattcctctttatattgaaaaaatagaggcattaagatgaaaataaatttactcacacctaccctga

SEQ ID NO: 578 - protein, 313 aa, Homo sapiens
METANYTKVTEFVLTGLSQTPEVQLVLFVIFLSFYLFILPGNILIICTISLDPHLTSPMYFLLANLAFLDIWYSSITAPEMLIDFFVERKIISFDGCIAQLFFLHFAGASEMFLLTVMAFDLYTAICRPLHYATIMNQRLCCILVALSWRGGFIHSIIQVALIVRLPFCGPNELDSYFCDITQVVRIACANTFPEELVMICSSGLISVVCLIALLMSYAFLLALLKKLSGSGENTNRAMSTCYSHITIVVLMFGPSIYIYARPFDSFSLDKVVSVFNTLIFPLRNPIIYTLRNKEVKAAMRKLVTKYILCKEK

SEQ ID NO: 579 - DNA, 1339 bp, Homo sapiens
  source
  (1)..(1339)
  CDS (201)..(1139)
gccaagaaggcctggctcagacttctgtaaacctgagccctgaacatagcagtagcagccccagcagggttgacaatattatcatttacatcctgcaagcaaaattctactgccattcctgtgccccatcttaaccagcattttccaagcttttgcatttcgtcttctttgtctgcctctgtgtccaggatcccaggcccatgagcgggacaaaccagtcgagtgtctccgagttcctcctcctgggactctccaggcagccccagcagcagcatctcctctttgtgttcttcctcagcatgtacctggccactgtcctggggaacctgctcatcatcctgtccgtaagcatagactcctgcctgcacacccccatgtacttcttcctcagcaacctgtcttttgtggacatctgcttctccttcaccaccgtccccaagatgctggccaatcacatactcgagactcagaccatctccttctgtggctgtctcacacagatgtatttcgttttcatgttcgtggacatggacaatttcctcctagctgtgatggcctatgaccactttgtcgccgtgtgccaccccttacattacacagcaaagatgacccatcagctctgtgccctgctggttgctggattatgggtggttgccaacctgaatgtccttctgcacaccctgctgatggctccactctcattctgtgcagacaatgccatcactcacttcttctgcgatgtgactcccctactgaaactctcctgctcagacacacacctcaatgaggtcataatccttagtgagggtgccctggtcatgatcaccccatttctttgcatcctggcttcttatatgcacatcacctgcactgtcctgaaggtcccatccacaaagggaaggtggaaagccttctccacctgtggttctcacctggctgtggttctcctcttctacagcaccatcattgctgtgtattttaaccctctgtcctcccactcagctgagaaagacactatggctactgtgttgtatacagtagtgactcccatgctaaaccctttcatctacagcctgaggaacaggtacttgaaaggggctctgaaaaaagtagttggcagggtggtgttttctgtctgatgaaataatcaagactgaatctcattcccaaggaaatttatttttcaccaattgagtttaatgcagtagttgtttcattaaatgatgttcttgctagtgacacacttagtaattatactaagttaaactattaattataattttttttgagacagggtcatgctctgtcacccaggctggagtgcagtgccgtgatcttg

SEQ ID NO: 580 - protein, 312 aa, Homo sapiens
MSGTNQSSVSEFLLLGLSRQPQQQHLLFVFFLSMYLATVLGNLLIILSVSIDSCLHTPMYFFLSNLSFVDICFSFTTVPKMLANHILETQTISFCGCLTQMYFVFMFVDMDNFLLAVMAYDHFVAVCHPLHYTAKMTHQLCALLVAGLWVVANLNVLLHTLLMAPLSFCADNAITHFFCDVTPLLKLSCSDTHLNEVIILSEGALVMITPFLCILASYMHITCTVLKVPSTKGRWKAFSTCGSHLAVVLLFYSTIIAVYFNPLSSHSAEKDTMATVLYTVVTPMLNPFIYSLRNRYLKGALKKVVGRVVFSV

SEQ ID NO: 581 - DNA, 3079 bp, Homo sapiens
  source
  (1)..(3079)
  CDS (201)..(277)
  CDS (1964)..(2879)
  modified_base (1785)..(1884): a, t, c, g, unknown or other
ggaggtggccctctgcctgtcctcagacaagggcctcgagtcacaccctcccatgggaaagcttcagtgtggggctgagctccagggccctagtttgatcccttctatgctttgggaccttaagccatatatcttaccctcagagccttggcctctttcatctctaaaacgggtcagttacatgtaccttacaggcggtcatgaaggctacacaagtattgcctggctccaaggaagtgctggataaatccagcagggcccaggtgtgtttgggcaggttggtggatctctagggagcgccactgacacggttgtgatttgcatatgctgatggcagaagatggggcccccttctccaacccccacaaagacactgaagggggttgtgagtgcccatggttgcactgctgggtcctgcctggggaaggggtccttggtgcccatgtgggagtcccgccactgagagctgctcaccagagcccaggagcttcaggcccctccatgggtccttggggccaagtcaggccagggagaacacagggtgggaaccctttcaacagagggtaggcatggacatttagaaaactaaattcactctgggtcaatgcttactttacctgtgacttctgggagttcttgacaaattgcgccactccctgagcctcatttcttttctttcttttgagacagtttcgctcttgtcgccaaggctggagtgcagcggcgcaatcttggctcactgcaacctccgcctcctgggctcaagcaattctcgtgccccagcttcctgagtagctgggattacaggcgcccaccaccatgtccagctactttttgtatttttagtagaaacggggtttcactatgttggccaggcaggtctcgaactcctgacctcaggtgatctacccgcctcggcctcccaaagtgctgggattacaggcatgagccaccgcgcccggcctcatttctcacaagttggaatggaaggagaatactgccccccactcagggctgctaaggactgaatgggcccagaatacatgaggtcaggcgaaaactcccagcctaaggctgcttacgaccttgaacccgaatgctgaactgggatgcccaaaaacaaccacttcccctgtgaaaattctaccctcctgaagttattgcattagtttgtttattttgttaatgttttaagtgtttcataaatgtgttttcatttaaaaatacaattccatttatttctcaggacctggccagcatcatacgatatcactttttttttttttttttttttttgagatgtagtcttgctgtgtcgcccaggctggagtgcagtggcatgatcttggctcactgcaacctacgcctgctgggttcaagcaattttcctgcctcagcctcctgagtagctgggactacaggcgtgcaccaccacgcccagctaatttttgtatttttactagagacagagtttcaccatgatggtcagactggtctcgaattcctgacctcaggtgatctgcccgccttggcctcccaaagtgctgggattacaggcctgagccaccacatctggctgtaattgaacaacagcaacaacaacaaaaaaaacgacatagaaactataaatgtttctctctttctctcttgtaactgggtccccactggtttttctctcagttgtgaaatttggccagtgattggaacatggcctcctattctacacggggtcacactttgaagttgttaaaactcggtatataagagaaaaaacggtaggattannnnnnnnnnnnnnnnnnnnnnnnnnnnnnnnnnnnnnnnnnnnnnnnnnnnnnnnnnnnnnnnnnnnnnnnnnnnnnnnnnnnnnnnnnnnnnnnnnnngcgtcgctaggaacgtcatttataaatatataattgacaacgcgatcaaaaaataaaaagctgaattgcgttcgtgcaggtccgaattcctccttctgggattctctgacctcaaggccctgcatggccccctgttctgggtggtgcttctggtctacctggtcaccttgctgggtaactccctgatcatcctcctcacacaggtcagccctgccctgcactcccccatgtacttcttcctgcgccaactctcagtggtggagctcttctacaccactgacatcgtgcccaggaccctggccaatctgggctccccgcatccccaggccatctctttccagggctgtgcagcccatatgtacgtcttcattgtcctgggcatctcggagtgctgcctgctcactgccatggcctatgaccgatatgttgccatctgccagcccctacgctattccaccctcttgagcccacgggcctgcatggccatggtgggtacctcctggctcacaggcatcatcacggccaccacccatgcctccctcatcttctctctaccttttcgcagccacccgatcatcccgcactttctctgtgacatcctgccagtactgaggctggcaagtgctgggaagcacaggagcgagatctccgtgatgacagccaccatagtcttcattatgatccccttctctctgattgtcacctcttacatccgcatcctgggtgccatcctagcaatggcctccacccagagccgccgcaaggtcttctccacctgctcctcccatctgctcgtggtctctctcttctttggaacagccagcatcacctacatccggccgcaggcaggctcctctgttaccacagaccgcgtcctcagtctcttctacacagtcatcacacccatgctcaaccccatcatctacacccttcggaacaaggacgtgaggagggccctgcgacacttggtgaagaggcagcgcccctcaccctgaagggactcggatgtctgctcactcactcagtgctcatcctcccactcttcagggactggatttaaaccccactctcacagaaatcacgcagcacctcaaaggaaaaggcttcctggaagaaagtgctgaaattaaaacagagataaatctacatattgcctcttatcccagagtccacactcactatcagagcatgggtt

SEQ ID NO: 582 - protein, 330 aa, Homo sapiens [sequence omitted]

SEQ ID NO: 583 - DNA, 1339 bp, Homo sapiens
  source
  (1)..(1339)
  CDS (201)..(1139)
tattttttatttttattttttgagacagttctccctctattgcccaggctggagtgcagtggtgtaaacatagctccctgcagttgcaaattcctgggctcaagtgatccttccatctcagcctcccgagtagctgggactacaggtgtccaccaccatgcctggctaatgacctcttcttttgtagatacatcagctacatggaagcaggaaaccaaacaggatttttagagtttatccttctcggactctctgaggatccagaactacagccgttcatatttgggctgttcctgtccatgtacctggtgacggtgctgggaaacctgctcatcatcctggccatcagctctgactcccacctccacacccccatgtacttcttcctctccaacctgtcctgggttgacatctgtttcagcacttgcatcgtccccaagatgctggtgaacatccagaccgagaacaaagccatctcctacatggactgcctcacacaggtctatttctccatgttttttcctattctggacacgctactcctgaccgtgatggcctatgaccggtttgtggctgtctgccaccctctgcactatatgatcatcatgaacccccacctctgtggcctcctggtttttgtcacctggctcattggtgtcatgacatccctcctccatatttctctgatgatgcatctaatcttctgtaaagattttgaaattccacattttttctgcgaactgacgtacatcctccagctggcctgctctgataccttcctgaacagcacgttgatatactttatgacgggtgtgctgggcgtttttcccctccttgggatcattttctcttattcacgaattgcttcatccataaggaagatgtcctcatctgggggaaaacaaaaagcactttccacctgtgggtctcacctctccgtcgtttctttattttatgggacaggcattggggtccacttcacttctgcggtgactcactcttcccagaaaatctccgtggcctcggtgatgtacactgtggtcacccccatgttgaaccccttcatctacagcctgaggaacaaggatgtgaagggagccctggggagtctcctcagcagggcagcctcttgtttgtgatggatcccttggccccaggactaagaagttttgtgagcaccaatggcaaaaatgttttattttgaaattcttactctttaaaattaaaaacatttttttatactttgagagtacaaatgcagatttcttaacatgcatttgcataagggtgaagtctgagcttttggcgtaccaattacctgaatagtgaacataaggca

SEQ ID NO: 584 - protein, 312 aa, Homo sapiens
MEAGNQTGFLEFILLGLSEDPELQPFIFGLFLSMYLVTVLGNLLIILAISSDSHLHTPMYFFLSNLSWVDICFSTCIVPKMLVNIQTENKAISYMDCLTQVYFSMFFPILDTLLLTVMAYDRFVAVCHPLHYMIIMNPHLCGLLVFVTWLIGVMTSLLHISLMMHLIFCKDFEIPHFFCELTYILQLACSDTFLNSTLIYFMTGVLGVFPLLGIIFSYSRIASSIRKMSSSGGKQKALSTCGSHLSVVSLFYGTGIGVHFTSAVTHSSQKISVASVMYTVVTPMLNPFIYSLRNKDVKGALGSLLSRAASCL

SEQ ID NO: 585 - DNA, 1078 bp, Homo sapiens
  source
  (1)..(1078)
  CDS (201)..(878)
tgctggggaacctactcatcatcctggccgtcagctctgactcccacctccacagccccatgtaattcttcctctccaacttgtcctttgtggacacctgtttcatctgcaccacagtccccaagatgctagtgaacatccaggcacggagcaaagacatctcctacatggggtgcctcactcaggtgtatttttaaatgatgtttgctggaatggatactttcctactggctgtgatagcctatgaccggtttgtggccatctgccacccactgcagtacatggtcatcataaacccccatctctgtggcctcctggttctggcatcttggttcatcattttctggttctccctggttcatattctactgatgaagaggctgaccttctccacaggcactgagattccgcatttcttctgtgaactggctcaggtcctcaaggtggcccgctctgatgctctcctcattaacattgtcttgtatgtggccatggcactgctgggtgtgtttcctgtagctgggatcctcttctcctactctcagattgtctcctccttaatgagaatgtcctccaccgagggcaagtacaaagccttttccacctgtggatctcacctctgtgtggtctccttgttctatggaacaggacttggggtctatctcagttctgctgtgacccattcttcccagagcagctccatggcctcagtgatgtacgccatggtcacccccatgctgaaccccttcatctacagcctgaggaacaaggatgtgaagggggccctggggagactccttagcagggcagcctcttgtctcttacggtacacaacctcagaactaagaggatgctatgggtcccttaagcaaatgtgaatgcgcatatcctagatcttgctctcccctaaaatatatgttgcagtttcctattttcaaagcacctacgactttgcttaaaatgtttttgtatggccgggcacggtggcttacacctgtaatcgcagcactttgggaggcagaggcgggcagatcatgaggtcaagagatcgagaccatcctggccaacaggtgaaacc

SEQ ID NO: 586 - protein, 225 aa, Homo sapiens
MFAGMDTFLLAVIAYDRFVAICHPLQYMVIINPHLCGLLVLASWFIIFWFSLVHILLMKRLTFSTGTEIPHFFCELAQVLKVARSDALLINIVLYVAMALLGVFPVAGILFSYSQIVSSLMRMSSTEGKYKAFSTCGSHLCVVSLFYGTGLGVYLSSAVTHSSQSSSMASVMYAMVTPMLNPFIYSLRNKDVKGALGRLLSRAASCLLRYTTSELRGCYGSLKQM

SEQ ID NO: 587 - DNA, 1345 bp, Homo sapiens
  source
  (1)..(1345)
  CDS (201)..(1145)
gacactaactgattaagttttctccctccagcctactgattctagctgcagcctcattactcttctcaagacaccatcccaggaagccactaccaatcaatgatgattggcatgtgagatgaaaattatttgccaccccatgcaggcttcttgccatagttcagctgttcttcctgcagctaaagtgcattgtgtaaaacatgggggatgtgaatcagtcggtggcctcagacttcattctggtgggcctcttcagtcactcaggatcacgccagctcctcttctccctggtggctgtcatgtttgtcataggccttctgggcaacaccgttcttctcttcttgatccgtgtggactcccggctccatacacccatgtacttcctgctcagccagctctccctgtttgacattggctgtcccatggtcaccatccccaagatggcatcagactttctgcggggagaaggtgccacctcctatggaggtggtgcagctcaaatattcttcctcacactgatgggtgtggctgagggcgtcctgttggtcctcatgtcttatgaccgttatgttgctgtgtgccagcccctgcagtatcctgtacttatgagacgccaggtatgtctgctgatgatgggctcctcctgggtggtaggtgtgctcaacgcctccatccagacctccatcaccctgcattttccctactgtgcctcccgtattgtggatcacttcttctgtgaggtgccagccctactgaagctctcctgtgcagatacctgtgcctacgagatggcgctgtccacctcaggggtgctgatcctaatgctccctctttccctcatcgccacctcctacggccacgtgttgcaggctgttctaagcatgcgctcagaggaggccagacacaaggctgtcaccacctgctcctcgcacatcacggtagtggggctcttttatggtgccgccgtgttcatgtacatggtgccttgcgcctaccacagtccacagcaggataacgtggtttccctcttctatagccttgtcacccctacactcaacccccttatctacagtctgaggaatccggaggtgtggatggctttggtcaaagtgcttagcagagctggactcaggcaaatgtgctgactacatagaaactgctggtgagattccagcggtcctcgatcccacccaccttcccaaagtatgcatttggcattcaattgccaatttgtgcaactggccaaatatccagccattgcccaaggtgcaactttttgagaaaatgtctgccttttaaattgaggtagaatacacgtaacataaaatgagccactttgaagtgt

SEQ ID NO: 588 - protein, 314 aa, Homo sapiens
MGDVNQSVASDFILVGLFSHSGSRQLLFSLVAVMFVIGLLGNTVLLFLIRVDSRLHTPMYFLLSQLSLFDIGCPMVTIPKMASDFLRGEGATSYGGGAAQIFFLTLMGVAEGVLLVLMSYDRYVAVCQPLQYPVLMRRQVCLLMMGSSWVVGVLNASIQTSITLHFPYCASRIVDHFFCEVPALLKLSCADTCAYEMALSTSGVLILMLPLSLIATSYGHVLQAVLSMRSEEARHKAVTTCSSHITVVGLFYGAAVFMYMVPCAYHSPQQDNVVSLFYSLVTPTLNPLIYSLRNPEVWMALVKVLSRAGLRQMC

SEQ ID NO: 589 - DNA, 1333 bp, Homo sapiens
  source
  (1)..(1333)
  CDS (201)..(706)
  CDS (833)..(1133)
gaaagttctgagatgtatctgtgtatcccatatttcagggatcctggggtcttttactgctaacatgaggaacaggcagagaactgcaactacctagttgaaaaacttgaattttgtttcacattttatcgtgttagtgggataatgaatacctaactcaaattttcttcttctctttctacataaaatttccagagaaaatggtaaaaggaaatcattccacggtgactgaatttaatctcgctgggctaacagacaaaccagagctccagctgcctcttttcctcctcttcctgggaatctatgtggtcacagtggtgggcaacctgagcatgatcactctaatagggttcagttctcacctgcacacccccatgtaccatttcctcagcagtctgtccttcattgatctctgccagtcttctgtcattaccccaaaaatgctggtgaattttgtgtcagagaggaatattatctcctacccagcatgcatgactcagctctacttcttccttgttcttgtcatatctgaatgtcacatgttggctgcaatggcttatgaccactacattgccatatgtaacccactgctttaccatgtcgccatgtcttatcaggtctgctcctggatggtagttgaggtgtattttatgggctttattggtgctacgtgctcacacagtctgcatgctaagagtgcttttctgtaaggctgatgtaatcaaccattacttctgtgatcttttcccactactggagctctcccgctccagtatttctatcaatgaaatagtagtttgtgcttcagtgcatttaatatccttttccgcagcctcaccatccttagctcttacatcttcatcgttgccagcatcctctgcattcgctccactgagggcaggtccaaaaccttcagcacttgcagctcccacatctcggctgtttctgttttctttgggtctgcagcattcatgtacctgcagccatcatccgtcagctccatggaccaggggagtgtcttctgtgttttatgctactgttgtgcccatgctgaacccccaatctacagcctgaggaataaagatgtcaaagttgccttaattaagttccttgaaaaaagaagtttcctgtgaaagttgccttaaataagctccttgaaaaaagaagtttcctatgaaggggggtattttgctttagcaaaaacttttaatttctggaaaaggtttgataaggaaacaatctagagacagtaaggtatgtccacaagtaatgagatggctgctactacttggttatttggaagaaagatgccaaggataaggctgaattcata

SEQ ID NO: 590 - protein, 268 aa, Homo sapiens
MVKGNHSTVTEFNLAGLTDKPELQLPLFLLFLGIYVVTVVGNLSMITLIGFSSHLHTPMYHFLSSLSFIDLCQSSVITPKMLVNFVSERNIISYPACMTQLYFFLVLVISECHMLAAMAYDHYIAICNPLLYHVAMSYQVCSWMVVEVYFMGFIGATCSHSLHAKSAFLLTILSSYIFIVASILCIRSTEGRSKTFSTCSSHISAVSVFFGSAAFMYLQPSSVSSMDQGSVFCVLCYCCAHAEPPIYSLRNKDVKVALIKFLEKRSFL

SEQ ID NO: 591 - DNA, 1502 bp, Homo sapiens
  source
  (1)..(1502)
  CDS (201)..(218)
  CDS (379)..(1302)
ccagtaatccattcctcgccccagggaaactcctgccttttgggaatgtgtctcctggggtcaactgtgcacacaggctagtgtgcatggggagccaggccagcactatggggacctgattgagagagaggttgatggcaatctcctgctaacagttctcaacctctcacaggtgtcacatagaatgggcatcaagtgcaatgggtaactacagcattgtcagggagtttgtgctcctgggattttcttttttttttttttttttaattgatcattcttgggtgtttctcgtggagggggatttggcagggtcataggacaatagtggagggaaggtcagcagataaacaagtgaacaaaggtctctggttttcctaggcagaggagctccttggattttcttatctccatgagttccaggttctgctgtttgctctgatcctgttgatatatgtgctgatgctgctgggcaacctggccatcatcagcttcatttgccttgattcccgccttcactcacccatgtacttcttcctctgcaacttctccctcatggagatggtggtcacctccactgtggtacataggatgctggcagacctgctatccactcacaagaccatgtccctggccaaatgcctaacccagtctttcttttacttctccctgggctctgccaacttcctgatactcatggtcatggcctttgatcgctacgtggccatctgccaccccctgcgctacccaaccatcacgaatggtccagtgtgtgtgaagctggtggtggcctgttgggtggttggtttcctctccattgtctctcccacactgcagaaaacacgactctggttctgtggccctaacatcatcggccactacttctgtgactctgccccgctgctcaagcttgcctgctctgacacccgccacattgagcgcatggacctcttcctgtccctgctctttgtgctgaccaccatgctgcttatcatcctctcctacatcctcattgtggctgcagtgctgcacatcccttcctcctctggatgccagaaggccttctccacctgtgcctctcacctcacagtggtggttctgggctatggcagtgccatcttcatctacgtgaggccaggcaagggccactccacatacctcaacaaggcggtggccatggtgactgcaatggtaacccctttcctcaaccccttcatcttcaccttccggaatgagaaggtcaaggaggtcattgaggatgtgactaaaaggatcttccttggagacccagcagcctgtaggtgagagggtgagcccttgacagggctagagagcacctgacaagtcacgaggagtagacttgctgcaggtgggcacccacatgcctaagctggagctcctcactctcttttttctcattttctcctggtccctcatcttcatgcaagtttcttctcctgcactgcagagaactaatggacacacattggtagaatgtctcaaag

SEQ ID NO: 592 - protein, 313 aa, Homo sapiens [sequence omitted]

SEQ ID NO: 593 - DNA, 2869 bp, Homo sapiens
  source
  (1)..(2869)
  CDS (201)..(1088)
  CDS (2478)..(2669)
attacactgttacaatttcttgttttcacatccatgttcttcagtggaccatttaaagagcaaagactacacctcaatcacctttatgttccatgtgaccgatatgaaaagagaatcagtaccatgagaaaactgtctggagtaatcttgacttggctgctatgattttacgagttatttctagggagtagcctttgtaaatggccttggggaatcacagcaccatcaccgagttcctcctccttgggctgtctgccgaccccaacatccgggctctgctctttgtgctgttcctggggatttacctcctgaccataatggaaaacctgatgctgctgctcgtgatcagggctgattcttgtctccataagcccatgtatttcttcctgagtcacctctcttttgttgatctctgcttctcttcagtcattgtgcccaagatgctggagaacctcctgtcacagaggaaaaccatttcagtagagggctgcctggctcaggtcttctttgtgtttgtcactgcagggactgaagcctgccttctctcagggatggcctatgaccgccatgctgccatccgccgcccactactttatggacagatcatgggtaaacagctgtatatgcaccttgtgtggggctcatggggactgggctttctggacgcactcatcaatgtcctcctagctgtaaacatggtcttttgtgaagccaaaatcattcaccactacagctatgagatgccatccctcctccctctgtcctgctctgatatctccagaagcctcatcgttttgctctgctccactctcctacatgggctgggaaacttccttttggtcttcttatcctacacccgtataatctctaccatcctaagcatcagctctacctcgggcagaagcaaggccttctccacctgctctgcccacctcactgcagtgacactttactatggctcaggtttgctccgccatctcatgccaaactcaggttcccccatagagttgatcttctctgtgcagtatactgtagtcactcccatgctgaattccctcatctatagcctgaaaaataaggaagtgaaggtagctctgaaaagaactttggaaaaatatttgcaatataccagacgttgagttaaaaaacaaacattgttggccgagcactgtggctcatgcctgcagcaggaggattgcttgagctcaggagttcgagattagcttggccaacatggtgaaaccctgtctccaaaaaaaaaaaaaaataggccgggcatggtggtgtgcacctgtaattccagttacttggaaggctgagggaggaggatcacttgagcgtgggaggtcaaggctgcagtgagctgagattgcaccactgcactccagcctgggcaacagagcaagaccctgtctcaaaaaaaaaagattttggaaaatttaggtcaagctgcatacaacatgacactggataagtttatagtagtaagtattcctggctaccctcagtgtctgatactgcaagctgtaaattagaagtgcatgagagaatggtacaaagttattacaagtaggaaggttaactttaatccctcttagtgacaaagcaaattattaaattattacctcaataaagttttgttatgaacatattgattcatttttctcattctaaaacattcatcttgggctttgcatttagtaaaatcattagcgtcgcaaatctatcatttttaatttactttggtgaacacactaaaagtcatggcatttaataagaacacagtgtcatggatgcgtgggagagaaaagtcactagataagacttgatgggaagaaagagaaagatttccaaccgtgtggccatagaagacataaacacctaagagaacttcagagagggaatcaacatactgaggcagaacttggactcagataaaattcccaagaacttcactgtgtgtgcagcttggtggccagctctccggtgcaaaagattgcaaggaggctctgtggctctagaaacttcattcctcacatggtcttcattcactgtatacgggatttatattttttccaattagctgatcttatcagtgtgtcttttccttgtagagtgcaggctatgtaccctagacaaataatcttgttttgacctcatctcaagtgaatcctgaaactatctttgtctcatctttcattgtttagtgtcaggtggtttgccggttctaagggcactgaaaaactctcacgtaataaacattttttcctataaaacaaatgcttctgatttgtttaagctatattttacaattgcctaacttactgtagttaactgaaaaggtgcaaaaactatctacaaattattgaatttattgaatattaacttgcacttttctcaagcttctttcacaaactctcttcgttctaattgtcagttttaaaagcttttcatgaaaaaaacgtatctgttacaagggggaaagaagcctccgggacagcagtcatttgcctcagctgcacaaaggccaggccagatggaagagaccagccttcaccgaaggccgcagggagcccggacacccggagctgagcattccggtcacgcctcaaccccaaggggcctgcgcatgctccgcgctgcgcgcggcgcccacggccctgccctgatacgcaggagccccgggatagagaaacccagatgaaaacacaagcccagtgagatgttggcctcctcatctgctaccctcgccgtcacctctgcgcaccaagccttctgtcccggagaagaagccgtatttggtctccctcgatgggcgagaccggggccacgcgggcaccgtgatcccgccactgcatcccggggaccc

SEQ ID NO: 594 - protein, 359 aa, Homo sapiens
MALGNHSTITEFLLLGLSADPNIRALLFVLFLGIYLLTIMENLMLLLVIRADSCLHKPMYFFLSHLSFVDLCFSSVIVPKMLENLLSQRKTISVEGCLAQVFFVFVTAGTEACLLSGMAYDRHAAIRRPLLYGQIMGKQLYMHLVWGSWGLGFLDALINVLLAVNMVFCEAKIIHHYSYEMPSLLPLSCSDISRSLIVLLCSTLLHGLGNFLLVFLSYTRIISTILSISSTSGRSKAFSTCSAHLTAVTLYYGSGLLRHLMPNSGSPIELIFSVQYTVVTPMLNSLIYSLKNKEVKGERSLRDSSHLPQLHKGQARWKRPAFTEGRREPGHPELSIPVTPQPQGACACSALRAAPTALP

SEQ ID NO: 595 - DNA, 1393 bp, Homo sapiens
  source
  (1)..(1393)
  CDS (201)..(674)
  CDS (756)..(1193)
aaaacaaacgagaaatgtattttaattaccttatgttgtatctcgcacactttctagcatagtgtatttcagtaaaaatttacagtgcaacatagtagatggccaataaaagtactttctttctttcttcttcttcttccttaaagctcagagaatagcatgctcaccaatctaaagtaaaacatttttatagaattctaatggggctcactcaagatttttttcctccgacctctgagctcctggaaggagggaatcagactagcacctttgagttcctcctctggggactctcagaccagccacagcagcaacacatcttcttcctgctgtttctgtggatgtacgtggtcactgtggctgggaacctgctcattgtcctggccattggcactgacacacacctccacacccctatgtacttcttccttgccagcttgtcgtgtgcagatatcttttccacctccaccactgtgcccaaggccctggtgaatatccagacccagagcaggtccatttcctacgcagggtgtttggcacagctctacttcttcttgacttttggggacatggacatctttctcccggctacaatggcctatgaccgctatgtggccatttgccacctgctccactatatgatgatcatgagcctccaccgctgtgccttcctggtgacagcctgctggaccctcacaagtcttctcgccatgactcgcaccttcctcatattccggctttccttgtgctcttagatccttcctggcttcttctgtgatttgggaccgctgatgaaggtgtcttgctctgacgcccaggtcaatgagcttgtgctcctcttcctagggggagcagtcattttaatcccttttatgctcatcctggtctcttatatccgcattgtttcagccatcctcagggccccctctgcccagggaaggcgcaaggccttctctacctgcgactctcacctcgttgttgttgctttgttctttgggacagtgatcagggcttatctgtgcccctcatcctcttcctccaactcagtaaaggaggatacagcggctgctgtcatgtacacagtggtgactcccctgctgaacccctttatttacagcatgcggaacaaggacatgaaggcggcggtggttagacttctcaagggcagggtctccttctcacagggccagtgacttctgctgagaaacccaaggtgttctccatcccctccagtgaggggcttgacagaaatttctacctcaagtgtgtaatttcggaatcccacatatcccttctcagcactcccctccctgaatgcgcactgcaagtttgaaggaaaatcaagattttgcttcgtgcttcatctgtgaagagcgccttatttgctcattta

SEQ ID NO: 596 - protein, 303 aa, Homo sapiens
MGLTQDFFPPTSELLEGGNQTSTFEFLLWGLSDQPQQQHIFFLLFLWMYVVTVAGNLLIVLAIGTDTHLHTPMYFFLASLSCADIFSTSTTVPKALVNIQTQSRSISYAGCLAQLYFFLTFGDMDIFLPATMAYDRYVAICHLLHYMMIMSLHRCAFLILPGFFCDLGPLMKVSCSDAQVNELVLLFLGGAVILIPFMLILVSYIRIVSAILRAPSAQGRRKAFSTCDSHLVVVALFFGTVIRAYLCPSSSSSNSVKEDTAAAVMYTVVTPLLNPFIYSMRNKDMKAAVVRLLKGRVSFSQGQ

SEQ ID NO: 597 - DNA, 1372 bp, Homo sapiens
  source
  (1)..(1372)
  CDS (201)..(1172)
agagattaattttctgtccaatatcatacagatcattaatactgaaacccaggatttcaaatgatcctgaagtaggtgatcttttcttgatctcacgctgcttctgacatactattcctggtgggctcttcctacatatcaggtcgttaaataagctgccagatttctgcctttacagcccaaggagcttgtcatggaccatgggcatggagggtcttctccagaactccactaacttcgtcctcacaggcctcatcacccatcctgccttccccgggcttctctttgcagtagtcttctccatctttgtggtggctataacagccaacttggtcatgattctgctcatccacatggactcccgcctccacacacccatgtacttcttgctcagccagctctccatcatggataccatctacatctgtatcactgtccccaagatgctccaggacctcctgtccaaggacaagaccatttccttcctgggctgtgcagttcaaatcttctacctgaccctgattggaggggaattcttcctgctgggtctcatggcctatgaccgctatgtggctgtgtgcaaccctctacggtaccctctcctcatgaaccgcagggtttgcttattcatggtggtcggctcctgggttggtggttccttggatgggttcatgctgactcctgtcactatgagtttccccttctgtagatcccgagagatcaatcactttttctgtgagatcccagccgtgctgaagttgtcttgcacagacacgtcactctatgagaccctgatgtatgcctgctgcgtgctgatgctgcttatccctctatctgtcatctctgtgtcctacacgcacatcctcctgactgtccacaggatgaactctgctgagggccggcgcaaagcctttgctacgtgttcctcccacattatggtggtgagcgttttctacggggcagccttctacaccaacgtgctgccccactcctaccacactccagagaaagataaagtggtgtctgccttctacaccatcctcacccccatgctcaacccactcatctacagcttgaggaataaagatgtggctgcagctctgaggaaagtactagggagatgtggttcctcccagagcatcagggtggcgactgtgatcaggaagggctagcagggactcccagagtatcagagtggtgactgtgatcgggaaggattagcggggactcccagagcatcaggggtggtgactgatcaggaaggactagcagggactagtgcaaacatctgcggtgctgcggccaataacgcagctattacagaaaatatggtattggttctgaagaatgttcagtgtcactttcagcaatt

SEQ ID NO: 598 - protein, 323 aa, Homo sapiens
MGMEGLLQNSTNFVLTGLITHPAFPGLLFAVVFSIFVVAITANLVMILLIHMDSRLHTPMYFLLSQLSIMDTIYICITVPKMLQDLLSKDKTISFLGCAVQIFYLTLIGGEFFLLGLMAYDRYVAVCNPLRYPLLMNRRVCLFMVVGSWVGGSLDGFMLTPVTMSFPFCRSREINHFFCEIPAVLKLSCTDTSLYETLMYACCVLMLLIPLSVISVSYTHILLTVHRMNSAEGRRKAFATCSSHIMVVSVFYGAAFYTNVLPHSYHTPEKDKVVSAFYTILTPMLNPLIYSLRNKDVAAALRKVLGRCGSSQSIRVATVIRKG

SEQ ID NO: 599 - DNA, 1357 bp, Homo sapiens
  source
  (1)..(1357)
  CDS (201)..(1157)
tcgtagttcactttagcttgtggccaacatgcgacttgacctaagatttgaacttatgattttatgtcagtttaactcaatatttagaaaaataattcaaagcacatgtcttaccagaaaaaggttaggaaagccatgtacataggaaagatttaaaattaatgacttttttttcctcagggggaaactgtgagccagtcatgtgctcagggaatcagacttctcagaatcaaacagcaagcactgatttcaccctcacgggactctttgctgagagcaagcatgctgccctcctctacaccgtgaccttccttcttttcttgatggccctcactgggaatgccctcctcatcctcctcatccactcagagccccgcctccacacccccatgtacttcttcatcagccagctcgcgctcatggatctcatgtacctatgcgtgactgtgcccaagatgcttgtgggccaggtcactggagatgataccatttccccgtcaggctgtgggatccagatgttcttccacctgaccctggctggagctgaggttttcctcctggctgccatggcctatgaccgatatgctgctgtttgcagacctctccattacccactgctgatgaaccagagggtgtgccagctcctggtgtcagcctgctgggttttgggaatggttgatggtttgttgctcacccccattaccatgagcttccccttttgccagtctaggaaaatcctgagttttttctgtgagactcctgccctgctgaagctctcctgctctgacgtctccctctataagatgctcacgtacctgtgctgcatcctcatgcttctcacccccatcatggtcatctccagctcatacaccctcatcctgcatctcatccacaggatgaattctgccgccggccgcaggaaggccttggccacctgctcctcccacatgatcatagtgctgctgctcttcggtgcttccttctacacctacatgctccggagttcctaccacacagctgagcaggacatgatggtgtctgccttttacaccatcttcactcctgtgctgaaccccctcatttacagtctccgcaacaaagatgtcaccagggctctgaggagcatgatgcagtcaagaatgaaccaagaaaagtagtaaaggacaagcattgtcccctcctctttctataattccgttactccctatctctcctctcttttgccctcaggtctccgggtccccagcacaaagcccactcatattttccttctttcttatacgtggcgttttccctccatactgcttattgctcccatttatctcattagatttaatatctttagagtgtttttaac

SEQ ID NO: 600 - protein, 318 aa, Homo sapiens
MCSGNQTSQNQTASTDFTLTGLFAESKHAALLYTVTFLLFLMALTGNALLILLIHSEPRLHTPMYFFISQLALMDLMYLCVTVPKMLVGQVTGDDTISPSGCGIQMFFHLTLAGAEVFLLAAMAYDRYAAVCRPLHYPLLMNQRVCQLLVSACWVLGMVDGLLLTPITMSFPFCQSRKILSFFCETPALLKLSCSDVSLYKMLTYLCCILMLLTPIMVISSSYTLILHLIHRMNSAAGRRKALATCSSHMIIVLLLFGASFYTYMLRSSYHTAEQDMMVSAFYTIFTPVLNPLIYSLRNKDVTRALRSMMQSRMNQEK

SEQ ID NO: 601 - DNA, 4256 bp, Homo sapiens
  source
  (1)..(4256)
  CDS (201)..(391)
  CDS (493)..(793)
  CDS (879)..(1661)
  CDS (1776)..(1979)
  CDS (2114)..(2234)
  CDS (2361)..(3315)
  CDS (3713)..(3890)
  CDS (3979)..(4056)
tggcctcaggcagagtctgacgcgcacaaactttcaggcccaggaagcgaggacaccactggggccccagggtgtggcaagtgaggatggcaagggttttgctaaacaaatcctctgcccgctccccgccccgggctcactccatgtgaggccccagtcggggcagccacctgccgtgcctgttggaagttgcctctgccatgctgggccctgctgtcctgggcctcagcctctgggctctcctgcaccctgggacgggggccccattgtgcctgtcacagcaacttaggatgaagggggactacgtgctgggggggctgttccccctgggcgaggccgaggaggctggcctccgcagccggacacggcccagcagccctgtgtgcaccaggtacagaggtgggacggcctgggtcggggtcagggtgaccaggtctggggtgctcctgagctggggccgaggtggccatctgcggttctgtgtggccccaggttctcctcaaacggcctgctctgggcactggccatgaaaatggccgtggaggagatcaacaacaagtcggatctgctgcccgggctgcgcctgggctacgacctctttgatacgtgctcggagcctgtggtggccatgaagcccagcctcatgttcctggccaaggcaggcagccgcgacatcgccgcctactgcaactacacgcagtaccagccccgtgtgctggctgtcatcgggccccactcgtcagagctcgccatggtcaccggcaagttcttcagcttcttcctcatgccccaggtgggcgccccccaccatcacccacccccacccagccctgcccgtgggagcccctgtgtcaggagatgcctcttggcccttgcaggtcagctacggtgctagcatggagctgctgagcgcccgggagaccttcccctccttcttccgcaccgtgcccagcgaccgtgtgcagctgacggccgccgcggagctgctgcaggagttcggctggaactgggtggccgccctgggcagcgacgacgagtacggccggcagggcctgagcatcttctcggccctggccgcggcacgcggcatctgcatcgcgcacgagggcctggtgccgctgccccgtgccgatgactcgcggctggggaaggtgcaggacgtcctgcaccaggtgaaccagagcagcgtgcaggtggtgctgctgttcgcctccgtgcacgccgcccacgccctcttcaactacagcatcagcagcaggctctcgcccaaggtgtgggtggccagcgaggcctggctgacctctgacctggtcatggggctgcccggcatggcccagatgggcacggtgcttggcttcctccagaggggtgcccagctgcacgagttcccccagtacgtgaagacgcacctggccctggccaccgacccggccttctgctctgccctgggcgagagggagcagggtctggaggaggacgtggtgggccagcgctgcccgcagtgtgactgcatcacgctgcagaacgtgagcgcagggctaaatcaccaccagacgttctctgtctacgcagctgtgtatagcgtggcccaggccctgcacaacactcttcagtgcaacgcctcaggctgccccgcgcaggaccccgtgaagccctggcaggtgagcccgggagatgggggtgtgctgtcctctgcatgtgcccaggccaccaggcacggccaccacgcctgagctggaggtggctggcggctcagccccgtcccccgcccgcagctcctggagaacatgtacaacctgaccttccacgtgggcgggctgccgctgcggttcgacagcagcggaaacgtggacatggagtacgacctgaagctgtgggtgtggcagggctcagtgcccaggctccacgacgtgggcaggttcaacggcagcctcaggacagagcgcctgaagatccgctggcacacgtctgacaaccaggtgaggtgagggtgggtgtgccaggcgtgcccgtggtagcccccgcggcagggcgcagcctgggggtgggggccgttccagtctcccgtgggcatgcccagccgagcagagccagaccccaggcctgtgcgcagaagcccgtgtcccggtgctcgcggcagtgccaggagggccaggtgcgccgggtcaaggggttccactcctgctgctacgactgtgtggactgcgaggcgggcagctaccggcaaaacccaggtgagccgccttcccggcaggcgggggtgggaacgcagcaggggagggtcctgccaagtcctgactctgagaccagagcccacagggtacaagacgaacacccagcgcccttctcctctctcacagacgacatcgcctgcaccttttgtggccaggatgagtggtccccggagcgaagcacacgctgcttccgccgcaggtctcggttcctggcatggggcgagccggctgtgctgctgctgctcctgctgctgagcctggcgctgggccttgtgctggctgctttggggctgttcgttcaccatcgggacagcccactggttcaggcctcgggggggcccctggcctgctttggcctggtgtgcctgggcctggtctgcctcagcgtcctcctgttccctggccagcccagccctgcccgatgcctggcccagcagcccttgtcccacctcccgctcacgggctgcctgagcacactcttcctgcaggcggccgagatcttcgtggagtcagaactgcctctgagctgggcagaccggctgagtggctgcctgcgggggccctgggcctggctggtggtgctgctggccatgctggtggaggtcgcactgtgcacctggtacctggtggccttcccgccggaggtggtgacggactggcacatgctgcccacggaggcgctggtgcactgccgcacacgctcctgggtcagcttcggcctagcgcacgccaccaatgccacgctggcctttctctgcttcctgggcactttcctggtgcggagccagccgggctgctacaaccgtgcccgtggcctcacctttgccatgctggcctacttcatcacctgggtctcctttgtgcccctcctggccaatgtgcaggtggtcctcaggcccgccgtgcagatgggcgccctcctgctctgtgtcctgggcatcctggctgccttccacctgcccaggtgttacctgctcatgcggcagccagggctcaacacccccgagttcttcctgggagggggccctggggatgcccaaggccagaatgacgggaacacaggaaatcaggggaaacatgagtgacccaaccctgtgatctcagccccggtgaacccagacttagctgcgatcccccccaagccagcaatgacccgtgtctcgctacagagaccctcccgctctaggttctgaccccaggttgtctcctgaccctgaccccacagtgagccctaggcctggagcacgtggacacccctgtgaccatctgggccccagagccaagctgtgtccctgtccctctgtgcccagaccaggcctgcccaggtaacccagacccactgttctggaaagaggcccggagggctcccagggtacccgcaacccacaccgtgagctcaggaaaaggacgcagggaggccccggccagatggctggaagcccaaatcaggccctgccgacctgaccatgtcccaccagggcccccatcctgcaccctgccaggcaccacagcagtgggaggccaggtgggggcacacaggcatatgcccagggcagagcccgccgaggtaggggtggcacccagcttcctactctgccctttgcccagtgggtagacagcatcatgactgtcaccagtaccagggacagagcccaggtggggtgggggcggggtccagcaccacggccagcaccgaccaccaggaccccggagccagcaccatggacagaaaactgcccaccaggatctgacgccagcacgccgccaggcccacacagggtctccggtcagagtcccagggtcagctcccagcagggcctaggggaggctggaccagctccctgtgcctcattccaaggcagcccagccggagagaaggggcacaggccacacatctgtcccataaaattaaacgctttttagtgtttaaaataagcagcatttacacagaagcagctctatgttaaccatctaaacgctgggactttgatacagtatctacagcacagacacgtgggggcc

SEQ ID NO: 602 - protein, 936 aa, Homo sapiens
MLGPAVLGLSLWALLHPGTGAPLCLSQQLRMKGDYVLGGLFPLGEAEEAGLRSRTRPSSPVCTRFSSNGLLWALAMKMAVEEINNKSDLLPGLRLGYDLFDTCSEPVVAMKPSLMFLAKAGSRDIAAYCNYTQYQPRVLAVIGPHSSELAMVTGKFFSFFLMPQVSYGASMELLSARETFPSFFRTVPSDRVQLTAAAELLQEFGWNWVAALGSDDEYGRQGLSIFSALAAARGICIAHEGLVPLPRADDSRLGKVQDVLHQVNQSSVQVVLLFASVHAAHALFNYSISSRLSPKVWVASEAWLTSDLVMGLPGMAQMGTVLGFLQRGAQLHEFPQYVKTHLALATDPAFCSALGEREQGLEEDVVGQRCPQCDCITLQNVSAGLNHHQTFSVYAAVYSVAQALHNTLQCNASGCPAQDPVKPWQLLENMYNLTFHVGGLPLRFDSSGNVDMEYDLKLWVWQGSVPRLHDVGRFNGSLRTERLKIRWHTSDNQKPVSRCSRQCQEGQVRRVKGFHSCCYDCVDCEAGSYRQNPDDIACTFCGQDEWSPERSTRCFRRRSRFLAWGEPAVLLLLLLLSLALGLVLAALGLFVHHRDSPLVQASGGPLACFGLVCLGLVCLSVLLFPGQPSPARCLAQQPLSHLPLTGCLSTLFLQAAEIFVESELPLSWADRLSGCLRGPWAWLVVLLAMLVEVALCTWYLVAFPPEVVTDWHMLPTEALVHCRTRSWVSFGLAHATNATLAFLCFLGTFLVRSQPGCYNRARGLTFAMLAYFITWVSFVPLLANVQVVLRPAVQMGALLLCVLGILAAFHLPRCYLLMRQPGLNTPEFFLGGGPGDAQGQNDGNTGNQGKHEAPILHPARHHSSGRPGGGTQAYAQGRARRGRGGTQLPTLPFAQWVDSIMTVTSTRDRAQDLTPARRQAHTGSPVRVPGSAPSRA

SEQ ID NO: 603 - DNA, 1360 bp, Homo sapiens
  source
  (1)..(1360)
  CDS (201)..(1160)
aaggtcattcaggggtccaacagcaagtatttcagatgattttggcatggaggtaaagcttaagagatatttctaactggtttcttcaggattccagaatcagcttgagtaactcattacagaaaggaatgaagcaatattcagtgggtaatcaacattccaattataggagtctcttgtttccttttctgtgttcacagatgacacagttgacggccagtgggaatcagacaatggtgactgagttcctcttctctatgttcccgcatgcgcacagaggtggcctcttattctttattcccttgcttctcatctacggatttatcctaactggaaacctaataatgttcattgtcatccaggtgggcatggccctgcacacccctttgtatttctttatcagtgtcctctccttcctggagatctgctataccacaaccaccatccccaagatgctgtcctgcctaatcagtgagcagaagagcatttccgtggctggctgcctcctgcagatgtactttttccactcacttggtatcacagaaagctgtgtcctgacagcaatggccattgacaggtacatagctatctgcaatccactccgttacccaaccatcatgattcccaaactttgtatccagctgacagttggatcctgcttttgtggcttcctccttgtgcttcctgagattgcatggatttccaccttgcctttctgtggctccaaccagatccaccagatattctgtgatttcacacctgtgctgagcttggcctgcacagatacattcctagtggtcattgtggatgccatccatgcagcggaaattgtagcctccttcctggtcattgctctatcctacatccggattattatagtgattctgggaatgcactcagctgaaggtcatcacaaggccttttccacctgtgctgctcaccttgctgtgttcttgctattttttggcagtgtggctgtcatgtatttgagattctcagccacctactcagtgttttgggacacagcaattgctgtcacttttgttatccttgctccctttttcaaccccatcatctatagcctgaaaaacaaggacatgaaagaggctattggaaggcttttccactatcagaagagggctggttgggctgggaaatagatacagatcctggagactctaaaaagcctcttggaagagcaaaatttcactgttatttatcttttccatgtctatcctctttctgtattgctgcaactacttgttctattatttttaaaaagaatgataaactgctgtatacaggctgtggatggtaagtggatggccagtttacatcaatgcctctaccatgcttgtta

SEQ ID NO: 604 - protein, 319 aa, Homo sapiens
MTQLTASGNQTMVTEFLFSMFPHAHRGGLLFFIPLLLIYGFILTGNLIMFIVIQVGMALHTPLYFFISVLSFLEICYTTTTIPKMLSCLISEQKSISVAGCLLQMYFFHSLGITESCVLTAMAIDRYIAICNPLRYPTIMIPKLCIQLTVGSCFCGFLLVLPEIAWISTLPFCGSNQIHQIFCDFTPVLSLACTDTFLVVIVDAIHAAEIVASFLVIALSYIRIIIVILGMHSAEGHHKAFSTCAAHLAVFLLFFGSVAVMYLRFSATYSVFWDTAIAVTFVILAPFFNPIIYSLKNKDMKEAIGRLFHYQKRAGWAGK

SEQ ID NO: 605 - DNA, 972 bp, Homo sapiens
  source
  (1)..(972)
  CDS (201)..(604)
  CDS (640)..(772)
accgagccagaggcgcttcaggaagcaagagaagtccccgcgcgctccgggacccggcgcagctcatggtgagcgccctctggggctcgagggtcccttggctgagggggcgcatcctcggggtgcccgatggggctgcctgggggtcgcagggctgtagttgggatcgcgcacaaaccgactctgcggcccagcccgaaatgctgccgccaaggagcaacggcaccgcgtacccggggcagttagcgctgtaccagcagctggcgcaggggaatgccgtggggggctcggcgggggcaccgccactggggcccgtgcaggtggtcaccgcctgcctgctggccctactcatcatctggaccttgctgggcaacgtgctggtgtccgcagccatcgtgcggagccgccacctgcgcgccaagatgaccaacgtcttcatcgtgtctctacctgtgtcagacctcttcgtggcgctgctggtcatgtcctggaaggcagtcgccgaggtggccggttactggccctttgaagcgttctgcgacgtctgggtggccttcgacatcatgtgctccaccgcctccatcctgaacctgtgcgtcagcaggtcatcagcgtggcccgctactgggccatctccaggcccttccgctacgagcgcaagatgacccagcgcatggccttggtcatggtccgcccggcctggaccttgtccagcctcatctccttcattccggtccagctcaactggcacagggaccaggcggtctcttgaggtgggctggacctgccaaacaacctggccaactggacgccctgggaggaggccgtttgggagcccgacgtgagggcagagaactgtgactccagcctgaatcgaacctacgccatctcttcctcgctcatcagcttctacatccccatggccatcatgatcgtgacctacacgcgcatctaccgcatcgcccaggtgca

SEQ ID NO: 606 - protein, 178 aa, Homo sapiens [sequence omitted]

SEQ ID NO: 607 - DNA, 84510 bp, Homo sapiens
  source
  (1)..(84510)
  CDS (201)..(272)
  CDS (29879)..(29999)
  CDS (45509)..(45616)
  CDS (50871)..(50974)
  CDS (58541)..(58638)
  CDS (60172)..(60304)
  CDS (62427)..(62580)
  CDS (71080)..(71140)
  CDS (72348)..(72417)
  CDS (75647)..(75738)
  CDS (77542)..(77668)
  CDS (82828)..(82869)
  CDS (84170)..(84310)
ggcggcttagcgcgcgcggccacctggtccgaggaggagcagtcccggggcccgccgcaggtcgggtggctcagccatggctcctcggggcgcagcggccggccggagcccgggaccctgcgcggggcgctgagctcccgagcgggcagagggcacgggcaggcggacgtcggggcgccctcggggaacgtgcgggcaccatgcgtccccacctgtcgccgccgctgcagcagctactactgccggtgctgctcgcctgcgccgcgcactcggtgagtactgcgcccttctgcaggctggggacccgagggagcgacagtctcgccctttctccggcctcgggcaggatgcaggtggagagggactagcagatcttcccatgaggaatagggactcttccctcccaatcctcccaacattaatctctcccagctcttctccggagggaccctttcccaaagaaaaacatcgtgcgcgccagacgaaggcggctctaagatgaatccctgtgcccaccaccgaccccttcctctggtctggcttctgaaactctcctacacggaaattctggagccgcccgtggcagtgcctactgtgtcctgggcgctttgcctccaatctttccttgaaacctggtaatcacctttcgaggctgctattatcaccgtcactttacagacaaagaaaggaaaggaaaggagaggagagggggaataaaaattcttgctgcaagtcagaaaaagaggattggaacccacatcagtatcagtctgcccccaaaccttgacattttcacactcacgggctgcggatgggaaaacctgagggagctctggcaggagcttctgggtctgcgatgggaccgcctgccgctctccccacaccgtctcgtgtgggatgcggctccctaatgtctgcgtgcctggtggctccagggcgctgctgttccccaaagccaggtcctggcaaggggctggaggaggaaaataataataataataataataataataataataataataataataatagcggcaggatgggtggtttgtttttctttccaacagaaattcctgggagtcccgggcctctctgagctccgggatctctgataaagagagtggccccacccagaccagcagaaaggaaggaatggggagggagtgggggttagaggtgggggccagattccagaatcatcccttcccactagcattccaaattggtccccaagtcgtctcttccaagaagctccccagggaacgcgcttggggacccaactgagtctctgatctctgtcctgggcaagtctcatggtgtccagcctccttgtcttcccttagtctcctctggtttgattataaggaaaaccaatgctcccggagccgaccagagtgttgacactcaggagatgctcatttttctggtagccccaagactttcagcagcagtagttgggatgagtgcaatttggagcttgcttggagctcccttgccaccgtggagcctcctctcttcagtggcagtgctggccttggaagacgctagagcaacagcatgcactcatgagttttgactcccaatttggagaaatgccaactgggatactggggacagtgcaaagccaggtagagccagaaggtgtgttattccgtggctgggggtgggagaggcaatagctccttccttgggaccctcccagcctccttcttaagtatttgcagtgactctgagactgtcgtaactggtacctcgagtgcaggactgaggttcagcctacatttttatctcaaggaaatccctggattatcacaggaataaatggaaggggaaaatgagaggcttcacttggtttaagtcttcagtgtaccttggaaggatgcttcattatgctatggtcccaatccctcattttaaaaatgagcacactgagactctcagagagaagggagctgcccgagatcagcaagttagtagtagagccgggactagcagctctactcgccccacataccccacttaacccactaaggttagcacccagatctcttgattcccaaccatccagggctctgtcttttataccccttgtatttcctttttctttttcttttttttttttcttttgagacagagtttcactcttgttgcccaggctggagcgcagtggcgcgatcttggcttactgtaacctccgcctcccaggttcaagggattctcctgcctcagcctcccaagtagctgggattacaggcatgtgccaccatgctcggccaattttttgtatttttagtagagatgggatttctccatgttggtcaggctggtctgaaactcctgacctcaggtgacctgcctgcctcggcctcccaaagtgctgcgattagaggcatgaaccaccgcgcccggcggtcccttgtattttcaaatgtgcattactgccttacataatcacaagatggtttcctgtgtataagtcgtggtccttgggttattttacggcttctgtagaccttagatctcacacttcttggctgagaactcctgtaataaataggagtggaactgacctactttggttggaatatttcccagcctctggagccctgctttccttctgtttgactctgggtggtcacacatttgattttgaaatctaagtgtgttcaaataattttttattcatttgaagctcccccttgagggagattataggcatcttcccaatggaggggggtcagtgaggccaaattgcttattaccgctctccctctactccatatagggaggcgtcagaagtgacccttgtaagtgaaacccaaaaagtggccgaatggggcagttttctgaggcctccctataagaaatactgatcacagccccctctgcggccccacccccatacatctcatgagaacttttacctggaacattactgtaattatttactaacacatctgtcccccaaaccccaatatgcacactttgaacttgaacatggagactcatcttgttcatctttcatccctagagtctgtcacagtgtaagaaggagctcagtgagtgtttgttgaatgaatgcatggatgactgaatgaaatcatgctgatgcagcaacaaataaggaagaatcacctcttgaaagcactccttacttgctaaattgtacagaaatgtgtcaggctgtagagaaagagtcactcaaggtagggctttttaatccatgacatttggcaaactgccaatttgttaaccttagtgagttaagtgaggtgtgtggggctggtttttccttcaagcagagtttcttcacactactgacatttggagccagataattctctcttctgagagctgtcctgtgcattgtacaatgtctagcagcatcatggacctctgccctctagaagcccatgatcactccaaagctgtgacaacagaaaatgtatctctagacattgccaaattttttctgggggtaggaagggcaaaatcgcccctgcttgagaaccgttgccttaaaggttgtcatgtttcaggacagatacacagatagggctaacaataggtattcatttcacattgggtttggggcagtggggttggtgatacggcatctgagtcagaggatggaaacaggtgtgcctgatgaaaaccagtttccaaactggacaaaggacttctgtggagaatgtttccttgatctattccaccctcccttcccatctttttccctcctatctccatccctcctcagttgatggctaagaaatataaaaattccaagtacaggctctggcacatggaagccttcagtacatggtggtcgctgccctgtccggtcatgcatctggatccagaagctgacaagccctgtggctgcacagtgagcagaaccttagaaaggcctgcaagcgttgcctgcagagctggtaattaccctgttgcccgggctggagtgcaatggtgcgattatggctcactgcagccttgaacttcctggctcaagtgatcttcccacctcagcctcccaagcagctgaaactacagacacctgccaccatccccatctaattttttaatttttttagagatgggtctcaccatgtctcccaggttggtcctgaactcctgggctcaagtgatcctcctgccttagactcccaaagtgttgggattatgggtatgagccaccatgcccagcctgggagctgattattgatgacttttcagagagggtcactggggattttttttgtgtacctggaaaaacactttctagttttctgaagaagtatttgtggatttcttttgagatttttattatccctgaagttaataagtgaaggatgatgaaggctcctttaattgactcttattttctaccagacactctgctgagtccctcctaacactaacactcacttcaacagttattagccccatggtgcagatgaggaaactgacacttggatagatgtgaagccatttgcttaaggccacccagctggacatggtgacatgagaccttaaacctggaacttcttttttgtttttttttcttttttttttctttgtttttcttttctttttttctttttttttttttttttgagacagagtctcatctcactctgtcacctaggctggagtgcagtggcgagatcttggctcactgcaacctccgtctcccaggttcaagcgattctcctgcctcagcctcctgagtagctgggactacaggcatgcaccacaatgtctggctaatttttgtattttttagtagagatggggtttcaccacattggccaggcttgtcttgaactcctgacctcgtgatccacccaccttggcctcccaaagtgctgggattacaggcgtgagccaccgcagagcttcttaaccagcacatgcatctgctccaaaagagaggcctgttccgggtttctggtgcccaaggagctgtcataaaattatctcccaaacttcaaaatagcattaattttcatttaaactaatcaatttgtgaaacataaaaaaatactgagttacacacagcatttattgaggggcccagaaatgagcatggggtcacaaaatccaacaggaggagataccagttcccaaacagtttaggggagtccacttaggcggagcgcggtggcccatgcctgtaatcccagaactttgggaggccgaggcgggtggatcacctgagatcgggagtttgagaccagtctgagaccagtccgaccaacatggagaaaccctgtctttactaaaagtacaaaaaaattagctgggcgtggtggcctgtaatctcagctactcgggaagctgaggcaggagaatcgcttgaacttgggaggcggaggttgcagtcagctgagatcatgccattgtactccagtctgggcagcaagagcaaaactccgtctcaaaaaaaaagggggagtccacctgctttggcatcgtcaccctttggagttcccgcagaacttcccaacctcaccctgtcctcatgatccccacccaggttgggaagtccccagatttcctaccatgacaagggaggacatagcctctcttcctggcacccccttgctgaaagcctagatttaatatctgggattcgagctccaccaccagaacagcctcttgcagtgagccccagcttggtctctgcatccctgctcttagcaagctgtaggttctcaccactgaccttcactcaggcttcgggacaacctgcagctcaaggtaaaaccacaatactcagatgctatctacttgcttacattacaaacagaaggctgctcagcattcctatggactcctggggcccacccagcctctacattgtgcgtctgttccaaggatggcatttggggagggtcatccctggttcatcacgtcccgcagtcttagcccattgtgctgcaggctcctgaggttcccagagtcatctccagatcctgccatgccccaccccacttccctcacctgaggctcttaggcgtgctcctgatggccacgtgtctttcaaatttctcacctcccgcctccctctcatgttcaacagatgggctcaccttccatttcccaagagttgagactacctggatgaacttctaaccaacatcttgcccttacagatgtgtctaaattgtaccctctgttcctttccttcccgtctgtcttagtcagctgtgttatcataacaaaataccacagacttggggacttaaacaaaagaaattaatctcgcggttctggaggttggaagtgtgagatcaagatccccaagggtttggtctctggtggggaccctcttcctggcttgcacatggccactttgtcctcatgtggcatttccagtgagtgtgtggatgcaggggaggggagggaaacacctttctggtatttcttcttgtaaggacactaatcctataggatcagggccctattactacaatgctgtttaaccttaattacctccttatgggccctacctccaaatacagccaccctgggggtagggcttcaacatatgaatttagtggagacacattcagtccataacagcatccaagtggaagagaggctgttccccagacaacagcctgtccctactcctacccctaccgacttccttcccaggacaacacaatgacagccatctcacccaaccttcaccctcttcctctccgctgacttttctcatcagctggttaacttccccaagtctatccagcccaggcagtaaatagccctctgctctctgccccctggtggccagcttcctgtaagacgcgtccaccttcattgcctccacttcactcactctcacactgcaacctggctcccacgctccacccacagaaaccagcctcaccagtgcccttcgatttgccacattcactggattcttttttataatcttttttaaaaaataaaaattgtagactaagcacggtggctcactcctgtaatcccagcacttggggaggctgaggcaggtggatggcttgagcctgggagttcaagaccagcctgggcaacataggagaccttgtctctacaaaaaattttaaaaattagctgggtgtggtggtgtgtgcctgtagtcccagctacccaggaggttgaggcgggaggaatgcttgaaccagggaagtagaggctgcagtgagccatgattgtgccactgcactccagcctgggtgaaagagtgagactccgtctcaaaaaaaaaaaagcacttaaagtgtacaacatgatattttgaaatacacagtgaagtgattactatagtcaagcaaattaacatatgtttcttcacaaagttaccatttgtgtgcatgtgtgtgtgtgtgtggtaagagcacctgaaatctactcttatggcaaaattccagtgtacgatacagtgttattattattgttattacttttgagacagaatttcgctctttttgcccagcccagagtgcaatggtgcgatctcagctcactgcaacctctgcctcccgggttcaagaggttcaagtgatcctcccgcctcagcctcccgagtagctgggattagaggcatgcgccaccatgcctggctaattgtgtatttttagtggggacgcggttccaccatgttggccaggctggtcttgaacttccgacctcaggtgatcagcccacctcagcctccccaagtgctgggattataggcgtgaaccaccacacccggcccgatacagtattattaactatagtcttcatgctgtacattagatctctagacttattcatcctggtgtaactgcaacttcataccctttgacctatatctctccattcccaccccctcccaggccctggcaaccaccattcaactccctgctgctttgtattcaactttgtaatattccacatataagtaagatcatgcagtatttttctttctgtgaccagcttatttcacttagcaccatgtctttcaagtttattcatgttgtcactaatgataggatctccttttttaaagctgactggcattccattgtatatatgcagcatgtttcttcatccattcatctgttgagagacacgtaagttgctcccacatcttggcaatggtgaatagtgcttcagtgagcatgggggcacaggtacctctacgaggtgctgatttcatttcctttgggtttatgaccagaagtgtgattcctgaatcatatgttagttctattttgaatttttttgaggaagctccatgctgtctttcataatggctaagccagtttacatttcttccaatagtatgtaagagtctccttttctccacatcattgttagcacttgttctcaccccacattagcccccctaacaggtgtgagatgatggctcattgcggctttgatttgcatttccttcatgattggtgatgttgagcagcttttcatttacctgttggccatttgtatgcactagatactttccagtccggatcctaccaagggtcatccatgcagtttttgagagagaagagatactatgaatagttacactgagacactaggaaatacccaacacatcttagaggcatgcagtgctgggcacctccttcctttccatcttgccagcaacatggctcaggccaacgtggttctgagtctgaccgcctcagaatcagggaagatgatggtggaactcagtcagaagctagagtcctgggaaccatggggggaccacttgtgcaagttctaaaatccaaggctgtagaacctgggattctgatgttcaaggacaggagaagggtgtcccagttccaggaaagagagagaaagagagagagtaagttagtgaatttacctttctctgccttttttgttgtattcagtgcccagccgattggatggtgcctgcccacgttgaagcagatcttcctcactcagtctaccaactcctgagccaatctcctccagaaacacccagaaatagtgttttaccaactatgcagttagcccttaatccagtcaagttgacactgaaaagtaattatttcaaagacaatcctcacgtcttgcttaaatggtagagccatctcctaggggttctttactactactctgaccccatcctccttccttctcataatggcagacttggcaatgccactcccatttaaaattcctcacagcacttacattgggccctctggccattgacttctctggcccctgttggagaccatgagcttcaaggacagaatctatgtcccattcaccttcatgtcaccagtgatgggcagactgctaagcatatagtaggtgcccaataaatgtttgctaaaattttgagttttgaataggttatataatgatgagtttcctgtttttatttctcattgtataaattagactattactttcctttccccccttgaagcgatatctttccagtctctggttgttaggcaagtaattataaagtgtgagaagagagatgatgttgagtctctttaccttattcagattttttttttcttttgagacagagtctagctctgttgccaggctggagtgcagtggcatgatgttggctcactgcaacctctgcctcccgggttcaagagattctcctgcctcagcttcctgagtggctgggattacaggcatgcgccaccacgcttggctgatttttttgtatttttagtagagacggggtttctccatgttggtcaggctggtctcaaactcccgacctcaggtgatccacctgccttggcctcccaaagtgctaggattgcagccgtgagccactgcacccagcctttattcagaatttaaaagatttttattatatctcctcccagattttgccatcttgacttaagagtccaaaattaaactccaaaatagctaacagaacccacttgacatattttctctcttatttgtgtcttctttgttattctttctctctgcagactggatttttctgttgctttctacaggatagtatatggatgctccatagcctccaagtttgcatgctttggaaatgggagagattggctttctccccatgccaacaccaaatatccaaggaaggcagattgtctcacacctggttaggttttctcctttggtctaatcagtgggataggatcacacagcataaaccacccagcctagacatgaaagggttcttcccagggggcagttgttggttcaggggctaagcagacacctcaaaacatgtctaccatctggaaaaataacccaaagaaagagatggtggaagttcatcatagaattgtcaagcaagaggtgaacttatacaccacagtgggaccaaccacgactatgtgttgagtgagacaaagggtgatacaccctgcagagacactgttagacatgcagtgactcacacagtttacaacttaagcacttcttctttaaaaaattaccatagttttatgtagcaaaaccaaaactcaatgtaaaattatgggatactaaaaagtggaatttacccagaaaagcaatggatgggcaccagttccatggttctgcaaaagaccctagaaaagattcagttcagaaaatcaaagggctccttgaagaacaccccagagaagacagtaggcaatgttacagaaagccgttctcttcagaaccttgaagtacagctctgatgtgtaattaatgaggtgaaggcctgtgaattttgtgatcaacaagaaaaaagaaagtggatttaaaattctaggaaaagacaaaagttatacaaaacgtttgtggtctaaatattttaaaatccaaactttgacatgattttagcaatatttccaaaactccatgtaatgatgacttagactcaggctctgaaaccaaaaaggaaagaatatgtaatgtatgtttttgtttagttaataaaaataataaaataatatagaaaagtaccatttagtgatttttctctgacaatctcttattaaatttttgaggaatttttttaaatatgcttagggcattcagtttaagatgacagattgaccacatatatttatctgctctgtctctggaaacacttttaaaatgacagtaaaggaatagaaaaggtataaacccatacaaagagaacaaaacaagagacagagatgaagcagaaatttccagaaatctttggaaaatgaaaagtgatgaagtgatagctgtatggaaagaataacctcaatgcctgtagcaggcagaggagaaactgtcaagtcatcctgtggcaccctggaaaggccccagacactgaggagagtccactcatagaccccagcagtgggctccctcttggcctggttatgttacagtgaaggccaccaggcaagaagctgtttaggtccacagtgtttccaaggactatgttactgtctcaagcttagatcgtacattgaggagggcctccaatgtggaagcaaacaatcatgagaaaagtgcctcaaggaaacagatcatgtagacaagaggagacaaacttaagacgtacaactaatatttggaaatcctttgtgaaaatgatgcctgagccacaaaactagaaaaggatgctatagaaaaggaatcatctcagagtaagaaaggattcttggaagttaaatgtatgaaacaaaacattcataaaaaaactctacagataatgtcaaggaaatcttttataaagaaaatcacaaaggctgggcacggtggctcacgcctgtaatcccagcattttgggaggctgaggagggttgatcacctgaggtcaggagttggagaccagcctgaccaacaaggtgaaaccccgtctctactaaaaatacaaaaattagctgggcttggtggcacgcacctgtaatcccagctactcgggaggctgaggcaggagaatcagttgagcctgggaggcagaggatgcagtgagctgagattgcgccactgcactccagcctgggaaatagagcgggactccatctcaaaaagaaagaagaagaaggagaaggagaaggagaaggagaaggagaaggagaaggagaaggagaaggagaaggggaaggggaaggggaaggggaaggggaaggggaagaggaagaggaagaagatcacgaagacaaaatggtagaatagtagagaaagatgaaaagattggagaatcagtgcacctcgtccgatactctgctagtgggaattccagagagacagcataaagatgaagggaggaaataataaattaaaaacataatattttttaaattcccagaaatgaagaacacaagtcttcagattgaaatgctgactgagtatccaatcaataaatttaaaaacaaccatttcctcaagaaatttcaaaatacctaagaacaaagaaaaatcttacatatatctagggacaaaacaaaaaagttgtatacaaaagatttggaatcagaattggatttcttattaacaatacaagaagaggagaaatgccttcaaaatttggaaggaaaattatttcagcctagtattttctacccaaattgttaattagtttaataattaatcaaattaataaaaatattttcacttctgcaaagattcaaaaatttacccccatgtactttttcttaggaggttactagagaattctgtgcttttgcaaaatgagagcaaaccaaggaaaaagccatgatacctaggaaatgagaccccagccaggagacagggagagggcaccccaaaccacagccagatagcaggcctgggtggagcaagaggaaggagaactctgagacagaaatatccggaggaaaaaccaataggactgtggatagatgtgtaacagagctgtgggagcacttggaaaaattagccatatgtacatggaaaactaatccaatgaaaaaacaataatgatagacctcaggaaaaacaaaatgtacaagaaagacacataatcattttacatgatttgactcagcagcgaacaatatttcctagtcaaaataagtcattataaatgtagaccattcttcactaaaaatgaaatgaagattagtatatgtaatatatgaggagagaagtatatgtagggagattttaaaacatctcatctttctcttccctaataggaagtttgactgtctcaaatttaaaaaccaagaaataacaacagtaaaagaatataattttttttttttgagacggagatctcaaagagattgctctttcacccaagctggagtgcagtggcgctatctgggctcactgcaagctctgcctcccaagttcacaccattctcctgcctcagcctcccaagtagccaggactacaggtgctcgccatcacgcctggctaattttttttttttgtatttttagtagagacggggtttcaccgcggtagccaggatggtctccatctcttgaccttgtgatctgcccgcctcagcctcccaaagtgctgggattacaggcgtgagccaccatgcccagccaagaatataattttaaaacatggagacaaaaatgaaaataaacaactaaaaggagttgaaaatggttgcctggagagcaggtaaaggttatggaagggaaatactatttgtcattatactctttggtactagtacaaatttaaaaaaaaggctcagtgtggttatacaaactcaattttaaaaatttaaagggatttaaaaaaaatgaatagctcttgttttgaggaaaattttacataaagttcagcaattctttcatcttcatttgtccctcctgtgaattacaactaaaatgtatttaatacttttaaatttaatgaatatatacaatatgtgtacatatacacatgcatatagctactaaatgtcagcctctccccctcttctctaggttgatgtagatagcaaaagggcttgtttctcatctcccacatcttctgggtggttgctccaaggagccacatgctcttcccaggcgctcccagcaaccctggggaccccagtccctctttgccggtcaccacctggaaacatggactcagtcctctcagcagaatgacattcctgtctcacagacactggtggacaccacacatttctttagttggcataccccctccccccacattatcttggcttgttacattttagaggaaggatcaagggcaaaacaaatgtgagatgctccacttcacaaccataagtgggagttgaacaatgagaacacatggacacagggtgaggaacataatacacggggcctgtcagggggtagggggctgggggagggatagcattaaggagaaattcctaatgtagatgacaggttgatgggtgcagcaaaccaacatggcacatgtatacctatgtaacaaacctgcatgttgtgcacatgtaccctagaacttaaagtaaaataaaaaaaaaaaggaaattctgatacgtgttgctacatagattaaccctgaaaatgtgctgagcgaaacaagcgaggtgcaatgaaaccaatactgtgtgattcatttatgtgaggtatctagaataggcaaattcttagagtcagaaagtagaatagaggttaccaggggctggggaaatggggggatgtggagttattgctaaatgatgagttcagagcttctgttcggggtaatggaaatggatactggggatggttgcacaacattgtgagtatacctaataccactgaattgcacacattaaatggttaaaatggtaaattttatgttatgtatattttaccacagttaaaaaaaagaattgttggatgagaagaaaaagttaaactatcctccattgttgctgtttctatagtccaaaggaaaatcgccaaggaagttgaactcttcttgcacagggcttcccatcatagatatgttatcccatttctaaccttgctctgttgctctcaagagagtcctctttgccagaggactttcaactcttacagtggaaattgacatctacttttgggaaacctcattcactattcacacacattgataccgccctggagtttatttcctaccctgtatcagtcagctaggcggcataacaattgcacacatctcagtggcatgcagcaataagtgtttatttccctcttggcatttacagttgagctagggtgtgattgatccaggctgggctctcccggcttggctccatcccctgggttaggttcagtcttctacacctgtcattcattctaagatgagcaagctaccccaggttctgaaatgcaggtaagcatttcaaacctctgctcacatcaaatcactaacgtcccattgaccatggtcacacggccaaggccaagcaaagaagtacacctcgcccaccatgataggagtcatatgtatgtataaaccccatagggcgttgagaccagtacttgtaactacagcatacttctttcctgtccttggcagtaaatttcctaagtctgagttacttcctgtatattaacatcaagaggacgcaatggatgtacaacatgatgactaaagttaataacaatgtattgtgtttttgaaaattgcttagagagtagattttaagtgttttcaccgcacacacaaaagtgaaataatgcctatgttaattagctcaataagagcctttctacagtgtatacatatttcaaaacaacatgtgcataataaatctatacagtttttatttatcaatgaaaaaaattaatttaggccaggcacagtggctcacacctgtaatcccagcactttgggaggctgaggcaggagggtcacttgagcctcataagttcaaaaccagcctgagcaacatggcaaaaccttgtctctaccaaaaaaatacaaaattagctgagtgtggtggtatgcgcctgtagtcccagctactcaagaggctgagatgggaggatggcttgagcctgggaggtcgaggctgcagtgagctatgattgtatcactacacttcagcctgggcaacagagcgagattgccaaaaaaaaaaaaaaaaaaaaaaaaagaagaagaagaagaagaaaaagaaagaaagaaaaagaaaatttttagaaaagagaatatgatggaatgtggaggttcagaagcaaactccaggataagtttagtcctcttagtccagcagaacaatcagccttagggctgttactcccatccccatggttgaatatggttcaccgcaatatccacacgtagaagagggaggcacgtccctttccttcaagggcatgagacagaatttgcacatgtgtttttcactccaatccattgctagaatctaatctcatgggcacgccttagttgcaaggaaattggaaactgtagtgtctaagtgggtaaccaattgcctagttaagttttgattatactagagaaagggaagaatatttactggggaaacagtctctgccaaaagagacgggtggtaagagtgagaatgagccagcactttgggaggccgagatgggcagatcacgaggtcaagagatcaagatcatcctggccaatgtggtgaaactccatctctactaaaaatacaaaaattagttgggcgtggtggctggtgcctgtaatcccacctacttgggaggcagaggcaggagagtcgcttgaacctgggaggcagaggttgcagtgagccaagatcgtgccactgcatcattctagcctgggcgacagagccagactctgcctcaaaaaaaaaaaaagaaaaaaaaaaaaaaaagaacgagaaagaggaaatggaatgcggactttcatttcatatatgacacccatagcaaatttggctcttagttcagaaaccttgatttaaagaaataatttctttctttaaactaataactgctgctgagtccccagcctaccttactagtgacagccaggggacgagttcttcccctattcccctgacaaatggcagctctgttgacatgttcacttagtgatagcagggctacacacacattggttgtctaccttcctctgcatatttaaacattattttaaaaggtttaaaagataattttcataatattttcatgcattttcttccagatttttctctgaaaaattagtacatttaacataattacaatcatactgtacatataagtttgtcttgattttcctgtttaacatcacggtattactgttgatagtctgtactgctaaacactttccttaaataatcatatgtaatgcctgaacatatcctgttaaatggactcaacatactttacctagctagatgttcttttatactcagataattaagttgtcttttttttgtaattcaactttttattttgaaatagttgtaaattaacatgcagttgtaagaaataatacagagagatctcttgtaacttttgcccagtttctcccaatggtaacatcttgcaaaactatatatagacagtacaagattacaatcatgatattgacattgctgcagtcaagatacagaatatttctggcatcacaagggcccttcatggtgccctattatagttatttccacttttctcccattctcaccccgtccttaactcctgacaacacgcatctcttctccatttctataattttgtcatttcaagagcattatataggccagacatggtggctcgtgtctgtaatcccaagactttgagaggctgaggcaggaggattgcttgaggccaagagttcaagatcagcctgggaacagagaccccatttctacaaaaagtattaaaaattagcctggctatggcagtgcatgcgtagccctacctgtgcaggaagctaaggcaggaggattcttgagcctggggattcaaggctgcggtgaactatgattacaccactgcactccagcctgggtgactgagcgagaccctgtctctaaaagataaataaataaataaataaatattataaaataaaataaggaatgctatacaaatggataaatggaataatatagtatgtaatttcttcgcattagcttcttttcattcagcatatttctctggcgattcgtctaggttggtgcatatatcaatagtttgctctttttattgccgaatagggttccatagtatgaatgtaccacagtttattgaactgcttacccattggaaaacatctggattgtttaagtttgggggcttttatgaataaagctgctataaatatttatgaacaggtttttctgtgaacgtgagttttcattcctctgggataaatgcccaggactgtcgtagttgcatgtttagttgcctggttggttttcaagacactgccaacctgttttctacagtgactgtaccattttacatttctaccagcaatgtctgagtgatccaatttccctgtgaccttgccagcattgggtgttgttacttttgtattttagccattctgatagatatggagtgataccatataaaggttttaatttggatttacctaatagctaataatgttgaatacatgttcatgtgcttgtttgccatctgtatatctttttttctctgtttttttaaattatactttaagttttagggtacgtgtgcacaacatgcaggttagttacatatgtatacatgtgccatgttggtgtgctgcacccattaactcttcatttagcattaggtatatctcctaaagctatccctcccccctcccgccaccccacaacaggccccggtgtgtgatgttccccttcctgtgtccatgtgttctcattgttcagttcccacctatgagtgcgaacatgcggtgtttggttttttgtccttgcgatagtttgctgagaacgatggtttccagcttcatccatgtccctacaaaggacatgaactcatcattttttatggctgcatagtattccatggtgtatatgtgccacatttttttttcttttttttattatactttaaattttagggtacatgtgcacaacgtgcaggttagttacatatgtatacatgtgccatgttggtgcgctacacccattaactagtcatttaacattagatatatctcctaatgttatccctcccccctccccccaccacacaacacatttttttaatctagtctatcattgttggacatttgggttggttccaagtctttgctattgtgaatagcgctgcaataaacatatgtgtgcatgtgtctttatagcagcatgatttatagtcatttgagtatatacccagtaatgggatggctgggtcaaatggtatttctagttctagatccctgaggaatcgccacactgacttccacaatggttgaactagtttacagttccaccaacagtgtaaaagtgttcctatttctccacatcctctctagcacctgttgtttcctgactttttaatgatcgccattgtaactggtgtgagatggtatctcattgtggttttgatttgcatttctctgtgccatctgtatatcttctgtaaactatctcttcatgtcttttgcttatgatctaattagaatttttgcttctttactgttgagtttcaagcattctttgtatattttagatattattccttccttgaatatgtagtttgtaaacattttctccgattccatagcttgtctcttcatcttcttaacatggtttttcaaggagcaaaggttttaatttttattgtgtctaatttgtcaatcttttcttatatggatcatgcttttggtgccaagcataagaactctatgcagctttagatttgaagattttctcctatgcttttatttatttatttatttatttttaatttttattttttgagacagagtcttactttgtcacccaggctggagtgttgtggcgcaatcttagctcactgcaacctccatctcctggattcaagtgattctcctgcctcagcctccctagtagctgggattataggtgtgcgccaccacgcccagctaatttttgtgtttttagtaggtggggtttcaccatcttggtcaggctgatctcgaactcccgatcccaggtgatccgcctgcctcagcctcccaaagtgctgagattacaggcatgcaccactgcagctgagctcctatgcttttaaataaaagtttcatagcttgaatttaagcccgtgatccattttaatttttgtgtaaagtgtgagactgagctcaaggttcattttattgtctacagatgttcggttgcttcaacaccatttgttgaaaagatgatcctttcattgaatccctttgtacctttgtcagtaattggttgtgcatatttacgtaggtctatttctaggttttctattgtgtccattgatctacttttctattcttccattgatatcctgtttgattactgtacctgtataatacatcttaaaatcaggtaaaccgattctttccacttttcttaaaattaatagaattaattttgttgaaaggaattaggtatacagaaaaattgagtggaaagtacaaagagtttccatataccccttcaatccctcctctccagttttccctattaacatcttgcatcaatgtggtttatttattacaattgctgagcttatgttgatacaatattactaactaaagttcatagtttacaataaactttgtgttgtatattctatgggttttgacaaatgtataatgacatgtatccgctattacagtatcatgcagaatcgattcactgccctaaaagtcccacgttccacctattcttccattccaacttagcccactctccctccctattgtcccctggcaaccactgattttttttactgtcaccaaagtttttgccttttccatacagttgagattatatagtatgtaatttattgaatgatttatttctcactctgtcccccagactggagtgcagtagtgctatcatggctcactgcagccaccacctcccaggctcaagcaatcctatgcacgccaccatgccaggctaatttttaaaataatttttttaagcgatgggatctcactgtgttgccaggctggtcttgaactcctggactcaagcaagcctcttgcctcagcctcctaaagtgctgagattacaagtgtaagacgccactgccagctggtaacctttttagattgacttctttcacttagcaatctgtatttaagattactttgtgtctttttgtgacttaatggctcatttcttttttcctttttcttttctatttttttttttttttttttgagatggagtcttgctttgtcgcccaggctggagtgcactggcgctatcttggctcattgcaagctctgcttcccaggttcacaccattctcccgcctcaacctcccgagtagctgggactacatgtggctgccaccacacctggctaattttttgtatttttttttttttagtagagatgaggttccactgtgttagccaggatggtctcgatctcctgacctcatgatctacctgcctcggtctctcaaagtgctgaaagtgctgggattacaggtgtgagccaccatgcccagccttcttttttcttttctttctttcttttttttttttttgacgaggtctcactctgtcgcccaggttggtcttgaactcccggactcaagcaatcctctggcctcagcctctctaagcactgggattacaagtgtgagccacagtgcccagcagctcattcctttattttatcactggataatcatcaattgtatgtctgtattatgatctgtttatccattgacctatagaaggaagtcctagttgattcctggttttagcacttatgaataattaatttcacttcttaaaaaaaaacacctcttttaggtattctcattcttttgcttttctacataaattttagaataatctttgtatctccaaaacacttgctgggattttgataggaattgtgttaaacatagtttggaaagaactgacatctttactatgtcaagtcttctaatccatgaacatggtatgtctcttcatttatttagacttctgattccttttatcagcattatgttgttctcagcatataaattctgcacatgttttgctggatttatgcctaagcatctctttttttaattgattctgagtgatactgtattttcttttttttgagacagggtctcactctgtctctgagtctggagagcagtggtgcaatctctgttcactgcagcctcaacctcatgggcttaagcctcctgcctcagccttccaagtatctgggactacgggctcatgacaccacacccaactaatttttgtattttttgtagaaatggggttttgacatcttgcccaggttggtcttgaactcctggattcaagcaatccacctaccttggccgcccaaagtgctatgattacaggcatgagccactacgcctggccactgggtttttaattcactgtgcatgtgctcactgcaagtatatagaaatacaatttgtttgtgtgtgtttagtttttatcctgagaccttcctgaatatactttttagttctaggatttttttttggtagattccttgggattttctatgtagacagtcatgttatctgcaaataggtttttcttcttcttcttctttgtattttttgattggtgtatcatagttttacatattttggaggtaattgtgatatttcgatgcaggtatacaatatgttatgatcaagtcagggtaattgggatatttatctcctcaaacatttatcttttctttttgttggaaacattacaattcttctagctactttgaaatgtatgataaattattgctaactatcatctccctacttatattatcaaaggctagaacttattccttctacctaactgtatttttgtacccattaaccaacatctgttcatcctttcctcccccacccttcccagcaggtggtaaacaccattctattctctacctccaagagatccacttttttttttttttagatggagtctcattctgttgttcaggctggagtgcagtggcatgatctcggcttactgcaagctccacctaccaggttcaccccattctcctgcctcagcctcccgagtagctggaactacaggtgcctgccaccaagcctggctaattttttgtatttttagtagagacagggtttcaccgtgttagccaggatggtctcgatctcctgacctcgtgatccacctgccttggcctcccaaagtgctgggattacaggcatgagccacgatgcctggccaagatccactttttaagctcctacatgctagtgacaacatgcaatatttgtctttttgtgtctggcttacttcttttctttttcaaccttttgttattaaatttttttaattgacacatttagatatatatattttgggggttcatgtgataatcatatacattcatataatttgtaaagatcaaatcagtgtagttgggatagccatcaccttaaatatttgtcttttcttaatgctagaaatattgaaattattgtcttctagctattttgaaatatacaacagattattttaaactatagtcaccctactgatctatcaaacactaagtcatatttcttctatcaaaactatatttgtacccattattcaacctctcttcaaccccttttctcccctacccttcccagcctctggtaaccacccatctagtctctatcttcatgtgatccacctttttagttcccatgtatgagtgagaacatgtgattttttttgtctttttgtgcttggcatatttcacttagcataatgacctccatttccaactgtgttgccacaaatgacaggatttcattgatttttatggctgaataatattcctctgtgtatatataccacattttctttatctactcatctgctgatgggtacttaggttgattccatatcttggctattgtgaatagtgctgcaataaacatgagactgcatatatctctttgacatactgatttcctttcttttggatatatacccagaagtgaaattcctggatcatatggtagttctatttttagttttttgagaaacctccatactgttttccataatagctgtactacaattcatcccatcagcagtatacaagcattccccttcttctcatccttgccaacatttagtactttttgtctttttaaggactaaacttttaggactacactttttagtttagtcctaactggggtgaaatactgtctcattgtggttttgatttgcatttttctaatgattagtgatgttgagcatttttcatatacctgctgccatttgtatgtcttcttttgagaaaagtctatttagtccttttgcccatttttaaattgaagtgtatatttatttttgctattgagttgtctgagtgtcttatgtatatgtatgtgttcctccttcttatctgtatgcctttatttctttttcttgtcttattgcattggctaagacttccaatattgtgttgcataagaattgtgagagtagacatcttgccatccttaaggcaagaaatgtcaacattaagtatggttttagctgtaggttttttttggatgctctttatcaagttgaagaagctcccctctgttcctatttttctgagagttttttcattaatggacattgaattttctcaaataatttttctgcctctattgatatgatcatgtgatttttcttcagctgttaatacgataaattacattgattcattttcaatattaaactcatggattgtttagaagtgtgttgcttcatttccaagtgtttggagattttccatttttctttctgttatttatttttaatttgttttcattgtggtcagagaacacattgtatatgatttcagttcttttaaatttgttgtgttttgttttatggcccacaacatgatctgcttgataaatgttccatgagcacttgattaaaatgtgtattctgctgttgttgggtgaaatgttctataaacgttaattagattgtctttgttaatggtgttttcctagatccttgctgattttctgtctagttattctatccattgttaagagaagagtgtgtagtctccaactaaaattgtagatttgcctatttctcctttcagttctatcagtttttgtttcacatattttacagcatgattgtttggtgcatacacatttaccattgctatgtattttttgatagcttgcctttttttatcattatgtaatgtgtctttctgtttctggttattgtttttgctctacactgtactttatcttacattaatatagtcactcctgatttctttgattaatgtttacataatatatatttttctgtcctttcaacctgcctagattatatttacagtgagtttcttgtagacagtgtatagtttaatcatgttttaaaatccaatatgccagtctctctttttaaaattggtgtgtttagaccatttacatttaatgtcactattgatatgtgagggcttcaatctgcctttttattttttgttttatatttgttctctaagatttttatttcttagtttacttttctctgccttcttgtgggttagttgaacaatttttaaaattctattttgatttatctacagtgcttttgagtgtatctctttaagcagctttttaagttgctcttagatattccattatacatacataacttataataggctactggtgttctcatgctcccagttcaaggatagtatagaatcttatctctatttttgtccctttatcatcccgcatttgtaatatacttgtcttaaatatgtagttgatatacatttagaataaaatcagacagtgttgtaatttttgcttcaatcattaacataatttagaaaactgaagagaaggaaaacctatcgcatttacccacatttttgcttactgtgttcttcttccttgctaatgttacagttttccttctttaactttttctttatatttagagaagttcttttagccattcttttagggtgagtctactggcaacaaattcttttactttttcttatttgagaatgtcttgatttccccttcattcctggaggatatttttactgagtataggattcatggttgacaatacttttctttcagcactttaaaaatattgtgccatcttcctgtaacttctgatggaaaaccagttgtcatcttaactgttttccccctttagataaagtgtagtttttctctggctgctttctaggttttttcttagtctttagttttcaaaaataatgtgccttggtgtggacttttaaggatttatcttctttagggctggtttgtgttcttcagtctacaagtgtatgtctcttgccaaatttgggaagttttcagccattattttttggagtacttttttcaactccaccctctttctcctctccttctgaaactcctaagaaatgaatgctaggtattttgttataatccccatcaggttcctcaaggtttcttaatttttattttcagtttattttctctctgttgttcaggttgtgtaatttctagtgttctatcttctaggtcactgcttcttttctctatccacccttccttccatcaccatcattctgcttttgagcccatccacggagcttattttgtttattatctttttcacttctaaaatttccatttgattcttctttatatcttttatttctttgcttagcctgcctgcctgcctgcctgccttcctgccttccttccttccttcctttcctttcctttttgctgatgtttgtatttctacatttgtttctagcatgttcataatgctttaaaatctttgtcagatcattctaacaactctatcatctcagtgttggcatctgttaattatgtttttctcatccagtttgaaatcttcctggttcttgatatgatgaaagatagacattttcattttatgttatggaactgtggatcttattcaagccttctcttttagttagcttttttttttttgagaggggaagtggggggaatgggtgctcccttcttatgaccaggtgaaaatagaagtccaacgttcccactctgccttatttgacacctgcagagtgggggaggagcctagtgactgatgataagtgtggggtgggagtatcagctccacacacagtctccactgacacagcagtgggggtggccacagtgccactcggtggtagtggaaaccccaactctccattaggacttctctgacaccttctggtgaagacatgaagaggaggaccttgttacttctgaactagggtagtagtctagtttccactgatatcatgggttgggggagacttcattaccacacagcagggatgaaagttacagctcctatttggcctctctggcactgccctggccagagtttgcagtctctgtgaaacacacgtatcacctcctaacatcaccaaggctggttaccagttatggcttggcaagggtgggggtccggactccctacttcacctttccagggatgtgggagtggggccacaggttttctgtggtggttggcaggagtagggtggttattggctaaaagttttctgtttcgctagatgcccctttcctggtcgttggctaaagatcaggcatttgctggggttgtttttgtcactatctggcagtgcttccttattgccaacatcttcagctccagtcctgtgatatatgaggtgggactcaccactgggtcattcttgggctccagggcccctagtccatctgtcttcttcttccacttttcagagtcttcttatgtttgttttgtatataatgtccaggatcttatttgcacttagtagacgtaatagggaaaagtacatctaacccatttttctggaagcagaagtctgtcttttttttctatattatatataaagctgtgacagaatctgtctatataaagctttccccacatgtgggatggattcccagaagtacagttagttggccaaagggtatgaacatttctgtgacacttaccatctacaattccttaaattacttaaaaggttatacctggtctcactacctccagcactttctgtcctgttgagagtcatgttaatttctaagcagctctgaacagcatgtgtgctgaccagtgaactaacaggcagtgcctgccaatctctaggtggatttttccactcaagctcttccacttcctccactgagaagccagagggtgccagagactatgggcttcggcaagaaccaggtgagaccccacaaggaagaagacaagagcaggagtgcgtgagctgtgtgccaatgccagctctcttgacaactgctatattcttagggaaactgcctgttccaatcaagagtctaaatgacaaacaacatgattaacacatttgctgtatggtgtcgagagtaaatggaaacttaaggctgagaggtggggaaagaatgagcattctatgatcctagagctggctgggcccaggtgtttctgcaacagccggccatgactgatcacaagctctgggccaggggaggtgatgtgtttttcatggggaacataaaccttggtcagttggtgtcatggagtcggggagaggagcagttgctgcagctggtagatcctttccgatagcactagtgaagggtggtaacatgtggaagatcctgaataggagctaatcagaagatgacttctacttgcctctgagccatttgaccatagtgctaccttagctgtccttctctggcccagaacttttgattacttgggccaatttggaatgtggctttgtctccagggtcttctctccctgctccattatgttggaatttccagagactatgggcttcagcaagaaccaggtgagaccccacaaggaagaggacaagagcagtagtacgtgagctgtgtgccactggaaagagtgaggaagtcacagctgagtgccagtccctcctccactctcctgtccaactcctccctgcagtcgctgttctaggtgtgattatgcgctcttctgtgggacaagaagatggttaagtgtacattttaaagaacttgtctgaatcaaaactaggttttcaggctggacacagtggctcatgcctataatcccaggagtttgataccagtctgggcaacatagagagacccccttctctcttttatgtgtgtgtatatatatctgtgtgtgtgtgtttgcatttgtgtgtgtgtgtgtgtaaatctatatccaggcatggtggcacatgcctggcctgtagtcctagctgctgggagcactgaggtgggaggattgcttgagcccaggagatcaaggctgcagtgagctatgatcacaccactgcactccagcctgagtgacagagaacgaccctgtctctagaaaaatagaaaacaagaccaaagaaaacaaaaaacactaagctttcaaaaaagaaaacactcacacagttggagtagcataaagtaagtcccacagatgtagaataagatgctgagaaagcaaacagcttgttgggctcaggagccttcataaacttaaaagcaaaatttgcagtggacaagccacagatgatttgcacatcccagctttcccagctgtgttctgaattctctcccaggagtggctgcctccacctttcctgcagaccaggagatccttgcaggcaagggctttgctttacttgaatccccattgaatctgcattgtcttgccccattctcccccatgtggcaaaattgagttagtggcaatgatgagcatccctggttttggacttgcagactggagcccttccccgactatgtgacgtgctacaagtgctgtgggaagagcaagaccagtgcctgcaggaactctccagagagcagacaggagacctgggcacggagcagccagtgccaggtatgaggcttgccacagcccatgtcctctcttgggggtggagcatgtccggtcctgctgggcagggggagcttatcctgggccaggatgggatgtgggaggctggtccagcttttctcactcagacaatcagctggtggggcagggctggagtggttctggtgagcagatcgcatggaccccaaagccagatcctcaccactcttcctttctctgggcaagtaaacatagccggtgttttcctatcatcagcttctgcatgctgacttggccaacgtaagagcttggtgggaatttctctgcaagacagttctcctctcattcatcctcccacctccctgccagctccatgagtgaggtagtaggaaaggcagcctgggtccacagtagtgtggcctgcctgctaggtgacactcaccggctgtgtgaacacaggcaaattatttagccctctgagtctccattttctgatttatagaatggaggtggccaggcgtggtggctcatgcctgtaatcccagcactttgggaggctgaggtgagtggatcacctgaggtcaggagttcgagaccagcttgaccaatatggtgaaaccccacctctactaaaaatgcaaaattagccgggcgtggtggcgcatgcctgtaattccagctactagggaggctgaggcaggagaatcgcttgaacccgggatgcagaggttgcagtgagttgaaatggcaccattgcactccagcctgggcaacaagagtgaaactctgtctcaaaaaaaaaaaaaaaaagaagaagaatggaggtgataatgtcttcttcaggattataatgataaatgagataaagtgtgttaaatacagctgccttgtaaatattgctaatttaaatgttaattattattattaatcaacactttaagcactaagtttatatttaaatgttaactttatttttattcccttactaaacgtctcatctttgctctctgtcatctaaggataaggaggggtatagcattaagaacccactgccagggttcaaatggacatctgtacatggatgttcataacagcccccttcacaaggatgaagaagtggaaacacccctaatgcccatcaactgacgaatggataaacaaaatgtggtttatccatccaatgggatattattcagcctttaaaagaaagaagtgatgatatgttctacagcatggacaaaccttgaaacataatgctaagtgaaacaagccagatacaaaaggacacacattgtggctgggtgcagtggctcacgcctgtaatcccagcactttgggaggccaaggtgcacagattatttgaggtcgggagttcaagaccagcctggccaacatggtgaaaccccatctctattaaaaatacaaaaattagccagcatggtggtgggcacctgtaattccagctactcaggaagctgaggcaggagaatcgcttgagcacgggaggtagaggctgcagagatcatgtcattgcactccagcctgggtgacagagtgagactctgtctcaaaataaataaataaataaataaataaataaataaataaataaataaatattaaaaaagtaaaataaaggaacacactgtatgatttcactgatataaaatgtgcagatgagccaaacctgtagagacaaattagattagtgcttgccaaggctgaaggaaggaacaatgggaagtgattgcttgaggggtacaggtttccttttggaattggtaaaaatgtgttagaactagatagaggtgatgtttccacaatattttattatgaaggtactaaaccactaaattgtacactttaaatggttaatggttagtgttatgttatatgatttttcttccatttgaaaagaaagacagcgggaaagaaaaataaacagaacccaggcttttaaattagacagactgatcttgaacaaggcctcagttttgacatctattttatggagttggtgtgaaatgaaaagcattcattcaaagaatgcttatttagcacttggtggtgtcaggtgagtggtgagaaacaagcgttgtcggctgtgctctcatcacttaggaatgcgttttgcagtgtgtggcaggagcctgatacactggtttcaccagacaggaatttatttgttgcatattacaaaaagagctggagcaaagttccaagatgttgccatattccagattcctctcttttgcctgaatgtgtggcttctgtcctcatggtcatataatggctgctgtaccttcagggaggagagaagaatacctgcatttctggcaggaagtagaagaaactcactagaaggaaggatgagatatactgggaagccagactttcctgacactctccagtgtctccagtgacttctgtgtatacttcatcagctggaataggactgcatggccaccccagctgcaatggatgttgcaggttgagtttatagctgtgcatgtagccacctggagcaaaaccaggtcctcctagtaagaaagaagagaaggatggcagtgggcagcctttgccattgtccccatgactcagcctggtgagggagacatggatcaagtgattagaaattgattgccgggcacagcggcttacacctgtaatcccagcactttggagggccgaggcaggtggatcacctgaggtcaggagtttgagaccagcctggccaacaaggtgaaaccctgtctctactaaaaatacaaaattagccgggtgtggttgtgggcgcctgtaatcccagctactcaggaggctgaggcaggaggatcgcttgaacccaggaggctgaggttgcagtgagccaagatcgcaccattgcactccagcctgggcaacaagagtgaaactctgtcaaaaaaaataatattaataataatgaaagaaagaaagaaacatgtaaaatgatgagataagaacagtatgtgggtctgcctgagtgtctaatcaggaggcttcacctggcctgggcctccacgagggctttcttgaggaaatgacgtttgagccaaggccggagcctgactggtggttgctgggcacagacatgagggatcctgctgcaggatgagaccacaggggctcatcatcccttgggggattttcatcctatcctaagagaagcaaaagccttggagagtcttaggaggccaggagtgttaccgtctgcattatgaaaagatcacctctgccacagtgtgggaggtgaactggaaaaggacatgagtagttcagagagactcgctgtgagcctggtggtctaggcaagagatatgatcattgggactggatacgatgtcattgtttggattccccagaagcaggtgattccaggccagatctgtaggactgggaaccgagacagggaagagaagaaagctggcaaatgttgcatcatcactgtgggcacttgtggaacacacgcctccaagtcgcacaggagctggaggatgcatccaccagtgccctgtcagtcagagatggggctgcttcagagcgagcagttttcattcccttgcacttccagcctgctgtgcttagggacaatcagtagctagagaaagcccccagacaaagggatactgggccagtgggtgaaagtgagattggtgtgcccagaaaaggttaaggctaaggagttacaagcaggttccactgcaagggctggagaggtacacccccgtggcagagctgtgtgggtggggacactgaccacacatggtgatgagctggactgggaatgaggtgagagatggagaatccaggatggcccccaggtgtttgacttgagcaattggaggaaggaataaaggaagatcagcattttggaggagaggagataaaaaatcacacatgtagttttagacgtgtagaggtgagacttcagagtggggatgaaggctggggataaacctccgcataggcggcaggtgaggctgaggttgcaccaggagagtgcaggagcgggaagggaagagaacccaggagccagcctggagcactcccggccctcatttgtcaggagcagctggaagcagaggaacatgagggtttgtgagcagcggaggcagcagcatggatgctgcaaatgtgctttagcccatgcactcggccactgcgcaagggacagggacagaacagacatctctcccacagtttgagcctttgctttccctctacctgactgcactttccctctggctccgactgcacttggggagctagaccatggtcttatggcattcatgggggcaccaaagagagccttctgatttcctgctacccccggaaactgcgtctgggacagcaggaagcaaggcaccaacaaggccagccagaggtgcagccaaattgtgggtgtcccccacctcctgtccccaaggacaatgcctgaaattccaatgacagcagccctgtgagatagggcctagaatgcggagtctctggtggggctgatggtgaactttcgtttacacggagaagtaagggatgattattttaacataacatgtgtttaaaatgtcccactgttctccagtggttccaggatgaggcccagctcctgacttggcccctgtccacatctccaccccaaacactgccaatcagctcaactgtcaaccaaattgcttgcaatttcctgcctgtccatttctttcctgcctccaacctttgcacatgcagactgctctgctacaacaccattctccatcttcttccctctgaagctacccaccttttcagactcctctaggaatgatgtctgaatgcccatagctcccctggtcaagcgagttaccccgactcctgcaggatactgtttctctctcgtctcgcacctctgcactgcactgtaaaggtgtgtttcctggactgtccctgccccagcctgaggcagctacagtgtcgccttctttcttcctcagtgcttgacacagggcttgccagaccgagtattcagtgtgtgtttgttgactgacttactgagtgaatgagggcagatacatgactgagagcagggagaaaggataaaacaaaagacagctggccccaaggagagagtgggagatgaggtggagccttggaggcaggtgaggcccccgcagaggacacaaatgccaccagctgcccaacttgtcacaaattagctgaggcgagcaacgtggtcctggtcaccggtggagggatgctttccagggtctaaccttgggggagagaggtgagtccctgtcttccctggccttcccctatggagtggtgagccggctctgcctgccccactcaggctctgactagtgaccacgccagatggggttcctgctcccctctgggcacccagcattcctgttgggctctcacggttcgaggaaaagactctccccgtggcggcagagggtctgctgtgaggccactcactgctggatctgacgaaatgagcagggctgaatgccaggcagaaagcaaatagagtcagccggagtcggtgccactcttcctttatggggctcttgggctagaggattctccccactcctcaatgtgcccattttaaagtggggaaaataatctgatcaacttcatgacgctgttgtggagaataagtgaatgactacctgaagaaggcagaagctcctctcatggcctctctgtcccagcccttcggtgcagccaagctgacctctgccatgaatggctggtgttcacttaggccctcagccctgcctgtgggtggcgcctcttctgcgaacctgttgcccagtcaccttaccaatgccaagtgcacattcacattactccgggaagttgcacccacgtccatgtctcaattccaggttgaccgatctgagcagaatcggtcatctttcttccctaaggctccccatgcagtgaaccagcgctttccgccaggtcctgaccgtgcatccagggctgagaaagctcactggggattcctgcctgacttctgcctcacactcactggggggacctgggcaagccctgaccatacccctctcttccggaccttactctgcttaagaaaagggctcccctggctttgcaagagctgtggtgtctggccaggccctggcggctgaaccaaggagggccagcgtgcaggtgggtgaaagggtggctcagctggccccccacccatcacaaacagctgtcactgggatctgttttgcatagtgaccttctgcagtgtgcatttaggaaaggggatctgttactttgaaaacatggttttaaagctccaaagaggcccaaggactctgcctgctggaaaagtcttcagatctgccccactgagggggtcagaagccagggccaagggctccatctgggagtgtggagcgggtgtgatgtctgaggaaaaatcccctaaaagactaagaggagaaatggccaaggcctagatctggtgtccagggggcctctcccagcaccgagactctatcctgacacctgtgtggggggaggggctgctggggctctccgttgagggtgcagggttaatggttaagctccctggggtagaggttaatgtttgaacgccagaccagtcacaggaaacaccactcaaggagctgtcaccgagcccgccacacttatcacaaataaaaaattaactcttcagccattccgggttaggtggccaaggtcttactggcattttctgggaacgtttcagggtcaccctaatagctgcacggcctgccccacagggctatttattactttgtttacagaggccaataccccctcagagctggcaggtggaagggccatggctctccccaggggaagaatgttccagaaggacagtgtggtgacaggaaaggtgtgggcttgacagtcagacagacctgggcatgtgtcctgctgtgtcacacaggtgctctgtgaccttgagcaagacactggtcctctctgagccttagtgaccttgccttcaagtggggtcatgacatcccattttccttcttgtctctacctgctggttgcccactccacagagcatgggtccaggaaaacaggctttttattttgtaccttttttattgaggtgaaattcacatagcgttaaattaactgttttgaagtgaataattcaatggcaattagcactttcatagtgctctatgcagccaccagctctgtctcattccaaaatatcttcattaccccaaaataaaatccctgtacccattaagtcatcactcccctccttccctgtctgcagccgctggctattactaatctactttctgtctctgtggatttgccagtgctggacatttcatatcaacggaagcatttgctatgtgaccttttgtgtctgtctgcttttgccgagaataatgttcttgaggttcatccacggtgtagtatgaatcagttcttcacgcatgctggctgttagtgcagttttctctaacattcctagctcctttctggagttgcctggcccccgatgccctctggcagccacaccgtggaccatcctccacggctgcccacagctcacctctgcccattcttcccttggcaccactgatcttggctcatttttccaaaatatggcagcttatgtttgtataacattctaggcaatttaaatttttagttcttaaaacaactgtgcaataagcactattattactcccatttcatagatgagaaaacaggctccaaggggcccaggatcgcacagagccgaaacaggactcagctttgccgtccagtctaatcaaacacagcacaactgagctgtgaatgactgataaccttaccctcccgagagaaaggttttccattagagaaaacaaacaaagacagagattgctgctggcaattaatccttaattcgcttgaaaggtggtatgaaatgaagagctttaggtcaggtgaggaagagttctcgggtggatgaggagggttctgtggaggtggcacacactttgtgcagtctctggaaggcgaaggacttagctccccgtgctcagaagctagcctggggctggcctcctggacatagatgggccagcctgctccagagaagtggctgctcggcctcagggctggaagggttcttcatctcatgtagtgcagacttcattcagtgtctgatgctcttccgtctcctaattccatgactctctctgcttgaatactttcagtgatggggacctcatcactcccaagatagttcatcccatcaaacagcttatgattcctggttccaagactctttagctgtttctcctgcgatgtgtttttaaatacccttgttgccctgggatttcagctcctctagccccatcctgaccacagctcctgtgcgtccagccatcacaaaggagagcgacaccttcttgacttaagactgtaggtcaagtcattagcaaagttgaagaaacctcaccaggctgccccttggatggcctggggctggggccatggctgagccaagagaggcaaagagatacacgatgcaattgggaaacaggccgctgtgcaggagctcgtcctaagccactgtgggttctggggaggagaaagggatgagtgggggtgagcagtggaagtgcctgagagatggatgtggcggtccgcgggcagaggaaagagcaaacaccggcagaagcagaaggtaggagaggacagacacaaggccaagacaaagaggagctgtggcttccctggtgaccccatcagccgatgaagtgagcaccagggacatggaggggtgtgagtggcccagttcagcatggccccgggggccgggctgttcctggccccctgccactgcagcctgacacattgctccagaaatagtcccaggtttttatcaggccatctgagcttatttataaatagaggactggaggatagaggctccatgccaggtgaatgcagggcaaactcccaggcactgtcctgccctctgagatggccctttcccctctctcagtcctcccccaacccacccagacctgcctctggggccacctctctatccctgtgggcaggacagaggaagctgacattgctgggtctgcttcagacctggcccagggccaggggctccacaaatataaagaccaggaatctttatctataaacccctttgggcaaaaatagaactttctccgttttctgactttaattctgattgcattctcctgggatggcagacatttctggatcttcccctgcaattttcccaggtggctagagattcacgtagcaccaccacgttcagggggatctcgcctgcagctgatgatggtgttagtcacaggtggtgactggcagagccctgtctatcctgggccactggcccctcctgtgctttgccgggaggcatgggctcggcaaggctgtgtgtggtctgcccatctagacctgcccccacagctgtttctcctctgggccatcccacctcctcagggctggctgggcagcagggtatttgcacctcttctggaaccctccatgtcccagctcatcacttcccctccatctctccccagtctctgggaattcttgctctttttctgttttctcccaagtgctttgattatcccagcatacctcttcatcccccagaggcctttggaaacctaagccaggaagttttcctgcctttctctgtgacttcaatctgaggaggaaggagagagaaaaggcaaaaaacaaacaaacaaacaaaaaaaacaggagaagaaaaaagaagagattgatggatcagaaagtattccaccgcacccacatatcatttaattctctcaaaaatcctgggaaatattactgtgcccattttatagatgaggaaactgaggctcacagaggttaagtgtcatacccaaagtaggcttgggtccaaagcccattctatctccaccataccacctccctcaacctggtatcccatgctgtcctcctgggccacgggcactggggcaggcaacccctcctccccaggtggtggcattgtcttctcttgtttccccacttaaacttcccagccttccatcccatcccctccagccagacaattggtggcggaggtggccatcagagacgacagaggcgtgggaagccctgctcttcacatgctttggatctgcctgcccacacagctaatgtatattccttctagccctggctctcctggggcggtgacccctccctcgtggctcagtaagtgtggccctattgacaaagctcccccatcccctatctcaatgaatgccgcttacccccaagtcaggcagtgagctgtgctgctctggaactaaaactgcccaggatgaccctagtcctgggctgtgtcccttccctgccagggctccctgggaaggccagagccaggacaggtatccgaagctaagctgggagcgctctcccctgcctcccattcctgcttggcttgggggactggggagtcccggagtggagtctgagatgctgcattcaaagcctggggaccgtgcaaggcagcctccacaagcactgaggaggccacagggactgtccagctcccccaagccacattccctccagcctggctagagccacgcacctcctgtgctatgatttccttcatatgttttcctttcaatcaatggacttttaaaaaacttagcctcatcctaaacaatagtagctataaaatcacagatgtgatatgctagttttataatgtttctaatacacattttctttaaaaaagtgcaactatgaaaaaatgttcaaccatgtaccagccaaaagcacaggccaccagtgagtggtgagctcatcgcacgctgggaaaccctgggtctgttctgtgccttctgtgcccagacgctggagccagggctgggagagaacaaggcagtgtcactcgtgttcaggaaacgatcaacactgtggggggctagcagccaggtctgctgccaccaaggccagcctggaggaggcagcctgtcccaggctggggagatgggaaggctgagtgggatcccagctccattatcaccagctctgtcacccacacttctcacttccccctcttggaacctcagcttcctcatctccgccgtggggcagtgaccctactcacccttgagctgctgtcaacctcagctccaggatgtctgatgtgcatccagcacaggcctggcatggcctgtccccaggcatccctgggggccctgcctgacgtgacccaagttaggaagcctctcagacgtgctggcaccgtccacatctgtctggccaaccagccaggcattgtccagcctcatggcctggagcctgcggctggtaccctggctgacctggccagtccagccagcactgaatctgtttttccacaagtgaggcaaaaggctcctgcctttttccatgctctggaaatgccccagctgcttccaatgcaagagaggctgacccgagctggcaggggagctgcaacttgaaacgaggcatcctgctgcaaccctgagacggccgcacagggaaagagggctctgggtcacccttggcctcctgagactccaggtgccaggctaggtcagcacggagacacagagtgggctgtccgtaaagggtcctcaggaccaagtccccatcccacaggcatctgggtaggcccagggttacccggcaggcctgctgagttcccgagaccctgctcaggcccagccagcagcgtccacagctggaatgtagacgggcagcctcgggatagtggcggagccgtccctggggagtgcacagcagagagaagctccggctcctcctcttgcaggtgaagcttctggaacatccaaggagttcctcatctcccatatgcctccaaggacacagacccctgccccttggcctcatagatgcttccactgtcctgtgaaagctccgcccacacactgccttctgtgtccctctacaattctacgacacccttgctcatggttgcagcctgcccttgtggctcctgggactgccccgcctccaaagcccccacaggcgtcctgatttcaggactgggttcctctctgggccctcccacttcccctctcctgctaggggctgggcctctcttcagggagaaacaggccacacctgccccgctctaggccagcatcccccctaacccaggccctggcccggcccaccctaccgttccctaccccttctgtccctctccagttcccagagcctggcttgaacaaggagggcacttggcagctggggccggtgtcacctggagactggtcaggtgggtggagggctgggtggagacagctttcatcccctccatgtcctggctgtgtggcctgggaagccacttctggctctgcttgattgctgcgtttataaagtgggggtagagccaggcacatcgggaactgggggcaccgccatgggattacaggagctcaagtgtgggacgcacagggctcctccccatcagcacagcaccagagctggcaggccctggatgcagaatgtagaagtcaactgggtgtcaaggtgaaagcccgtttatgagggatgcctggcgggactggtgtgggaggcagtggttccagctggcgtcccttcatttgttcatctgctgtgtttgctgagcacttgtgctatgcctggcccatcgtaggcacaggggcgtgctctcctgggctctctgcctggtggtgggggaggcatctgtacccaggtaccaaggtgaagacacagctggtagtgacccccactggtgggtctgtgactgcctgtctcactctctgtgaattgctcctgggagccaggggtagggctaagcctagaaatgaggaaccctcagctgtgaggagcagggagactcagagtggaaattctcaaagcaagccctggaaccacttcagcggcatttttggggaattcttaaaatgcagattcctgggtctggtctcacaaggaggatctggggcctagagatctgcatatctctgacaggcacccagctcattctgatgtaggctggagggtcacacttctgcaatgggacaggtcaccagggagatttcacttagaggggatgaaggggtcaaggacactatggatgctttgggtctggtcagattgatgcctaaaaacaggttcttgctccttaaaaaagctgagcatttgccatctgggtactcccgcaatgtctgcacaccgcatccatcgcccagtccccagagctaagaattgccattcaggggacccagcctagtccaacctcctgaatccagatgaaaaaggaacaggcctggggaggccagcgggaaaggggttgccagtcccagtgcctgctctgggcaggcttttcagttgggctttgagctcttcctctggatagcctcaggagggaggtgccggtcctcccacaagagataagcaagtgagcagggcagctggcaaggtgggggaggcctggaggccgggtcggccgacttgagtcctggctctttctttttgggctctgccctgcaccatgttccccaaacgggaggagcgctgactgcggctcgcctcatgggtgtccctcagctcatttctagccccttccaagcctgaccccagcgatgacctctcagagggcacgggttccagaagtctgttgcaggaagcagtttccctgtgtggctgcccttggatcaactttgggagaattggtgagttgttatgtgaaatgatgtcttaaaagacagtacagtcacagctcacacacaaatataaaatgaatacctgccgaacagcttgtttaatttgtgagggactcagtaagatcttatcactggttcatagcattcaaagtaactgatatggtttggctatgtccccactcaaatctcatcttgaattgtagctctcagaattcccatgtgtcatgggagggacctggtggaaggtaatagaattgtgggggcaggtttctcccatgctgttctcgtgatagtgaataagtctcatgagatctggtggtttcataaacgggagtttccctgcatgtgtcctcctgcccaccgccatgtaagaagtccctttgctctttcttcgtcttccaccatgattgtgagacctctcagctatgtgaaactgtgagtccgttaaacctctttccttcataattacccagtctcaggtatgtctttatcagcagcatgaaaacagactaatacagtaccatacctataaggcagaatgataacatgaatttacaaatagatgcaaagctgactgaatacacagggagggaagtgaaattaattgtatttcaactggacaataattattgtgcctatggacgagaatcatttgcattgctaccaatcatctagaacttacagagttgcagtgtagctcgaagacaataaaagacctgacaccccattgaatcagataatccagaaggctgtgcttagacaatgcctagttttgcattgaaaacacctagtaattttttttattcatcttaaaatctttcagttttcagaagtgggccacgcatctggctctgagcttcctagcagccaaatcaaagaggaaaccagcttcaaatgtagtgtctatgtatactagtcgttcacaataagttcagcttctcactgcattgagacctggttctccttccagaggggcctcatcaagggaactcaagtgatgtagaaagcaacatcctcaataatattcttgcagcaaatacagtggtgacacttgtggagctgtgtccataggccagggcagtggctctgagtgtggtcccaggacaaacagcatcagcatcacttgggaacttgttagaaatgcagatactcaggccccaccccagacttactgagcaatctgtgttttaataatccctctgggtgactctgatgcaagctgaagtttgagaatcatgggacaagagttctcaaccctgcagtcaaacgttagaattacctgtaaggctttcaaaggacatgatgcctgggcccacccaaaccaattcatgcaggatccctgtgtgccacgccggctaggtctatttctaaagctccccaggtagtcgtaccatgaagctagaagggagacccattgctgcttagttgtttaatgcaaactgattggccaacagatgtgccatctgctccagagaaatccagacctttacttgcaaagcttataggagagggcgccttccttctttccttcttcccttcctccctccctttcttacttccttctatcttcaacactgagcactaccgtgtacatggcagagtccaagggtgcattagacaggataggttcctgatcctgaggagtcagcacctaatgagagctttgaaagtagtctagtgggaattccaggcaggcaagggtgtcggtgatgtggacaggatggtagggcagccctcggtccatcccccatccttgtctgatgctgcttttcttggcaggttgtgaggggatgtgggacaacataagctgctggccctcttctgtgccgggccggatggtggaggtggaatgcccgagattcctccggatgctcaccagcagaaatggtaaccactcggcccatggggcctggcggacaggctgaggggtgtccctctgggtggggcctcagcttagaggcaggaggccaaggaaccttctctgaggacaagtatgggtacaatgatgggggagatcactgcaaaggattagaagccttgcttgggaatgtggggtggactcaaattctgagggtgtcaagcaagggggcaggaggcagtgcactggggaaggcgataagggaggctgggcctgcttctgtcttccccaggcccttcagctaggagctctcttccttccttccatgtttctgcccccttagcaaccaggggccttgttccagtccccatgtctggaacccctcctggtagtggcaggctccctaatggcctggccttccaaaatacttccttccactgtcaggccctgctgagaaattggctccctgggagcccctggcctcctggggcgaggggttgtcttaccagaagacagctgcggatttaagaattttcctagttgactcacattgattagaagtcgaccatgcactggacatttttatatgtacatacgggctcatttattcatcataaaccccctgcagatcacaggacttttcccttgatccagtaaagagtaataataacagggactgagaaaagctgtgcagctgcccctctttcctggtccatgcaggacagcaaagctgccagatgaagcctgaacaagaataggtgatttaacactaaaacccaccagcctttcaaagtcaggcaaggcaaagatgaccacggttcagagactgtgggaagggagtggagattcttctcaccataattctgctgtacatacgcacatgtgtgcacacacacacatatttggggaacatgctgctccctcgaagcctcactcaacaccctacactatgggaactgggggaaatgaggtagacaggcttgaaacccgctcctccaattcctggcttggtaatgctagctgctgtaacagacaatgccccacatctcaaagccttcatgcaaatttgtccacagaaagtccaaaacaggctgggtgcggtggctcacacctgtaatcccagtactttgggaggccgaggtgggcggatctcctgaggtcgggagttcgagaccagcctggccaacatggtgaaaccccatctcttctaaaagtacaaaaattagctaggcgtggtggtgcacacctgtaatcccagctactcaggaggccgaggcacgagaatcacttgaacctgggaggctgaggttgcagttagctgagctcgtgccactgcaccccagcctgggcgacagagtgagactctgtcacaaacaaacaaacaaacaaacaaacaaacaaaaaacgtccagaacaggaaacaggtattcctgattagcaggcagctctcctctacacggtgaccccagcaccccacacctcacaaccgtggcatcacatagtttccaggctgactggcggagaggaaagaactcggaggaccacacagcagaggttcataaggggcgggcctgggaaggatcccactctgcccacattccctcggctagaactcagtcacatggcaacatctaactgcaagggacctggggaaatgtcttttagctgggtgccagtcagccccgggatccaagttgctcactgctggggagcctcaattttcttgactgtaaaatggggaaaataaataagacctgccctgtaaggctgtgcttggaaataaattttgtcccttctcccctactcctctcccttcttttcctttttctccttcccaccttccctcccctacccctgccacacacacccccgcaagcttaccaactttacctgccagcgtggcccctccatgcttgcctctggggtcctgggagctcaggacacaggagattagtccagatgtggcggacctagagccccaggctggtcaggtgcaaggtcacgcccagactccactttctgactcctgtgcagtgctcctccacagctgaccgggtttttctcctgatggaaaggactcgaagctcttctcctttgcagccgtcccttttcagccttcccagagccacagcacctccgcctcccgcagcactgtcccttctgccctgcagaggggataggcggagctggtgctcacggccacaaagtgaccaggtgccagtcctgtcacatcctttctcaattaattgcttgaacccctccctgcctcattacgtaaaggctcagtgtctccctcttgaggctcccctacccttggattgctcatggtccgcggcaggaagctggaccatgtccacacaacgtgaggatggaagctggggtcctgtgccgactctgctgcagtttcttctcgccgccacatggtgtcgctgtgggcctgcagggccacaccaaaggcctgcctattgggctctgggctccctccagggtggtgggggccacgttgttcatacccagcctgggggtgggtggcccaagagcacaggtcaacagctgtctggcctcaatttatcatcaagaactcccacccacccctccttcatccccatagatctacttctgggtctgattagactcctgccccttcatctcccggcaggaaggcaggcttccctaggtggtgcccccaaccctaaccccagggggagcgcccagtgaggacaaggtgctctggaaaataaattaattctccttgagggcacctactacatgggtcctgacaggaggggtggggtccatgtgactggagaaaccgcaggccgattctgcccccagatgtttctgttcatgccaggcctagaatgctccctctagggtgtattcctttgattctgaaaaggacgctggtcttccagagttccttattaaaaaacacaattccccagcggcatccccttggccctctttctcttcctacttagtgaggatctggccttaaagcggtcatgcttcccaacctgattagggtcccggagccttctgaaaatcagatgaaagctttggactagtctttccccgaactgcataaatatatatctatatatctatatatttatatatatgcacataatatatatatttattttatatttataatataatacaaatataaatataaatatctatttatattatatatataatataaatatctacatctatatatatatatatatgcacaaacatcctttcaggggtcccctgaggtgcacactggcctgtgcctggttaagtttcccttacctattaggaattcagccctggggaagtggggaggcagctgctttgcagctctacagagtggaaggcagggggccctgccttgttagcagctctgggcacctggcctgggtcacatgcagcatctgtcttgggagtcctgctgtgtcagtgaggagagggccccaaacgggcaggcctgctgccctgggcgagcccacagggagcccagcctctaggcacgcgctgtcttataaccttcgattctggccttgggggaatttgtgttcccttaacttgctttcccatccacccagcctaaatttgaccaccgttgtttcccatctgacaacctaactctcttgattcagttccagaaacctccccacccctcgcctaaattccaagattccaagcccctcccacttctgcctattttagaaaggccaaaaagagaggggagtgatgcctcggtgcccgctctgtgcctggcaccagcctaggcattttccgtgtgctctcatgttccctgctcactcttgcagtgtgggtgattattttgtggcacagagaaatgatgcaccgaaggtcacacagtgaccaagaggctgcactgggtttcagactcagatctggctgcttctaaacctgcgctccaggcctcctgagcctccacagggcaggcatgcccagatctcagaggacacggtctcctggtcctagacgctgcccctgagacttcaggaagagggcccggtgggtgggtagaacagtgatagcatacgctgtggctgggcatgatagctcaattctgggccttggtgttctgtcctgtaaaatgggcagcagcacctccttcagtggggcactgtgaggattagaccctaaaccctgttagccaggggcccagcccctggagactgtgtaaagaagcatgccacgctcagctggggctgttaaggctccagtgagagcaaaggggtggcagggctcctacccacaggactcggccatcagcatcctgccccctgcaacacttacaccggcctgagctggggagccagatcccagccctccttggcagctcagagtacagaattcagcgaggccattcagcccgaggagggaaactcctcacggtggccttccaagacttccctcctggctagtggctcccttccgcaggctgggctcctgctgtaaaagctccagtggggaagtgctctcctcttccctatgagaagagttcagggcaggctctttatccccattcaatttgcctttctgtccagccagccagcccgcgtttgataagcagaggctctgggccaggcactggggaggcggggaagccactgcccatgtggtgagagggcccagcatgcgtcctcgtgccaggggtggggggcagtgagcagctgagccggaggactgtggtggtctcacgatctattatgcagagaaatgcagaggggtggcctacaggtcgtggccgaaggaccctccacccttccgtgaggggcgctgcctggaggggttcatctcaatggcactctggtggttttcaaatggctgagtgagcagggcatgaagttccatttaaaacagaacttccatggagcaggatgagtaaaaatgggagcctgagaaaaagtcatgatgggagtggccaggtactgggcagccaccacagattctccggggtacccacctgttaaacggtggcagggcctgggatcaggagcagcacccggctggggtgagaagggggactggcacgtggtgtgtgcttaagagcttgggctctggagcccgagccccagggttcaaatcactttccccctatttactagggtgtggtcttgggcaagttctggaactgctgtgtgcctcagtttccacactatagagtggttgtagcagctacatgttacaatagatgttactatgaaaatcacagtgcctgggcccatggctcacctacaggactcttggcacccacaggttccttgttccgaaactgcacacaggatggctggtcagaaaccttccccaggcctaatctggcctgtggcgttaatgtgaacgactcttccaacgagaagcgggtaagcctgtcaacctccaccccacgaacccggggacaggaacctatagggtgaggaggccctgggagaggaggccctgggagaggacagggtggcacaggcctgggacagtggtcaggatgtaagggctaccccctgtccccatgcctcctactcacagaggtgtcagtgggtctgcctcactgccctggtctatcgacccggagatgatggttaggaggaacccaggcacaggtaggaactgtcgcataccaccgcgagactgggggtgctgtattcattcaactgaaagagacgctaacatagtggctaaatgctcagagcaaggctggtgcgtctgaattccgaccttgaccttagtggggctggggaagatttaatcactacgtgcctcactttcttcatctgggaaatggtgttaataatgctgacaacataggcttgtcaagagaactaaatgagttaatatatgtgcatcctgagttgggcgcctggtcacagtaagtgctcagtaaatgtttgcttttggccgggtgtggcggcttacacctataatcccagcactttgggaggatgaggtgggaggattgcctgaggccagggcaacatagtgaaacattggatctacaaaaaatgtttaaaaattagctgagcgtggtggtgcgtgcctatagtcccagctactcaggaagctgaggcaggaggatcgcctgagctggagagtttgaggatgcagtgagcagtgattgtgtcgctgcactctaacctgggcaatggaggacaggattgagccctgtctcttaaaaaaaaaaatgtttacagcattcgaaggagtctcccggctctgataagcaaggagggagtccggctgcagagctgccctagctgaggggatgctcccttcggcaatcggctgacctttgctggggacctccagaggcttcctctgagggtggccatcagggccctgtctgggctcagctcactctgcatcactgtcctttcccaggatggccctttctctcaaatctcatgcacactgtgccatcctgcctcccacctgggcctttgcccccgttagggccccttgcctggagagcactttcctcctctcttttcttgactgattcttatatatcctttgagactcccctcgggcccatccatgccagccctttcttcccctccccacgggaagggctcccttagagcctggtgttggcctccaactattacctaccatgttacattaaaatgatcagcgtgtgccacctgcctccatctctctcactaaaatacatgctcctcaaaggcattcattcactccacaaacactcactgagcacctgctgtgggccagggttgggtctgggcaaaatcacggtgacaaatcagagagtcttgttcatttccaggccccagtgcccagcacaatgcttggcacctatgaggtgcccaataaatatttgtttgtgcacttaaacatctactgagtgccagctgcttgatgcgcaattgtattaaatcctcaaaataatcctgtacattcattgttttcctcactttgcagaagaggaaactgaggctcagggattaaggaacatgcttgtaaagtagtggaggtaggatttaaaccaagcctagctccaaaagcaccagtgctccgtcctctgtcttctgatacctccccataagatgtgtgccccgcccagggagtacactttcagcaggtcccattagctaaactccctagaaggaatatgggcaagctttgcctgtcccttggagggtagggtgaggtcatgggagaaagcacgggtggagagtggcagaattcagggagaagggaggaagttgtgtgtcagagcaccccgtcttctgcattttgcgaagacccctctctctgtagcgcatcagccttgctctatgtggaggaaggcaagctccaagggagaggaagcagttctttccttcccagggcttgtcatcccattgggaacatacacgaggtcttcagatctggtcagagtgggatgatttaataaggagattcgacaaggagtgagcactcgtggtcttggagggatggtgagtgggctctgccttctgcagaggaacagttctatcatcgacttatatgaagagagggggcttatttgtttcaaatttgtaaaatccataaaactaaaaaggaataatatcatgatgggtggccggatgaggttcataagaaggctttgtactgcaaataacacacatttctaactggtttaataagcacatgtggcttgcgtaactggaaatgcagagaatgggcttcaggattctttgatgaggcagcaccacagaatcaccagggtctgtgtcatttgcatctctctccctgctgtcctggtggcttcttccttaggctggcattgtaagatgactgccatcagaaattgcagccacaggccaggcacagtggctcatgcctgtaatcccaccactttgggaggtcgagacgggtggatcacttgaggtcaagggtttgagaccagcttggccaacatggcgaaactctgtctctactaaaaatacaaaaattagccgggcatggtgacgtgtgcctgtaatcccagctacttgggaggctgaggcacaagagtcgcttgaacttgggaggtagaggttgcagtgagccaagatctcgccactgcgctccagcctgggcgacagagcgagactctgcccccaaaataggaaaaaacatccacacaatgagaactgttggtttacactaatcagtacgaataatggagcccagggccttaaccacaacgttcatgccaagattaaaactgtaaaatccccaaaccaaggagctgaaatttcataaaggaaaatgtaacgctttggacttaactcagaaaaatgattgtccaaaaatggtggaaaggagacctagcttggcttcagcttgcattaaaaaaacaaaacaaaacaacagctctgagattggaagggtttcctgaccacgtgattcaccggtccctaaatgccagtccacaaattggcacgagttttgttctttattctgagatttaaaccatcctatttcttattattaaaatgtctttttatcaactgagggtgaaggtatgtattagttgcttttctttttttcttcttttctttttgtgacatccttacttggtatacaccactatattattgacacacaatattactgacaccaatagtggactcagattggcagtaagaccgcacatagatgtcacatgggtaaataaaatgggatttgcaaactgtagctcttggacccaatgaggctccactgcctgcttttgtaaataaagttttattggaacacagccaagcccattcctaccacagtaaggctacgtttacatgacaagggcagagttgagtatttgcaaaagagaccacagggcactcagagcccaaaatatttactctctgtcccttaacaaaaaatgtctgtgacagatgatctaaaggctacagaaagcaggtggtacagtcagaacatacagcagtaagagaggcaactgaattcaggacagacaacagtgaggcttctgggccccatgtcctccaggagtggtgcacacttttagatgttaagagctgaggactggctgggtgtggtggctcatgcctgtagtctcagcactttgggaggctgggctgggagaatcacttgaactcctgagctcaagaccagtctgggccacatagggagaccctatctctacaaaaaaaatttttttaagtagctgagtgtgatggcacttgcctgtagtcttagctactcggaggttaaggcaggaagattgcttgagcctgggaggttgaggctgtagtgagccatgatcgtgctactgtactccagcctggatgacagagtgagaccctgtctcaaaaaccaacaaaaaaaaagctaaggaccgaaggtcacatgaaaccttcagggagcaaggctgtttctgggtgggtgaggtcttatggttcctaccttacaaggcaagaacgggtctacatgagaagcgggctggtcacctggcaagcaatggccacagccacgggacagtgcagaatcttctgcatgacaccccccttgtcaccctgtgcctcttcaggctcttgcaggctggtccaggtatccccaggagtgaggctgacaccctctgcaatgcggctcatctgtacatggcgagattatatgttaacatattggtcctcaattttttgacatttcacaggtctttgatgtcccaaagcctaggaaccattaattcaaggcaacccactgcccttcaagggtcttcctcacatccctgagaggtgactcctggctctcaggagagcagttacatcagtggggaactcaatgtcacatggtagccttcctatcgaaggccacctcctgctgtcagaaaatgatcagtcaccccgagtcaaaatctacctcctttctggaaacttcccccaactggagctcacacatgaggtctggcccttcttctacatgttgttcagtctaacacttttctcctctaagtgtgtgtttttcccctccaggtgtcatggacccagttttttcatgtactctacagatgacacaatcaccctcctctggaaatgcttcagtttattaatgtgactcttaaaataacatgcctagcctctccaaacattcccacgtggccagctgcccacagcactccatcagtgtaactgagaataaagctaatttttgagccatttcatgctcagacttcctaccatctcaaaccgctgactcattttgaaggaggatggtgggatggggaaaaattaaaattaccatacactgagtgtttcctacatgccaaggcattgtctaggtactctatctgacactgtatttgttcttccaacaagtctgcaaggtagatattattatccccattttgcagatgaggaatctgaggctcaaagaagttaaataatttgctcaaggtcacacagttggtgagtcacagtccgggtttggaacccttgtctcctggctctgaagcctgtgttctttctctacagtacactgtgtgacaccatggagcttgggtctttctaacctcaaggttactttcccatgaagagctgtcagccaggtttcccctattctattcttgtgccttcttaaaaaaataattacccttttcttttggttataaatagcccttatccactgtggaaaaattagaagtatagaaaaattataaaagaaaataacaactctatttgcaagcctataatacaaagttaaccactgttaacatcagccatatctctttacaatcttgtctctctgtatgtatgagattgaaccacatggaatggctgatattcagtttttttgttttctttattttttgtgttgatattcaatcattttggatctacacaaaaggtaatttcatataaatctttttaaaatttatttattttaaaaattctcagcagaatcagttttcatataattccctaatatgtttttacatatagctggaatcacattgcacatgtaaagtttgaattctgctttttcatgtaataatatatcagcatgtcctgactcattttaaattcttggtaaacaacattttattagcggtataccatgaaagtaatttgtatttgaaataattgatgtaactattctattgttggacatttgggttttttttatcactaatacttctgtgataaacatcttcatgtataaatatgcttttaaatttctgattatttcttagaatcaattcctgaaggtagaagggaggtcaaaaggtcatatttcaaaggttcttgatacatatttctatattaccttccagaaagattgaaccagttttgagtcccactataccctcacctgcagaggaaattattacttttacatatttgttagtttggttggtaaaaattattcttttaatttttattcccttgattctttttgatactttattttttggacctaaatgcagatctttcaatttttttttttttttgagacagggtctccagcccaggctggagtgcagtggtgcaatctcagctcactgcaacccccacctcccgggttcaagcgagcctcctgcctcagccttccaagtagctgggattacaggtgcacgccaccatgcctggctaatttttgtatttttggtagagacagggtttctccacgttgtccaggctggtctcgaactctaacctcgagtgatccaccgactttggcctcctaaagtgcagggattataggtgtgagccaccatgcctggccagatcttttaattttctgaccaatattccacttagatctttttgactcaaagatgagccaatagtgtgaagtggctgctgaataagtgaatgcctgcttggctgcataggcgcgcaatgtatagatcaggggagatgggaggtgatggatcccttctacctcttcctggtcagagaatgcatctggagcttttcagctatgtggttctgggggtcttatttaagaaggacattaacaaactggagcatattaatttaactaaaggttgaaggattgtggaaagaggttaaagacacagggaatatgtatgtatgtatgtatgtatgtatgtatatatttatttatttgagacagggtcttactctgtcatccaggctggagtgcagtggctggatcacagctcactgcagccttgacctcccaggctggagtgatcctcctacctcagcctctgagtggctgtgaccacatgtgtgcaccattgtgcctggctaattttaaaattttttgtagagacagtgtttcgcaatgttgcccaggctggtcttgaactcctgagctcgagcaatccttcctccttagactcccaaagtgctgggattacaggcatgagccaacgcacccgacctgacacagggaatatttgacatagagaaaatgaaagagaaacagatgggcagaatagctgtattaaaaaatggcaggcctccctgtatgacctttgtaacttttctatataaaacctgccttatataaaagacaaatccattttaagtggatccagaagacagaaaatggaccaataggtggtgcaagtaattgattttagcttcacataaacaaaatctaatattttgtgctattttacaccaaataactttctcaaagggcagtgagcactttgtctctagaggtattcaagcaaaggtttgaattcagagagttggtaaggggccctatacataagatggaagtttgaattggcatcaattcaaacttagggatgatccttagggatcatcagatgatccctaagggcttttccaatgccaggatgttacggtgttatgtgtctgtgaattggcgtccttgaggtatggacagaatagcagcgtcggtgggttcaagctgcctgaagcggatgcagtgaggcacagaaggcagagctagccaggagggccggcggggctgacacgtgcctctctctgcagcactcctacctgctgaagctgaaagtcatgtacaccgtgggctacagctcctccctggtcatgctcctggtcgcccttggcatcctctgtgctttccggtgagaacacactgccagctctccataccccagccctcctcaggtacagactttgggtctcttctcaaccacccaggacagaaagaggaaggtctgagtgaactaccttgtcgtctcttgatctaaagctgacctatggcaaaacatcgaggttcctgtgacctcattcatccctttattttttcaacatttactaagcactactgagaacttgcggccggtcgctttatatgtattctaattttcacacaatgctatgagataggtaacaggaaccccattttacagtagtactagcgagattctgttgcaagagacagaaatccacctcgaaacagcataagaaaaacaaaggcgacctgacccatgtaagtggcaagttcatgggcatctgctgtaggcatggctggatctaggtgttcagtggcatcagcagctaggtccgtctccctccattccactgctctgggttggcctcatcctctgggaggctttctgcagaagtggcagagacaaccaccagcagttgctggcattcatcctgctagctcagcaacaccagggccaacaagagcctcttcccctctggttccagtaaaagtcctcagagttctcataggccgggcttaggtcacatgcccaactctgagccaatcactatggacagcgatggagcactctgattgatcaagtctgtcatgagggtgagaagggtggagccctcccaatccagagctggaatgggtttcccagaagaaagcctgtttccggtaccagaagaagcagaacaagtaactgacttctgtcccctgcagcagaggaggacactgaggctccgggaagtgaaaagtcttgctcaaggtcatatagctgctaagtggcagagccagggtctgctttctccccgcagcctgtgttccttctgtgcccctagccctctcccgttctggttgccgtcctcacccctcccccaaaacaattctgggagctggagatggtggtaggtcagggcagaatacaatgttgcccctacagccccagctttttatttattcatttagagacaaagtcttgctctgctgctgaggctggagtgcagtggcaatggtagaactcctgggctcaagcaatcctcccacttcagcctcttgtacaaggaatacaggcaggcaccaccatgcccagctaattaaaaacaaaaacaatttttttgtagatacagaagtctcaatatgttgaactcatggcctcaagtgatcttcctgccttggcctccctaagtactgggattacaggtgtgagccacactgtggctggcctttttttttttttttctcactgcagcatgtagcaaattagactggccacctggagacccagttcctcattcaggttatgctcacagaatgtgttacccggaaagagctgaagtctagggcctcagtttccccagtgcactggtggcaggtgggcctggctgagtcccagcccctcaggctctggcctctatgtccctacattctctccctgcaggaggctccactgcactcgcaactacatccacatgcacctgttcgtgtccttcatccttcgtgccctgtccaacttcatcaaggacgccgtgctcttctcctcagatgatgtcacctactgcgatgcccacagggtaatatgtctgggtgccccaggatgtcgccaggcccgcctgccttccccagcctagctttggagaggggagtagcctagttgtccttcccccaagcccctgctgaggctgcacttaataccaaggataaagcagccagtgctgacactgggccaggaggttcagggagattccacagccacatgtgcacaatctgggtcatgtaggagagaagctcatgggggttgccgtaaactcccagtgtccaggagtgaactggtcactctaggaattagatatatagggagactcctcttttccctacttctgccagttcccagctgaagaaagatgacccagtctggagagggtgggggttggtcataaaaagaaaagggtgagcatgggccagtatgtctgtataaatgtatttgcaataaaacgttgtgttttcttaaatctaaccccctttctccttccaaatgcccagatgactcaattcattgcaatcaccctgtgtgtcagttgggattccttttgctgcgaataacagaaaactatatattggggtcttaaacaaatgggggctgtttcctacgtaagcagtccacagatgaggtggtgcaatggctgtgtgataccatgagggacacagtcttttcccctgtttccgcactgccatccttagagtaggcctttgatgtcatgctttataccacatggttgcaatatgactgctgcaaccccaggcctcctgtctgtgttccaggcaagaaggagaaaggtaaaacgttaaacatttttttatcttttgggcagctttgcctttctattgagaaagggcaccttccccagaaactcctacctacatctcattggctagagttgagtcatgtaaccacacttaatcgcaaaggaagcagggtgatagagttttttactatcacaatctctatagtagaggcgagcaagggagaaaagagattggaaattgagattagttcagccaacctgcctgccacttcctaccactcacctgtttgtattgttcagagttgtgtgtgtgtgtgtgtgtgtgtgtattttctgactcagactgagaggttcttcaggtaggatccatgtctctcaaggaggtctccaggatgaaacaagagtacctgctgggagtcaggagccttaaatcctagccacgcttcattactgaccagcagtggacaaggccagcaatgccccagcagggaaccttctcaggttttactaaacattagactcacaagtcaaccatgggccttgcctggagtcagagcctctgggaaggccataaggcaggaaccaccactgtccccaggcagcaccgggcgctcctccttctcgggcttgtctttgcagcagccctacggctatcccgggagctgtcccatccccaggggacagcccaatgcaaagaaaaggacaaaggccctaccatggcagaggtacaggagctgtgctggtgtagaagcctggtgccccacaattctacaggcataacttccggggatccctgcaggggacatgcctgttaaaagagtcagtcactgcatcagggaagtccaactccatgacatccccatcagatatgtggagagtgcaatgtaccagccagggccatttttaccataatcagtggtacctcctaacagagttggcacatcccttcattatgtgtttgcaagggaactgagcttagaaaagatttttttaaccctttgctcagaaatctcttccctttctaggccttggtttcctcatctgaaaaaatgaggggattgggcagtatccgacacagttctgtagttgaaggactgcctcctcatctagcctggcagccagtgctaggatttgaacctagttcctgctcctatgatggctcattgattggccagcttgactgaacccactaggcctgtggactcctactctctagagaatgctgcaggcctgatggaggaaggccacagaagatggccttgaaccccagaggcccgctcttgtggcctggctcctgcccctacaacaccctgttgctccctttggggccactcaccagagggaaccccactgccacccggcctgggttcagctgcctctctctctccaggcgggctgcaagctggtcatggtgctgttccagtactgcatcatggccaactactcctggctgctggtggaaggcctctaccttcacacactcctcgccatctccttcttctctgaaagaaagtacctccagggatttgtggcattcggatggggtatgtttctccctgggtctgatatctgcatggtatgtgggaaggggtgctgagtcgagagtcggagggttcggcttttagttccagctccacacttaactaacttgtgtaatctttttttttttttttttttttgagttggagttttgctcttgttgcccaggctgaagtgcaatggcatgatcttggctcactgcaaccttcatctcccaggttcaagtgattctcctacctcagcttcccaagtagctgggattacaggcatgtgccaccacacccagctaattttgtatttttagtagagacagggtttcgccctgttggtcagactagttttgaactcctgacctcaggtgatccgcccgcctcggcctcccaaagtgatgggattacaggcgtgagccaccgcatccagctaacttgtgtaatcttagacaagttccttgatgtttaaccctctggtctcagtttacttatctgtcaagtgggaaatcctagctcaaatttagccccagtttctggcatctagagctttttacagttcgttcccacccaatacttgttgcctcgtctgcctttagacggtgcattcctacgtcctctttcttgcttcctttctgtattagaacgcttttgactgctggcatcagaaaatctgtaaacctttaaacataaacgaaattaattggctcatataactgaaaagtccagtgatcaccaacttcaggagaggctgaatccagcagcgtcacactgttgctttctgtctctactttgcctttcgtaacatcggctttgtagttaagctggtgttcccaatggaatggccaacagcttctgggctagagacttccttgtaccgaactccaacgagagaaagaaagagactccatccagcattcttagcaaatattctgaggtgcactctggttggactgcttgaatctcatagacacccttgaactagtcacagaggcctgagagaatgaaatatgttgattggccttagctactcaaaccacatgacttcctaaaggaaattcgggattcattgtctaggaaagagggagaatgagagcgagacagccaagtgcgggcccccattccatctctgtcccttttccttttcggtcaatgaagacgacaaacaacttccattttaggggcacttgctatgtgccaggcattggattcagcactttacatgtatcatttaatcatcgtagcaatctccagaggcctctcagagacctcagctcacagacacaacgtaacataccaactcacatggtaaacaaggacagacctcaggattcaagccaagacttgtctgtttccaaagccctttaacttttaccctgccattaacacccatccatccatccatccatccatccatccatccatccacccacccacccatgcacacatccacccactcatccatccattcctctatccattcatccattagttgctcatttgataaacatgaacgttaccctaaggagttctagacagagagccaggttcctgtgagtgactcaaaggcttacagagatagtcatgtgcaccaagcattagcttcttttggtttcttcctggtgcctttaagaagtgtccctgccaggaatgccctgtgctgccttttctgcttgtctaaatccttatttacaagggccctgtctcccgatcaggggagctgcctgagctggcagagcttgctgagccctcctgcttgctgagccctcctgcttgctgagccctcctgcttctgaaccttggcagcccagtcagcacctgaccccgggccatcgggaggttgcagagttatgccgacgtctctagaggccagcaatcccagagtgcctggggaccagggacttgccttatgcagctggctctgccaaaaaagcacccaactcactgagcccagttcactaagctttaaatcccagatacgccaagattcagctgtatgaacatggaccgttttcccatctataatatcaggaccataatttattcaacattctttgagcacttcctgtgttcagggattacaaagctgcattgtgatagtatctctgtcacaggattttaagatgttggaatgaaataataagaaccttcctttcttcttcaaatctttgtggagcatctactgtacgccagccctgtgctgggtgctgagaattgagtgacatataaaacagcaatggttctcttcctcctggcctgtttgcctgccagacaccaaagagaccctgaagggtccctagaaggcctgaagcccctctatctgtgagaagcccttttcatgcgaaggtaacggcccctgcttgaaattatactgatttcatcaaagataggttgcttaaatgggtacacccctactgtaaaaccttgtaaaaaaaatttttttaagtagaaaaaaaaaaattaccctagtcccacagattgaactttttctgagatttccttccaacctttttttctacttgcagtttttcctcacatagctgtggtcattctctatgaagaattttgaatttcgcttcttcccattaacacataagcatgttctgtattatgtcaaatctttcataaacattttaaactaccacatagatagatagatgtgatatagatgtatttaaccacatacctattgtttggacatttaggttgtctcactattataaatagcacagtgatgaatacctttatgggcaaagtgttttctgtatgtaatacagaatcccaggatatggattcctgagtggaaaggagtgagcacgtttaaggtttttaacacttacccaaagctttgactttttcagagcggctgaggtgtgagtctgtatccagaaaatagtgacagcgcaggctttatagatgagccaggctgccactcagcgagtgagagtgagcggctggcactggcggttctgcctcagcatgggtgaaggtctgccaaacccagcttgctgcactccccgcccagagactctgaggcagtgggtctggggtggcccgagactgcatttctgacgtgttcccaggtgttgctcatgctgctggtccaggggccacactgagccaccaacttaaaccattacaaattttgcaaactttcccaccaacttgccactaaggatggaagataatgaacaagtgcctctcaaaacccatgttctttgcccaaagcactaagaattgaggcaagactttttttttttttttgagagagagtcttgccctgttgcccaggctggagtgcagtggcgcaatctgggctcactgcaagctccgcctcccgggttcacaccattctcctgcctcagcctcctgagtagctgggattacaggtgcccaccaccacacccagctaattttttgtgtttttagtggagacggggtttcactgtgttagccaggatggtctcaatctcctgacctcttgatccacctgactcggcctcccaaagtgctgggattacaggcgtgagccaccacgcccggcttttttttttttttcaagatagggtctctctttgtcacccaggctggagtgcaactgttcaatcttggctcactgcagcctcaacgtcctgggctcaagtgatccttctgcctcagccgcctgagtggctgtgactacaggcatgcaccactgtacctagctaatttttatttacttatttttattttttgtagagacagtgtctcactatgttgcccaggctggtcttgaactcctggcctcaagtgatcctcctgcctcagcctcccaaagtgctgggattacaggcatgagccaccacacccagcccaaggcatttgtttaattgttatttttatcaaagtcattcatgtacttggtttaaataattaaacaaaagactacaaggtttataataaacaaaagctaaatctcctgccttcacttcttattcccgagctcagcctccagagttaatgcctttcactcttttaacttgttcctcctaagatttactctcgtgtttctaaaatcaatacactactatttcttgatttgtctgtttgaagcattagttattgactccacatgatggaagataagaatataaaattattttttcttttctgagacaggatctcactctcttggcccaagctggagtgcagtggttcaatcacagcccactgcaacctcaagctcctgggctcaagcgatcctcctggctcagcctcctaactagctaggactacaggtgcatgccaccacatctggctgattttttacatttattgtagagacagggtcttgccatgtctcccaggttggtcttgaactcctgggcccaaacgatcctcctgcatcaacttcccaaagtgctgggattatagttgtgagccattgcgcctgaccaagaatataaaattcttaatcctctacctccattcttcctttacagtttcttatcatttttggctaaatcagattcagtgtatacattattatatctatgtaaatagtgtttaccactgagacaagtggtgtacaataattttactttcaatcttattaactttttattttcctggaatcatttttcctttgctttttatatatatatattgccagcatcaattctctcaaattctttggacagccttccaatgctatttattttccaaatcatcaaatgcaataggaaatctatcagttcctatttgtttgtttcctgctgtattagttcctaaggctatcttaacaaattgccacaaacttggtggcttaaaacaacagaaatttactctctcacagttctggaggccagaagtctgaaatcaacgcgttggcagggttggtttcttttggaggccctgacggaggatccctcccatatctctttcctaccttctggtggtggctggcaatgcttggcattccttggtttgtagttgcatcagccccattcctgcttatgtctttacatggacttcttcctctgtgtcttctctctctgtgtgtctctcatggccttcttataaggatgccaatcatgctggagtagtggcccaccatactccagtatgactttatcttaaccaattacatctgcaaagaccctatttccaagtaaggttacagtctgaggtgctgggttgacatgaattttagggagacactattcaacctggtatacttgccagtgtttttttctagagctttctgccttcttgcttgacttggcctggctgttctccagatttgctcagctcccttagctttcaccttcttccacaaatcctgtttcctttctttctcatctccctgtctttggttcactctctagttgtgttggagcacatcctccagtatctgtctaaccaagagcacctgaaaggaacatttttttaatcccatgtctgaagatatcttcgttcaaccttcatacctaattcattattttgctggacataaaacaagctgaagtccaggcacagtggctcacacctgtaatcccagcaatttgggaggccaaggtgggcagatcacttgaggtcaggagttcgagaccatcctggccaacgtgttgaaaccctgtctctactaaaatacaaaaattagtcaggggtggtggtgggtgcctgtaatctcagctattcaagaggctgagacagaagaatcacttgaacccgggtggtggaggttgcagagagctgagaccactgcactccagcctgggcaacagagtgagacttcatctcaaaaaaaaaaaaaaaaaaaaaagttgaaaaatcattttccccagaattttgagggtcttgtgttttggcatcagtgttatgggatgtgccatgccattttgcttcctgaactttttactcctttctacataagctgcaggatcttctctctgtgttctgaaatgtcacagggatgtgctgtgatgcaggccttttttcatcgtttttcctggcatacggtgtccctttcatctgaaaattcatgtctttcatttcttgaaaatgttcttacattatctatttaattgttttttccttctgttttttatcctctgttttctgaaactccctttagtctaatgttgtacatcctggaataacctctaatgttcgaatttctttttcctacttttcattccactgttgtttattctgctgagagattcctagtctttatcttccaacccgtctattgcgtgtttaattgtggttatcatatgctccgttcctaagccccctttcttgttctccgggcactccctgttgacagcatcctgtttgtgtcttgtagatacgaccttttatctctccgatggcgttccttagagttgttttgttccaagttccttctgcttcctgtatggtctgtttcctctgagttccttttctctgattgttttggtctgtgtcttttatgtaataagatgttggtgaccttggctgtctgttcctatttaagaatgaatcacttcagagccggctaatggctgttgggggtgtggggtttgtctctcaagggacactggactggaagtgttggggggtccccccatggctatctataggctctttgtctggggctgttcagttcctctagagaatcctttcatctccagcgtgcagtggcagggaggtgggcagagggtagagggctggggtaggggtagaagcccattcagtagaggcctgaaaactgagcggcccggggaccagggcttttaccattcagcttgagcacgtccactagaaatagaatctgatttaagtatttctgcttaaaaaaaaaagaatctgagccatacatctagcttaaaattttctagtagccacaatcaacacagtaaaatgaaacaggcagtatttgtttcaacaatctattctgttcaacccaaggtgaccaaaatagtatcatttcaatgtataatcaatataaaaattggtaatgacatattttacatttttttttttttgagatggagttcctctcttgtcacccaggctggagcgcagtggcgcaatcttgactcactgcaacctccgcctcccgggttcaagctattctcccacctcagcctcccgagtagctgggattacaggcatgcaccaccatgcctggctagtttttgtttttttaatagagacagggttttgccatgttggccaggctggtctcgaactcctgacctcgggtgatccacctgcctcagcctcccaaagtgctgagattacaggcatgaaccaccgcgtctggccatgttttacgtccttttatttgtaccaagtcttcaaaatatggtatctatcttgcacttagtgcccaactcagtagggaccagccacataccaggtgctcaagagccaccttgagcgctggtgtagactgtcactccattcctgctcagctgagcaacccctccaaccctctgctgggctgcagccctgttctccttggttcagtaattccagagaataaactctgttggaagttgactattcagtctggtgagggtagtgctggccgcctggggtgcttatctgtttcttatccagacttcaaaccatcctcctgccccagccccactctgccgcctgcctcctgggtaccgggtgccctggccctagagcatccttgggcacttccccagcggcattgccccagacagcacttctgtttcagcttcctctgctcgggacatcagctgccactcctctggcaggcttctgtgtgcctaagcgtgttgccgtctctcctctactctgcccttccttctcagtctttgtccttacgggcttttaccatttctatttctttattatcattttagaggggcttcaggggaagtagggataaatgtataagttcagtttgccacgtttaactagaagtcaggaaatgttattgtattttctcttctaaattcttgtggacttgatctcatctctagtccaaattatatttttgtttaaacatgacagtgatggcttaccttagctgttaaatggccaagctttttacaaaccaatatttgaataaaatcaacgtttctttcatgacctgtgtccaccccttctccacttcctcctccccgctgcacgtggccaggcagatcacagtatgagaagggggctctccagctgcctccatgtgtccacgagcctgcccaggagtcccagcccctctatactttgcagtggtcctctggagtctggcctgggttcccaggagacccctaacaccaagtggcctttgggatccttctgattctgccatagtccccagggcatgcccggcacccttgaggcacatggtgccacattcacacaagatggcacaagatggcagaggggtttctgtggaaaccaaatcttggcacctgctcagtagctgggctggggtaaccaattgtcctgttctgatatgtgtgttgaaaattgagtcctctctcttctgcccctccctttgtttttaatcctcaggttctccagccatttttgttgctttgtgggctattgccagacactttctggaagatgttgggtaagctaacggaaggaggataacaagaatgtatctgacatcgtccagcttttcaaacagcatagttacttctttggagctatctaggaaaggcctttttctcaaagtagaggccacagatgagttccctggactgatgctcactgcttcccaggtgtgtttccaggtgggccgagcagccttggccatgcctgcactgtcctggccttcctgtcttcttgctgcctgtccgctctgcatgtgggtcagatgccagacaagagctacggggctccaggcaggtgttgctccatggaagaaactcaaggaagggccagtccagctttttcttcctcctgggatctccctcctggatgcctctctacccctgggtgtttaggagccctgcagagccagactctaaagaagtcaggcattgagggtggcagtgagcccaggggacgcacctgggagtaggtacatgggaagcaagcttaaaagaagctggggaagaggagaggcagcagggcagcagcgaggcagcggggcagcatgggagttgatttctcaggggcataatgacacaaccaggccaataagtggatgaggtcaaatgagacatccaagtgtctatagtccaaatttagcccgaaataattgcttcaaagtaatttttgtattgggtgaattcactttttcaaaaaatctggattttcagcttgtctagaaaaaaatggagaggtcctttaacacgttccatttttccttgtggcaaaaataagctggagcagagctgcggctgtcttggacagggcacatgctccccagtttgctcagtaccctccaggcctgatgtccccagatcctgaggtcacatgtcagccatccaccacttctcttactgatgtcatcttcctggcttctgttggtagctgagtttgccaccgtgctcgctggtgaattctgacagtaagctaacttttggatctgggagtctcccggctctcaggttctcgcagggagacaggtggccactccctcagccccagcagtgctcctgggtggcaggagggggtgttctaatggtgctgggcacaccactgcaggggctcagtgccacaaacacaggtccttcataccaagggccacctcagggaacatgtccttgctggttagcccagctcccacagctcctgctcataaccatgcccagctgtccctcccttaggtgctgggacatcaatgccaacgcatccatctggtggatcattcgtggtcctgtgatcctctccatcctggtgagtggccctcctctccctagctggggatcagtgggagagacggaaatggtgaccagcccacaggggcagagggtggaaggacagggctccctgcaggtgccaggagggataaaccacagtgtttgtgaggttggtgagcagcgtggggtgtggaagctctgccccctgcagaatgtgtgggagtgcagtgaggggtaagctggaggcaagagcctgcgaacctggttctttcccacaagcagcagctcaagtgtggtgagcagagctccttgttctaaactggctggctcccattggcctgaaattccaccttcactggttcagacctgtgggccttgaacatttttctagggatttgcttgttaacttgggatgagtcgctaagctgagatcactgaagagggtgggagtgcagatcggggaagctcagtggggtcatggtcttgggactttgcagtgctgcgagtgggctcaggcctggaggggcggccccagggaagagatgctgggtgaccatcttggacaggagcttgtgagtgtcaaccctggtggcccttttgaatcacctgggagcttttagaaaatactgatagctattgattccatttctttttctggcaagaggcctgggtactggtccccaggcgattctgctctgtgccagggtagagtcctgtagcccagcccatgggtatggttcagcatagggggacagaggagggaaggcacatggggacacacaggaatcatctcatggatggaagcagtcccttggctggaagtaacatccacacggacagcccagggatgcccaaggctgcagaaccagttgaaagtgagtgtcctgtgcaggctcacctgcgtggggtagggggagagggcacaggacagggccccttctcttccagtagctgcctgggtggcatcttgggattggttgagaggagaggaccattccatgacaaccttcttttattcttttttaattacataatctgagcaaaaaatgcaaaatacaaaatgtttgttttggttttactttttgagacagggtctcactctgtcacccaggctggagcgcagtggcgcaacccatgactcactgcaacctccacctcctgggctcaggtgaccctctcacatcagcctcccgagtagctgggactaaaggctcccaccaccacgcctagctaattttttgtagagatgagctttcactgtgttgcccaggctggtcttgaattcctggactcgagtgatctgcctgcctcagcctcccaaaatgctgaaattgcaggtgtgaaccactgtgcctggcacaaaatgtattttttaaaaaggaaaaaaaaaatcattcatcattctcccagctacatatatgttatgaccatgtgttttccttcctccttcttctttgagcagacatacttttctttttcaaaatccttaattaggttttttttttgtttttttgttttttgtttttcacttagcaatagatgtgagctttcctgtttcatgtggaattccttgataaactgatttgccatggcttcataatatcatgctggaggctgtttcctcatttagttaagcaagcccgctgttattctgggactcggagagcccagcccaggacaaccctggatgaaggacggccagctccagtgtccagggctggtttcagagggctgtggtttattcagcaattgaggatgttggatgagcactcctgatgcaaaatatctccctaccaacctagcatggggcctggaattccactatttaaaaatggactcattcttgggaacttaaagactttctttctttccttgttttctgcttgcttgcttgcttccttgcttccttccttccttcctttccttccttccctccctccatttatttatttatttatttatttatttttctttctttctttctttttctttcttttttctttcttccttccttccttcctgccttccttccctccctccctccctctttcttccttccttccttccttccctccctccctccctccttccttccttccttcttttttttgtcttcaagtgctccctattaaattaaatacaactctaaggcaaacaaaattaaactaaatagccttaatgagttgatagcatgcatagccagcttacaacaagatgcataagcaagttgcagagaagcagggttccccgaaaagcagtgctgggccaggagtcctagacagccactaatcctgtgtcttttggcaagcattcccaggccccaggctgcttgtgtgaacaatgcgggtgtgaggctgggtgattccactgatccctgcttctataaaatggctggagcaggtgtgtgagggagggagagatgctaccatgtgggcaacttcctaatgttgttggcactgggcactggggttgggggaggggacaccaaaatgaataaaaagactgcgttcctgtccttcaggaagttacaattgaattggcagataactaggcacatacatgtttgacagacacatgcatttgaccttttaagatattttctcttccaatcatagttcgcaagaaaaaaaaagatattttaagtgctcttacacagcaatattatccctaaatacggtgaatcaggaaagggaagtaatcaagggtggcttcttgaagctggcgattgagctgcaaactggtcctcacaccagcagcttcagcatcacctgggagcttgttaaaaataattcttgggccccacgccagacttactgaaccataacctgtggggttagagcccagcaatgggtaccctaaactttgagaaccactgctgtaaaggctttcagctttggcattgtattacctgggagcttgttagaaatgcagaatctcaggtccaccccaaacctgcattttaacaatatccccgggggcttccaatgctctgcacgggtgagtgatctgccttgcaactaagcagaccttagagcttctgcagcccaggggcaggagggagtgctgcctccagccatggactctagacagtgtttcaccaggactgggggtggggaggggatggagaggagcggcagcactggtgggccatcctggctgtggtgtctgcaatgtcttctctgccctcaggtccaggggacagggccaggagaggtggctggaaaagcaagatgccttcagccccacctctgccttgtgttttgcagattaatttcatccttttcataaacattctaagaatcctgatgagaaaacttagaacccaagaaacaagaggaaatgaagtcagccattataagtaagtgaagggcaaagactgaggcatggtcagtcagcaagcatttactgagcacctactgtttacttaactggtgctagctattggagacggaggaaacgttgtagacctagtcgtaagaagtttaccaggtacatgggggcggttgcggggaatggtctgattttagagcctcagacactgtatgggggtggaaacactaagaaatctcaggcaggaagcctgacggcagagagatcttatccttggggcaaggctagggagtctccacatgggcttcaaagactgaaattcacacaaatgtgtgtaggtacagtatgtgtattttcagaggaggatgaccttcggtttcatcagattttagggaagtgcgtgatccaaaaacacttaagacctttcaaatgttaaagagaaatacgttcgttttctagggcttccataacaaaatatcacagactaggtggcttaaacagctgatatgtattttctcagagttctggaggctgaaagtccaagatcaaggtgtcgacaggtttggtttcttctgaagcatttcttgctgtgtcctcacagggtctttgctctgtgtgtgggcatccctggtgtccctctgtgtgtccatatttcctcttctaaggacaccagttgatttgattaggccccactccatccttgttgtaacttagcctcctctttcaagacctttctccaaatgcagtcacattctgagatactgggggctaggacttcagtgtaaaaatttggcagtgggtgtggacataattcagcccataaattatattaaagacaaattagcatccaggcgcggtggctcacaccaataatcccagcactttgggaggccaaggtgggcagatcacttgaggtcaggagttcgagaccagcctggtcaagatggtgaaacctcgtctttgctaaaaatacaaaaattagccaggcgtggtggagggcgcctgtaatctcagctactcgggaggctgagataggagaatcacttgaacctgggaggcagaggttgcagtgagccgcgattgcgccactgcactcctgcctgcacaacacagcaagactctgtctcaaaaagaagaaaaaaacaaaacaaaaacaggacaaattagtgtcccccagagaccttctccatggtgtttcgtgttttgagaatctgacagtgcctcagattacttggtgtcagattcctggggacctgggataaagttgccaggtaaaatacaggatgcccagttacatttgaattttggataaacaacaaatcgtttttcaatatttatacccccacatggtgtccattgtttatctgaaattcagatttaactggggattctgtatttttatttgctaagtttggcaaccctaatctgggaagaaaatacaagaatttgtccctacagatatttattatctagcaaatgagaaagccggctttgcttgtatgatgttagacatagagcagcagtgatataggcacgtaatttataaataaagttaatggtgtaggtaccgtttttttttctttttactgatggaggtgcatgatcagaaagtttggggctttgccatgagtcaaaaattgttgtatctgagtgatggatatgagggagttagaaactttcaaaataaaaaatgaaaacaaaaaagtttggggtactgctagccagcctcagcagtcagtcccgagctggggagtggcacagctgtgtgcctacaggaggagaaagggcgcagggaggcagagtggaggctacaggctttctgtgtccccaggcgcctggccaggtccactctcctgctgatccccctctttggcatccactacatcgtcttcgccttctccccagaggacgctatggagatccagctgttttttgaactagcccttggctcattccaggtaagtttccaggactggggctgccagctgaaaagaggagttctctgtgtccttagggagaagtggagggcatagagactgcgagccagatgccttatctggcagagacccaggggaagaaggggtcggacctgacagtgctacaggtccctgagtgggatccctggtccccaccagtcaaatgggggtgggagataaaactaagagagacagagagactgacttcagggaaaataaaaaggaaaagtagccccagtacactatattgtacaactctcaataacatatacatggtcaaaataacgtaagcgcggatggccaagtcatcaaacactggggcgggaagatgagcctcgcgggagcgtggggcgggtgtttggaagagaacactgtcctcatcttcacactgggaagtccatagaaaatgccctagactgaaaactcctcaagtggcgacaccagcatattttttagaagcagttaagagagtttcaaggagcagtcgcatgtgaggaaaaggaagtgagggtggggtgtcaggaggctgctggttctgtaacaggaatcctttgattctctgaaaccatgtgcatatgcaaattattaaaactaaaaactgactttaaaaaataaagtgaggtggaaaagcgcttacctactaattccacaagatgctgtgaacttaaaaacaacaacagtaaacgtgtttgggcagagggagcctgaacgtgaatcccaaacttcacaatgccgtttgtttatttactcatagctatttccttccaaaaataatgcaatgtcgcttttgggaaaaacatacaaaggacaaaaaataagtcgatgaaggatcagtgaaaaaaagaatgtacaactggttgggttgctacacagaaacaaatacgataaagttctatacaggagggagagatgggtcataagtatgatagggagcttcccagtagccaaagcaaagacaaaacaattgtttcaaaatttcgcatatccataagacaaaatcaaactaacggccgggagaagccagtgattataggctctaggcctgagacaaaattctcccagtagttttttttaaaggacttagtccttaacgacatttccacggtagggcgatattgtccagccaagctttcactggggtggcctcggcctgcgagcaggggttcaaaccctcccctcatccctagagctctgttcagggtagggtcttcctgttacttacaggttctagggaggatgcctcactggggacacatcactgagtggagtcaggtcttgccctacccataccttcagaccacaccctcccctaagctggccctctacccagtaacccgtcagtgccccagacctccagagaactcagcctctggcttaatccaggattcttttcctctcggcctgggggccagggagctagctttcctcaccactgctcttgtaacgtccagggaggctgggcacacaatggcccatctagcaggtagaggatttgaggaccagtcgggtggaaggacttgacctggctcagaaaagggaccatgctgagagcttggacccgggtctgcctggccatggatggggacttcctgtccctcagagttggggctaatggttgggactgtggactacttctctaggaaaatgtcttgccaagagaaaatcaaaagcactttcctgatgttctcatacgaatgttgatgaagaaaaaggatcttttaaagttttatacatatatatgtatatatattcgtacgaatatatgtatatatattcgtacgaatatatgtatatatattcgtacgaatatatgtgtatattcgtacgaatatatgtatatatattcgtacgaatatatgtgtatatatattcgtacgaatatatgtgtatatatattcgtacgaatatatgtgtatatatattcgtacgaatatatgtgtatatatattcgtacgtatatatgtgtatatatattcgtacgtatatatgtgtatatatattcgtacgtatatatgtgtatatatattcgtacgtatatatgtgtatatatattcgtacgtatatatgtgtatatatattcgtacgtatatatgtgtatatatattcgtacgtatatatgtgtatatatattcgtacgtatatatgtgtatatatattcgtacgtatatatgtgtatatatattcgtacgtatatatgtgtatatatattcgtacgtatatatgtgtatatatatacgtacgtatatatgtgtatatatatacgtacgtatatatgtgtatatatatacgtacgtatatatatgtgtatattcatacgtatatgggtatatatattcatacgtatatgtgtatatatattcatacgtatatatgtgtatatatattcatacgtatatatgtgtatatatattcatacgtatatatgtgtatatattcatacgtatatatgtgtatatattcatatgtatatatgtatatattcatatgtatatgtgtatatattcatatgtatatgtgtatatattcatatgtatatatacatatgtgtatatattcatatgtatatatacatatgtgtatatatatataagaatatgtatatatattcttatatatacacacacatgagaaaatgtttttcatatacaaaagtgaagagaataggacaatgaaccccattacctatccccagcctcagcggtatccactcatggcctgtttgtttcatctccatccctacctactacccccatctttttaagtaaattcaaaacatcatgttatttcatcttcaaagagtttagtgtgcatttctaaaagacggggcttaaagaagaacacatacaactgtaataacaccatcactgtcatatactctttaaaaatgtatttatggccgggcgcgggggctcacgcctgtaatcctagcacttcgggaggccgaggcaggcgaattgcctgagctcaggagttcgagaccagcctgggcaacatgatgaaagcctgtctctactaaaatacaaaaaattacccaggcatggtggtgtgtgcctgtagtcccagttactcgggaggctgaggcaagagaattgcttgaacctgggaggcagaggttgcagtgagccgagatcgcgccactgcactccagcctgggtgacagagcgagactccgtctccaaaaaaaaatatgtattcactctttctaattgtataaataatgcttgcttattgtgaataatttgggaaataaggaaaagtttttcaaaaaaagaaaaataataagaaaaaaatctagaacgtcataacccagaaataacttctgttaaagtgttggtgtgtttacttccgtctcttttctttccacaaagatacacacacataattgggatcatgatgtgtatggttttgtatcttgcttgttttgtttaattctctatcatgcccatcatgagcatttcttcatgtcattaaaattcttcaaagtcttcatccttaatgatcgcagaatcacggtggaaattagtaaacttgctggcttgtgtgaggcctgccctatatacactggagcacagctaactccctcccctgaacagtgaaaatgtgtccctggaccctagcgcagcggaggccaggcaaccctagcccatgcaacgggcagcatccttggcctgctcgtggctctgggccaagcacacagagctccaggcatgcctaaacccctccgtgcctcagttccctcgcttgtgaggtgaagatcctcccacctgcctccgagagctttggcgaggttaaatgaagcacctgggacctacaattactcaggcctagctgtgctccgatccaagtctgtttcatttcaaagcctgccttgaagtgccttttactccctctctgacagtagttcccggaccatgatgcccgttttttggaactgtgtggggatctttaaaagctgctgatgcccccagctactgggatctggggagtgcaacctggataaaaggtcccaggtgattctaatgtgcagcaatacttggaaaccgatgccctgagtgtttctgcccctcaaatagtccccagtctatgtagcagtcattgatacctgaaattctaaagcaaacccttccagcttcgccactaactctttttaaaatgccaatatccctgagaagttgtacatattaagcccaccatcgatgagctgattcatcacccttcgaggttcctttccaatatcataagtagctacaggcaggcctgggtgggactagggaggaggagttgggccatctgaggtcaggcctctgtgtggggagggcaggcccgtaagggagagaagggtggcctgaggtgggtccctgagaaaggagaggagcagggtgaatgcgccgcagagacactgcttcctgctgatctggaggcctcttaggctccaagcaggcgccccagcctggagtccctcccctgacagagctccacaccaggatcctgggggcaccatcaggaaatcaggagctccaaataccagggagggagggtcttacaggcacagaccttgccacaccagggaacataaaactctgagcacggaggtgcacccacctgtccattaagcagggagctccaaccctgctcaccactggctggccgggacctgtacatagtttgttctgcctacacatttgtttttcaatttgaattagttatctacatttaaacatattcagatttccagtttatcttgaaataagaccacacagggcccagggtctcaccctgggcagcctgcactcctcctggcagagtgggcggacttcaggtgccacccatccctgtggctcccaggtgagcttcctgatcccggctggctgggttagcagcccccctgacaccatatgtgttcaaaagggagcctacccttggctgcaaggagttcacagtttatgctggatgagccagcacagccagggccaccgtgggcagcccacaagaggtagcctaattcccagtgaggcaagagaggtggggaaatgagcctgtagctggtgattaagagacctggggagggtgcagctggccagctggttcaggccgcatgctgagcacctgtgctaaccctgctacctctcttcttctggcagggactggtggtggccgtcctctactgcttcctcaatggggaggtgagtagtcttgggtcacccaggtacccaggagagctcctagccattggtttccgggtcagaaggagctacctgggaggggtggtaggaagggggatggaaagggtcagagggagtcctgggtctggtggcaggtggcttggccagttcttttaggagtctgaatttgcttaatgggagcaaggcttgttcaaaccatggctggaccctgttcctagtttctcattccacagaaataaattctgtaggtctggactggggtctgagaaagtgttttttaacaagcattcctggtgccgatgttgatctgttcagcaaatgcaggaggaaagttgggcagaacccaggttcctgactgccctgctgcttgcttaatgggcgatctcagtcactgccctgttctgggcctcagtctgcccatatgtgaaacgggtgactcagaactgtctgcagctcaatccttagggacctccagatgagcactgactccttgggagactgcacactcactttgaggactcgagcctcacatggagcatctgggtcaggaccccaggctctgggcatacagagctatgtggttaacatgagctaaggctttctgtgactactgaccatctatctggtttgttgcacttgaatgggagtgatctttgatgtttcccaaaaatcaaatatcaagcctagcttcaaaggttcagctgctgcagctgggaattgtgaaggaaatttacaaagagaaactccctagttcccagatcagttctgagcttgggtggcttcctgggaataagtggggacccatcttaaatcacttaaaatcactggggacccatcactgagtggagtcaggccttgccctacccacaccttcagaccacaccctcctctaagctggccctctgcccagtagcccctgtcagtgccccagaccttcagagaactcagcctctggcttaatccgggattcttttcctctcagcctgggggccagggagctagctttccccaccactgctcttgtaatgtcaagggcacacacttgtcccaaggtgcacaagtcctttctttaagacacgatgtaatgagattgcaggtgcatgtgcccaggagagaggggaccctcagtagctactggacattggggctggaaacagtcaatctgcgtggcctgcaggctaggggacagggcagctgggcaggagtggcagggcctgcgtggagtcactgggggagtgagcagggctccaggcacagaactgtcctctcctcctgggctgatggctggtctcccgggcaggtgcagctggaggttcagaagaagtggcagcaatggcacctccgtgagttcccactgcaccccgtggcctccttcagcaacagcaccaaggccagccacttggagcagagccagggcacctgcaggaccagcatcatctgagaggctggagcagggtcacccacggacagagaccaagagaggtcctgcgaaggctgggcactgctgtgggacagccagtcttcccagcagacaccctgtgtcctccttcagctgaagatgcccctccccaggccttggactcttccgaagggatgtgaggcactgtggggcaggacaagggcctgggatttggttcgttt

SEQ ID NO: 608 - protein, 440 aa, Homo sapiens
MRPHLSPPLQQLLLPVLLACAAHSTGALPRLCDVLQVLWEEQDQCLQELSREQTGDLGTEQPVPGCEGMWDNISCWPSSVPGRMVEVECPRFLRMLTSRNGSLFRNCTQDGWSETFPRPNLACGVNVNDSSNEKRHSYLLKLKVMYTVGYSSSLVMLLVALGILCAFRRLHCTRNYIHMHLFVSFILRALSNFIKDAVLFSSDDVTYCDAHRAGCKLVMVLFQYCIMANYSWLLVEGLYLHTLLAISFFSERKYLQGFVAFGWGSPAIFVALWAIARHFLEDVGCWDINANASIWWIIRGPVILSILINFILFINILRILMRKLRTQETRGNEVSHYKRLARSTLLLIPLFGIHYIVFAFSPEDAMEIQLFFELALGSFQGLVVAVLYCFLNGEVQLEVQKKWQQWHLREFPLHPVASFSNSTKASHLEQSQGTCRTSII

SEQ ID NO: 609 - DNA, 3086 bp, Homo sapiens
  source
  (1)..(3086)
  CDS (201)..(277)
  CDS (1118)..(2192)
  CDS (2218)..(2886)
ttttataatgatctcatgacaagtataattatccccacttttaagataaggaaaatgtgtctcagaaagcctaagttgctcagagtctcccagctgataaatggtaccctataacaagtggaactatgaagacaatatataataacatgaaaagtgctaacagaaatctgtaaataaaaaattgattttacctatagaaaatgtacgtggaggtgggtgcggtggctcacgcctgtaattccaactctttgggaggccgaggcaggcagatcacgaggtcaggagatcgagaccatcctggcgaacactgtgaaaccccgtctctactaaaaatacaaaaaatcagccgggcgtggtggcaggtgcctgtagtcccagctaatcaggaggctgaggcaggagaatggcgtgaccccggcaggtggagcttgcagtgagctgagatcgcgccactgcactccagcctgggtgacagagcgagactccatctcaaaaaaaaaaaaaatgtatgtggatagggacaaaagatgagagtaaaagcatgtgatgcatctggctagtgcaatatgaatgttttaacatttctaatattctttgctcttataatgttttcaataaaatggagagatattgtaaaaatatttcaaaggctagtcttccttttcttctaacaaattctcttcatcaggtcaattttctcaaaatcttctcaattccagctttctccatgttggaaactgaaaggacagggctgggtggagagtgcgcgtatgtggggggtgaggacatgataggggaggttagagctggcgaagatgatggtataaagggttcctcttccagatctctgccagattgctcagaagccgcgttctttcctcatagagccagggagtgaatttctcaaggcgtcaccaagccctcgccgggcagccgtgctggaagcaaagcggcggcaggatggggctgggcttaggagctttctgttttatataccccaatacctgggtttcccatttcgggtataggtagaatcgagattacaggaaacccgaagccccctggccggggcagagcgggacccttgtttcccagtgtcaaaccgtgccaccagcaggtccgaggggtccgcagaggtggtggcaagggactttctccccattgtaaacctttcccggagaccacctcagttagggttgtctctgcttggcacagtcagggagaccagcggggacagtgttgaaggcctggctcctgttggtgggctctccagctaccccgggttgtctctgcttggcacagtcagggagaccagcggggacagtgttgaaggcctggctcctgttggtgggctctccagctgccccttgctcccgcccacccccgcccactgcaggtgcagctcgtctcccgacgccgctgggtgggggaggggcaactctccaagcacaacccgcgctctgtccctcggccgcgctgattcccaaccccctggcggccggtggcacccgggaccgctaagagaggtggtaggagggactggcgagccgagcggagctagactgaggggtcctgctctctcttactcattctcctggaaaagaggatctacgggggctgcaggcatacgtgccaaaggtgggctgctgcccgcaggagggatcaggataggacgacctggacccctcttccagcctcccccggcaggcagtaccccctccacgcccgcacctgcccggtccacgccgaactcactgaggactcgtgtgccccctgccctggagctgcgatcccaagcgccatggaggccgctagcctttcagtggccaccgccggcgttgcccttgccctgggacccgagaccagcagcaggacccgggaccccaagcccgagagggatactcggttcgaccccgagcggcgccgtcctgccgggccgagggccgcccttctctgtcttcacggtcctggtggtgacgctgctagtgctgctgatcgctgccactttcctgtggaacctgctggttccggtcaccatcccgcgggtccgtgccttccaccgcgtgccgcataacttggtggcctcgacggccgtctcggacgaactagtggcagcgctggcgatgccaccgagcctggcgagtgagctgtcgaccgggcgacgtcggctgctgggccggagcctgtgccacgtgtggatctccttcgacgccggagcctgtgccacgtgtggatctccttccacggctgtgctgccccgccggcctcgggaacgtggcggccatcgccctgggccgcgacggggccatcacacggcacctgcagcacacgctgcgcacccgcagccgcgcctcgttgctcatgatcgcgctcgcccgggtgccgtcggcgctcatcgccctcgcgccgctgctctttggccggggcgaggtgtgcgacgctcggctccagcgctgccaggtgagccgggaaccctcctatgccgccttctccacccgcggcgccttccacctgccgcttggcgtggtgccgtttgtctaccggaagatctacgaggcggccaagtttcgtttcggccgccgccggagagctgtgctgccgttgccggccaccatgcaggtgaggggtgggctgaggaacgttgctatggggaagcggttgctagagaaggaggcagcttcgcgaatgggagagtgggcggaagcttgtactaatggagcgcgcgcccagagatcacctggggcgcacgaggacaagtttgccatcagttcttctgaagcgggcaccgaggggcttgtcaccggctcacctggcacgcaagtgaggggttcgccagctgcgtacttggtgcgcgcagaggaaagggtttcacaatctgcacgttagggaggcagatctgacaccgacccacgacgcacgatatggccggaggggcttgtaggttcagcccgtctcagtagcgatgagggcacatcttgttacctgcactatctgttgttttccccctcaagggcccctgtccatgtgagtcctggagccgccggcttccttgtcccaactagacctagaggggatgcagtggactg

SEQ ID NO: 610 - protein, 606 aa, Homo sapiens
MYVEVGAVAHACNSNSLGGRGRQITRSEGSAEVVARDFLPIVNLSRRPPQLGLSLLGTVRETSGDSVEGLAPVGGLSSYPGLSLLGTVRETSGDSVEGLAPVGGLSSCPLLPPTPAHCRCSSSPDAAGWGRGNSPSTTRALSLGRADSQPPGGRWHPGPLREVVGGTGEPSGARLRGPALSYSFSWKRGSTGAAGIRAKGGLLPAGGIRIGRPGPLFQPPPAGSTPSTPAPARSTPNSLRTRVPPALELRSQAPWRPLAFQWPPPALPLPWDPRPAAGPGTPSPRGILGSTPSGAVLPGRGPPFSVFTVLVVTLLVLLIAATFLWNLLVPVTIPRVRAFHRVPHNLVASTAVSDELVAALAMPPSLASELSTGRRRLLGRSLCHPVPRVDLLPRLCCPAGLGNVAAIALGRDGAITRHLQHTLRTRSRASLLMIALARVPSALIALAPLLFGRGEVCDARLQRCQVSREPSYAAFSTRGAFHLPLGVVPFVYRKIYEAAKFRFGRRRRAVLPLPATMQVRGGLRNVAMGKRLLEKEAASRMGEWAEACTNGARAQRSPGAHEDKFAISSSEAGTEGLVTGSPGTQVRGSPAAYLVRAEERVSQSAR

SEQ ID NO: 611 - DNA, 972 bp, Homo sapiens
  source
  (1)..(972)
  CDS (201)..(592)
  CDS (640)..(772)
accgagccagaggcgcttcaggaagcaagagaagtccccgcgcgctccgggacccggcgcagctcatggtgagcgccctttggggctcgagggtcccttggctgagggggcgcatcctcggggtgcccgatggggctgcctgggggtcgcagggctgtagttgggatcgcgcacaaaccgactctgcggcccagcccgaaatgctgccgccaaggagcaacgacaccgcgtacccggggcagttagcgctataccagcagctggcgcaggggaatgccgtggggggctcggcgggggcaccgccactggggcccgtgcaggtggtcaccgcctgcctgctgaccctactcgtcatctggaccttgctgggcaacgtgctggtgtccgcagccatcgtgtggagccgccacctgcgcgccaagatgaccaacgtcttcatcgtgtctctacctgtgtcagacctcttcgtggcgctgctggtcatgtcctggaaggcagtcgccgaggtggccggttactggccctttgaagcgttctgcgacgtctgggtggccttcgacatcatgtgctccaccgcctccatcctgaacctgtgcgtcagcaggtcatcagcgtggcccgctactgggccatctccaggcccttccgctacgagcgcaagatgacccagcgcatggccttggtcatggtccgcccggcctggaccttgtccagcctcatctccttcattccggtccagctcaactggcacagggaccaggcggtctcttgaggtgggctggacctgccaaacaacctggccaactggacgccctgggaggaggccgtttgggagcccgacgtgagggcagagaactgtgactccagcctgaatcgaacctacgccatcccttcctcgctcatcagcttctacatccccatggccatcatgatcgtgacctacacgcgcatctaccgcatcgcccaggtgca

SEQ ID NO: 612 - protein, 174 aa, Homo sapiens
MLPPRSNDTAYPGQLALYQQLAQGNAVGGSAGAPPLGPVQVVTACLLTLLVIWTLLGNVLVSAAIVWSRHLRAKMTNVFIVSLPVSDLFVALLVMSWKAVAEVAGYWPFEAFCDVWVAFDIMCSTASILNLPFRYERKMTQRMALVMVRPAWTLSSLISFIPVQLNWHRDQAVS

SEQ ID NO: 613 - DNA, 3179 bp, Homo sapiens
  source
  (1)..(3179)
  CDS (201)..(366)
  CDS (2279)..(2979)
ctgcgatattgggagtcatatcatcctctctccctgtggatattaggaagagtatcacagggctgtgtaaaccccctgcggtactgggagtaatatcatcctctctccctctggatataaggaagattttcacaggggtgtgtacacccccctgcgatattgggagtgagatcaccctgtccacccaggaaatgactaacatggtcacggggaagtgtactccccctgcgatattgggagtaatgttgtcctccccaaacctggatgttagcaacgagatcacagagggggtgtacacaccctgcgacattggaagtaatatgatcctctccccacctggatactgggaaagatatcacagcgcgggtatacgtttcctaccctgttgggagtaatatcattcttttcctttctggatattaggaagaatatcacaggggtgctgcacgattacttcgatattgggagtaatatcatcctctattttcctggatattgggcacaaaaacacaaaagggtgtacaaccccttcgatattgggagtaatagcatactctccttccgtggattttagaaaacaatatcatcagggctgaacaccccctgcgataaagggagtcatggttactctttcacaggccatttggaataatatcacagggggtgtttacaaataggggtggtgtacacctcctgtgatattgggagtaacattctctccacctccggatattaagaacaatatcccggcgggaggtggtacacccccagtgatattgcaaataatgtcatcctctccttccctggatattaggaacaatatcacagggggttgtacaccttctgtgatattggaagcaatatcatcctctcccccgctggatattaggaaaaaaaatcacccacggtgtacacccactgtgatatgaggagtaatatcttcccagggtattatgtataatttcacagtctgtacacacatggtgtacactcactgtgatattaggagtaatatctacctagtagataacaaataacatcgcagggtgtacacccactttgatattagctgtaatatttttctaagttgttacaaatatgatcacagggtgtaccaacatggtgtacacacactgtgatatcaggagtcgtatctctgtaatatattatgaataatatcacagggtgtacacccactgtattattagaagtaatatctctgtaggatattacaattaagatcacagggtgtagagccacggtgatattaggagcaatatctttctaggatattacaaataatatcacagggtgtacgcccactctactctcaggagcaatatctccctaggatatcaaaaatcctatcacagggtgtgcaatctctgccttccaggttctaagggattctcctgcttcagcctcccgagtagctaggattacccgctaccacgccaggctagacgggatttcaccacgttggccaggctggtctggaactcctgacctcaggtgatccatcagcctcggccacccaaagtgctgggattacaggtgtgagccatggtgctgggccaagagttctagattctattcatttggaaacacagctcccatctttgagtgtgcatgtacttttatgaagaaatgatgtcagaaaaccgaaggatgataataaatatgaaaagtaacaggcatgtgaaaaggtcttccgattgagaattataaggttcgatttcgttttcacataatggggtactacctcttgagtcgtccttttacatattctacatcaatggaagttgtagcaccgtgtcagaataaagtagagtgtatttcacggtttcttaatttctttcaattagactgagatctttttcttaaagagagaaggacattgtcattgcattgtattttttctgaaaagagtaggccgtattttactgagatcacggatttgttatatatgacgtttcggtcttctaatattctccagtggattttctctaaagtagtgtgtacagaaagccttgtatagcaaaaaagtaaatcatgtaataattctgagatttttggaattgtcacagctgagaaacattgctggcggtgtatggtccgcaagtgtcaagatgttccttgtgaattgcttgcatccagcattaagggctggtttttatcttttatttttccaatcctctttccttctcaaggtgtccaaaacacacagagccacggaatctcacaggtgtctgagaattcctcctcctgggactctcagaggatccagaactgcagccggtcctcgctttgctgtccctgtccctgtccatgtatctggtcacagtgctgaggaacctgctcagcatcccggctgtcagctctgactcccacctccacacccccacgtacttcttcctctccatcctgtgctgggctgacatcggtttcacctcggccacggttcccaagatgattgtggacatgcagtggtatagcagagtcatctctcatgcgggctgcctgacacagaagtctttcttggtcctttttgcatgtatagaaggcatgctcctgactgtaatggcctatgactgctttgtaggcatctatcgccctctgcactacccagtcatcgtgaatcctcatctctgtgtcttctttgttttggtgtcctttttccttagcctgttggattcccagctgcacagttggattgtgttacaattcaccatcatcaagaatgtggaaatctctaattttgtctgtgacccctctcaacttctcaaacttgcctcttatgacagcgtcatcaatagcatattcatatatttcgatagtacaatgtttggttttcttcctatttcagggatcctttcatcttactataaaattgtcccctccattctaaggatgtcatcgtcagatgggaagtataaaactttctccacctatggctctcacctagcatttgtttgctgattttatggaacaggcattgacatgtacctggcttcagctatgtcaccaacccccaggaatggtgtggtggtgtcagtgatgtaagctgtggtcacccccatgctgaaccttttcatctacagcctgagaaacagggacatacaaagtgccctgcggaggctgcgcagcagaacagtcgaatctcatgatctgttccatcc

SEQ ID NO: 614 - protein, 288 aa, Homo sapiens [sequence omitted]

SEQ ID NO: 615 - DNA, 5385 bp, Homo sapiens
  source
  (1)..(5385)
  CDS (201)..(561)
  CDS (2343)..(2511)
  CDS (3718)..(3883)
  CDS (4000)..(4239)
  CDS (5075)..(5185)
ggggattaatatgattatgaacacccccaatctcccagatgctgattcagccaggagcttaggagggggaggtcactttataagggtctgggggggtcagaacccagagtcatccagctggagccctgagtggctgagctcaggccttcgcagcattcttgggtgggagcagccacgggtcagccacaagggccacagccatgaatggcacagaaggccctaacttctacgtgcccttctccaatgcgacgggtgtggtacgcagccccttcgagtacccacagtactacctggctgagccatggcagttctccatgctggccgcctacatgtttctgctgatcgtgctgggcttccccatcaacttcctcacgctctacgtcaccgtccagcacaagaagctgcgcacgcctctcaactacatcctgctcaacctagccgtggctgacctcttcatggtcctaggtggcttcaccagcaccctctacacctctctgcatggatacttcgtcttcgggcccacaggatgcaatttggagggcttctttgccaccctgggcggtatgagccgggtgtgggtggggtgtgcaggagcccgggagcatggaggggtctgggagagtcccgggcttggcggtggtggctgagaggccttctcccttctcctgtcctgtcaatgttatccaaagccctcatatattcagtcaacaaacaccattcatggtgatagccgggctgctgtttgtgcagggctggcactgaacactgccttgatcttatttggagcaatatgcgcttgtctaatttcacagcaagaaaactgagctgaggctcaaagaagtcaagcgccctgctggggcgtcacacagggacgggtgcagagttgagttggaagcccgcatctatctcgggccatgtttgcagcaccaagcctctgtttcccttggagcagctgtgctgagtcagacccaggctgggcactgagggagagctgggcaagccagacccctcctctctgggggcccaagctcagggtgggaagtggattttccattctccagtcattgggtcttccctgtgctgggcaatgggctcggtcccctctggcatcctctgcctcccctctcagcccctgtcctcaggtgcccctccagcctccctgccgcgttccaagtctcctggtgttgagaaccgcaagcagccgctctgaagcagttcctttttgctttagaataatgtcttgcatttaacaggaaaacagatggggtgctgcagggataacagatcccacttaacagagaggaaaactgaggcagggagaggggaagagactcatttagggatgtggccaggcagcaacaagagcctaggtctcctggctgtgatccaggaatatctctgctgagatgcaggaggagacgctagaagcagccattgcaaagctgggtgacggggagagcttaccgccagccacaagcgtctctctgccagccttgccctgtctcccccatgtccaggctgctgcctcggtcccattctcagggaatctctggccattgttgggtgtttgttgcattcaataatcacagatcactcagttctggccagaaggtgggtgtgccacttacgggtggttgttctctgcagggtcagtcccagtttacaaatattgtccctttcactgttaggaatgtcccagtttggttgattaactatatggccactctccctatggaacttcatggggtggtgagcaggacagatgtctgaattccatcatttccttcttcttcctctgggcaaaacattgcacattgcttcatggctcctaggagaggcccccacatgtccgggttatttcatttcccgagaagggagagggaggaaggactgccaattctgggtttccaccacctctgcattccttcccaacaaggaactctgccccacattaggatgcattcttctgctaaacacacacacacacacacacacacacaacacacacacacacacacacacacacacacacacaaaactccctaccgggttcccagttcaatcctgaccccctgatctgattcgtgtcccttatgggcccagagcgctaagcaaataacttcccccattccctggaatttctttgcccagctctcctcagcgtgtggtccctctgccccttccccctcctcccagcaccaagctctctccttccccaaggcctcctcaaatccctctcccactcctggttgccttcctagctaccctctccctgtctaggggggagtgcaccctccttaggcagtggggtctgtgctgaccgcctgctgactgccttgcaggtgaaattgccctgtggtccttggtggtcctggccatcgagcggtacgtggtggtgtgtaagcccatgagcaacttccgcttcggggagaaccatgccatcatgggcgttgccttcacctgggtcatggcgctggcctgcgccgcacccccactcgccggctggtccaggtaatggcactgagcagaagggaagaagctccgggggctctttgtagggtcctccagtcaggactcaaacccagtagtgtctggttccaggcactgaccttgtatgtctcctggcccaaatgcccactcagggtaggggtgtagggcagaagaagaaacagactctaatgttgctacaagggctggtcccatctcctgagccccatgtcaaacagaatccaagacatcccaacccttcaccttggctgtgcccctaatcctcaactaagctaggcgcaaattccaatcctctttggtctagtaccccgggggcagccccctctaaccttgggcctcagcagcaggggaggccacaccttcctagtgcaggtggccatattgtggccccttggaactgggtcccactcagcctctaggcgattgtctcctaatggggctgagatgagacacagtggggacagtggtttggacaataggactggtgactctggtccccagaggcctcatgtccctctgtctccagaaaattcccactctcacttccctttcctcctcagtcttgctagggtccatttcttaccccttgctgaatttgagcccaccccctggactttttccccatcttctccaatctggcctagttctatcctctggaagcagagccgctggacgctctgggtttcctgaggcccgtccactgtcaccaatatcaggaaccattgccacgtcctaatgacgtgcgctggaagcctctagtttccagaagctgcacaaagatcccttagatactctgtgtgtccatctttggcctggaaaatactctcaccctggggctaggaagacctcggtttgtacaaacttcctcaaatgcagagcctgagggctctccccacctcctcaccaaccctctgcgtggcatagccctagcctcagcgggcagtggatgctggggctgggcatgcagggagaggctgggtggtgtcatctggtaacgcagccaccaaacaatgaagcgacactgattccacaaggtgcatctgcatccccatctgatccattccatcctgtcacccagccatgcagacgtttatgatccccttttccagggagggaatgtgaagccccagaaagggccagcgctcggcagccaccttggctgttcccaagtccctcacaggcagggtctccctacctgcctgtcctcaggtacatccccgagggcctgcagtgctcgtgtggaatcgactactacacgctcaagccggaggtcaacaacgagtcttttgtcatctacatgttcgtggtccacttcaccatccccatgattatcatctttttctgctatgggcagctcgtcttcaccgtcaaggaggtacgggccggggggtgggcggcctcacggctctgagggtccagcccccagcatgcatctgcggctcctgctccctggaggagccatggtctggacccgggtcccgtgtcctgcaggccgctgcccagcagcaggagtcagccaccacacagaaggcagagaaggaggtcacccgcatggtcatcatcatggtcatcgctttcctgatctgctgggtgccctacgccagcgtggcattctacatcttcacccaccagggctccaacttcggtcccatcttcatgaccatcccagcgttctttgccaagagcgccgccatctacaaccctgtcatctatatcatgatgaacaagcaggtgcctactgcgggtgggagggccccagtgccccaggccacaggcgctgcctgccaaggacaagctacttcccagggcaggggagggggctccatcagggttactggcagcagtcttgggtcagcagtcccaatggggagtgtgtgagaaatgcagattcctggccccactcagaactgctgaatctcagggtgggcccaggaacctgcatttccagcaagccctccacaggtggctcagatgctcactcaggtgggagaagctccagtcagctagttctggaagcccaatgtcaaagtcagaaggacccaagtcgggaatgggatgggccagtctccataaagctgaataaggagctaaaaagtcttattctgaggggtaaaggggtaaagggttcctcggagaggtacctccgaggggtaaacagttgggtaaacagtctctgaagtcagctctgccattttctagctgtatggccctgggcaagtcaatttccttctctgtgctttggtttcctcatccatagaaaggtagaaagggcaaaacaccaaactcttggattacaagagataatttacagaacacccttggcacacagagggcaccatgaaatgtcacgggtgacacagcccccttgtgctcagtccctggcatctctaggggtgaggagcgtctgcctagcaggttccctccaggaagctggatttgagtggatggggcgctggaatcgtgaggggcagaagcaggcaaagggtcggggcgaacctcactaacgtgccagttccaagcacactgtgggcagccctggccctgactcaagcctcttgccttccagttccggaactgcatgctcaccaccatctgctgcggcaagaacccactgggtgacgatgaggcctctgctaccgtgtccaagacggagacgagccaggtggccccggcctaagacctgcctaggactctgtggccgactataggcgtctcccatcccctacaccttcccccagccacagccatcccaccaggagcagcgcctgtgcagaatgaacgaagtcacataggctccttaattttttttttttttttaagaaataattaatgaggctcctcactcacctgggacagcctgagaagggacatccacca

SEQ ID NO: 616 - protein, 348 aa, Homo sapiens [sequence omitted]

SEQ ID NO: 617 - DNA, 33963 bp, Homo sapiens
  source
  (1)..(33963)
  CDS (201)..(278)
  CDS (11221)..(11326)
  CDS (16713)..(16820)
  CDS (23365)..(23471)
  CDS (24871)..(24974)
  CDS (25469)..(25601)
  CDS (28262)..(28415)
  CDS (28954)..(29014)
  CDS (29286)..(29352)
  CDS (29725)..(29816)
  CDS (32457)..(32586)
  CDS (32825)..(32866)
  CDS (33572)..(33763)
cctccacccatccattggctagatccgccgcccgtcagacgagcccccggggcccgcccccagccctgagctgcgcctcttagctctggggccacagcgccagcgccactctgccaggctcccggccatcgcccgcctggtgcgccgcccgccagctctttgcccgcgcggggccgcccgccgcgggctcagggcagaccatgcgcccgccaagtccgctgcccgcccgctggctatgcgtgctggcaggcgccctcgcctgggcccttgggccggcggtgagtgttcgcccggccgcccagagtcccggcagcctgggggttgcggagggcgggggaggtgggggatggcgggagccgggccgtctgtgcgcgtgtctgtgtaagaggaataggggacatcaagcatctcgactcgcctcctcccaccgctccagaccgaacctagacgcgagggctgggatattggtcgtgcccagtccctcccagcgcagcccggagcaggcacagcatcagtggaggggcagcggggaagagtgggccccagacttgccttccttgtcgtggttgtgggtgcgcagcggggtggggcggccagtgggtgcagagtcaggtactgcggccgattgagatggaaggtttggtacaccgtaggtgagagggaggatgtgaggggccgttcttgtgtgctgtgaccgtctggaggtgcctgtgggctgtcagcatcagaaccagtgctgggggccccaggacttgagaaggggttcttgggatcaggtgagtgacaggcacatccctccgtgtgccctcccactgagcaaagcaaaaaggtaccagaccccaaggtggaagctggtgggcagtgaggggctaagggtggtggttaacaggaggggccaggcctgtacatggagagagctgagcagggagccaatgccaacaagcagtggcctccctcttcctcccacttctgcttcctctcaacgtgggtatgtgtatgcccttgatacatgtgtactcgtgtgccccatgtgtgggtgtgatatgtgtgcctgtggatggcttacctgggctgggaggcagatgctgattgaggcaggagatgcatggatcatctcactctagaacaggggagacctcagcactcattgagtctcctgaagcccattttacagatgggcaaagcgaggtccagagacacaagagccacatctgtctcccaccagttagacctagacagaggttgattttctccctaccccagactttgagtaatctagagttgctgcttaggcagggccttaaatgcccactccaagttggctgggggagggtgaggaatcttgattatctagttcattctctcccatggtcacttcccttaccatcacctccaccagagcaggtatctctgtgtttccatctagcggatgtcttgagcaccctgggaatgggaagctcattgcctgtcctaggagcggacctctgacaattggcaggagcctcacctccacccatgacagccatgagacccacctcctgagcactcaaaatcttaccaagctctgtcccagaggccacagctctggcacaacttgcatgaagccttcaggcctctccaaccaccatctggccctcccaaccccaggttcaagccactcaaactcttcttggatgaaccggggatcttgggaccactgttgtcaccccattcctccatcccgagaagcttctgagcccaggggcagagtggattcagagaggtctcctttcacaccaggccacttctacttcacacttcctgagacagcccaaatctgtctcctccctccaatgcctaccctccccctgtctttccacatcttattcgtttagtgcccaactctatctcctcctccagacagccttccctgattgctccagccaactcaacccttccccctctaaccccacccttcagccctacccacctcccaggctgggctattctggccatcctataaggtcaggggctggggtctcttacatccccatgtttcttacagcccagtgcaggggctgggtccacagagagaggagaagggactcaaccaggactgggtgagggcaggctggagtgaggggtccctatttccctccctgattctccctcctccccaccagctaccaatcgctccctcatggaatggggcaaacctgctctagccggactcggtgtgacggcggggtgggggggcggggtgacaggagttatcagagtcataaaatggcagctgcaaagttcaagttgaaggcccaaggccttatcactcctgtttatggtgtcctgacttcagcctgggaaggagaaatctctgaaaagggaggcaaaaaaaaaaaaaaaaaaaaaaaaggaaagaaaacctccagtgtctcagaggaggaagtctgccccaaggccacctgtcaagccttccactgcccctgccccccggacagcaggcacagggactcctcatccagaagcagagctgctcagggcaatgcccagtacgaggctgggggaggagggtcacaggcctcctcgtgggaaattctctatctggtgtgggagaccagacccagtgacttaggagaaagagtccaggtggatgtggggtacagcctcctagaactggggcaggggttgctgagaggaacagtcaggggaggctcctggaagaagcaggactgtgccctaaagagtttgaccagatgggccaatctttcaccctaaaccataaaacagcctctgttgacaggaccaatgggcctgcccccagaaggaggagtcccagggactgggagaggctcggcttctccccaactctgaggttgatcagtggccacaagctcctgaaggccttgccttgccaccggcatcctgctgcccctgccacctgcctctagcctctccagaggcggaccacagctgcccaggccctcttggcccccagcaggccaccctgtgagctttgggaaacatggctgcatctgggtcaggcctcctcctcaagtgaggttaccacctcagttaggcctggccagggctcccagggtaccatgctggaaaagcgagcccttttggaagtttctaccctcctgtcctggtgcactaagactatgccttctctgaggtttgtgggacatccttggggagcccaggctggaaacaggagagctggtcctcactccactccatggcaatggcttgaccttgggaacatctttaacttttgtggaagggcctcgggttcctcaccacaaaagggaaggtgagaggcctccgcccagtgtgcaggagaagtgggaggagagggttaggctggagccaactctgcctcctgagtgggacataatctacccctggagcaccagggtctctgtgaaagggggtttgtctttcaagcaggacttctgtgagctttgaaggaggtaaaggttgtgaaggtggctatgtgaactgtgtgactgtcatcccttctcctacgtccccagcttgggagccctgtgcaaacttatacagctatttctggcccccatcttcccacaggttcccagggcagcaggagtcctggggaatgggggacgtttcctcattaggtggccaaaacattttgggggtaaggctccaggcctaggtaggcaatggggcctctcagagcagatgggccttcacaacgtgggcagcctcagtggaaatccaacatgggccatgagaccagggtaggggctctaacctgccacgtgccacaactctgccattgctgggcccttcactgtggctcctttggccatggagcagggaatggggcctggggactatgtaaagcctagtccctttcttaaatccttctgttcaacccccagattctgccttcccctctctgacttcttaacacaaaatgatttttattgtacccattgaaaatgtcagtatgtactctctcacataacttagaagtatttcctttttttcttttttttctttttgagatggagtcttgctctgtcacccaggctggagtgtggtggtgtgatcttggctcactgcaacctccagcttccaggtttaagcgattcttctggctcagcctccctaggagctgagattacaggctcccgccaccatgcctggctaaattttgtatttttagtagagacagggtttcgccatgttggccaggctgctcttgaactcctggcttcaggtgatccacctgcctcagcctcccaaagtgcttggaattacaagcatgagtcaccacgcctggccccttagaagtatttctgaagaagaaaaaaacagtttaatctctccaccacgtgtatagtgttttaaatttttactttttttgtgaaaatttttaaacaagcagagacaacattataatgaacgtgcaaatacccaattccgaggtttgacaattgttaacatctaacaattaatatatgcttcatttgcttttgggctgaagtattttaaagtaaattataaacctcctgaccttttaccccaaatcatttcagaatgcatctctaaaaccaaaggacactcttctatataactatgatactgtcattacacacctaacaaaattgacaggaattgcttaatatctaatattcaaatatccccagccggaatgtaatgaagtgccacaggatgagtggtgatattatccagggcttggtcttctcgcaggagtttcatgtctgtgtctgacgggactgtccagcgagctggcagggagaaagcagggtgccttggcagtgagcctcaggctagcctccactgggaggacccagtcttttcgtgcagcccctctcatgcggcccattatctctcaggaagtgcctcctactacctaacttcaaaacaagttcttcctgcacagcaggtcaccagaggagggggaagaggccaccaaccaatctccatgtactaaggactcatagccttgtggctgcctgtgctggagtccagccctctgcaggtggctccaacaccaacgtcacccacaggcactgtgtttataagctgagtcctgcaaactccagttccctaggtgtggccaggatcgtgaacaagcagcagaggatttaaactaaatgcttagcctgtgttcctctgcaaataaaggcttcatgcccccaaaagaaaccttccaagaagaacccttagatgggaacaagctaagtgtctgtgcttgggttctgctaattatgagagcccttgtcctgatatcactctgagatgtggaaagttcttcttacccaaagcacaatcctgtatccctatgtctccccctcttcctccccatccccatcaacactcacacagcagttctcattctcttcttctaccagagctcagccttccccaagaggaagtgaggctggcaaaaaaaaaaaaaaaaaaaaaaaaagaatttgcagcggggaggctttgggctgttggctaagggatgtaaaaatacaaggaagagaaatcagtacggggcgaaggtaactggcagacttgagacctctggtgggtacggctggcacttgtcagtgggtaggaccttcagcctacctggggttatgcaaggcactacggctgtggctaggcttggatgtggacagcaggggcagcctggcatgaggactggactagagctttggcagtcgctgctaacccccctggtgcctggctggtgtcttttacatgtgaccctcaaccccaattctagaagtaggtggtattgttattgtccccattttatagatgaagttgagtaaattgcccaagtcatccagccaggaagcagcagacagtctcattctggaacctgtggtctgaactaggctctgccacctcgtgaagaggggctactacttccagggtgggcgacggcgtgtcacatgctgcgctgggactttagatatttttaaaattagtaaaatatagaaatctgaattgacagctcagtgaattgtcacatatgtgtacacctgtgtcaccactgcccaggtcaaactattatacattcccatcaccctagcaggctgccctgcaatgaggggaagtcttattttgatttcctttagtgctctctgcaaagctgggagcatgtttctcctttcttttgtgactcctggatcccatgatccaacttatgtcctttacccactccttttctgcccttcctcctcccaccttttctctcctctctcccctcttgcctcccaactacaagggctgcacgttctcgcccactcacgtgcaaaagccagcaaggatgggaaggtgagctgctgtcctgtgtgcctgtgatcacactgctttctctctggctcctccattccccctgtgtctcttttttaccccatgatttcagcagggggctggcagagtagagtaaataagtcgtgagatatgagatggtttctgtaaagggctagggtcatgtgggagagggtaaatgaaaccactcctgagccccctgtcctctactccccattcccctgcctccattaacagttgcaggctggaaaaaaataaaatagccctcttgacaaacctcagaagcacaaatcatccatggaggctctgcatgcttggcaatttgcagacagttctttctcctgcctcaccttatccagcctgctgcattctgtgctcctctcagagaccagcttctcctcggagggactcatgcttcctgctgtgctacttggctcctcctgccctagttctctggccccagatgatgaggctggggcttctgattcgaggcagtagctgtggtctcaggcttcccttgaggggattgaacatggcctacgaacctgagcatggcccaccctgtctttcagagccccttgcatctaacagctacaactcccagcatcttcacccatacccccatcaccacacctagcctttgctccagatctcagagaaccccacatggacaggaaaaagcagggctttctctctagcccctcaccaattcctatgcttgactgagctccaaaaagtaagcttaaaggcagcctgaccctgccgttgagctgaggctagagagttttggtccaggctgggctctcagcaccttctttggggcaggagttcctaagcccagaagggacccaggctgaagaagactgaagaagtccacagcatcttctccatcctggtcttcttctgtcctctgccatggggctagcgggatgtgggaggtgaatgacagggagttggcaggagaatcctgagtctagttggagacagggactaaccaagtcttgttcattccacctgccccctcctctctgtgccctctctttatacccactgtcctgcccaggcttcatcagttcctgcctggactggtgcagtagctttcagccccaccacctgcaacctgagggatctttgtaaaatgtgtatcccccatcctcagtctcctgcttcaagtctctgttggcccccatggcctaggagtgaaagctcacacttgaaaactggcattccaggcccttcccaatcctaccccagtctacatctctcaacttgtctcctgatgcccccagaactccttgctgcagctacaccaggcttctcacagccttgcatgtattaggcattttcatgcctccatgcctgtgcacacgctgctctactttctggggtgctcttactccacttctaattgtctaacttgcacatcctccatgacctacctctacagaatgagtacagcatacccattctgtaggaagcccagactccagctatatcccaccctggaacacttccctgacatcagtagacttggctatattcagccagggaatttttcaactctctctgtgttcctgaagtccagagggataatgaggatgtttagaatagggaaataaataagtgggagaggaagtccaaagtctgcctgaattccttagtgataaggactagagggagctgccctggcccggtccctcaaagggcaatggttgaccagagggtccaaggcgaggctgtgttgaaggattgatgcagtccagaccagcggtcagagacttaggtcccatctgggaatgcgcatttgctgggtgacctcaggtccctctttgggtctccatttcctctacccctccccagatagggctcaacactaaactaaattgtgacaaagagagagctcatcttccagaccacacccactgtttcataaacaccacaggcttcggtacccacccctcctttctctccaaactgcctctaaggaagggctgtgtgtctgtgctgctgagggggcagagttggctggagaagttgacccaacactcttctaccctcagagagtcgcaagcagaagctgccagaaatcctaggcgcccatggtgattgggaaacaaatatttcttggcaaactatatggccacagtcctggcttaagaaggcccagaaagtgagggcgtccattatcttgtcctcagagggcaaggctggacacttttgtttacagcgaccaacagaaaactcaactgatccaagccataaaggaaaggcatcagctcatgttgctagcagtagagctggtttcaggcatggctgcattcacagacccagacaatattaagagaacctgatttttctccatctctctattctgccttcagctgtatagtttttatccgtgtgttccacttgtcaacaagaagacagcagaagcttgagcccttgcttcctttaaggtttccagtccagtggggaaaaaccaaattcactttcttaatcacttaatccaaagtcccaggagtgagcctcctggctctgagtagcctgactcaggccatgtgtcaggcactgtggccaggaatgctctgatggacttaagccttggtcacatgtcaatcccctggaagagggttcttcagaactccatgaactagaggtagggaaggaggttgtttcccagacacagatgaggacatggcaccagaagagagtaaaggatggtggaaggcagaaacaagagatatctgctaccatccatcctgttttgacgttacagtgttatgagaggtgagaatggacaggagaatcaggagacgctgggaaggggccagaaagcagaaagaaccctgttgctggtgggagatggggttgggatggtaccttggtgagaaatgtgctccaagacaggcgagacagaccaatgatgggacacaaggcagggtagccagtacccagattcctcttccagaagccacctctgagatcttcctggccactattccccctatacttgaggatgaaacagccacaaatcccttgagacagagtgtcttgagcatttcagcctgagtaacccttatgggaaggagagaaagcacatgaccccaaagaggaaccacagacagtttccttgaagtctcctatcttttaacagttatacgagtaactgtatcatgctccatcacacaactgtgttactttcaataagttttaaatgacttaccagctaatgtctttacccccattggctggtaaaggtgcaagatggagctcgtgctcactgtggcttccagggcaacagcacttaggcaggtgaggtctggatgctggggaaatctaaaggagtcctggagagggaggccttccctggacctggacgaggtcaaccatggtgctagctgcttctgggagtgttggcctgcaggtgacctgtgagacagaggctccaccagagagccctcaacaggaatgagagagctgtttggggtggaaaggacttggctgtgcagcttcttaggcactgagttgttcagcttcagcttggacccctctccctccgcagcaatggattgctggctgccagctgggatgcacatcccagtaaatggagctgatttacttaaaacaatggtcaaagtactaagcactttggtgcctgcaggccaggagggacccccttaaaggaaggtcccccacctatgttcttcccacggacccacttcaagaatctctaagtcggcaggggaggtggttgaggcccacgtagcctacagagaaactgaggcccagggaggtaaggaccctgtcccagggtgggagggacaagctggaggagacactgagaatgtctgattctggagtggtcttgctggactctcttctatggccctggtggaaactgacattcttctcccaggcagagatgaggaaactggtgtggggttgccggggccagcaaccacttttctaaagccaaagacgcagaaggtgctgccagtccaacgcttcctccatggaggccttcacccacccacacccatctaagagttcccaagacctgttttttctggctattcctagacagccatcacccccactcacatgtcttccacaaggtcagtgaccccagtcacactggtctggcccacccctgatccctggccagggtacagggaggggaagaggagaagcttggacttttccatcccttctcttcaccttccagaagcaggggaggcctggtgggatcctagaggggctctcttacttccttaaacctccccaccctcagtagatctggtatagcttgaattatttagaaactaaaaaggaggcaggtgaggtctgggcaaggaaggccagagtcccctccctagcctggtgacccaggggactgagcacagaatcctggaatgacagaagctggaaaatacagctagactcctggattcttcccagggctggccctgggaaccagaggccaggatccaactccacataacagagtagtagcacgagctggccccactcatcagggagatcaagacagggacagactctcaaaccaagctggagagtggcagagtccagagggccagctcaggcctctaaggggaggccctcttgccgccatctggagttgtgccacccgcaaaaagacaaagcagttacagctgcagcactaatgggggagccatcaagaagctgtggcagggtcctcggggccgacccaggtttgggggcaatggacaacaggttggggtcaggttcaggtttcagtcttgggttggtattggggttccatctggaacttggatctcttccagggagagggcaggtgcagtccagagactgggcctggtgctcctgagtctatggacgaggctgatgggccctccctgtctttgttctcagggcggccaggcggccaggctgcaggaggagtgtgactatgtgcagatgatcgaggtgcagcacaagcagtgcctggaggaggcccagctggagaatgagacaataggtgaggcccccatgggcagagaggggctgcatgcccccagggagcccaagattcctcatgtctcaagctgagatccaagtcacgttcgttccacatttattggatgatggtgaggagcggctggggagccagatggaagaagaaaggggctaacaggcttccacattcccaccccaggtctggggagctcccagccgcagctaaggaggacatactaaattggggttctgaaaagtacatggagccaactctgcctctgggggtccctatccctcttctccaggaaaagtgaagatctccatggcggccagcccacccaggacacaaggcccagggtgctatgtggtgggggatctgtgaccaatgagggcaggcaggttccaggaccccctggagctggcatgggagaattagccccataacaccacactccaggattagaacattgtactgttagcatctccagaggaagaagaggcacattcagtcacaatatgtgacccccacagggaccacatggaagctcaaagccatcttagtggtcccgagcaagaaggggcacaagttttgtctggaaagatgtggaatactcaccacagccaatattcagcctggaaactgaggcccactcctccctctcaaccccaggctctgcctctgctacatccagaggaccgatagtgacaccacacacacacacacacacacacacacacacacatacacacacgcccagcccctaagcatacacatacaggcaaacacactggcctctccatcccaacccacccttagtggccagatgaaccatcagctcattattcggctgatgagacaagtcaaggtcagccccaggggctgagcacatgagggccccagccactcctcctcagggggctgggagagccccacctggcagtgtgaagggtagtgcccagctaccaagactggacagcagggctatcaggacagatgacagcaccctccttttgactcagcagccccaggtaagaatggatggaattctttggtaccacttgaaccagacttggaggggtgagcaggtttggagaaacagagagtctgggaaggtgggaggcactgaggcagacttcccatggggagtggggcatggttggcaggttcaagtcttactgccagggacaccagcctggcatgtctgggctggaggcatgagatggctgggcccgttctgggcctccatcccaggccatctccccgcggctgagcttacagttatgtaacagccttgctcaggagcagggagcatctttacgtcttcctggctccctagttccccttccacctctctaaagctgacagttatgtaaccccttctgggtccctcttcttggccctggtgcccaggctgtctgcctcctgttctgtaagtgagtatgtgtagcctcacagatgggctttgcctacccttgtctcaaagcaggacaaccccttgactctagggcccagagactgaggcatgggtcacggggtgactgggcctgcccactacctacaggccccaccccactccaccagtgcagggagccaggaccaggtgcagacaggctttggcaggccccagcggtgggatcataggcagccccaagaggcccagactctagactccactgcgcacctcccacgcctggggacaggccaccctcgtgattccaatgaggtcactgctggcacagcgttcccgtcgggtgccaacaccctgtcaccagcagccaggctgggatgcagagaagggccagcataggttgtggccatgggtctgcccgtgaccttctgtagggctctgtgcgtgttcatgcacatctaggtatgcgctcctggcccatgtctgtctggagctgcgtctgtgcctctggggtctatagctctgtgtctgactctgagtatctttgtgagtcagaagtgtgtgtctatttaagcttgggcacatgccatctcgacatgcctagatgtgtctgcccagtgtgctgtgtctctgtgtgttggcttgtatgtctatcagtgtgaatgtcagtgatacacccagacatgtctgtctctctgaatgtatgtctctgtgagttgtgtgtctctctgtgcccatttgcttgtgtctgtggtctgtgttcaggtaagtgtacatgtgtgcatgtttgcatgtgtgcctggtgttctgtgtactggcatgtacatgtcagtgtgtgtatctctgtgtgcacacaagtctacaaaatgacacagcagaggccccacctcatcttgcctcaccatcccttaccccaagctctgggttgggctttcctgctgagggcacagccccacctgtgggcacacacagccagcctgggccctgtatttctgtaggcctggtgacatgtgtgatgggacctatggggcctcattagggcaggcacacaggaaatactcccgttgcctagcccaggacaacaggccattccaggtaccaagtatattcatggctgtcaccccgtcccctgcttccctgaccatgtccctcatattggcctctcatcctgctcccctgccctgctggctgccctacaccccagcaccagttcacagcccagccttggttatgctgagattccttgaggccaagtgtggcctcccaagggcagggcctggtttcctctcttctgtcccactgcagtgaagcagagctcagggccagagacccagccccggattcactccctggcctgtgctggcagccggaggtttagagagcccaaagtctggcagggactcagacacaatagccggcctacaaaacagggcgtgcccagtgctgtcagagaggggtaaacaaagtccagcagcagcaaaattcccagagaaatgacaggccttccaaccaagaggagtgggaatagactgtaccgcttaccagcaacatgaccttgagctggttttctaatcagtctgtgcctccatttcctcatctgtgaaatggaagcattaaataagttattcatccaaagaggttagaacagtgcctggcacatgcaaatgttatatgaatgtttgctgatattcttaacagggtcttgaacccccagcagggtttgactgacctgaagtgcccctactcagctttcagagaagctggcccagaatggaagagggactgacagccaacatgaggccacaagagccctcaagacaggttgggggaaaagtggtcagggtccatgaccaaggaaggctgcaatctctggccaagccctagggatccaggtgtcctcctcagccttcagctatagatgtggcctgactgctgcagccccagaaagtgccccttgctgctgccagcccactccaatgcacacagtcccgaggctcttccccaagtaaacacatccctccacctcctcttcccagacccccttcttgggaacttgtgaaccttcggacctgagctgggctgggctgggcttggcccagctggcgttgactttggctcaggggttgggttttctgagcaaatctatgggactggcaggattgcaaagagacaattaagcctcctgcatgggatgggtccagagcagtcctagtccctcacgggcatgaagcttctgaacagactaaatgatggcatttgcatgtgcctattcaagcagacccctagagaccacactgtgcatctttcactggccaggctctgcaaggctgtggcggagaatgcagccacaatgcagggttttcgctgcacttgttccctaactattcccctccatcacaattcacaatccgaccacgttgggggaatctgtgttgttcaagaactaggtgcgggctgggcacggtggctcatgcctgtaatcccagcactttgggaggctgagaggcaggtgaatcacctggggtcaggagttcgagaccagcctggccaacatggcgaaaccccgtctctactaaaaatacaaaaattagccgggtgtggtggtgggctcctgtaatcccagctactcagaaggctgaggcaggagaatcactttaacctgggaggtggaggttgcagtgagccgagatcatgccattgtactccagcctgggcgacagagcaagactatgatggggtgatgagtatattgggatgcatctagttcttttttttttgagacagagtctcaaaacattttctaatgcctccttcactatcataatatgaaattcaggacacgtacccatccactttataaaaaataatgttctagctatactgtaaaataaatattaaaaggaaagtaatttacaataaagtaccatgtacatattcaagcataaccacactagatgtagtctgaaggttgtacctacaaatataaatcctgggaatgtgaggcctacaaatgcagactgatggacacaggtagttgtatcggtgactcaagtatcacaggcagcactgctatgggtatcatgattttccaaaacattgaacaactcttagtgaagttcagaacaaaacaaaatacaatcttccctcccttttctcagtggctgcattcctggaaaactccatgtatgttaaacttgtgcaataaacagcttgtgttggccgggcgcggtggctcatacctgtaatcccagcactttgggaggccaaggtgggaggatcacttgaggtcaggagttcgagatcagcctggccaacatggtgaaaccctgtctctactaaaaatacaaaaattagccgggcgtggcagcatgggcctatagtcccagctactcgggaggctgaggcaggagaattgcttgaacccaggaggcagaggttgccaaggttgcaccactgcactctagcctgggtgacagagtgagactccatctcaaaaaataagtaagtaaataaataataaagtaaatggcgtgtgtttatacataaaatggtgtaagagtctaggctctggtcattatgaaaggttttcacctatacatatgcccagtggctcatctggaagccatgcagaatgtgagacaattcatcattgtgcaggagttgtctgtctggcatccctggtgactgcccatcaaatgccagtgaggcccccctattgctgcaacaatcaaaaccaccactggcattggaaacatccccagggggcgctccatccctcactaaggaccaaggaactgtagtcaggcctccttcctgcctccctgtcaggacagccccgtgcaacctccgcagggctgtgcctcccctctcagactggaggctccttgaggtgggagcctggcagagggaggaagagagtgggtgcctatggcctcaggccccagggctggaggcacctgcactgtgctcacccatgtgtcttctgccttacccccataggctgcagcaagatgtgggacaacctcacctgctggccagccacccctcggggccaggtagttgtcttggcctgtcccctcatcttcaagctcttctcctccattcaaggtaagacccctgggttgaagaggtgatgtgagtggggccggctggagtggggactcacctgtcaaggaagtggaaaggcaaaggaaagtggtcaaagaggctggagcaatccgagggactccctggcagaggaggcaatggtgctgggtctttaaagaactcacaggatttgattagctcttcacataaagataagcatgtgggaaaggctcactaaatatttgctcaacaattgataactgattgactgacaggtacttgattaaattatgactcccatagtcctgttgtcttgggctggtcttgattcagtctttcgatgcctggagcctatgacctcttgggctccatgaagccaccacatgactttgcttacacaccttgtcatgttccacttaaatgaatgtccacagaatgaggcagaaaagaaaagggggagcccctttaggaggtggctttctagctagtgagtcattaaagagattcacaatatagattcagtcattcttttgtgcagtgaatgaagcacttaccagtgtgccaggcactgagctggacaaacacagtggagagaggataaaacagcccccggggctgctctcccagagctagcattctcattggagagacatttagtaaggaaataaacagatgtatcatcaataataaaaagtgctggacgagagaataaggagagtggggactaacttaaggcagaggttcacaaacagcccctctctgaggaggtgacacttcatctgcaatctgaagacctggaggtgagaaagaaccaccaggcaaagatcccagattggggacaactgagagagagaatcaacagcccgtggaacaagcatccaaggaagttccgtgaaggccagtgtggctggagcagggaaagcaccagggatgaagggaggggagggacaggtgcgccgaggccagaccatgcagggccttgaggacagaagcgaagacttgagttttttcctaagtccagttagaagtggggggttttaagcaggggactgacaaagtccaatttagatttttaacgtctaactggtttctgtgagaaggaagaattctaggagtgtaaacaggaaaacccaatcacaaggcaggcaggaaatgatggcttgaattcaggtagtgagctcagtgcgggagagaagtgggagagttgtttatggagggaatgggagtgagtgaggcgagggaggaatcaagcaggccccaccctaggcttaggtttaatgagccttagggaagagagtgggactgggtggggagcatggagggaggggcaggcctagagtggggaggactcatgaggagcagaacttatataattattcagagagcgaacagaactcaggcatctctcactccagatggccttttcctccctggaccccagtttccccgtttgtaaagtggggataggtggtagaccccagggtctctttggggtaagccagtttgccccccagtgcctgctgttgtgacctcagtagtgaaagacagaacttgaagccctcctgaggagtctgggagggtcacagccatgccatattccaggccagtgcccacctagcctggtcacctcctccagggacacccagtgcctgggcagataagagatgagttcctctggcaggtttcacagtgcacgccatcaccaagcctggaaactagccttctctctgatccctggaagcacctgctaattgcctttctccctgagactctgctaactgcattcctccccatggctcttccttctgtccctgctggaatgtgtcaaggcaactcctgcccttgagaacctggactccagcccaccatctagctaaccctgaggctgccgccatcaatggggcccatacggtgcctttggactgacaagaaaaaggcagtccttcctcgggcagagatgacctctcactagagcccacctagtgacaagcagaatatgcctaccggccaggtgcccttgtagagtgaacaacttgcacagccatactctgtgggcctggtctctgaaaatggtggagagaaataagagactgcgattagggactgaaaacagaaaaaagacagtgttctcctgagcaagtagatgaagaagttgtgggcaaccgacctgaaattccaaagagggaagtttgcaagtgtgaggcaggaatgatggcatcaccaactcacacaacaggcctgggaagaattatacccacgggaagggacctggttatacagggaaagctaaataaaccttatagaagataaaaattgtggagagttagaaaaaagtcatctacctagactggataaaatacctgaaggagggagtttggccaggcaaggaattgctcattaacacatcaaaatgttcatggtagctcacttctttatttttattttattaatgttttgagatagagtcttgctctgtcacccaggctgcagtgcagtggcaccatcttggctcactgcaacctccgtctcctgggttcaagcaattctcctgcctcagcctcccaagaagctaagattgcaggcaccagccaccacacctggctaatttttgtatttttagtagagacagggtttcactgtattggccaggctggtcttgaactcctgacctcatgatcctcccacctcagcctcccaaagtgctgggattacaggtgcatacttctttaatctgtagtctgcatatctttcatctgtgtttctaccttcaaatatatatatatatatatatatttttttttttttttttttttagacagcgtctcgctctgtcccccaggctggagtgcagtggcactatctctgctcactgcaacctccgccttccgggtccacaccattctcctgcctcagcctccccagtagctgggactgcaggcgcccgccaccacacctaattttttgtattcttagtagagatggggttttaccatgttagccaggatggtctcgatctcctgaccttgtgatccacctgcctcggcctcccaaagtgctgggattataggcatgaaccaccatgcctggcctctactttcaaatatttgaaaagatttgttttaaaataaatatgggagagccattctggctgagaaaattcgacatacagtctatgttaaccatgtctgtggggtctatgggatacctcccctcccctaccacctgcatcatgatgctataaataagaaaaccttgctgccagcctaggaagctcaaacttgctggctgggatgggacaccacggcagggaatcagcaggagagttccatggtcaggtctgggtgttagcatgatccttccagctgtctcagggtggggagctgacaggaaagcagggggctcctacctaatccaggggagatgaggtggtggtggtgctggggaagaagctgggacaggactggtgactgatgggggagaggagggagaggattattcctcaattcctggctccaggcactgagtggaggatcctagctaggcacaagcgggggccatgactgctttttgagacatagtgagtgggaggagactggaagaaaggtggcccttgccacccttctggtcgtcatggctatcctgagcttgttcaggtgaagcccagcccaagtgacaggcctcaaagcagacctggcaagtgtccctcccacggtggagcccagcctggcccaggcatgccctgaccccttcactgttgcatgccctgaccccccccccagtggagtgtccttcccagcacagggttaaagtcccttgctacctccctcctgcccttcatgtccccctctacagatattgggcctgccggtttccaggcccagactggagggagactcttggctgcttcttgggatcccatggtgactgccattttgatatccttgagagcagcttgctatgaggccttgaccacaatcccagggctcttcaaagagaccacctggccccagagatgacccattgtcccctcccctcctctccttcaccatctatggcagccagggctccagaaaacagagtatccctttggccgctgctgggagcccagaaagatctggagtcaggcagaccttggtctgcatcccacctgctgctcccttgctgtgtgaccatgggcaaatgacttaacctctcttagccttgggatccccattttttgatgggataacaaaaactaccaattcctagccctaacacattaatgtttaccctaacacctccgccactacacacacacacacacacacacacacacacacggcatgtgaagctgctgtgtacatgccagagtcacccaggtttgctggcataattcatgataccagatgcttgccatgtcattgggcctggcctcctcaagccccggtccctctggtgagtagggagcccaaagctccagtgtcccagcttcaaggctgggtgattttggccttaatcctcttttttttttccctgagtcggagttttactctgtcacccaggtgggagtgcagtggtgtgatctcggctcactgcaacctccacctcctgggttcaagcgattctcctgcctcagccgcctgagtagctgggactacaggtgtgtgccaccactcccagataatttttgtatttttagtaaagacagggtttcactatgttggccaggctgatcttgaactctgacctcgtgatctgcctgccttggcctaccaaactgctgggattacaggcatgagccaccgcacccagcccttaaccctgttttctacctgcctgagccttgtagggggaagtcctcaaatgaatcagattgtgggtaggatccagggcctcagagcctgcagttagctccctggaactggggctgaggaagagcctaccctttgatgaggggctgggctgaaggctctgggccaggcccacctctggctgcaatgatgggaagctgagaggggcgcagaaggacagctgaaggcttttctgctgtcctaggagcctcttgcaacagtgaggttgggagcccagggcagaaaaagggatgccaaggcaggaaactggcccagtccaatgccccctcctcaaccaaatccatcctgccctccctgggccatgcggtggaaatagacccagcccacggctgctctttcctggctgtcccatccccacccctagctgtccctcagttcttcatccatgaagtagggtgacaagacctctttccaagggttgccaggaggatttacagaaatggtgaatatggaatcacctggtatattccgggcatacagcaaagtttggaaataaacacacgtgcccagtgacacttcctgagctcatagaacagcttgaccctcctgcagctctttatctggtcaccgaaataagtcctcaggtcacctccatgcaggtgagaaccaagcttacctgggaagactctggagaccaaatcagctctatcctgtcctctctatgtagccttgggcaagtaaccaacctcttggggcctccacttctcaactgtgaaatggagttaacttcctcactggatgattgaggaaattaaacaggatgtgcctaaagtgcttgaccagcactgacatttgaaaagtactcaaaacctgtcattgtgatgaggctgacaacagtgatgctgctgatgctgctcatggtgactatggcggtggtggtggtggtgatgaacgggtactgagatggggaagcgtgattcttctctggctcatctaatttctattcaacccatcctctccctctctggggagaggacacctccccagtgctggagagtggggagcctcagtggtacccctcacctcacataccccctaagcggtcctgtctctttgctgcagcttcaagcctctgaggacagtggacagtgcagcttgcctggagcctcagcctctgcttgtttcagccccaagctcctgccatgctgtgctgcctgattccccctcacatgcctttgcctgcacaggttccccaaccccacccctcctcacccccacactcctgctccccctccagcagcacatctaagcccttccaggtgtgagaagaaacccagccccacaggcccaggcaggctgactgaggaggaccgggcaggcctgggccccttcccccagccgtggccttgtgacaagggtcagcattctgctcacggcaagggtcaggaatcattctgtgacaaggatccaggcagggtctgtgacaaggataagagtgtatgttgtacttggggtcaggttcagaccataacaaaagggctgagcccaagaatgtctgctctgattctatcatcggtgcgggagccctgaagaggcttctccctgccccaggtgcccccacggtgccctgggtaactgggtcagggcagctggaacctgacagcaccagggttggtgggagtagggctgaattctctgccttgttccaagcagagacagccaggtccccatgctcccggcctcagcctttgtccttgcccctgccctccacccaggccgcaatgtaagccgcagctgcaccgacgaaggctggacgcacctggagcctggcccgtaccccattgcctgtggtttggatgacaaggcagcgagtttggatgaggtgggtctcagggcacccccacctcacctgcagagcgccggggcccacctaggagactttgatctctcccaccgaggggtgtggttgctgtctgtgtgggaacaggactcctggagtctgccctcctctagcctcctccaggcctgcctttctggggtcccaacccttggctccccctgacagggtatgggaggaggctttcccacaggaggggcccccagagcagcaaaagctgaagcagctcccccaggctgggccaccctactgcctcatgggagcctcacttcagcccgggagttggcagggcaggcagacaccagcaccccatcccatccagaggggaaaccgagttgctgcaggtcctggaaggaaccagacttggctaccaaatagccagtcaggaacagggacagagcctgtcattctcagtcccaggacagatatcttccccggagcagttaaaacatggtctctgtaaagactggggagcctggtaaggacattgatggggaggctggagtcctcagctaggagcccctcactgctttggggtgcaaatgcatgtgtgtgtgtctgtctgcgatggcatctgccccaccctcaggcgcccttctcagaccgggctttcactccacccacccccgaggacagcaatttcttcagaggcctttgaagcccactggagctataggccctcattcccccttaaccacttgcctctcctcaggcaagcgtgggaggctgacaggaaggagtggcttgcctagtggctgtcgtgctgcactgcacctgtgtccatggggagggcatcaggagaggggaccaagcgagacaccctcggggcctagctttgccctcctccaccggaaaggccagactgccctcatcccaccgaccccaactcccaagggcccaaaatgggacatactagtgccagtgtcttcttcgacatcctgcaacctcgcatacctctcctccctatacagagacagggcctcgaggggtgtctgaagggcaagcagaccccacccctagggtgcccagctcagagctggcacagaagggaagccgggcacatggctggagacatgaaattaacaaaagggacgtgcaaggtcttcattctctccctcaccaacttgtccctcgtaaagaagcaaagacaggaagtacattcaacccccaccccaccctaagacacagtcctgccctgtctgtagaaaccagggcgttaggggtcaggggctcagctgctcttgggagccccagacctcagcctcctcatttgctgaggcagggttgggcaggcagagtgtgtagggcaccccacccctgccaataccccctagatgagcctcccaccccaccacccaagagcctctccctgtccctccaacagcagcagaccatgttctacggttctgtgaagaccggctacaccattggctacggcctgtccctcgccacccttctggtcgccacagctatcctgagcctgttcaggtgaggcccagcccaagtcacaggcctcaaagcaaacctggcaagtgtccctcccacagtggagcccagcgtggcccaggcgtgccccgacccctccactgttgccccccagcagcacatactccccagctcctgccaggccagcttcccctggagaaggcaggtggctgagctcttccatgtgttgcagcctagtctcccctaggatggccctgcacctggggacagggcaccagagagtggggcctgcacacaggaatgaggcttctggggccacacacgaggttgaggcccttgggagcccagttgcacaggtggatggggtacctgggggtggggctcgtatttcaggatgggatcccctttgaggcggggcctgccctctggaggacacatgctcccctgccccacccttgctcagcacataggacagcattggctggggtggggatccaaggcccctttggcctcccagatctgcccaccccacacaggaagctccactgcacgcggaactacatccacatgcacctcttcatatccttcatcctgagggctgccgctgtcttcatcaaagacttggccctcttcgacagcggggagtcggaccagtgctccgagggctcggtgaggatcctggccctggcccacctccctcagtctcgccgttatctttaaccactgtaatctcctcttctccccctgcttctccctctccctcctccctcttccctcccaccccacccctcaatccaaggatagcctaacccccacccaaccccacctggcagtactcaaatcacactcccctccggcaacaggagatgttgctcacccatctgggtgctcacagacctgccgccgccagtgagaaaagcagatgggaaatgggacacttcatggccacagcccagagcacctgtcccacctgttgctaacttcctatgtggccttggggaacttacagcctcagtttccccatctgtgcaaggaattccaagattccttccaactctgccatctgccacctgcatagccagggctctgctcaccatgccacttttcctactccccccgtccccgtgccatctggagtgggtccatacatatgcagtcctcctcttttgttctgatcctgacagcaggctggttctgggccttcctagggaagagaggtaaagggatcatctaaggaattcattgccagtcactaagggggccatctccaagggattcttagggaccctctctgagtgccccaagctttgacagagagcttgagatcagccccagcccccactcattccttgtggtcagtaactcattgcttcatgcatgaccccagaggcagtgcattatatcaggggtcagcagtaccttctccccaaagagtgaaatgatcatactggaatctcaggcatttcaacaagggggagagaaaacctaggggacccactttggccattcccagagcttctcagaggttctgtcccaggagctgtgaggccaagtcagacatgagcattgtgagccacaggacctgtggaggaacctgctgcctcctgtgcacatgttacggataattatggagactggcttcccaattcattactgcgaagcttttctaagactaggaagaagcacagataactgtcctggtaaagagctgagttatggccagacgcggattatggctcacgcctgtaatcccagcacttctggaggctgagttgggcggatcatgaggtcaggagttcaagaccagcctgaccaacatggtgaaacccagtctctactaaaaatacaaaaataaaaaaaattagctgagtgtggtggtcagcacctgtaatcccagctactcagaaggctgaggcagaataatcgtttgaaccaaggaggcagaggttgcaatgagccgagatcatgccattgcactccagcctaggtgacagagcaagactccatctcaaaaaaaaaaaaaaaaaaaaaaaagagttattctccaaaagcaaatgggaggaagatggggaggcaagaactcctgtaactggagggactgaagccagacctgaggaaggactttccaaccaaagggagtggtgggggcagggggaggcttctctctgaggatgtcgcaaaccaagggtacaggaaggaagggtgggaaccaatgttttgggtacagggggaagtggaagccagacagtttcctggtggagggtggctttaagccctggctgacagacatctaggcttgatctgaaatgggggactttctgggaggggacagaaggcccagaataccttccagtcatgccaagtgggccacccagagccctgtgattgctctactcatgggtctccctaactccttcatggtcctcgtctgcctaagaaacccattcttccactcggtcctctgaaccccaggaggaatggccacccctcccctcttctcttcttcttcatttctacttccccctcttccaccctcttctcagtcccagtctccctccacacttccatctgggccccactccacagtccacagccctccactctcccacattgagcagactcttgcaaactcaagcaagaattctccctcataccttccagctaccttcaatacaaattggcattagatgaatgagtgggtggggtgggagtgtggatgggcaggttggtggatggctaagtaggcagcaggataaatgggttaagtaaggaagattggacagatgacaggcagaggggcaggtaggtagatatgtgggtggatgcacaagtggattgatgggtgggtgcagagatgaatggatgggtagatgactgagtgggttggtagaagaatggagagataggtgtgtgggtggatggattgatagatgggaagatgatagatgatggatggacacatggataaaaaatggataaatgagtgagttgatagtgaatgtctagtgggtgagtgggtaaataaatggatacatggataggtgggtagatgattgaatgggcagatgggtagatatatagatgggaaggtgaatagatgaattgatggatggataattaaaatcaccagtttatcccgaagtatcagaggatctaaaattagggaaaatgggaaaaccaatgagtacatttttaaggggataatgcaaaacaacaaagagattaagttggctgcactgcaactgtgtttgtccccccagacacgagtgtgggcagtcaaggacccttgacagccccagtgaaccccgtcttttctcctccccctgcaggtgggctgtaaggcagccatggtctttttccaatattgtgtcatggctaacttcttctggctgctggtggagggcctctacctgtacaccctgcttgccgtctccttcttctctgagcggaagtacttctgggggtacatactcatcggctggggtatggtaccagggagggcttccaggctggggacagagggggcaaggcctggagaactccctagggggagggtgccaacccagcttgcagtcctacgtcttgcttagctgcaggtcctgcctgcaaggatatcagccaagggtcaagaaagtcctcaaaatgtctgatcccaggacaagtccctcaggttgcagctgcacctagggctgacctgtgggacagattttgtgaacatctttccatttccctttagttcccgaaatacacagggccactgctaatctataaagggcctctgtcacaattagaaagagaatgtccgtctaggtagacacagcccttcaggcatacagcttcaccccctcagtggagcatccctccgtggtgaacaacctatgcaaccaaagacagcagactgacaacccacccttttctctctccctccctctccctgcttttctccaaaatctctccctcatgccctctacccctgcttcctgtgccctctctgctctttcactctccctgggcctgacaggggtacccagcacattcaccatggtgtggaccatcgccaggatccattttgaggattatgggtgagctgctgccccacacactcccccggccgccatcacttgggcaggccccctgggtgggatgataatgccatctggccttggtgagtggacaaaaaccacagctctcgggccagaggggaggctggaggaggacctggggagcaacagactctgggcccggggttgctaaagtgctcaggagcagagctggggacaactgggggaggtgctgctgagtctctctctggctgaggacaatccctctcattcctccccacggtctgctcaggtgctgggacaccatcaactcctcactgtggtggatcataaagggccccatcctcacctccatcttggtaagataccctcccaccacctagagatggggaaacaggcccaaagggcaggcaacttagcccaaggtcacatgggaaattagtatctaggtcagaactgaaacgtagcttcctaatgcccaatgcaggatcatccccacccctgtcctaccagttcttccttgagcgtaagcggattgggagcacagtccttagggatttgaaggaggtagagttcccggatgacctgcccaaaggggaaatgccagaggagaggtaagatagagagaggggcagcaggaccctgggaaagaagacaggccagcagtcaaggggcctgaacacctcagccttcccgctctgactgcccgaactcgggtccccacccactaggtaaacttcatcctgtttatttgcatcatccgaatcctgcttcagaaactgcggcccccagatatcaggaagagtgacagcagtccatactcgtgagtgtgggcctagtgcctcagcccccagtacctccatccccagtcctcaaatcatcccacatctccttgaagtcctcccaccccaaacatccagagtcaccaaagagccacattgttctttcccacctccaccatggcctggctcagcccaccaccatcccctgctccagccccaccctcaccaggctgcactcagagccctgcatgcttctcctgcccacactcacctagcatccttcccaggtatgcatctgctgccaagccagggagctcaagaggacaccgatgacctgtgtcttgttcataccatgtgcccagtccctggcatgtgcctcacatggaaaaagggtgcaataaacacatagtagatgaatgccctgggggagaccccagtccaccaatgagacagccatgttcgggactcagtattcctcagtaataatgatgacacctgcagtttacatgccaggcacacgctaagggatttccatgcatcatgtcatttcatccacacagtcccctgcaaaattatctttactttacagggaggaaatgacatacactcccttctccttgagggttttggagcaggtcaccatgggcagggagaagggggcacaatgtccatggaccagggcttggaaaggtgtcaggactgttccccctgcttgggaggactggaggaagaggcaggtttttttgcgggagcaacaaggcttgaagacagagctaaagaaacatgaaaaatatgaaaagggaggctgtgggaaggcaagtagggtctgcatgctcacagatgggagtaggagattgagtatcagtgctattgacacaagacaaacctgggacgtcccacaaggccttccagtcctgggattcttcttggcctggcttctctttggagagtctgtgctgtggttctaagattcctggctagaatgtcacagactgctggatttaggattctattctggaatcccgtgattctccctgatgagactaagactcacattcctggtgtgactgcattctctcctgccaggtgtgtaggcggagcttcccttcctgtctgagaaggaaaggctgggggggcggggggggcatctgcagtctgctgaggggcagcacatcgggcctgtgcacccttatcctctcctttgccgatgggaccttatttcccccaacttacaatggttcaaaagggcctgaatctgaggcaaacagagctggccatggtcagggccaggtctgtgtggtgagacagaaaggaaacagttgtcagcaggcaaaaggggtgggggcagttggagatgaagctcctcaaggagaagctgtcagctcccactctacacctccccataagcctttgatttaaagaaagcctccatctgttagcctccggtgtgtgggatagttttgcagccgaagaggggtgggcattgctcaggatcttggcatggctgagaaccaggtccaggaaggagtgggaggggcaaggccagctcctctgcccccagcttgctgtgggacctcaggccttgggctagacttccttggactgactgctaaggcaggagagacagagtcagagaccctccctatccacaccccacctctcctagccagggagcaatgggttcacactgcctggatcagctatgaggtcaggtggctgggaggcctgaaccaggaagagctctgggccatgggaggcgggtgagcatttagaatgaatgctgaccctactgagcacacaaagctgtgaagaaggagctggtccttcagagcacgctgggagtatatgcactggtgtggggaggtaggaggagggggatgcaaccccagagaaggtggcaacttctggagaagcagacacagcagaaaaaacacagatagagggcgatactgattaattttgggttgtccctggtgatcaggtatgaacttgggtccccatcaccctcccaagtggccctgggcatatgtggtcagcacccagttagaaagacttgtttcctagtacgtcttctctcatggtctctcatggatgcactatacttcatagtacccaaaacacttccaagttcatagtgggcctctgtttctataatttgactatgtcgagcatacacttactgcattatacaaattggaaaaactgagaccaggagaggaggaaccagaatctcttgttgcctaagagattttctactgctcttgatggctgagagcatcctctactgcaatgatgaggtaagcctctcctagaccagggggcccaggcaacagaactcccaatagtggatttcagctaacatgtccctgttagcatcattctcactggcctctcctttacctcttaccctctctcctccagaagggtgagaatagagggggtttctttctctctcatgcttccctccaggccaggagggctgggggcagaagggcagaggcactgcagctgtggaacaggagcagacaagggcataatattcagaggaacctacagtccatcctcatacttcctggtcattgtccccatcttctgtgcctccagctgcccccatgccacaccctatcatatccacatgtgtggacacacatacccatggcctgtccctcccctgtctccagaaggctagccaggtccacactcctgctgatccccctgtttggagtacactacatcatgttcgccttctttccggacaattttaagcctgaagtgaagatggtctttgagctcgtcgtggggtctttccaggtatgggctgttgacttaaggctgcattcttccctggcttttaagggaattcaacctggagtcttggcccttgccactggattccaacctttttactgtaataagtattagataagcacctactttgtgcttagctctttccttaaccaggggaacacaggggctggagccaggggtggggcagggctgggggcttctggtctgtctacctcacctctcctgtcatcttccttctcagggttttgtggtggctatcctctactgcttcctcaatggtgaggtaagcccctcccagtccttggggcttaggcaatggaactcccaggaccagggtccggaaacattggtgggatatgtgcagagcaaggacgggttaaaccttgctgctccaagtatggtcctcaaactagtagcactggtgtcacctaggcccttgttaaaaatgcgcatctctgggaccaccccagacctgctggcttagaatctgcattttaataattattttaaaaaacaaacaaacagctttttactaaaccccagggggattcctgtgcacaacagagtttgagaaacacctagttaagtggctgtgtgcagtgagtggggaggggtgagggcttccaatgaaggttgagttgctgtggagctctggttacattgcacaaaaaacccactcaagtgagctggagacccaggatgggaagaattggagtacagtcacccctaggcagcatccctccctctccctggactgtattctaggatcctctctgcctcttacctcctgccattccaaggcctccttctgaacctggcctcaacccagtcccaagtttgcaccgcccgaggcagcataggggtccctccattttgatttcctaaagagaataagactggctagttcagaaccctaagtccagggcagcccaatcagcagtggaagaggctccacagcagtgggcctgaccaccttcccctctcctaggtgcaggcggagctgaggcggaagtggcggcgctggcacctgcagggcgtcctgggctggaaccccaaataccggcacccgtcgggaggcagcaacggcgccacgtgcagcacgcaggtttccatgctgacccgcgtcagcccaggtgcccgccgctcctccagcttccaagccgaagtctccctggtctgaccaccaggatcccaggggcccaaggcggcccctcccgccccttcccactcaccccggcagacgccggggacagaggcctgcccgggcgcggccagccccggccctgggctcggaggctgcccccggccccctggtctctggtccggacactcctagagaacgcagccctagagcctgcctggagcgtttctagcaagtga

SEQ ID NO: 618 - protein, 457 aa, Homo sapiens
MRPPSPLPARWLCVLAGALAWALGPAGGQAARLQEECDYVQMIEVQHKQCLEEAQLENETIGCSKMWDNLTCWPATPRGQVVVLACPLIFKLFSSIQGRNVSRSCTDEGWTHLEPGPYPIACGLDDKAASLDEQQTMFYGSVKTGYTIGYGLSLATLLVATAILSLFRKLHCTRNYIHMHLFISFILRAAAVFIKDLALFDSGESDQCSEGSVGCKAAMVFFQYCVMANFFWLLVEGLYLYTLLAVSFFSERKYFWGYILIGWGVPSTFTMVWTIARIHFEDYGCWDTINSSLWWIIKGPILTSILVNFILFICIIRILLQKLRPPDIRKSDSSPYSRLARSTLLLIPLFGVHYIMFAFFPDNFKPEVKMVFELVVGSFQGFVVAILYCFLNGEVQAELRRKWRRWHLQGVLGWNPKYRHPSGGSNGATCSTQVSMLTRVSPGARRSSSFQAEVSLV

SEQ ID NO: 619 - DNA, 1334 bp, Homo sapiens
  source
  (1)..(1334)
  CDS (201)..(715)
  CDS (834)..(1134)
tactctattttcctggggttggtctcttttaaacaaggcctctgactagactttgggggacaaagttgaatgccgggttggggcagaggctgatgccatgctgaggtcatgatgttatgctgtccattttgcttccttccaggggaagcagaagcgggagccgtcgtggagctctgctcctggagggagcctcccgggacatggagaaggtggacatgaatacatcacaggaacaaggtctctgccagttctcagagaagtacaagcaagtctacctctccctggcctacagtatcatctttatcctagggctgccactaaatggcactgtcttgtggcactcctggggccaaaccaagcgctggagctgtgccaccacctatctggtgaacctgatggtggccgacctgctttatgtgctattgcccttcctcatcatcacctactcactagatgacaggtggcccttcggggagctgctctgcaagctggtgcacttcctgttctatatcaacctttacggcagcatcctgctgctgacctgcatctctgtgcaccagttcctaggtgtgtgccacccactgtgttcgctgccctaccggacccgcaggcatgcctggctgggcaccagcaccacctgggccctggtggtcctccagctgctgcccacactggccttctcccacacggactacatcaatggccagatgatctggtatgacatgaccagccaagagaattttgatcggctttttgcctacggcatagttctgacattgtctggctttctttccctccttggtcattttggtgtgctattcactgatggtcaggagcctgatcaagccagaggagaacctcatgaggacaggcaacacagcccgagccaggtccatccggaccatcctactggtgtgtggcctcttcaccctctgttttgtgcccttccatatcactcgctccttctacctcaccatctgctttctgctttctcaggactgccagctcttgatggcagccagtgtggcctacaagatatggaggcctctggtgagtgtgagcagctgcctcaacccagtcctgtactttctttcaaggggggcaaaaatagagtcaggctcctccagaaactgaggcagaacaagttgggtgagcatccagctgggaggaagagatgcccagggttgaacagatctgggtaatgccaaggtgaagcttgggaaaaacgagctccaacaccactagcaacaacttgtttgtacacagatgagtgctggtgggagaggggctcaagacctcctaaaagtgtcctgctgcaaaggacacttttatat

SEQ ID NO: 620 - protein, 271 aa, Homo sapiens
MEKVDMNTSQEQGLCQFSEKYKQVYLSLAYSIIFILGLPLNGTVLWHSWGQTKRWSCATTYLVNLMVADLLYVLLPFLIITYSLDDRWPFGELLCKLVHFLFYINLYGSILLLTCISVHQFLGVCHPLCSLPYRTRRHAWLGTSTTWALVVLQLLPTLAFSHTDYINGQMIWSLIKPEENLMRTGNTARARSIRTILLVCGLFTLCFVPFHITRSFYLTICFLLSQDCQLLMAASVAYKIWRPLVSVSSCLNPVLYFLSRGAKIESGSSRN

SEQ ID NO: 621 - DNA, 21704 bp, Homo sapiens
  source
  (1)..(21704)
  CDS (201)..(460)
  CDS (3722)..(4013)
  CDS (5323)..(5425)
  CDS (7113)..(7286)
  CDS (9491)..(9609)
  CDS (9795)..(10513)
  CDS (10731)..(10873)
  CDS (12442)..(12502)
  CDS (13146)..(13277)
  CDS (13901)..(14207)
  CDS (14687)..(15069)
  CDS (21303)..(21504)
ttgggagaagggcgcaaacttttgctcaggtttgcagaaacatcagagaccttcaaacccttaaaagccccaactctggggccagtcttatgcccgaggtgagacctagtgggatcccattctgctgagcaggcgatggcttagattaggccatactgttcttctgggccttgattcctcaacccaagtagggcctgcttatgaagatccaccaggtcgtagcagccaactccgctatcccaggctgcatcccactgcctgccccgaaggcggccacgctggctggccaggatgagaggcgtcacagtgcctcttcccccccagcccctcccagccccaaacacaggcagcctgttcaggaaagcctggcgaaggggaggaaaagtcagcacttgtcagcggtggcggggcaggacgaggagcctgctcaggccagccggacagagagagggcagcaggggtgggggagcagtcccagccagctggcacgggagacatccaggggtgccagcatgggtcccagtagtagaacctggaggagggctgtaggaaggccaggaggtcatgaaggggtctcctgttagccagggttttctccttctggctgtgctggaggcatcaacggcctggttcccaacaccagagcccaactgtcctctacccagttacagctggggacaagccgccatcactggcatcaccggcacctttatgtctacacacctctgctcctaaatcggcttcggggaggctgccttaggggatctgcaaagggagacttgcttaatgtagcagctaaaatccaggattatggaaagatgataccgtggctggtgccagggtacccgtgtggctgggcacttcctcctctctttcccttcttccaaggctgctgcttcagtgtcaagcagatcttagctccatccctggccctcctctttctgtgactcttggcctcagtgtccctgtctgtaaaatggggatgtggtagaaggtgcaggaggcatgggttttaaagctccttgctgaccatggggaggatgtgctacagtggagggtattgaagccaagcaccatgatggctgggttgggggagtcaagtcagccctaatcaggaccataggaggagtgttggggggatatgggacagctggtgcagggctgggtggcctgtaagtggtgggtatggactaagtgacccctggccacagcccagccccagtccctcagtcctcacccctgagacccaagatctgcagatccgctggatctaaggggacgcaagcctgagtcctctgcaccctggcgctgagccaagaagacaggaactcctcaagggagagagggttggaggggtggggagaagggagtagcagacagggggcatgccaggctgagaagagatacagctgtcagcatttccccttcatccccaggagataaggcctcctcagtcagggcagaggcagaggagggggtcctttttcctcctaagctcaagcttggggcctctggcagtaaccttgaatcctaatgtaagtccagagtggatccagaaatgcaaggagccattgggatactcttccatcccaaaagcttgccaggaacaccttatctagcaggtcctcctgtagtccctgcccccagtccaccctggggccccatctcccatctgcccctcactgtcacctgctggactcagccatctacccagataatctcccccagccaccttgggtccctggcctggctgggagcacccatgtcaccaggcagcaggggtgcacatggcggggatgtgacttgctgctgctgctgctgctcacagtatcaacaatagcaaccagcttttcctgagcttcacccctgcacaggcttgttgtgaagtacttcatttaatcttcacagcagcttttttttttttttttttttttttgagatggagtttcgctcttgttgcccaggctagagtgcaatggcgcgatctcggctcactggaacctccgctcccaggtttgagcgattctgctgcctcggcctcccgagtagctgggattacaggcgcaccaccacacccagctaattttgtatttttcagtagagacaaggtttctccatgttggtcaggctggtctcgaactcctgacctcaggtgatccacctggtttggcctcccaaagtgctgggattactggtgttagccaccgtgccgggccaacaacagccctattattaccctgattttacaggaaaactgaggcacacgggttaagcaactttctcagacacgaagctagtcaagggtggaggtgggattcacattgtggggctggtggcagaatctccttgaagaggagggcacagctggagggaggagtgaacaggagtgggggcattccaggcacggagctgtgagctaacgtttggaggggtagcgcacttggtgtggggttgtcctcctcttcttgggaaagtgcttccttaactttaacatgagttattcttgttgcaatggctgtgctaacagataaataggtcctaaagttcagggaggccagaggtggggccaccacccctatggatgaatgaaggagtgtgggagtcatgcgtgctggaagcacatatctttccctctcctgaacatcccaactccagaaaaaggggtgtgcctcctcctggccatggagaaggtgaagccaacagctggaggtagaggctgagccaattccttgagccagtgaggggtgtgttggtcagctttcggtggtcaggctgcccaatggccactcagttttcaacccatgactgcctgcctgcagtctaggccatcaggggtgacccccagtcatatcagtaggctggtctgtctgttgggaggcccagggagtcagcaagtctctaaggatgtgtgggagcctccgtcagtcactccagagctctccatcagctggagaaaatacagcacaatgggtttgtcttgagaggggtggaggtggcagaagaagaaggatagtggggagggggtaagacaacaagatggcaaaggcagtgtagatggtagttgttgggcaggtggcagtattgctgatggtgctaatgttgccttggtgatgctggaggtggtggcagtggtgctggtgctggtgatgtaccagttgtgatggtgcagatggtggtgatggtggttatatggatggttacagtagtgctcatggtggtaacggtgatgccagtggtggtggtggtagtactgggagggactggtgatgctggtgttggtgttagtgacagtaatgatggttattgatggaggtactagcagcaacgatggaaatggtagttaatgggtgctgtaaatggagtgaggtggacagggatcagccccctcaccagcatggatcccccatgtcagaggcacagggagagcttcaggttagtcttggaggcccctggatcctggcaagtccaacttgtcctcccttaagccatcccatcattctgtgtctacctctgccccagccagctcagccatagctggggaagcaaagagactaggatagaggagcttaggccagccgccagcacgtgaggatctgctccagcccttcctggggtccatagtaccagcggagatctcagggtccacctcagcccccagagacaccagaagcacgggccacccacagacgcaaaggctaaggagctgccgcctcactcacagacgcacacacgccgccctatgcccagaaatacatgtgcacgtgcatgctcacaaacacgtccggctcgcgtcccatactgacaggctggacagtctccatgtgagaacgcgcacggacgggcacacacaagtgcacgcgccggccactcgagaatgcgctgccactcgcgcgcgcacgcacagggacgcgcacgcggctccgctaagtggaaccagcagaacccaaggccggccgagccaattggagactccttggccctggaagccctcgctgctgccgccaagagacgcggtcaattaacttctccctgcagccaggctctctgacccggcctgcccgcccctctcgccggtgcccgccccatgcccgacccgccttcttcctcccctgcctcctctgggtcctcccgcccttcacagccatgctcggactgcagggccccggccccgccttggcgcgtctgaaggatgcagctctgccgcggagctgaggagacgtagccttctggggtagggatggagggggtcgtctcaggggacatacccctgcccaggggtctgaggaaacacgaccctgaattaagagggatggggctgagggcttcacagccccgccctggggaggtttcagagaccgccttaacctctgcgggtcacattcacgggaatggctgggctaggcacaccaggctgctcccaagtcagaggacagaggctgagacccctcagcagccacctgctctgggtgagcctccacccgcatgatatttcatttcctttcttataatgaggccagtgagtcccggtgggtggcagccagggcccagggtgtgcaggttggagggaagggaaaggacattccaggcagagaacagcaggagtgagggcctgagtgtcatcagaactccgagtctggatggagggagctcccagataagcagtggaatgagagggactcccacccccagccagcaccagagtgcccagcccaacccaggccgcatgccaacagttcctccatcctctctttctctctcttgggattgtaaggaggggaggcattgaggcactcaccgttcactggggacagcattgactggggagctgggccaagatggaaactggtgactcccaagaccccccagggtgccaggacttgaaggactccaggctgggtttgtctccccacagttcaccactccttatccaccccctgcccccgactcatgtccccagcaggcagccaggatcctgtgtggatccatcctgggacattccattccagtcccatgtacccctggggaaaggactggacagagaatatcagtgactgcagcctacagggttactggcgggcaggcaggagagagcccctgctttttcccttcgatcaggcaggccctacccctcagagccacagcttcccatctgtaaggtgtgagctccatagagcagattccccacatgcaggggaaatcccaccttccctctagagtcagggccttttgaaagggggtagtccctctgggaaattgggatgtctctgggacctgctgctgcgccggaaagtcctgcctgtggtctgaccttcggcttggcaggtggatgcagatgacgtcatgactaaagaggaacagatcttcctgctgcaccgtgctcaggcccagtgcgaaaaacggctcaaggaggtcctgcagaggccaggtgggggtcaaaggaagagggtctggggatgaggtcaggtgagggaggggccagtcaagggcgggacccaggatacagagccaggtgaaggctctctgtgggggcggacttaggtaaagggggccaggccaaagtgagaaccaaagtggggtgcgtggtgcaagagtggagtcagcaggctcgggcatccatggcttgtcctaagtctcgagctcaggtccctgtgttgcccacaaccagcactcagactgatagctgtcgggttaatctcatcaactgaagaggcccagaccccaactgactgaaggagaggagccgcttcctcccctgacaagcccttagggttctgcaggggttgaggctggtgatcgcccagaacacaagcacacaatgacaaacacactctgtggcacacagattttgctcacactcacagagactcacatggtctctgcagtcacagccccaccgatgccagccccaacagtggctcccagtcacatcgagatctggggggtcagatgggccccctcattctgggtcctgaacccagcccctcttcttaattgtgaaagcctggaggagcctctctttgcccctcatcatccaccatggagcctctcgcttcctactgtaccccaccctgctacccacatccccacactgaggcccgagggtggaggcaggaaaatgagcacagtcattctcatcccagtccaggctgcttggactcagcttcccatcattgccatagacccgacatgtaaggaccaggggggcctagcttgggcggtggctgaaggaatacaagtcagaaaatgaggaagactttgtggctaggaagaaagacctctccagcctgggcaacatagtgagaccccatctctaaaaaaaaaatttaaaaattagcgaggtatggtggtacacacctgtagtcccagctataggggaggctaaggtgggaggatcacttgagcacaggaatttgaggctgcagtaatttgtgatcatgtcactgcactccaggctgggcgatagagggagaccttgtctcaaaaaaaaaaaacaaaacaaacaaacaaacaaaaaaaaaaaacgtccagcatctctccaatgagaagagaggccaggctccatctcagattaggcatctcaacggccactgtggaagctgtgaaccacatacttgaggatccagggcaggggatggggtggtcttctctgtccactcttgactgtaccaccttgctcttgtcttctcaccaccagcttctttacctgcacagcactcaggccagacttaattttcgctatgtaacctgtccattgacatcacccactctgtctgctttcaccgtgcgccccctggtggggccttcactgctgcgtggccttggcccccacccactcctgactcctgggtgggaggataccacctctgctctgtcttgcccagtttagtgctcaccccactagctgatcctgcactcccattccaaccctgggggacaatctccacctcctcttattacttcacctggcaagcactttacactttgttaaacacctcctcacccatcgtctcagatctcccaacagcctaggtgtcaccagggcaggagacaacccccccattgtacaaagggggagtctgaggccaaagagtaccctgggtctcctgttgtagcacagctgacagccatcattaccaccctggtttctccagccagcataatggaatcagacaagggatggacatctgcgtccacatcagggaagcccaggaaagataaggcatctgggaagctctaccctgagtctgaggaggacaaggaggcacccactggcagcaggtaccgaggtacgtctctgcttccatgcatccagctggcatgggcttggatccacccacccccattgcactgtccctctgatgtgagctcatgcttcttggctcttatagaaagtaaaaggctgcagccacatccccaggcaaggggctgggagaagacagagtgtagtgggaaggaaggggagctagatggctcaggcctcagaaagagatgaacagagaactctccagcaccacaccaagagtggacccagggctacggtcccacccatggagagaaagagagatgacagagaaccctgggggacagagaggcagggagagatacacaaagacagacagatagtgacagagaaagacggggagaggcatggagacagagatcaacagaggcagggagagacagtcacagagatagaggggaccaggaggcacacactgaagtctgggctcagtgtgtcagaggaggtacatggggacacatagtggatagggccacagaaatagagaaggagaggagggcagtggcagagggtggggccagaggcagtgggacaaggaggggagaagagaagggagggaagcagatgaggaaaggcagacagagcccaggctttggccacagggccggtttcagccggccgggtgggcagcagattccagatgggccacatctgggaggctgtggtcaccctgtggctccctggggaccagagggaattgtgggcctggctgggtggggctgggaatatggcgcccaggacagagagcctttcaccaagccagggcgggtccagccatcaaggcagccttccagggtggctggagagtcctgtggttggagccctacagagggagagaagggggctgcaagctgggagtggaatgtggaagatccagaggctggggaccctccaaggtcacttagcctccctgcagtgaggctggggctccaaagtgggatgtcaccctactttgaatcccaccattagcacttagatttggggaatcgatctcccccagcagtggccgtgggagtctcacagcaggtactcagggcaggcattgagtggtggtagaagcatgggccaatgtggttaatcccaacttcccaatgaggaaatggaaatagaaagacttgggacacctgcgtgaggtcagcagctccttggagtccagctggcactagaaaccagacctcctgcctcctgtccatgatcccaggggaaggggcacacagggagcctcccagctgagggagagttagtctgggtacttgcccttcttcagagacacctggaaggtggttccaagagcagagagaaaggcgagaggcctggcctggggctgagcacttgaagaggacagggccctgtgttgtatgacctcagcaagttgcctacctctcttggcctctgtcagcccatctggaaaatggggccagtgccagtacctgtatcgcagaggccatagtaaattctatgaggtgggtacagcccacagaaatacattttctccagagtgctccaaagcctgaattttcctgcttggggcacacctgtccctgcaggaaccaacaaccactgatgggccgggtgcagtggctcatgcctgtaatcccagcactttgggaggccgaggcaggcagatcacctgaggtcaggagtttgagaccagcctgaccaacatggagaaaccccatctctactaaaaatacaaaattagccaggcatggtggcgcatgcctgtaatcccagctactcgggaggctgaggcaggagaatcgcttgaacctgggaggcggaggttgcagtgagctgagatcacgccattgcactccagcctgagcaacaaaagcgaaactccgtctcaaaaaaacaaaacaaaacaaaaacaaaaacaaacaaaccacagatgtattcatccttctgggtcactaatcatggccttgactctcccttggtatcccctaccctgtctgtctctgggcacagggcgcccctgtctgccggaatgggaccacatcctgtgctggccgctgggggcaccaggtgaggtggtggctgtgccctgtccggactacatttatgacttcaatcacaaaggtgaggcctgctggaaggggtggggattacaaggaggctgagacttggagctaggggttcagtgcctcgagacctccctgccggccctgacctcccatggacctgcaggccatgcctaccgacgctgtgaccgcaatggcagctgggagctggtgcctgggcacaacaggacgtgggccaactacagcgagtgtgtcaaatttctcaccaatgagactcgtgaacgggtgcgagcctttctcctccccaacctgaccaggataaattcactcccaccccacgggtgacccctgacccagccctgacccctgaccttgactcctccagcaaccttaccctggcctcttgctcttaccctgatgctctccctgggtcccagggctctgactgtgtctccccccgccccgcacaggaggtgtttgaccgcctgggcatgatttacaccgtgggctactccgtgtccctggcgtccctcaccgtagctgtgctcatcctggcctactttaggtgggcggggcggggcgagaggcggcgggacatggtggagggggggcggtggccgaggtctgatgcgaccccctccctgcacccatcacccccggcgggtgtccctacctacggcgcacaacccagcttcctgtccacccaccgcgcgtccccgtgcccccacccacggtcatgtcgcgcgccccgcaggcggctgcactgcacgcgcaactacatccacatgcacctgttcctgtccttcatgctgcgcgccgtgagcatcttcgtcaaggacgctgtgctctactctggcgccacgcttgatgaggctgagcgcctcaccgaggaggagctgcgcgccatcgcccaggcgcccccgccgcctgccaccgccgctgccggctacgtgagtacccctctgcccgcccgctcccggtgccgccactggcctcgtggggccccgccccgccccgctccagcccggccctcgccctgcccgcctcctgccagcgccactggcttcagccactcaaacccgtcttatagggtccctcgcaaccctcagctctgccgccgaccctgctgccaagggctccgagtgtcccacacgccccgcgctgccatcaaggctcctacctcaacccagtaccctctagccactctacctcttcactttgcctcctgcccctgacaccgcatccccctgagagagccccccaaacgaagcctgccccttcctggcctgtttggccggcaccacttgtcctctcctgccgccccagccccccagcccagccctgacttcccggaggcaggccctgccctctgactaacaccagctggtctcttaggcgggctgcagggtggctgtgaccttcttcctttacttcctggccaccaactactactggattctggtggaggggctgtacctgcacagcctcatcttcatggccttcttctcagagaagaagtacctgtggggcttcacagtcttcggctggggtacgcgggcacagcgggtagcgaggtgccggcaggggtgggaccgtgggtgacagggagagggcagcccctggggggaggcgcccacacagcacatcccgccccaagtggaacagcaggagagaggcctgccgcccttctgtgatcctgaccctattccaggctcaggaaacagcagggcttggccagggatcaggttcacctgaggttagattcacctgaattgaggctcggcccaggagagggaaaggaggaaccatcaggccaagattcagctcaggatcagagtaggatactgggtcagaggtcagcctggggctggaattgggatccgggaccctccctctaccctgagccccatggactaggccagcatctattaccccaccagtccccttgctgggatggggcgcggggctgcccacaccattgccagcctcagcaggcctgcggggtccatggcccagagccgtgggcccagcacctcagcatcacctgagcttcacagcacctctgcagaatgggttgctggagctgcgcactcctcccagccccccacaggctctgggatccagttaccgataattgtccattattgttggcagctgcagagcttggctgggctccgggacaactggccagactgcagaggggtgggccgggtggctggagccctctccgcactcagcacccagaggcccacaggtcaacagccaccgcctccctgcccctcgacatacatcctgaccctgacctcaccatgacaagccccagagttggggagacctgggcccagtcccaggaacagatgcaggctctggggctaggaggtgtcctagtggactggcgacatgcagattgggagtgcatagaatcctggggcacaggaatgtcacagctctttttcttaccgtaaagccaggtcataccctatccctccaagggtgtaccaggcctagagtcaagttggtggtatgtggtcggggaggacctggggctcccttcccagaggcacagctcacccaaatataccatgtgccccttgagctggcgcaggccaggacatactgacacaccgaggtctccctgtggcctctgcttgggacaaaacctctcaccccatccagtctcatccacgagggctaggacctttcaaaccaggttgtggggggtgctgtgctggggcaaaaaaaaatgcggaaaataggctgtctccccatgggagctgcaagtccaaagcagtgccctctgcagagggagtggacagggcatggatcagttagtgataccttattattatattatgccttgtaccccatatatgtgcatatgacatggagccaagatgagggcagaggctgagctgggttttgagggctggagccccaaggggaagctgttagggcaccacatggcagagtgtggctctgtcaccaagtggaccaagtgcccagtgtcaggggttcagggcaatggtggggtaagctgggggtcatcgaggatgaggggggaatgaccttgtggacagcagccacagtcctgcacactgtccccctctgtgcccacaggtctgcccgctgtcttcgtggctgtgtgggtcagtgtcagagctaccctggccaacaccgggtaggtccaggtggagaaggggcccaggcaagaagcacccctgggtcccttttcttccaggaagcatgtgagagggcctcctgtaccctggcctcaaacggcccagcctcaggagttctcagtccagcctcaagccaggagcaccctcagggtcacaggaggctacttccaaagaggcctgtgagggaggcctcaggcctggccacacccagcacccctgccctgtgtcctcaacagctaatgtcagaccagaccaaatctgggtctctgtgggcagtcttaggatgggaacaggagggatgggagctaatgcctcaacctcccccaggtgctgggacttgagctccgggaacaaaaagtggatcatccaggtgcccatcctggcctccattgtggtgagcaggggtgggctgctggccacaggggtgggtgggatgtgcgcctgcgtcccctggaaccagcccctgacagggacctaggaggcttccctggaccccagtgtcagagctacagaggccggaggaccagctgatccacactccagcccagaaaggaaaaccaagggctcaaggagccacccagagatgcagtgacagagcagagcctatggccgtggctgccaggccttgccccgccccactagggtgcagcctccagacgcagccccctcactcccacagctcaacttcatcctcttcatcaatatcgtccgggtgctcgccaccaagctgcgggagaccaacgccggccggtgtgacacacggcagcagtaccggtgagcccaccatgcctgccatgccctggctcctcaggggtccctgagtcctggtaccatgtaccccaggaaagacagtggccccatgaatgatcctggggcaagggaaaggacccagcgtctgactccctggctgtcctcacccacctggcctgcccagcagtgatgggaggccctagggcaccccaaagccagcctgcccacttgtaccaggccctgcactagagctggagtctgtgagtgtgcaacgaacttgaacctctcctcaaagagttggttgcagggggtctgaggaacaggtaggcggtgagtggccccgggaaggctgcagctcagctgaaacctgaggagcggactgtgggatagtgaggttcgaccgtggaggggagtgcttgccagctgagggctccacaggtgcgaagggcccagggacagggggactgtcatttgaagtccgctccgggacaccgctgagaaccaacgggccctattagcacttagccaggacagcagccatgcaggtgaactgggttgtcctcccatggtgactggagccctgggcccctttgagcttccggagcctggggctcgcagggtggggggtggtacaatgcttgttgaaggggaagtggcttggccctgacctacctgccccgctggcccaggaagctgctcaaatccacgctggtgctcatgcccctctttggcgtccactacattgtcttcatggccacaccatacaccgaggtctcagggacgctctggcaagtccagatgcactatgagatgctcttcaactccttccaggtgcgcagtgctggcccgggcctggctgagggtgggaggggttccgggggcaggcctgattcgagacacccctcttcacagggattttttgtcgcaatcatatactgtttctgcaacggcgaggtaagcaggagacagtgttggcatagggcagggtggggcagataccccagaggcttcctcaaggctcatttctccattcttccaccctgttatttctttgttcctccaagaacacccctgaggacattctgaaagcagagaagtctttccagatgatgcaggttcaggatgtgctaggatgtggggactcttcagtcactggcatagccaagtgtcttcccagccccatggttcaattatctgtgacccagattggaggactcagccacctttggggcaatttgagccttgtagattctgggtgtgtcggctgcctgtagccaaacaccctgttgtgaggatgggatttcacttggccttggagtttcccaggagtcccctattcccattttcattccgtgctgggtgtccaggggccgggatggggcatcgctggggttgggagacacacctgactgccgcacccttactgccccaaggtacaagctgagatcaagaaatcttggagccgctggacactggcactggacttcaagcgaaaggcacgcagcgggagcagcagctatagctacggccccatggtgtcccacacaagtgtgaccaatgtcggcccccgtgtgggactcggcctgcccctcagcccccgcctactgcccactgccaccaccaacggccaccctcagctgcctggccatgccaagccagggaccccagccctggagaccctcgagaccacaccacctgccatggctgctcccaaggacgatgggttcctcaacggctcctgctcaggcctggacgaggaggcctctgggcctgagcggccacctgccctgctacaggaagagtgggagacagtcatgtgaccaggcgctgggggctggacctgctgacatagtggatggacagatggaccaaaagatgggtggttgaatgatttcccactcagggctggggccaagaggaaaaacagggaaaaaaagaaaaaaaaaagaaaaaggaaaaggaagcggtgtgtggcttcctgtggcccaaactggggactcactccgagagggtggggctgggagccagggaaagctgtggcgggagggccatgagtcatggaggaatcctcaggtctcacttcagaatggggagggatctggggcctgtggtatccagcagaaagggcccagagtggctcaagtctgcaggggtcacacagcagccaagtggacccatgtggaaatccagcctcagcctccgttgctgccagctgtggagctgctctccacacttgtacctagaccccatgggggacccaggctcctctgggccaactcttctgactgctgcccccatcactgccacccagggctgctggcagatccctcgggtccctggccacacccccaagcctacggccctgccacagaatggacctttcctggctgtccagtggccactcagggagccctccacgcaggagccttagcatccacccgtgacctgacatgcctctgtgactgaggttgcagtaggagcaccaggccagcaggtgaagggtgggctgggtccctgctctggctcaggacttgtggggagccaggagtctgagcccagagggctggctgggcaggggcctgcaaggtgggacacatccattcactatgcatctgggacagtcactaagtgtcctcacctgacacccacctaccaccttactcacccccccggaccgtgccctctcccaccttgggccattcgtgggccccagagtggcacagagcccctcagcccgacaccctgaggactgaccctacagcatgcccaccccgggctctggcctgaacgagcttcttgctcttgctccagcctaaagacagccccgcacgagccctgccctgccttcccatctcccgctcagcccgtcttactcttctccacggactcggcatccaggagtgcacctcatctccagcagcccacacacaccccatagggcataggggaggggtcaggaggcccaagacaaaaaactcaggtgggcgttaggaggtgtgggtgcctgctgagcagccccacacccagccctgcctgcccttccagatgacggacaggaccaaaggctgtccaagggcctggtgcacccgtggagctccatgcaatggttgagggaggcataggccagtcttgaagggctgcagagccaggctgggagccactggaagttcaagagggagagcaacaaggtctgaatgtttaaaaagtccccacagcaatgtggagacgagaggaggctgcacaggggttggagaagaggtggcctggcaggaggcgggtggcctcgcagggagatggtgacagggagggcagcaagagttagctgggggaaggagacctcagcagggcagaccctcatcctcctccccagggatgtccgatgccactctctagggtctgaactgaggtttctgaagtaataagccaatgaggcccactcacctagaagcattcagactgggcaccccgcaacagggctgtggcttccccctcagactgggtgcccccccaggtggaggtgggcctctcctctcagattggattccctctaggacagggtttggtctcttcctacaaccagggagccccaatccccacccacaccccaggacagggctgtgtctccccactcagtctgagtaccccaaggtcagggctgagcctctgtctcaggcagggtgccccccagggcagaggtgcgcctctcctctgccctactgggtcaccccaagacagggctgtcacccccattagacttgtcaccatcttccctttagatggaactcccctccagatagggctgtccttcccctttgaactaatgcccccaggacatactgggtacccccatctcaggtttggtgtccccaggccagggccgggcatcccacaccagctggatgcctctaagaggaggactgccctgccctgaggatatctgcacccagggcagtgccaggcctccccctttagactaggcaccatttttcccctcagtctggatgtccaagacagaactggacctctcacctcagtccaagtcccctaggctaggaccagttctcttcccttagactaggagcccccaggccagggctggcctccactcagagaggcctcagagccccacctgggccatccaggtattggcagtggaagtggagccctcagcaggcctggcaggcaggcaggaccctgtttgccttgagcaggggctggatccaggtggtcacttctcccttcaaggccccacagcaaagccaagccacagggaacacgtaaacattagcagagctgggcggggtggtcagcagggtggagggcacctagagaccccaaatcctcagcccacttggctatgggatccggcaccttgcaggctgccccagactccaaggcaggccagtacagtggccagtttctgctcccacctgtcttgagcacgtggacggccccatccctcgctggcctgtctccctcagcccaggctgcgagaagaatcgctgaaggcccttggaaggaatggacctcccgggggtgctcgtccagccctggaacacaggcctagcctcaaggggaagctgagtggatgcaaagctcccagctcagaatagggtcgagctctgccacccaccacctgccagtccctgtcgagagcaaggactgagctgggccccaagtgcctggagtgggcaggctctgaggggccacaatcttcagccctcaccctgggaggtggccagagggggtgtggacagacaggaaagggggctgagttctctggaggttcaagagggacatgaccctgcccctccctccctgggatctgggaggacacagccctgctctgggggtctgaggggacatggacccatcctggggatctgagagtgcattgtctctgcgtggattcctggaagagctgtctggctgcagggacccgttgcggggggctggggtgagggggtacaactctctgtccctggttcctcctcagccaactccaggagaatgatcccagcccaaggctgccatggccaactgaaacaaaccttgcctgagggactggtcccactggctgggagggacagaggaggaagttactccagagctaggcaggggcctgagccctggctggctccaggtgtgtgctgtgtggctctgggcaagccaccttccctctctgagcctcaacttctcctcacaggtcaagcccctgctcaggcttcatgacctgagtggactcaggatcctacctcgctcctcaacaaggatagggacaggacccctatccttccctcaggcaggcgtgacagcctaaggacctcccccttagcctcaaatatgtctatttgtgtatgtctgtgtgtgtatttatatgtgtgtgtctgtgtgtatgtctatttgcatgtgtatttgttgtctatgtgtatttgtgtgtgtctatttgtatgtgtctgtgtacttgtgtgtatgaccggctccttccctcttcagtgccacgggcatgcaggcaatggaggccaggtgagggtggattcttcttgctccagcgtttttaacaggcagggcaggagcagccttggcatggcccggacactggcgcttgcccggaggccacagtcagacaacctgtccacaacaaactcatatccatacatcagcaagacagtggggcgtgttgggtgtcattctccatgtgcgagcgtttgtatgcgcgtgctgcttgtgtatttctttgtgtttgtgtacacgagtgtccatgtgcctatctatgtgtgtctgtgcttgtgtacctgtgtgtgtgtgtgtgtgtggccatgtgtgtttctatgtgtgtgtgtctggatatgcctgtatgtccatttgtatgtgtctgtgtcttctggcatgtctatgcgtgtgtggttgtaggtttgtgtaccagtgtgtctatgtgtgtatttgtgtgtgtgtgtgcatttgtatgtctatttgtgtatttctgtatgtgtgtctatttgtgtgtgtgtatctgtgtctatttgtatatctgtctgttatgtgtatatgtgtgtgtgtatgtgtctatgtttctgtgctggtgtacgtatgtctatctgtgtgtatttatatgtattgtgtatgtctgtgtatgtgtatttgtgtatttgtgtaaatatgtgtgtctgtatatgtctatttgtgtatgtctgtgtgtgtatttatgtgtgtgtatgtctatttgcatgtgtatttgttgtctatgtgtatttgtgtgtgtctatttgtatgtgtctatttgtgtgtatgtctctgtgtgtgtctatttgtgtgtgtctgtgtatttgtgtatgtctctctgtgtgtgtctatttgtgtatgtctctacgtgtgtatgtgtgtctatttgtatgtgtctgtgtgtttatgtgtgtatgtctctgtgtgtgtgtgtctatttgtgtgtgtgtggactcgtggtctaagaacgccgcctgtgggtggaatttggctcatagacatgtttggtttggcacctacagtattttcaacatcctgagccaacatttaaaaatcaggatatttcacataaaaattcagctttccaacttctcttaaaaattcagaagccctggcagccctgggcctgcgttcccctgaggccacgctcctcccgaactgtgcagggctgccctcctccgtgcaccctccatagcctcgcccacttgtctcgcccagcagtgtcttgaggatggctgagtttgtgaacccagtgtgtggtcacaactacgtgtgagcctggctgtcagggaatacgtgcatgagtggggtgtgtgtgcatgtgtgtgaatgtgtgtgtgcatgtgcaaagcaactctgtgtatgaggcaaacctgagtgtgtgcggtgcgtgtgaatgcctgcatgtgcgcgtgcgtgtgtgaagagtctgcgtgggggaacacgtgtgtaaaggcatggatgtgcacgtgtgtgtgcaggggagtggccatatttgtggctgtgtggagtgtgtgggccacagcggactggcatgctctgcccaggggcctcttccggtctttgagggggaattggattcccggcttctggctgggccgccttgcgggatttatttctgtctcagtgcccactggagtcctgagtaatgggaacatttaaagaaaaccagtaaatagatacagaaggggcaggctggctgggaaactcagcccagacacccctgcccagcccacagctgccagagcccctgggggcaggcctgagcccagggagaaaggagctccagcatgcgacagcaccccctcactctgtggggtgcccactgctacccatgcatgcccccaccacctggatggatggtccctgggtcaacactgggcatcttgagagcttccttggctccgagcagcagatgttcaggagattcaggggatgccagctcaggcctggcccaggggccaagaggacctgaccctccaggggtgccctttcccagccaggctacaggcattctgcccacacacaccctctgcacatgcagacgcacccacagttcaaggaggggagaggctgtgctgacctggcagggctgggcgggcactcgataccccacccggacctcacacacccggcagtgccttggaacctcatctgccaggacacggcccctgctgttctgggtctcaggctgactggaccccactctctggatcgtctctgatgagcagtcacttacaaatgacataaaccccacaggaaaggataggcgtgcgtcatgcggtggggtgacctgctttacagaagacccgctgctggcaggagctgtttggaccaacgcgccctgtcagggaccccatcggggatctcctgctgccccccagtggccatgggaggacatggggaaataaaagtcaacagctgcatggagttgctcatccacgtctgagtggactctgagggccccacgtggttcccagccagacagttatggggaagcaaggcctttcaactggtctgagggaaggggcttggatcccagcacagatctggagaccacctggaaggtcagctcctcgaaggcagaaccatcgtcagtcacagctgcatccccggatacagtgcccagcatgacatgggtcctcgggaagcatgctacactaatggcccactccccaggctcctgggggtgggcagcgctgtagcaagccctgggcccagctcagagccccatggagaggccgcctgaaggtgagcgggcatctcacatgttgaagcctccaaggcagtgaggggcttgggcttgaggctggacagtagttttcccttgtgacttcaggggttgtgcctatctctgatcccaagcccatagttcctcactgtggttacaaggccctgtcctggctggtgacctgcctggtccctgactctgcaagcccaggtgggact

SEQ ID NO: 622 - protein, 964 aa, Homo sapiens [sequence omitted]

SEQ ID NO: 623 - DNA, 1348 bp, Homo sapiens
  source
  (1)..(1348)
  CDS (201)..(1148)
agccaggagggcccccaccgctgtgttagggagatatggagtgtcccctattatgtcccaaagcttcagttgttgagatctaatgagttgcacacaacacagctgactgaagacatagcagcagaggtctataaagagatgtcagtcaatgtaacacatcttgtccatattctcaggtgaccaggagcaacaaccgagccatggagacgtgggtgaaccagtcctacacagatggcttcttcctcttaggcatcttctcccacagtactgctgaccttgtcctcttctccgtggttatggcggtcttcacagtggccctctgtgggaatgtcctcctcatcttcctcatctacatggaccctcaccttcacacccccatgtacttcttcctcagccagctctccctcatggacctcatgttggtctgtaccaatgtgccaaagatggcagccaacttcctgtctggcaggaagtccatctcctttgtgggctgtggcatacaaattggcctctttgtctgtcttgtgggatctgaggggctcttgctgggactcatggcttatgaccgctatgtggccattagccacccacttcactatcccatcctcatgaatcagagggtctgtctccagattactgggagctcctgggcctttgggataatcgatggcttgatccagatggtggtagtaatgaatttcccctactgtggcttgaggaaggtgaaccatttcttctgtgagatgctatccttgttgaagctggcctgtgtagacacatccctgtttgagaaggtgatatttgcttgctgtgtcttcatgcttctcttcccattctccatcatcgtggcctcctatgctcacattctagggactgtgctgcaaatgcactctgctcaggcctggaaaaaggccctggccacctgctcctcccacctgacagctgtcaccctcttctatggggcagccatgttcatctacctgaggcctaggcactaccgggcccccagccatgacaaggtggcctctatcttctacacggtccttactcccatgctcaaccccctcatttacagcttgaggaacagggaggtgatgggggcactgaggaaggggctggaccgctgcaggatcggcagccagcactgaacccagggcatccagtgcctggctctgccatctcttagctccagggatgtcgggttaataattctctcattttcagtcttggtttcctcgtgaattatgatgattgtgacaccctcagacttggaaggtctttttaaacactacatcagttctttctttctttctttctttctttctttcttttgttctttctttcgttc

SEQ ID NO: 624 - protein, 315 aa, Homo sapiens
METWVNQSYTDGFFLLGIFSHSTADLVLFSVVMAVFTVALCGNVLLIFLIYMDPHLHTPMYFFLSQLSLMDLMLVCTNVPKMAANFLSGRKSISFVGCGIQIGLFVCLVGSEGLLLGLMAYDRYVAISHPLHYPILMNQRVCLQITGSSWAFGIIDGLIQMVVVMNFPYCGLRKVNHFFCEMLSLLKLACVDTSLFEKVIFACCVFMLLFPFSIIVASYAHILGTVLQMHSAQAWKKALATCSSHLTAVTLFYGAAMFIYLRPRHYRAPSHDKVASIFYTVLTPMLNPLIYSLRNREVMGALRKGLDRCRIGSQH

SEQ ID NO: 625 - DNA, 1251 bp, Homo sapiens
  source
  (1)..(1251)
  CDS (201)..(529)
  CDS (634)..(1051)
taacattggatttacatttaaaccatttaaataattttttacaccaggaaatttgaattcctattatgtagatttgtttgcaaacctgtgaaatcatagtgaatattacataaaaattgactaactcctttttaaaatttgttttgacaatagatagagtacacttgattctatttcaagtgctacaaaataagcagatgatgaaaataaatgacagctcaggggaagacttcatcttagttggcttctcagaatatccccaggctgagttcatcctttctctgtttgtctccgggttctacaccatgacattcacagggaacacagccatcatcttggtctctctgctggactaccggctccgcaccccaatgtacttcttcctccgaaagctctcatttctggacatgtgtttcaccacctgcattgtccttcagatgctggtgaacatctggggagagagtaagaaggtcagctatgtaggctgcatggttcagtattctgtagccttggctcttggctccacagagtgtgtgcttcttgctatcatggctgtggaccgttatgttgccgtccgctggccccttcactatgttacaatcatgcaccaacagatctgccactttctcgcagccttgtcctggttttctgggttagccaactctctctttcactcttcactaaccaccattttgcctctgtgtggccaccgccgtgtggaccatttctttgtgaggtcctgctcattgtcaagctgtcctgcgtggacaccggcccaactgaattgaagatgttaattgctcgtgtgatcatccttgcccttccagtgtgcaccatcctcacctcctatgcctgcattgccagggctgtgctgaggctgcagtctgctgaaggtcagcagaaggcctttgggacttgtgcctcccacctgatggtggtcttgctgttctatggaaccatcatgttcatgtgtcttcagctgaagagtaactactctcagattcagggaaagctgcttcctcttgtttataccattgctgcccccacctagaacccactaatctatgcactgaggaacaaagttgtaaagagggcaattggaaaattgatctggaaggattcagtttaagaaattacgatccctggaatttgtgtcatagaaattatttggagagtggattaatggcaggaaggataattttcagatttcagcccaaattgattgacaaacaaatgaagcaagtactaaat

SEQ ID NO: 626 - protein, 248 aa, Homo sapiens [sequence omitted]

SEQ ID NO: 627 - DNA, 1741 bp, Homo sapiens
  source
  (1)..(1741)
  CDS (201)..(1541)
tgaccatccacgggattgacttggattgccactcaagcggtcctctcatggaatgttggtgaggccctctgccagggaagcaatctggctgtgcaaagtgctgcctggtggggaggactcctggaaatctgactgacccctattccctgcttgggaacttgaggggtgtcagagcccctgatgtgctttctcttaggaagatgaggactctgaacacctctgccatggacgggactgggctggtggtggagagggacttctctgttcgtatcctcactgcctgtttcctgtcgctgctcatcctgtccacgctcctggggaacacgctggtctgtgctgccgttatcaggttccgacacctgcggtccaaggtgaccaacttctttgtcatctccttggctgtgtcagatctcttggtggccgtcctggtcatgccctggaaggcagtggctgagattgctggcttctggccctttgggtccttctgtaacatctgggtggcctttgacatcatgtgctccactgcatccatcctcaacctctgtgtgatcagcgtggacaggtattgggctatctccagccctttccggtatgagagaaagatgacccccaaggcagccttcatcctgatcagtgtggcatggaccttgtctgtactcatctccttcatcccagtgcagctcagctggcacaaggcaaaacccacaagcccctctgatggaaatgccacttccctggctgagaccatagacaactgtgactccagcctcagcaggacatatgccatctcatcctctgtaataagcttttacatccctgtggccatcatgattgtcacctacaccaggatctacaggattgctcagaaacaaatacggcgcattgcggccttggagagggcagcagtccacgccaagaattgccagaccaccacaggtaatggaaagcctgtcgaatgttctcaaccggaaagttcttttaagatgtccttcaaaagagaaactaaagtcctgaagactctgtcggtgatcatgggtgtgtttgtgtgctgttggctacctttcttcatcttgaactgcattttgcccttctgtgggtctggggagacgcagcccttctgcattgattccaacacctttgacgtgtttgtgtggtttgggtgggctaattcatccttgaaccccatcatttatgcctttaatgctgattttcggaaggcattttcaaccctcttaggatgctacagactttgccctgcgacgaataatgccatagagacggtgagtatcaataacaatggggccgcgatgttttccagccatcatgagccacgaggctccatctccaaggagtgcaatctggtttacctgatcccacatgctgtgggctcctctgaggacctgaaaaaggaggaggcagctggcatcgccagacccttggagaagctgtccccagccctatcagtcatattggactatgacactgacgtctctctggagaagatccaacccatcacacaaaacggtcagcacccaacctgaactcgcagatgaatcctgccacacatgctcatcccaaaagctagaggagattgctctggggcttgctattaagaaactaaggtacggtgagactctgaggtgtcaggagagccctctgctgctttccaacacacaattaactccgtttccaaatacattccagtgtattttctgtgttgttcatagtcaatcaaacaggg

SEQ ID NO: 628 - protein, 446 aa, Homo sapiens
MRTLNTSAMDGTGLVVERDFSVRILTACFLSLLILSTLLGNTLVCAAVIRFRHLRSKVTNFFVISLAVSDLLVAVLVMPWKAVAEIAGFWPFGSFCNIWVAFDIMCSTASILNLCVISVDRYWAISSPFRYERKMTPKAAFILISVAWTLSVLISFIPVQLSWHKAKPTSPSDGNATSLAETIDNCDSSLSRTYAISSSVISFYIPVAIMIVTYTRIYRIAQKQIRRIAALERAAVHAKNCQTTTGNGKPVECSQPESSFKMSFKRETKVLKTLSVIMGVFVCCWLPFFILNCILPFCGSGETQPFCIDSNTFDVFVWFGWANSSLNPIIYAFNADFRKAFSTLLGCYRLCPATNNAIETVSINNNGAAMFSSHHEPRGSISKECNLVYLIPHAVGSSEDLKKEEAAGIARPLEKLSPALSVILDYDTDVSLEKIQPITQNGQHPT

SEQ ID NO: 629 - DNA, 47804 bp, Homo sapiens
  source
  (1)..(47804)
  CDS (201)..(1022)
  CDS (1093)..(1208)
  CDS (1871)..(2040)
  CDS (3227)..(3386)
  CDS (3492)..(3698)
  CDS (5159)..(5424)
  CDS (5651)..(6504)
  CDS (18486)..(18612)
  CDS (19045)..(19140)
  CDS (25901)..(26126)
  CDS (26658)..(26848)
  CDS (30445)..(30482)
  CDS (37501)..(37634)
  CDS (38681)..(38889)
  CDS (46474)..(46682)
  CDS (46867)..(47604)
  modified_base (7478)..(7577): a, t, c, g, unknown or other
  modified_base (17033)..(17132): a, t, c, g, unknown or other
  modified_base (24561)..(24660): a, t, c, g, unknown or other
  modified_base (33542)..(33641): a, t, c, g, unknown or other
  modified_base (41424)..(41523): a, t, c, g, unknown or other
gctgttaatcactctaatgcatgcagagaaacccagtttccaacaatccccatcctaggccagacacagctttaaatggaacatcccctgctgctcccctgtctgccctaatccctcctagggctgcctgtccctgcggaccaccccttggtgtgaatcaagaaaacgtgctttgccctgggcctgactaggacaggcagatgcagctggatgggctgcaggccctctgctgggggtccttgttcaggacacagcttgtaccagtatatgtggcggtcctgccctctccccagccctgcatacctcccacctgcacagcattcacggaattctcaggcccactcgcaaaacaccacagcttccagcctttccaggtggctgctccagctggccccaggtccccaccccaacccttccatctcccatctgtgtcccaggtccatgccacacaccttctgtgccccgtccgtgtcctgggccccccttaccctccctctcttgagttactgacctccatccacagcccagctgtccttcctgccccacagataccccagatcagctatgcctccacagccccggagctcagcgactccacacgctatgacttcttctcccgggtggggccacccgactcctaccaggcgcaggccatgggggacatcgtgagggcactgggatggaactatgtgtccacgctggcctccgagggcaactatggcgaaagtggggttgaggccttcgttcagatctcccgagaggctggtgagctgggggctccgaggcaccaaggagtctacatagtgtgggcccggggccctcagttggggcagaagcacaaagatggggggcccaggtccatgctgggccgaggttgcctggctggtgctccatgtgggcgggacctttttgttttggacgactcagccctgcctcaggcttggcggagggtgcaggccagacttcacccctgcagacccttcagccagcctacacagtcttttgcagcggtggccaggtgggtgtgtgggtgggtgggacgaaagctgactctggcacccccaacgcccagggggggtctgtattgcccagtctatcaagattcccagggaaccaaagccaggagagttcagcaaggtgatcaggagactcatggagacgcccaacgcccggggcatcatcatctttgccaatgaggatgacatcaggtgggacagtggcacaatcaccgggcccctggggctctccctgagggtcccacccctcctcttgcacatcgccaccttacacactctccctgcctccctttcccctgctccccgcaccccccaccttccctgctgctgcctctgagtctggtgcccaggctcagaagcagcctggtctggggagatgccacaagcccagactgaatagcgcacagaacatgtgtctgtgtttacagctcctgggggtgcggggagggacctgtgggcagaacctagtgcagaaaatgagctgtgagggaaggagcccagggtccatacagaggctgcggaccccagcccgagacccaccggcccgagttcatctccagcctaggaggctgggtgtgacgctggtggaggcatgtggggaggggctggcttcgaactggattttcccccaaggagtccctctgaaccccctgaacagtgggttacagtgggcagagcaagtgggcaggcctagggtcagaggaaagcccagggaaggtgccctaaatgcccccggccccgtttttcctgagaaacaaggatctggtgagtgattatagagcaggggagatggatagagtgggaagggatgggggccgagctggaggaggctcccaggccctccctcaccccagccctgctcctaccaggcgggtcctggaggcagctcgccaggccaacctgaccggccacttcctgtgggtcggctcagacagctggggagccaagacctcacccatcttgagcctggaggacgtggccgttggggccatcaccatcctgcccaaaagggcctccatcgacggtgagtccaggggcactccatcccccaccccacacgtctccccagcaccccctcttggggatgctcattttctgcatctgtgtaattggtgccataatccagatcccttctcagatccccagatcctatgagtccgatcatctgtggacgcgtccctccaagcagcgcttgactgggatggcgtgcgaggaaagcacgctccactcactggacggggaggaattgttgggtttttggttttgtttcttaatttagtgcctgtatttctagtgctgccaaagacattctaatctgagggtgagggtgggagggagagaaaccaaggatacggaatataccatcctggtgatcagagtgatgaggcccctgcacccccagtcctacctgtggatctggatgaatccagcaggaacagatggctcactttacaataggattgctcattttccccaaggctggaccgaggacaccttgatgacatccttcagggctattttatgaaacacagaccctggaaaggctgagccctggctgctagggcctcttagccttagggggatatataccatcacgccttttatttcagctacgttgcatctgggtgcaggtggcagcctggactgagagtagttttagcgataaaggcatctcatcacaagacaggaggtctgagagttggtgactttaggcatggggcagtgagtgaatgcgctctcaaagccctgggctctgtccattcctttgttccaccattccctgtggttgccttgggtcttcctgcttatggtctcatagtcacaagatggctgctgaggctccacccattacatcttcacagcagcatcctaacaggaaagaaggagcagggataaaagtctttcaaatggtgaggctctgagtttgcatcagcatgtaagtgctaccctggaacctccagttggctctgagtccaccaatcagaacttggtcacctggccacgcctagctcacctggccactcctagctcacctggccacgcctaactcacctggccactcctagctcacctggccatgcctagttcacctggccactcctagctcacctggccactcctagctgaaagtgagcaagtggcagagagacacaggagaaacacagctggctcaggtcagcgccaccctcccccttcttccctgtctgtaggatttgaccagtacttcatgactcgatccctggagaacaaccgcaggaacatctggttcgccgagttctgggaagagaattttaactgcaaactgaccagctcaggtacccagtcagacgattccacccgcaaatgcacaggtgagagctgcccagggtggtgagggtggggagggtggggagggtggtgagggtggggagggggaaggcgggaggccgggttcggtgcatgggggccgggcacactttctctgggcatccctaggacaggcgaggaacgcatcggccgggactccacctacgagcaggagggcaaggtgcagtttgtgattgatgcggtgtacgccattgcccacgccctccacagcatgcaccaggcgctctgccctgggcacacaggcctgtgcccggcgatggaaccctttaatggccggatgcttgtgcagtacattcgaagctgtccgcttcaatggtgagtgggtgcctgcccccctgcagcagtgaaggacagctggggggctggattttgctgttaggcctgggacaacctcagggtggaagggctgggtgaggctgagtggtctaatgggggtgcctggggctgagtgccaaagacatgagacaagttccggtccccaatttttaacactgctccctccccaggcttcagtgttccctgcgctggtttgcacagttcagatgctggggagcttctttgatcccttctgccaggaacccccagtgggtcacaccacactcccctccactgcgcagagcttgagggcatctggaccctgggggtgcacgtggggcacagttaagactgcgtggggcgcctacccagggacatgccgcccactttgagtcatgcgccaggcacaggcgtgggtctgacctgtcccttggcaccaggcttggtgtgtggtcagggctcaaaactgtgttttttgaggagaccccagtggactcaagctctgtccacggtttgtggagagatgactttctgttcaatcactatcctttacacaattcaaaactccgctcttccactgaacactcactcaccaccttctttccggccatgctctctgctaatcaattccatttaatatgactccagagcatctctgcaagctggtggaacaagcttgtaagaaaaatagagctcattgttcaagtcattccaatttcatactgtcactcagacctctctccgtgtctgaactcatcctctcgcctggacagtgaaacttttttcatttttaattgtgataaaatacatataatataaaatgtatcaccttaaccattttttaagtgtagagttcagtgatattaaatacattcagtctgggcgcaatggctcactcctgtaatctgagcactttgggaggccgagacaggtggatcacttgaggtcaggagttcgagaccagcctggccaacatggtgaaaccccatctctactaaaaatacaaaaattagctgggcatggcgacgggtgcctataatcccagctactcgggagtctgagacaggagaattgcttgaacccgggaggcagaggttgcagtgagctgggattgtgccactgcactccagcctgggcgacacagtgagactctgtctctaaataaataaataaataataaattcacaatgttatgcaaccatcaccaccatctatccccagaactcttcatctatgaaaccataactctgtatgcattaaacacttccccatcccctcctcccgccagcacctgcaaccgccattccacggcccctctctatgaattgtctaccctcggtacctcctgtggtggcatcagacggtatttgcgcatgtgtgactggcttgtttcaccgagcatcatgtcctccaggtccatccattttatagcatgggtcagaactgccttccttttgaaggctgaatcgcatcccattgtgtgaatggccccgtcgtgttcgtccattcttctgtcagtggacgctcgggttgctttcatcttgtggctatgtgaataacgctgctgtgaacgtggctgtacaagcatttcttgccaccctgctttctagtctctcgagtatctacccgggagtggaactgctgggtcatgtgtttaatcttttgaggaggctccacactgttttctgcagcggctgcagccttttcccacccaccgtgcacaagggttccgacttctccacacgctcacaacactcgttattttctggttcttggctagaagccatcccaatgggtgaagggggatctccctgcggcttggatttgcacgtcccttatgagcagtgatgcttgttaagctcctcctttctcctgctggtccctggggcctccccaggaggccagctctgctgggctggaggaccaccgaggatgacggactctctctccaggcagcgcaggaacccctgtgatgttcaacgagaacggaaatgcgcccgggcggtacgacatcttccagtaccaggcgaccaatggcagtgccagcagtggcgggtaccaggcagtgggccagtgggcagagaccctcagactggatgtgagtgtgcagaccgagccccaggtgggcatgggcccaggatcccggaggcagacgccccagcctgtgttttgtgcgtcccaggtggaggccctgcagtggtctggcgacccccacgaggtgccctcgtctctgtgcagcctgccctgcgggccgggggagcggaagaagatggtgaagggcgtcccctgctgttggcactgcgaggcctgtgacgggtaccgcttccaggtggacgagttcacatgcgaggcctgtcctggggacatgaggcccacgcccaaccacacgggctgccgccccacacctgtggtgcgcctgagctggtcctccccctgggcagccccgccgctcctcctggccgtgctgggcatcgtggccactaccacggtggtggccaccttcgtgcggtacaacaacacgcccatcgtccgggcctcgggccgagagctcagctacgtcctcctcaccggcatcttcctcatttacgccatcaccttcctcatggtggctgagcctggggccgcggtttgtgccgcccgcaggctcttcctgggcctgggcacgaccctcagctactttgccctgctcaccaagaccaaccgtatctaccgcatctttgagcagggcaagcgctcggtcacaccccctcccttcatcagccccacctcacagctggtcatcaccttcagcctcacctccctgcaggtgggtccgtaggctcccaagggccagggcagggagggggactgtccgcaacgttacaaagccaaaagggccaggcacagtggcacacgcctgtagtcccagcacctttggaggctgaggtgggtggatcacctgagtccaggagttcgagaccagcctgggcaacatggcatgaccctgtctctgcaaaaaatatgaaaattagccaggcatggtggtgcgtgcctgtagtcctagctacttgggaggctgaaataggaggatcgcttgagcccaagagttgaaggttgctgtgagccaagatcgcaccactacaatccagcttgggtgtcagagtaagaccctgtctcaaaacaaaaagataaatgccgtttttagagtcactcttttctattttggttcctgtgttgttttgtttttttttttttagacagagtctcgctgtgtcgcccaggctggagtgcagtggcactatctcagctccctgcaagctctgccttccgggttcacgccattctcctgcctcagcctcccgagtagctgggactacaggcgcccgccaccacgcccgggtaattttttgtatttttagtagagacagggcttcaccgtgttagccaggatggtctcgatctcctgacctcgtgatccgcccacctcggcctcccaaagtgctgggatgacaggcgggagccgctgcgcccagtgagtttttttttttttttaaggccacaggaaatggagcccctcccctcctgtgacagcagctcagttagggccgccatctcccctgctgggtccttgaaggaaaacggggcagtcaggtggggagtgtgggcctccagagatctttctgtacaacagtgaagttattttttaaaccaaaatgctcttctacaatttggctcacatatggaaacaggtcaaagagctatctgaccggttttcctgtttccacaagggagtctctgctnnnnnnnnnnnnnnnnnnnnnnnnnnnnnnnnnnnnnnnnnnnnnnnnnnnnnnnnnnnnnnnnnnnnnnnnnnnnnnnnnnnnnnnnnnnnnnnnnnnntggattctctgcagtggtattatctgatatgacatattgtacttcaactgaaagattcccacaatcattacatttattaggtttctacattgtatgtctcatatgattattactgaagagttaatcatgaggtaagggccagtgaaaacattcctcacgtatgagttctttgatgtcgtgtaaggtttgtactccggctgaaggcttttccgcattcattacactgatagggtttctctcctgtatgagttctctgatgcactgtaagggatgaattcttaatgaaggcttttccacactgatcacattcatagggtttctcaccagtatgaattctttgatgttcaataaggtaagcactctggctgaatgcctttccacattcattgcactcataaggtttctctccagtgtgaatgacctgatgcacggtaagggatgatcgtccagtgaaatgttttccacacaccatacactcataaggtttctctccagtgtgaattctccgatgttgagttagagatgaattcttactgaaagcttttccacactcgttacattcaaaaggttttactccagaatgaagtctctgatgttctataagatatgtactttggctaaaggatttcccgcatttgttacatttgtaaggtttttctccagtgtgatttcgctgatgtagggtaagagttgagctcttactaaaggcttttccacattgactacactcatagggtttttctccagtatggcttctctgatgtacaataagatgcatgctttgactgaaggcttttccacattcattacattcatagggtttttctcctgtatgagttctctgatgaactgtcaaattcatgctttgggtaaaagctttaccacattcattacatttgtagggtttctctccagtatgaatcctttcatgctgaataagagatgaattcttatggaaggctttgccacactctttacactgatagggtttctctccggtgtgagttcgttgatggacagtaagattcatgctctgactaaaggctttcccacattcattacatttatagggtttctctccagtatgaattctttgatgtacagtaagggaggatcgttcaatgaagtgtttcccacatacattacacttatagggtttctccccagtatgaatcctctggtgcttaagaagggatgagctctgactgaaggttttgctgcactgattacattcatagatcttctttcctacaaacattctttgagttttaattaactcagaattttgtgtggcatcttctccatgtgaattacagttatggggcctttttaccataggaatgctttgctgtgtatcaaggattgaatcctgactggaacatctttcaaattcattacctccacatactctcatctcagtgaaggtttccttatgggtaactcccacttggctcagatgactatcctgttgtccctctaaccaattattaggttcccaggtttcccctagagtagaatgccagataccttccctttccattgttaccccatggcataaatcttcagtaatacccggcttcggagttggctctttggtttcaagtcttgtctcccagtctgaaaaaaaaaaaaaattcaaatgcacattggtttctgtgctaggagactggaaactgcataaggtaggaatgagagaattaaactagctatcaactaaaataactgctgagcacatttgagagctttcaaacatgtacccaaaattaggtagagaaataggaagggagagaaacaacagtgaactgatccaaagataacaggggaactgaaagcaggggatggcagatgtactgcataagcagagaaaagagtgagcccattcaggagggatggacagtgaaggcactgaccactggagtaggctacataatgaagatggaactaaggaaacacatgcagaagagctgggattgggaaaggcagatcaggaaaccctgcacactgtacctggtattcctgccagaagtttctttcctcctacgaggccacctagaatcctacaccaaattaatcttcctaaaatgtcacagtgtgacacaatgtaaagattgctgactcaaagtcagacaaacttggattcaaaccgtggctcttaacaccatcttaactagttacttgtctcactggctctgagggtcacagatataaaatgaggattaagaaatatggtcaagcccgggtgtggtggctcatggccgtaatctcagcactttgagaggccaaggcaggcggatcacttgaggtcaggagttcaagaccagcctggccaaaatggtggaatcccatctctactaaatacacaaaaattagctgggcatggtggcaggcgcctgtagtcttagctacttgggaggctgggatgggagagttgcttgaacccaggaggtggaggttgcagtgagctgaggtagtaccactgcactccagcctgggtgacagagtgagactctgtctcaaaaaaaaaaaaaaaaaaaaaaagggaaggggaaaaaaaaagaaagaattttgatttaggaagtaaataaaatgaaatatgataggaagtaagtaacataatctagggggtatagtttggatgtgtgtccccacccaaatttcatattgaaatgtaatccccagtgttggaggtggggccttatgggagatgattggatcatgggagtggtttcttatgaatggtttaacaccatcccccttggtactgtcctccctatcatgagtgagttcttgtgagatgtggttatttacaagtgtgtaacacctccctcctcactcttgctcttgccatttgatgtgcctgctcccctctcacctactgccatgactgtaagcctcctgagcccccccccccaccgtcaagcagatgctggcactatgcctcttgtacaggaactgtgagccaattacacctcttttcttataaatcacccagtctgaggtatttcttcataacaatgtgagaattgagtaatacagaaaattggtacggggaagtggagaatttctataaagatacctgaaaatgtggaggtgactttggaataactgggtaacaggcaaaggatggaagagtttggaagacccagaagaagataggaagataagagagagtttggaacatcttagaaactggttaaatggttatgaccaaaatgctgatagtgatatggacagtgaagtcttggttaaggtctcagatggaaatgaggaacttactgggaactgcagcaaaggtcatttttgctatgctttagcaaagaccttggctgtactgtgcccctgccctagggatctgtggaactttgaacttgagagaatggtgattgagggcatctggtggacgaaatttctaagcagcaaagcacacaagaggtgggttgtctgctaacaatctatgctcagatgtgagaacaaagaaatgacttaaaactggaactggtatttaaaagggagtaagtggaacatttgcagcctggccatgtggtagaaaagaaaagcccattttcagggaaggaattcaagcaggctgcagaaatttgcatgagtaaaaaggacccaagtactagtaagccaagacaatggggaaaaggcctcaaaggcatttcagagaccttcacagcagccccttccaccagaggcctaggatgactgaatggtttcctgggccaggcccagggcccggtgccctgcacagccttgggacactgctccctgcatcccagctactccagatccacccacggctgaaaggggccaggttacagctcaggctgctgcttcagagggtgcaagctgtaagccttggcagctttgatatggtatataaagcctgtgggtatacacagttgaacagttaaggcttgggaaactctatctagatttcagaggatgtatagaaaagcctaggtgtccaggtagaagcctgctgcaggggcagaggccacacagagaacctatactagggcagtgcagaggagaaatgtggcattggagccgccatgtagaatccccactggggcactgcctgtgagaagagggccactgccctccagactccagaatgtaagatgcactggcagtttgcaccctgcatgtggaaaagccagagacattcaactacaacccatgagagcactgcagggactgaacactgcaaagccatgtgggcagatctgcccaaggcctagggactccacccctcgcagcagagtgccctggatatgagatacagagtcaaagaaaataattttgaagctttaagatttaatgactgccctgatggtttctggactttcatggggcctatagcccctttcttttggcagagagttctcccttttggaacaggagtgttgacccaatgcctatacccccagtatatcttggaggtaactaacttgtcttttattttataggctcataggtagaagggacttgccttgtctaagatgagactgtggacttttgagttaatgttggaacgagttaagactttagggattagtggaaaggcaagattgtattttgaaatgtgagaaagacataagattgggaggggccaggggcagaatgatatgatttcatttggatgtgtgtccccacccaaatctcatattgaaatgtaatccccagtgttggaggttgggccttatgggaggtgactggatcatgggagtggtttcttatgaatggtttagcaccctccctcttggtactgtcctccctatcatgagtgagttctcatgagatctggccacttaaaagtgtgtagcacctccccctgccactctctcttgctcctggttttatcatttgatatgcctgctccccttttgccctccactatgactgtaagcctcctgaggcttccctacaagcagatgctggcactaatgcttcccgtacagcctgtagaaccataagccaattaaacttttcttataaattacccagactcagccaggcttggtggctcacggctgtaatcccagcgctttgggaggctgaggtgggcagaatcacccgaggtcaggagttcgagactagcctggccaacatagcaaaaccccatctctactaaaacacacacacacacacacacacacacacacacacacacacacacacacattggccaggtatgatggtgtgcacctgtaatcccagctactgaggaggctgaggcaggagaatcacttgaacccgggaggtggaggttgcagtgagctgagattgtgccatcacactccagcctgggcgacaagagcgaaactccgtctcaaaaaaaaaaaaccccaaaaataaataaatgaataaattacctagtctcaggtgtttctttatagcaatgtgagaacagactaacacagtatgtaaactaccctttgagaatatactcctctggaacataaagtaccagaacatacatgaaacttaaactcttaaaggaggatgacacaatctagaggtttcttccccttaaactttaagcaggctgtaatttattcacaggggtaagacagtcctaagggatactaccatttcctaaatacgcattccttaaagatgagaactggtggtagggacaggccaggggatctgctaaactgtttgagaggaggctggaaaaggaccttgtagctactcagacttgaattttcttagatcctatttcttatcccagacaaaataaggggtagaggactggcactgcaacctgagaatcagctttccgattgctgatcgaagtcaacagagagagatcaacactgaacaaacaaaccaaggcctatgggcacaggctttcctgtgaagcaagaaataagcattaaccaggcctctttcttccaacctgatctgcttaagtgaaaagagagaaaaagtggaaagacaaccaggctccacttccaaaacacatacaaccaagtaaccccaaacagaggaactggcaaactgagtatgaaaataccagcaggtggccgggcgtggtggctgacacctgtaatcccaaaactctgggaggccgaggtggacggatcaccaggtcaggagatctagaccatcctggctaacacggggaaaccctgtctctactaaaaaatacaaaaaaattagccgggcatggtggcacacacctgtagtcccagctactcaggaggctgaggcaggagaatggcgtgaacctgggaggcggagcttgcagtgagtcgagatcgtgccactgcactccagcctgggcgacacagcgagactccatctcaaaaaaaaaaagaaaataccagcaggtgacatgtgaattggcagctccctgttgcctcacctctgtacaggggtcagccagccaactcaagttctttgggaacatttaaggggctatgtattaaacaacataacaagcaaaggagaatccatttacactattagacaaatacaaagtccagacagaactgcttctatccaaagataaattatacacagaaaatattaagtttggaaactatgaagaagttcaggaaataaattttaaaaataattaaaacagagaatgagaagaaaaaagaagtataaagaccaaaagaagaaagaaaaatgttgggagaaaattaagtgcttctagtcatcaaaagacatcataaaaaaagataaaaagctgagtgcagtggctcgcgcctgtaatcccagcactttaggaggttgatgtgggaggatttcttgagaccaggaattttaaatcacctagggcaacatagtgagagcccatctctacaaataattcaaaaactaccagatcatggtggcgcacacatgtggtctcagctactcggaggctgaggtgggaggatcgcctgagcccgggagttcaagtctgcagtgagccgtgatcatgctactgcacttcagcctgggagacagagcaagatcctgtctcaaaatataaaaataaaaataaaagctaaaaaaatagaaactacctactgggagaagatatttgcaacacatgacccacaaaaaactagaatggagacttggaaaataatgcttatgaaacaccaagcccactagaaaaatgggcaaaagacttgaataagcacttaaggaaaggaagcctgaatggtctgcaaacgtaagcaaagatgcccaatctcaacagtaaccaagggaaagccgattaaagccgcaacaagatgccattaccacatccgcccaagtaacaaaatgtaaaaattcaaactgacagcttcagattttggaaagatgcaatagtgggaacttccacatactcctggtggaaatccaatctgattcaagcattggaaaaatagtttagtacagcctagagcaagcacatgggctgatacagcaagtctaccactaggtgcatgcacttagtaactccactagtaactccaccttgcaacagtgtgagaattcatgattcttcacacagcactgtgtacaacagcaaaaactggaaacatcacaaatgcccatcatcaaaaaatggataacaagatcgtcaagtgttcatacaatggagtaactgacaacagtgagcattaataaactaaagccacacatatcaatatgaatgaataagcaaaggcacataatatatatgtatatgtatatatgtgtatatatatgtgtgtgtgtgtgtgtgtgtgtgtatatatatatatatatataaagattcaatttaaagttttaaaacagaccaaaaccagatatattgtttagagattcaatgataaatggcaatagtataaagagagggaaaggaggtatcacagaagtcagaatactggttatatcttgggtagagagaggtaagaggatgtgaatgaggagatgcacacaaagcatttccatggcactagcaatgttctgtttcttgatctgggctctggtaactggatatctgccttattattattattattattttgagatggagttttgctcttgtcgcccagggtgtagtgcaatggcgcaatctcggcttactgctacctccgcctcctgggttcaggtgattctcctgcctcagtctcccaagtagctgggactacagggactacaggcatgtaccaccatgcctggctaattttgtctttttagtagagatggggtttcaccatgttggccaggctgatcttgaactcctgacctcaggtgatccacccaccttggcctcccaaagtgctgggattactggtgggagcccctgtgcctggcctgctttcttttttcttcatttgtctttatcattattaactaaaaagagaagcagaagggcacagtggttacgataacactaagatgaaacttcggacttttgagttaatgaactcaaaatgaactctggagctccaccactattagctgtgtgaccttgggcaggtttcttttttttttttttttgagacagagtctctctctgtcatgcaggctggagtgcagtggagcgatctcggctcactgcaagctccacctcctgggttcacgccattctcctgcctcagcctcccgagtagctgggactataggtgcccgccaccatgcccggctaattttttgtggttttagtacagacggggtttcaccgtgttagccaagatggtctcgatctcctgacctcgtgatccgcccgcctcggcctcaaaaagtgctgggattacaggcatgagccaccacaccttgcgtaggtttcttaacctctctgtgctctattgtccaaatttgttaaatggtacctatcttatagtgctgatataagaacaaaagttagttaataaagggcttagaagagtatgtaggtttttgttgaacagtcagattttacacattcttctgtgtatgtatttcaaaaatcaaattacaaaaagaacaaagtatttgctattctggaaaatattaatcattttaagttcaaacatatttttgtactacagaaaacttaatagtaggattcagtataccttcatggaatttagacttaaaagttagttttgaggagttgatgcttacgaaagaaaaaaaaaaaaagattacctacaaatttttaaaaaactggcagaagagattttctcaggaacacaggatgccgaaagacaatggggccatgcctgcaagaactgatgtgactcaagaactccacatggtcagcactccacacatgtgcagagaaaggcaaaacccagtcttaaatatgaagattcagtaataacagtactcctaaaccatttctgctattatttaaatatccaatttgaataaaaaataaacatgaatggggaagttagtttgggtataaaaagactggcagtgacatgctgaatccacttcaaggatgaacctcgaagatattatgctaagtgaaataagccagtcacgaannnnnnnnnnnnnnnnnnnnnnnnnnnnnnnnnnnnnnnnnnnnnnnnnnnnnnnnnnnnnnnnnnnnnnnnnnnnnnnnnnnnnnnnnnnnnnnnnnnngtctgaaggagataagctttgtacgcctttgtgattctgtacaggatgctcaattcagcatttctagagtatgaacaaagtgcaaacaacctaaacatccagtgctaggggagttacataaactagatcatctgtacactgaactactgggcagcatgtaaacagtggtgaccaggatgctgttatttgtataatgggattttatttttatttaaatatagaaccatatttgcatgaaaatcacctgaagagacatagcaaaaagttaactttttctggtggtagaaagttagatgagcacttcttgttgttttgcttattgatcttttagaattttctagtaagcttttttaagatgattcgttttgttttgttttttaagagacaggatcttactctgttgcccaggctggagtgcagtagtgtgatcacacgtcactgcagcctcgacctcctgggctcaggcaagccttttgtctcagccttctgaataaccgggactacaggcgcatgccaccacacccaattaattaaaaaaaaattattttttgcagagatgaggtctctctatgttgcccaggccggtcttgaacttctgggctcaagtaatcctcctttctcggcctcccaaagtgctgggattataggcgtaagccactgtgcccagccaagaagatgactctcaagaaggggagatggccctagttcagagcagtaacatgccatccagtgaaggaggagagagatagaagaacaggagcttttggggtggggagggagactactgaccatagccttctcctctggcttgaaaggttatgtagcccaccacctgggacctctcctgacacagccatgcctggaacattctcatagccttccctactgtgaatgtcagtgtcatctttcccaggactcatagagatggcccgagttgaggcagaactaggactcagtgaccgcctttcccagcaagcctggtggtgttccacctatatctccctcagtgaatgtgctggtgcctccttccgaaacctgactgtcaggtgtgacctgtaagatgagggtttggtctaggtgatcggacgtttccaaatctaaagttcagtgttttcttgctctgattttgtttcatgggttcaagtgcttctcttggttggcctctgtgttcaagcttcctgaggggacggtgtttcactcaccataggtaaatgataaatgtgtgcttggtaactgaaaagttgtccagaaacacttgaaatacttagaaccctaagttgtgacagggttgcttctcagtcttctcgttgtggggacagtcctggatgaacaggagtgggtttgccattccaggagtccgtgacgttcagggatgtggccgtgttcttcagccaggacgagtggttgcacctggactctgcccagagagccttgtaccgggaggtgatgctggagaactacagcatcctggtctcactgggtaaggaactttcctcctgatgcagaatctgccaggagagcaccttagcaccctcagggggcacatttggagggcttggccaggtcggctcacaggtgggctccaagagtggccattgccattccccttggttgtatggagagaccttggcttagtagagttgatgaaggggtcttttctctgcttttcctgtcttctgcccactgagctctgttccctgagccccacagggtgttcctgctgagaggagtgcacaaccagagccctgactttcttcctgggaccatctcctggttgtcctctaggagcccagtttgaagcctctcagaacaaacctcctccttccctgtactgcccctctgccctgggcactctggggctggacccgcctgctacgatggccgctcacgtttctttcttgttcatgaacagggattctcttttccaagccaaaggtcatctcccagttagagcaaggagaagacccctggatggtggagagtggagttccccaaggcgcacatctcggtgagtgacagagtaattgggagatgggcataacattttcccactgccagggcacagcgaggaggctgcgctcaagggtctccttgatgtgccaggccagggggaaatgctgggaaggtagatcctttctcttttgattacttgatccatcatgttcagaggagggttgaattctcccaatatgggttgcactgttttcagatatcttgtaatttgcagaatatgtaatacagtatatcatgtgtaaaggtttataattcttttatcttcctttatccttgcttttactggattgattcttttcctaaattattttccttagtggcttgaacattacattgtttttttttaatcactacaatacattcctcatagtttcatcttggaaccatcttttgctttgatttctttggtgtacaacttaattatacatggttcaaaagggggaaaaaagcagatatatgtgtatgtatttacatacatgaaagagggaaagaaggtgtgacaaacggtaacagttacggaatgtgagtgggcttccggatactcatcacgctattcttctcttttctgtgaaaatttagaaaataatgcatcccagatcccagctcctaaggcatgtcactttttccctatacgcccttggatgactgcattatcagcttccgcattcattctcctgtgaattctgtctatgcttctggcagtagaggaggcctctgttgagctttaccacgtgtctggtgtttttttctcacctgggcagggcgtgggctttctgggccagttcacttttgcgtttccattcgtgaactctgtcttcacatttttccctttggctcgactagaatattttcttgggtaacggttttcaaaaaaggttcatgtgtgcaatatctgtacgtgtcaaaaatcagttgtttttttctctcctctgagatttgttgttttggatctagaattctggcatctgtttttttttttttttttcctctctgcattgtccaaactgctccactgtctttgggcatggagtgctgctgacaaataatcccattagtcagattctatttcctgtataggtaacttgttttttcttttctgtcttctctttggaatcttacaggacatcatctttatctttggaattcagacttttcattaggttatatgaaagagtatttttttttctttgttctttggcactttactggcctctttgctttgaagattcagtccttcctttcatttcagggatcttttgtttctgccacattccaccaacaatgtgaggcaattgactgcaagagtagtgatacaataaaatagaaattcaatcagacatctagaaaataaatagatctgtagtaaggaccagaatggtagctataaatgagtttcaaatttcgctctgagctttctggttggcaaataaatcattggtatcacattgtcagtgttgttttacaagcatttttaaaaattaattattttaaatttgtacaaattctacatgctgttgtaaaaataggagcaaaaaaaagtcacctggaattttaccaactatgatcaattattgttgtttattacccattcaaactgcatatttgcttaaatgtgtttgtgtgtgagagacagacacagtgagagagagatacagaaagattgattatacagtttgttcttgatcctgttttaattgtgaatgtcattcagttattcagccctcagtgaatagaggcctacctcattgagaggactatattgtatgttaagccaattaaacagtcttccttttggaaattttagttaccagtttttctctgttactaatattgctaagatggttatgggaatacaaagccataatataaagaggcaaaggtaccaagagtaaatcatcacagtacaaagacatgagtattgtgattgaaaaggccaggcatgtggattaaaaatccacaagggattttttgaagcactattcaacttcattaaattaaaatcaatgaaattccaacgaagcacaagttaccatttttcccttattaccaaggattaagaaatagatacccaatgtgttgccactgctgtgagtgataagcagtatcgttagtgggactgcaactggtagtctttctgaggatggtctggttttattaaaatcaattccaagtgtagaaatgttaagataatttctgcacagataactgtgcagagttacaaagatgttgtaaaagaatgtttgttataacatgaggcatcactgccacaaaaggaggagggtaaatgactctcaaaaagggatttagtaaatgatgatgttttcatgcattggacatattatattgccattaaaatgatgatgtcagcctacatttattgacatggagagaagctcatgatttttaagtgaaatggaggtaaaggaagcttaatttcaatccattttaattttttaattaagtgattttttatatgcagaaaattctggtgagctatgtcccacatatgatagtgattacaattgcatgatgtatttatgggtgagctatgtgttcatttttatagttttctgtgtttttcttatgatgatatatttcttttgtagttaagaaaataaaagctgtttcataaaatacaaaaggaaatacatttcttttgaatcaatgattccatttcttgtactgtatcttaagtaaccaaaaaggtagacaaaaaattactctcaataatgttcttttctcccagtattccccaatatcatgataatggtgttggtgtccattgagttgcccagaccaaaagctaggagtcatccttgagtcccctctttcattgcctctgcgctctattcgtaggtgaagatacctgccagtgctacttgcagaacatcccagatacgcccacctctttccgtctcttatcaccacatgccagtgtcagccaccaccatcttcatccaggaagagtgcagcggcctcattgcctgttctgcagctgcccttgttctctttctccccggccccattacagtttgtttttcatatagcaaccagagtgatcctttttaaacaaaaaccacatcatttcatgtcccttctagccctcagtgatgctgatgaacttccaatatcttcctgtatcctagaaaacgctccacaatatagcctggcccacctcttttcctcatctgtgacactctcttcttgttcactctgcttcagctatcatggactgctatatgtcctggaaaacaggaagctattcctgcctagggcctttgtgttactgttctttctgactggaatcacctttataccctaatttttgtctggccagcgcttgttatttagatctcatctttaatttcattttctcatcacccagtttaaaatagttgcctattcactcttattacacagtgcttcgttcgtgttttcttacagttctcattgctcctttgtactgctgttgatttgttacttggtcattgtctgtatcacactgctggaatgaaaaccttgagagtaggcccttgtctggcttgtgccctgtcattctcagagtcttaacgtttgcgtagcacacagtaggcactcagtaggtattacttgagtaagtggatgccattatttacagcattctgaggaggcctagagcagcactgcttgacatcctgtgtttggcggagctcttctctttcatttaattttagcccctctgcagtttttcccttggtatttacctgagtgcactggtagctgccctgggagatgacgctgagggacacaggctgtgttcagaagggcctcatagcctagcgagctgtgctttgttaatagatcgagcctggctcttcctgttgtcccctaatttcctcagcccacctatatgtaggtttcttcagacccttcccacccacatgtctgtcatcctgcttccttcctcctcttctttttcccatccttttctaagatttcaaggctttatattttttaactatccttgtgcgtttttatgtcactttttaaaattctgagttcaagagagacttatatgttttgtctactttaggatgggaaagcttgtttggaaccatagtttctaaagaagaaaatcaggaagtcatgaaaaaactcataattgatggcacatttgacttcaagttggagaagacctacataaatgaagataagttagagaagcaacaaggcaaaaagaacagacttttcagtaaagtgttagttaccatcaaaaaagtctacatgaaggagaggagctttaaaggtgttgaatttgggaaaaatcttggtctaaaatcatcgcttattagaaaaccgagaatagtttccagaggaaggagaccccgttcacagcagtattcagttctctttaaacaactgggggtcaacacagtgcgtaaatgttataaatgtaatatctgtgggaaaatcttcctccacagttcctccctgagtaaacaccagagaatccacactggagagaagctctataaatgtaaggaatgtaggaaagccttcagccaaagctcatccctaactcagcacttgagggttcatacaggagagaaaccttatatatgtagtgaatgtggaaaagccttcagtttcaccacatctcttattggacaccagagaatgcatactggagagagaccttataaatgcaaggaatgtggaaaaacatttaaaggtagttcatctcttaataatcaccagcgaattcacacaggagagaagccctataagtgtaatgaatgtgggagggccttcagtcagtgctcatctctcattcagcaccacagaattcatactggggagaaaccgtatgaatgtactcagtgtgggaaagccttcacttcaatatcgcggctaagtaggcaccatcgaattcatactggagagaaaccctttcattgtaacgagtgtggaaaagtattcagctatcactcagcccttatcatacatcagagaattcacactggtgagaaaccatatgcatgcaaagaatgtgggaaagccttcagccaaagctcagctctcatacaacatcaaagaattcacactggagaaaaaccctacaaatgtaatgaatgtgggaaagccttctcttggatttcacggcttaatatacatcacagaattcacactggagagaaaccatataattgtaaggaatgtggaaaagccttcagttcccactcaggcgttaatactcatcgaaaaattcatactggagaaaaaccttataaatgtaatgactgtgagaaagccttcaaccaaagctcagctctaattcagcaccagagaattcatactggagagaaaccatataattgtaaagtgtgtgggaaagccttcagacagagttcatcccttatgacacacatgagaattnnnnnnnnnnnnnnnnnnnnnnnnnnnnnnnnnnnnnnnnnnnnnnnnnnnnnnnnnnnnnnnnnnnnnnnnnnnnnnnnnnnnnnnnnnnnnnnnnnnntcattgtggggggctcgggccaggctggctacagagagaaacacttggaatgcttttggccatgcattagtgtcatctagataaccaggtgacaaaaatgcaacttgtacatcttaaaaactgggcacttttctcattttattttcagaaagacacactgatgaataattattgttaacaattttttaaggatagtgacgcggctgaggcaagtggatcacgaggtcaggagttcaagaccagcctgaccaacatggtgaaaccccgtctctactaaaaatacaaaaattagccgggcgtggtggtgggaacctgtaatcccagctacttgggaggctgaggcaggagaatcgcttgaaagaaagaaaaaaaagacagtgacatgtggtacacagggtggcagacggaacacagggagtgtgagtaccacccagtgctggcacctgcaaaggaccatcagcaccgccgagaggtccttgagtgatcagaaacaaccaagccttgcgttcttttcccttcacaaactgttacaaaaatatttaaattgccaaagatatatttagcaagagttgaggtgggccaagaagcagggagccctcccactgcgacacagatgggggtgagagattgacgtctccatgttgtactgccgactaagccagtgctacaggggagggtggggcaaagagcgaaggaaaggagaggaatcagataaggggaggctatggcgttcttggattaattttgaattaaattgttttctccatcaaaagcactcagtttaaagcaattttgttccaagactctgaggctcggccacagtaacctggaagcctgagtctgctgcagggacaaatgctgttctagaagcagttagtgaatatggaggaaggtaacgtcttagagagggcgctgtcaaagccaggcaaacaggcaggcagggagaaagaacccagatgacaaatcagtcagctggagatgaggggcacccggcaggagacgggcagaggaatctgaaaggggaaatccaaagcaactgttttttttcggtaacaaggaggcagtttcagtggctgttcccagaagcccatagaaatgaagaacctatcagtctagatgccaattcccttctcaaactgggcagagtggagctggcactgtgatgggtctcggaacgctccgaggtgggaggagaggccaggagctgcttctcaggctcttacctttttctatggcccaggtgaggggcggggagactggcctcatgtgaaggtcatggtcgtggtgtaccagagcagtcttgtgtactacatgaagcaggcgcaggctggacgtgtgaagacagagctgctgaaggtggcacatcaccaggtggccaagtctgtccctgaagagtcccaaatcgtggtccttcatcttgtcacagctgggtatgtcgacatggccattaggactacaagagcaaggtatggaatgaactgctctttctaggaaacactggttctttggggattaacccagctgaaggtggggcacagaaaactccctctcagtaagtactgaaatgtctaacaccacacagatcagctggtagagaagactgtggctgaaaaagtcttactgcagggtcctcagaaatgtacttttaggggttgagctggggcaggtgagaatgcccaggtagagagcagtatcatccacgtgagaaaagtatgcctgggactcaggcagtgtcccctcccctagtcgagaaggccgtgcagtgagctcgtcatcctacagtgtaatacagtaaagccactgcctggccaagtactagtaccatcaatatattcaagtcagcctgggcgtatctaataggccagtgacgtactttttgcctttccagacagggatgagtgaacaggcatctcggaggactgatttcatgaaaacccaagcctgatgagaggcgaactcagggagagtgcactgtcttctcagatgggggccttcagcctgcacttaatgccgctgacgctagttcctggagccgcggctgaggtgaatgagactcaagtggctgcacgccttggtcctggctcaacggtaggcacataccaagtagtggtagttctcatgcgttcattacagatagacaaaaccaccaaccaactcagcttagaaacgtgcttctcagggattcaaggtaagggggtggtagttaagacctggcacattacatggatggggtgaagacagacatctgtagcagtgaacgtggttttttcaggtttactctggaatctgagggtgtcagctgcgtgaagctgcagatgaacttctgaggacatgggacacaagcaatcccaagaaacctcttgaaatactgcttcacatgcagcttaatagggaagaaagtctgagttgctgatcagctaacaggagatgctggcccacaaaggtggcctttattagatgaaggctgaatttagattacttggactttgaagctgctggaagcttccaagtctatgttgcaacccagagcccactgagttctaccatgatatagaatatactcttctgtaacatgggggtgaggtgctccattctgaggggtcagggggttgctcaacttgacggacagcacttccacataccaggaacttgccacttcactttccagaaaaatttgcttggcctcccatcttcactgcatgatatattccagcttgcagtagtgaaggctcctccattccttgtggtaggaaaagggagagggccctcagaggctgtgtgtgtgtgtgtgtgtgtgtgtgtgtgtgtgtgatgcacagatgttacttatctgtgtgatttctactgaaagcactgaaggattaaagacggggaaggtggccgggtgcggtggctcatgcctgtaatcccagcacctggggaggccgaggtgggcggatcacaaggtcaggagtttgagaccagcctggccaacatagtgaaaccccaactctactaaaaatacaaaaaattagctgggcatggtagtgggtgcctgtagacctagctactcgggaggctgaggcaggagaatcacttgaacccaggaggtggaagttacagtgagccgagatcacaccactgcactccagcctgggcgacagtgcaagactctgtctcaaaaaaaaaaaaaaaggaaaagaaaaagaaaaaaaaaaaacagggtaaaggaaccatacttgcaggacgactgtaccactcaaacttttgaacacggacatggcccttgccagagaatatcaatggtgctagtgaccacttcttgactcatggaattactcaacatttttctcaccactgtcagcatgagtctttaaatagtggaaggcccagatggaggagaggaaatgaccacttccaaatgcaaaagcagaaattcaaagctgtctgctttcctatgaatatagaattactacctccagaaacctagaaaaagcaggggaaggaccaggatgcagcagtttatcctgggagtagtaaatgtactctaatgcagtggacacagtggactgtacagccaggggaagagagtgggtcagagcattctgagaactggccttggggctttcacctcttatatcaattgcacatagagaaatgggcagcgacagatggaggtgactgggaatagtacaacgtaagtgggtgggatcattgcacctgaagctgagcaagtccctgactgatgtgtagagtcactaagtacagaacaattggagggtaaaggcggcacaggcaaagcccctccttcaggtgccatcccaggatcagtcaagctgaagcccagaggaaatgcataactcaagaattttgatcaagttgtgccttctggacagagataccaagttctgaaggctggatttgggtgtgatattcaacatcatggactgtgtctgagaccagaccaccacactccccataggggcagtgataggtggcaccatgcagacagttaggcgttgctaagtcagaagagggtcatttggggcaaatgaatcgtctcacagggattctacagggatgaagccagcagacagaccagagagatctgacaatggatggtttgaagcaaaaggcaggaagcatggtttaaataagtgtgggtgacgtactttctctacactgggtgtcggtggtgtgggtgaggagaggactaaggcttccattaaagctggcaactctcttatgtaagagaatctagtagagtgcaacgctcgtaggccattttacctttttgttcctttgcttttcagctttaatttttacaatttcagtttctctaatagtcaaaatgtaatttgataaaccaattttttaatgctgttaatgaagctccattttggttctgatgcttggtaattcagacaaatcaaacagtactgctatttgaggcagtattaaagaatgaggagtgtttgccattcttttttttttttttttttttgagactgagtcttgctctgtcgcccaggctggagtgcagtggcacgatctcggctcactgcaacctctgcctcccgggttcatgccattctcctgcctcagcctcccgagtagctgggactacaggcgcccaccaccatgcccgggtaattttttatatttttagtagcgatggggtttcaccctgttagccaggatggtctcgatctcctgacctcgtgatccgcccacctcggcctcccaaagtgctcccaaagattacagacgtgagccactgtgcccagccgagtgtttgccattcttaaatgcccaaaccccatgacactgtgaaacctgaccctcagtaaataaagtgactatcttgatgcaagctttcatagttattctctagaacggattatctcacattcaataattcatctactcagtctcaaaggtcttccatacaaactgcattcatatcacttctctccaatatgatgtctctgatgctgaatgaggtttgcagtctggttaaaagctttcccacatttattacatttatagggtttctctcctgtgtgaatcctctgatgttgagtcaggtgagtgcttcggataaaggctttctcacagattttacatttgtaaggtttttccctagtatgaattctcttatgttgggtaagggctgaatggtcactgaaggctttttcacatatgttacatgtataaggtttttccccagtatgaattctctgatgttgggctagtgctgattggtcccgaaaggctttctcacacaagccacatctgtaaggtttctctccagtgtgaattttccgatgtcgtgcaaaggatgaattatccctgaaagctttcccacattcattacatttataaggtttctctccagtatgaattctctgatgttcagtaagggaagagttcaccctgaaggccttcccacattcattacattcaaagggtttctctccagtgtgaattctctgatgctgaaggaaacttgtactctgattaaaggcttttccacattcattgcatttatagggtttctctccactgtggatattctggtgtttggtaaggtgtgccctgcacacaaaggctttttcacaaatgttacatttaaaaggtttctctccagtatgtattctatgatgatgggcaaggtgtatatttcggataaaagcttttccacataagttgcattcaaaaggcttctctccagtatgaattttctgatggtacgtaagtgaggagctcactgagaaggccttgccacattccttacattcatagggtttctcgccagtgtgaattctttggtgatggataaggtgcgtactctggtgaaaggctttcccacattctctacattcatatcttttctccttaatatgaattttctgatttgcatttttttcattatgaattttctgatgtttattaagagttgaactcttagagaagacttttccacactcactacactcaaaggcatttttgctaggttgaaatccctgactttgatcactgtgaagagatgagctcatagtgctcccggattcatcacattcctgtgatggggtgttggggtgagtgagtaccactcgctgcaaactgatctcctggcctccacattgccactccagcaggctagcacacttccagtgactactgctactgaatctttcctttattgtccattgatccaattcttcttcaggaatctctgccttgacagtagatttcttactggcaggcatagtcatccagtctgaaagacattaaaaataaaaatgtctgttttaccctagcaaaacatttggatggggcaagatgacgagcctcttcataatgctaacagaaagatttcaagtttgaagattttctgaagtaacaacaagaaaggacagaaaagaggggtgaacagaggactacagcaggggttgatctcatgtataatgtatgaggcaggagagcttggaagcatgatcttagaagtcacaggtggctgggcgttgtggctcacacctgtaatcccagcactttgggaggccaaggcgggtggatcacgaggtcaggagatcgagaccatcctggctaacacggtgaaaccccgtctctactaaaaatgcaaaaaattagccgggcgtggtggtgggagcctgtagtcccagctactcaggaggctgaggcaggagaatggtgtgaacccgggaggcggagcttgcagtgagccgagatcgcgccactgcattccagcctgggtgacagagtgagactccgtctcaaaaaaaaaaaaagtcacaggcctgggttagaattgagtacaacacatattttctttgtgataatagagaagttatctgattttctaagcctcaaaaaaaagaaaaacctgataaagaccacatgatgctaacagacaagaagaaaagtaccctgtcgattcaaatgagatgatttttaaagccagccagatgtggcctaaagaaactgctgaaaatagtagtcgacacttggtaggaaaaaccttgactctagagtgaatactaaaatcaagatataggctcatttgagcattcagatgaataataaaaagctaggccgctgtacaggctgtgtgaaatgctcatatctactaaaaaaataaggacctcctattgcttgtgaggaagcaatgtctccaaacccatatgaataatgtgacacccatgggagggaaatgtgccatgagatattttgtggcaaagttatctcaggataaacgctgcagctgcaagcactgccggcaagtattctcagggcaaacaggagagggcctaaaatgtaaaactaagggctagattccaaacacagacgatgcagaattcacgagaaatcccatcaagaacaagccatccttattacctccttttcccactcgctgcagaaaatcttctacaaaaaggcactcctggtatcattttagaatcaaagaaacaaacctctttacttactaggaaaagaaaggtaaacaggcgcatttcaagactaaaatcctgttgagctcagaataatatatccttgttcaaaacaaagaatggtcaaagttaaacatcggtattgccaaatgtcaaaatgttaaggactgacttccacttctggcccaaatagagtagactgtggcagactaacatttctgcagaaaacaactagaaaatctgaattggaaaaagttatctgtctgaaggcatcagatgtcacccaggcagactttatagtctaatatttgggagagaatgaaaatatagagaggtgatcccaatactcagtggcttgttactcaaacattttattgaattcttaagctttacagggcaaaagattaaagttaagcagaaatccagaattttctagtcttttagtacaacagaaccaggaccttccaaggagaggtcataataacatgtgaagctctcagccgggactcctgcagggctacaaaactagtagtacgggcaaatgagcagttgacatagctttacaaatattgtgaccaacctccagctattacaggccttggctggactaagatggtttgcttgcactctagctgctaccagggaagttaaatcttctctggaagaacaacatctagagcctctgctctccttcacatatagtgtcagggatacaataaaaaaggccagctgtgctaagaaattcaatgaagagggaaaaacagacaatagaaaaagaaccgtagaacacagataccagagttatcagacgtgaaccttaaaataactgtgattaatatgttcaaggaaacaggaatgagaattacaacaaagaattggaaccaaataatcaaatggaaattctagaactgagaaatacaataaccaaaattatgaattcaatagtctttaacaagatatcaaatatagcagaaaagaggaatagtgagctacaaaaatacataagcagaaaatatccatagtaaaacatggctaaaaaactaaacattatttaaaaacaaaaaggttgaaaaatgaactctgagaagggctataaactccaaggataactacaaagaaaattcacctaggcacctcagctaggcactactgaaaactgaagattaccttgaaagttgcttgaaaaaaacaaatgatacactacctttgaaaaagcaaaactaagactggcagtgtcttaatgaaaacaatggaacccagaagacaatgaagtaacatctgaagcggtgaaagaaccgaactgtcaagctagaattcaacacacagagaaaatatctctaaaaattaaacttgaagtagatatttccatacaaataaaaacagagatggtgtcaccagcagatctacattaaaagaaacacagatgtgggnnnnnnnnnnnnnnnnnnnnnnnnnnnnnnnnnnnnnnnnnnnnnnnnnnnnnnnnnnnnnnnnnnnnnnnnnnnnnnnnnnnnnnnnnnnnnnnnnnnncctcctgagtagctgggactacaggcacgtaccaccatgcccagctaatttttgtatttttagtagagatggggtttcaccatgttgatcaggatggtcttgatctcttgacctcgtgatctgcccacctcagcctcccaaagtgctgggattagaggcatgagccactgtgcgaggcccatggtttaataataataaaacaaatacccacatacccaacacttgggttaccaaagagaaatttacccaaaatttggaagccttgttcacagtgctcccaagtcattttcctgagttgctttcagcattcctttgttttgtttgataattactccacatgcatgtgtccctaaacattgtttacttttgcaacattttaaatctttataaaaagacaacctgctatatacatacaatatacaatatgtatgtatataaaggtaatctgctatatacatacaatatacaattgtatagtttcaattgtacattgtattcaacttttatacaatatacaatatgtatgtatatagcagataccctttatataaagatttctgcatatatatgtgtatatgcctatatgtgtatatatgtatatatatcatgtgtatatacatgcatatatgtatcatgtgtatatatgtgttcaacacaaacacttttagattagtctaccttgatacatgcaaagttcattccttttcattactgtataggatttcattattgattcattcagcaacaacaaaaattatgttgaacacttatcctgtgcctagcattgtgccagattctggaaatacaccagtgggcaaaactggcaaaacctgtgcacaaatgcagcttgaattttactggaagagagagaggaaagataataagaggaataaatacgttttgagatagagatgagtgtgaaggcaaccaaaataattcactccaaaacatacttccctgacatatcttgagatggctattcagagagcttgcagacaggaatagtcctgaaaagctgtcttttgtagaggagacttgcatctgttgaggaaatgaagtgcagtcaacaacagatgtgaataggctttctctgaggctctcccctcgtccagatctgagaaagactaactgagagtctgacacctttgaaaatctggtgcaaactttaaccacgggctaccatttgctcttaggctgctacctgtgcagcttcatttgcataatgagtctaccttttcttcaggtctttcctcttctctccctcctataacccgccttagccgtgatccaagcccctgttcttcctgtaacttcaagatggtataaaaatatcaactaccttgcctttctttgagtttttgtatgttgtatcactcctgtgcttgtatgaactttaataaaatttgtatgcctttttttcctattcagctatgtatcattttgttttatagactcaaattatcgaaacttcaggggaaaaatttaaacttccctgtaagtgcaaacaagaatttaaaaagggaacaggaacatggagggtgggagagtttgcaattttacacaaagtggttaagaaacatttcattgagagggtgacatttgaagaaagacctgcagaagatgagggatgggccaatttaagtatctgtgggaagtctttctggcagaatgaaaagcggattcgaataccctgaggtgggagcatgcctggcttgttgaaggaacaataaggacactgttgctgaagcagaaagaaaagggagagaacagtaggagatcctaggcaagggggcagaacgtggaggttcttaatgggttctgtgtcagtggatttcactctgaacgagacgagaatgcgctgagtagcggagagtgataagactacctccttgaccaaactttagtcaggccgttctgagccctcgttttcactaggcattgaccttggccctcattctgtcctgcccagcccagtctttgcaaagagtcttgataagtcagtttagcaagaatcccccaactcttgacatctgatcattcttactatctgacagagtttctcatcccccacctttgctgtgttagcaagaatgctgtaaagccagctgagcaagaattcccttgccccgatggctctgaaaccaccctcgcagggttagtgagaatttcaagccagagtttagggagaattacagttagacattgagcagggtgcagtggtgccctttgacccacttccctgaagctctaactaaccaagagtcctgtagtgtgccgaccacctgctcccccattgctcctataggcagaatctctgacactggatcttctaacccaagaattgcttaaggtgttttccagatcctgaattccagcaggatggctgacgccagtgggtctgaagatccccgccagggaaccgactaaacacaggaatgcagtttcttcctctccctgtcccatgacttgaccccttacttttcaaccaatcatcaatccccacactttagcccttcacacagccagatcccttaaaaaccccatccccaaacctctcggggaggcagatttgaggtttcctcccaactcctcatttggctgccctacaattattaaactctctgctgcgacttccacttttggtgcattggtctgctgtaacgtctcctctgtaaggaaggcgaatgccaggccagacagaacgctaatttgctgactgcagcaattagagggatcccccacaaagggcagggaaaggggggttccgggaggaatgcccagtccaattgctcgcgtctgcagcgtaaccaatgtgcctactgtaaagaaataggaccttggaaagataagtgtccacaactgaaggagaagcaaggtgatgcggagcaaaagaccacagataaagaccaagggactttgtgcaatctggccgaagggctgctagactgaaggagactgggctcaaatgcccccaaggagcccatggtcaggatgacaatagggggcaaggacattaagtttttggtcgataccggtgccactcagtagtaaccaccccagtgacccccttatctaagaaaaccattgatataatcggagcaacgggagtctccgccaagcaggttttctgcctaccgtggacctgctcggtgggaggacacaaagtgactcatcaatttctgtaaatgcctgactgccctttgcctttgttagggagagacttgcttagtaagctgagagccaccctttacaaaacagggctccttacaggctgaagttaccaggaacaggagttaccatggtccttacagtccgccgagaagaagaatggagactttttctaactgagccaggtcaggagataaaaccggctctagctaagagtgtgggcagaggacaatcctccgggctggcgatcagtcaagcccctgtactcatagaaattaagcctggggcccagccaattagacaaaagcagtatctggttcccagagaagctcttgaaggaatacaggttcaccttaaacgcttgaaagattttggaattatagttccttgccagtatccatggaacacccccctcctacctgtccccaagccagggaccaaggactatcgacctgtacaggacttacgcttggttaaccaagctacagtgactctgcacccaacagctcctaacccttacacactgttaggattgctgctggctgaggacagctggttcacttgtctggacttgaaggatgccttctttagcatcaggctagctcctgagagccaaaagctgtttgcctttcagtgggaagatccggggtcaggtgtcactacttagtacacttggactcggcttccccaggggtttaaaaactcccccaccatcttcggggaggcgttggctcgagacctccagaagtttcctgctaaagacctaggctgcatcttgctccagtacgtggacgaccttctgctaggagactccatggcagatgggtgtgcaaaagggacggatgccctgctttgacacctggaggactgtgggtataaggtgtccaagaagaaagctcagatctgcagacagcaggtacgctacctgggattcactatccggaaaggggagcgcagcctggggtcaggaagaaagcaggtcacctgcagcttaccggaacctaagctactgcctactgcagtggccagcccggaggattgtcctctgcccacactcttagctagagccagttttatctcctgacctggctcagaaaaagtctccattcttcttctcgtgggactgtaagggccatgataactcctgttgcctgtaacttcagcctgcaaagagccctgttttgtaaaggaaatggtggctctcagcttactaagcaagtctcccgctaaaaccagaaggcaagtaagggtatttctaggagccgtgggattttgcagattatggattccaaactttgcggtgctagccaaaccattgtatggggttacaaaggggggcgaccaggagccttctgaatggggacctctgcaacagcaagccttttgcaagttaaaggaaaaacttatgtcagccccagccttaggactaccagatttgacaaagccctttacactctatgtgtcagaaagacaaaaaatggcagtcagagttttaacccaaactgtggggccctggccaagaccagtggcgtacctctcaaaacagctagacggagtttcaaaaggctggcctccatgtctgagagccctggcagctacagccctgttagcacaagaagcagacaagctaacccttgggcaaaacttaagtataaaggccccccccatgcagtggtaactttaatgaataccaaaggacatgattggttaacaaatgctagattaaccaagtaccaaagcttgttatgtgaaaacccccacataaccactgacgtctgtaacactccgaatcctgccaccttactcccagcatcagacagccctgtcgaacatgactgtgtggaagtgttggactcagtctattctagcaggcccgatcttcgagaccagccatgggcatcagtggactgggagttatacgtggacgggagcagcttcatcaatccgcaaggagaaagatgcgcaggatgtgcgggggtgaccttggatgatgttattgaagacaaaccgttgcctcacggcacttcagcccaaaaggcaaagctcattgctttaacccgggctctagaactccgtgaaggtaagactgtgaacatttatcctgactctcgatatgcctttctaaccctccaagtgcacggagcattatataaagaaaaagccctgttaaattccgggggaaaggacataaaatatcaacaagaaattctgcaattattagaggcagtatggaaaccccaaaaggtagcagtcatgcattgcaggggacacctgcaagcttccacctcagtaagccaaggaaactcccgaacagacacagaggcacaaaaagcagcatctactctttaccaggcatcagtcacagcccctctactccctcaaacacctgatctggtgcctacttattctaaaaagggaaaagacgttcttcaggcaaagggaggacaaacaataaaagaagaatggataaagtcaccagatgggagaatagctgtgccacagctgctaggagccgcagttgtgctggctgtacatgaaactacccatttaggccaggagtcacttgaaaagctgttaagccggtatttctacatctcacacttgccagctcttgctaaaacagtagcgcggcgatgcacaatgcaaagcaaggtcccctgttcctcccggcacacaagcctgtggagcagctccctttgaagatcttcaagtggacttcacagagatgcccaaatgcggaggtaacaagtatttactgttctagtgtgtacttactctgggtggatagagtcttatccaacacgaactgaaaaagcttgtgaagtaacccgtgtgcttcttcgagatctcatccctaggtttggactgcctctacgaatcggctcagataatgggccggcatctgtggctgacttagtacagaggacggcaaaggtattaggaatcacttggaagctacatgccacctaccaacctcagagttcccgaaaggtggagggaatgaattggactatcaaaaatagtttagggaaagtatgtcaagagacaggattaaaatggatataggcccttcctatggtattgtttaaaattaggtgcaccccctctaagaaaacaggatactccctttatgaaatattatatcataggcctcctcctatactgcgaggacttccgggtactccccaagagttgggtgaaactgaactgcagcgatagctacaggccctagggaagattacccagacaatctcaacttgggtaaatgagaggtgcccggtcagcttactctccccagttcaccctttttctccaggtgaccatgtgtggatcaaggactggaacgtagctccttcacggccacggtggaaaggaacgcagatcgttatcctgaccactcccacagctgtaaaggtggacagaatcccggcctgggttcaccacagccacgtaaaaaaatcccgcagcccctgaaacctggagggccaaaccaagcctggacaatccctgtaaagtgaccctgaggaggacgacaagccctgctccagtcacacccggaagctgacgggtccgcgcacggccgaagcatgaggaaaatcgtcatgggacttattttccttatgacatggacttgtggggtaaaagcttccactgcttcttttcacatggaagactgctttcagtggctacatcaggtcactgaggtaggacaacaggttaaaacaatctttttgttccatagttattatgagtgcccaggaactccataaggaacatgtttatataataacactcagtacaaagtatgtaatccaggaagtgggcagcctgatgtgtgctatgacccctctgaacctcccatgatcacggtttttgaaacaagactaaggactggtccttttctaggtgacacaagtaaagtaatagctagagcagaagaaagaggggttcccaaacatgtaactctaaaatttgacgcttgtgccactattaatagtaatcagcaaggactaggatgcggttctctccagaaacataacatgaagtgactttcagagactgagctacatgctcagctaattgcaaaaacaaatttctactgtttcctggaatttcaggtactggcacatttagttcttcatagaaactctgaaatactggctctggagagcgttttcgaatttctccttttattaaaatgttgaccttagggtctagtccttttccatcaatgcctaaagatacgtgttctcctttttcccactttgggtctgagggattttgtaattattaattctaaagggttgcagcttccacttgtgcaggaggggctactttttcctttttggagccaaacaagatcttttttatcttttttccaagtagcccagatgacacaagaccagtattgacacacatttgtacatgaatatgattcatggcagatatacttattttatgctgtatagcttttttcccaatctagagaaccgcatcctagtcctgacaatttctgggttctaaaagcctcaattattggacaatattgcatagctagagaaggaaaagagttcactcatcctgtaggacggcttagttgtcttggacaaaaacnnnnnnnnnnnnnnnnnnnnnnnnnnnnnnnnnnnnnnnnnnnnnnnnnnnnnnnnnnnnnnnnnnnnnnnnnnnnnnnnnnnnnnnnnnnnnnnnnnnnacttcgattagttgtaaatttatattgaaaactatagggtaaccactaaaaaaagtttttaaagcataattgatatgtacagacagcagaaagatccatggttgccatactgatataaatgaatgtttgaataaataaataaatggagagaagcaacaatcctccatacagatttccaaataatgtatgttgattcttcacctctaggagtggtgcctgtcttgccaggccgtaagtgtgggctacacagtgtcgtctttcgaaggaatacagtatgggaaggcagaaaaagaaagtaactgtagagtggagagacttgacaaacagtgcctcagtcaggtgatgaaggtgaacagcaacagggatgtcatgttattagtatgcaattgtagtatgctgtgatcagactgacgcttcatctctgtgaccttcctccccaaaacccaaccccaggctaataatgagaaaaaacatcacgcaaatcacaatggaggggcattctacagaatacctaatcagggccgggcatgggggctcctgcctgtaatcccaacatttagggaggccaggcaggcggatcacttgaggccaagagttcgagaccagcccagccaacatggtgaaaccccgtttttatcaaaaattcaaaaattagcagggcgtgatggcacatgtctgtaatcccagctacttggaggctgaggcaggagaatcacttgaacccaggaggcaaaggttgcagtgagccaagatcgcatcattgcactccagcctgggtgacagagtgagactccacctcaaaaaaaacaaaaaaacaaaaacaaaaacaaaaaacaacctaacccagtactcctcaaaactattatgatcattacatacaaggaaagtctgagaaagccccaaagccacagcagcctaagaagatgtgaaactgaatgtcatgtggaatcctggggggccctggcacacaaaaaggacagcaggtaaaaactaaggaaatgtgaataaagcatggacttcagttaataataacataccaatggtggctcgttaattgtaacaaatataccaaattaatgtagggaataacgggaagctgggtgcagggtatgataactgtgtaattattctctcgtctaaaattgttgtaaaaaaaataaagattattctttttaaaaatactgacaatatcaaaaaagtacttatttactgcagaaaaatatgtaattaacaaattatgactattaagcaatcaataccaaattccatgtgccttttccccagacaataaattatatattacatggaaatatgtaatattgcaaagaacctatttttttccaaaaaatatgcttgtttgcagttttcctaacaagtagagagaaatttctccctcggtacccttaatgaggacagaatgtgatattggatatcaccattgcactgacttaaatggggtaatgagacctgtgattgggacactctgggtccccaggagacttaatcaaaagggttacataggccgggcgcggtggctcacacctgtaatcccagcactttgggaggccaaggcaggtggatcacgaggtcaggagatggagaccatcctggctaacatggtgaaaccccgtctctacaaaaaaaaaaaaaattagccagtgtggtggtgggcgcctgtagtcccagctactcgggaggctgaggcaggagaatggcgtgaacccgggaggcggagcttgcagtgaaccgagatggcgccactgcactccagcctgggcgactgagcaagactctgtctccaaaaaaaaaggggggttacatattggccgggcacagttgctcacacctataatccagcactttgggaagccaaggcaggaggatcgcaggagcccaagagttccttccagcctgcagtgagccgagatcgcaccactgtactccagcctgggcgacagagcaaaactctgtctctaaaaaaaagcaacaacaacaacaacaaaaacccacaaaaggattagatattgaatcagctgtcaccccttccaaaaacaacaacaacaaaaactggctctgagttgcaaacaaacctacctctgcccttggctaaaatgaagtaagtctctcctgctgtggatgtaggcgagctcagatagcgaacaaccctacctttgggcagcagatagcccaggtaatagctggatattcctgtgcactgcattttgctggtctttacgtcttggtttcctgaaatatccatctgcttctaattaaggaatcaggcctagtgaggcgaagcacaccaaatctggcaggtcctaaaatagtgctgctgctgctgttactgatactgatcatagtaacagctggaatttatggaggtcttaatacgtgccatgcacttctctcagcattttaaatgtactttttcagagcatgatgctaacagtatagactgtcttgttgggatcaaaagccagctgtgtgaccttgatcaagttacttgcttctctgtgcctgtctcctcatctgtacaatccagatattaacagtcctcttgtaaggattaaatgacttactatatgaaaggaatagatatttttatacatagtaatacatagaacctggctcacagcaaatatgcttgtaattactactttttggggttctttttgagacaaggtctcactctcgtgcccaggctggagtgcagtggcacaatcatagctcacttgcagcctcgaattcctgggctcaagtgatcctcctacctcagccttcttagtatctgggactataggtgctgctgcacccagctactttatttttaattttgtatagtgacaaggcctcactatgttgctcaggttggtctcaaacttctgggctcaagcaatccttctgtcttggcctcccaaaagtgctgggattataggcgtgagctactgtgcccagctactactgttactaatgctcatagcaactcagtcatgtatgtatattattaaccccaccaaaattgaggaaatggggtccagagagataaaataacttgctcagggctacatccctagcttggatttaaagccatgaagtcaagctcctgagtccacatttccagcctatgggctattggaaaaggagtcaatgaaaaataggctttggagtatggcagaaaaaatgcacagaagggaggggactagaggaaagggagctggtgttgaaggaaagatgggacttccacgtcggaatgacagacaggaatgctaggaaaaaggtcaggcctgaggacagatttggggaagatactcagaacgctgagggttaaagtaatgaaaatggatcttaaatggggaaagaacaagaaaaaagagcccaggtagagaggctaaactagcagagaaaaaagaaaagaatcagagaaggaaatagaggaatcaatcagacaggtgagatggacatttggacagcttaacatccccgctgcactgggaggggaaggccccaggcctgcctccttctgggcttcaaagcccaaaccacgctgaactccttctgggatgcccttagtcttctctaagcaccaatatcagtcctggcctccagtataaactcagaatgcccccacttctgggatatttcccctgaacatttaatcatgtttcctaagatcgataccacgaactcccagaagatggaaatgacagctttcctctttccatcccgtgtgctgcacaggatcctgtacatagggctcaataaatgcttgtggaggctgtcttccggcccttccacatcttagccccaagtgtgactatatcctctatgaagacagagactgcttcatgccccattctccccacccagcaccagtgtagtgggaagcatatgctcagaactgcctcaaatgtggatcacagagtgagcggggtgaattaagagtagtctcgggacaaaagaggcacattcctcagcagccccttgctaagcccaagacactgggaaaaacttttgaggttccggattcttcatcgttttggttggaccaaaaagtacctggacaaagtctggaaacatgtctaccatctctgaatccagaagccaactgatgaaaaagacaaccttcactcactctcacctgagcagacagcagatccacagccatcccttcctcctcagtcttcctgcccagggagagcagagtgtggacacggtgggtctgcagaggaaaaaggtgtcaagaggaaccctggcgtcaggagatggcttggagagaggaagttacaaccgcccataatgtccatcaggtctcaaaaaagccaccccccgtaatgatgtaaagcaagaagagtgtttactagtttactagggcaatgtgccaaccctacttctatttctgcacttggactctttaacttccaccttcgggcctctcagctacctctaggcaaaccgtgactcccccatggatgtctggagtccttcgctagctttgaactgcacacctaaaagtcgcaatgaatatccagtctcctggggcgccacttcccagcctagctagctgatcctcatcctgcctgccctgcctcaccctttcctccctatggtagccacgataaagaggcttccccgcatccctaccctggtgacagaccccactgctcgccctgagtggtccttccgtggagtgctgtgttctccccaagaaactgtgagcataatccaaccactcagctttcccagcctctttactagatcttcgtcgggccttaccacactttacccaaggtaacaggattaaggcactgtccccacccaaagccagagctttgctgtccctcctaatactccacaggtgccgcctctaatggcacccacaaccagaaacagccgtcgctgcccaaacaccaaccccaggtgggagaggtggaaaccgtgcccgccccacagaaagcaagggaagaggctgcctggggcagccgggcaagtgtgagggcctccaggcccgcgatctgcagcggcgactcagggtgccccctagcatggagccaacctggggctctgccaggccagttccagcgggtgcctcgaccagcccaggggaagctgccacacaaggcctcggttacgcgacgaagcgcacctcctcccaggaagcggtgagtgttttccacgcagtattttcaatcttcacatttacagatgttacggagactgaaaaccaggaggtcgtgacctgcccaaagtcataagggccgggaaggcaatcctgatcctagccccaggccccagttacatctggggcaatgacctcgccactctgcctcggtctcctcctgacagagcgggaacagcgtaccgccaccctatctgttagcagggatgcgcggagttcgttcgggcgatgcgctagtctggtgcctggcacccgagcgctctcggcgggcatcagctattgcttttattatttccgttactcagaagaaaatgcacagaagaaaatcgcagaatgaacaacgacaaaaggctggcatccccaccccagcggcccggcgcacccagctcacctggcgaggcgctccctcccgcgggtctccggcagtccaggccgctcgcggacggcgccccgggacccagtggccaaggggcccgagccgcgtagggctggtcccagaagcccagacgaggctgcacgccgcccactcgctggagaggcccggatccaccccggcccggaagagaccactgcgagcgcctcaaccccaggccggcaatcctagccaagcctggatggcccaagccaggagaacccccgaaaggccgcgagctgtccccgaaaccccgccaaccgcgggagaactaccactcccggcatgcctccggccccacgccgactacacttcccaggggacgccgcggtgcgcgctgcgaactccgggagaggaaccgcctccgccaacgagagctctcaaaggcgacagtgcgcggaggggctgcagtgcgagggagtacgcacgccgcacacgaggcaggaggtctccagctgctggccgtgctgcctacagcccgcgcacttgttaagcaagcggagtagtttgaaaaaacaaaaccggaaattagattcatttaggaggatcagtgtgctgtagctcccaccgctggttgtgattacttttctgttgatacaaaataatttacataatgtatagggtccatgtgagtgcttgttacgtgcatagactgtaatgatcatcaagtcacagtatttggggtatccatca

SEQ ID NO: 630 - protein, 1520 aa, Homo sapiens [sequence omitted]

SEQ ID NO: 631 - DNA, 2699 bp, Homo sapiens
  source
  (1)..(2699)
  CDS (201)..(248)
  CDS (1341)..(1795)
  CDS (1888)..(2319)
  CDS (2367)..(2499)
ccaggagaggaacaggggccacagggagctgatcatgaaacacactgagggtgtttcatcagggaagtgacaggagcatagtcacattcaggaaagatcactgcctctgggaagacagagggtcagggcagagcctggaggccaggagagtgccaccttcaaacagggtggaggaggcacaattctggacagggatgtccatggccagaggagtgatccagctcctagaagatgaggagagaccgaaggtgaggatggctcttcagtttcaggtttaggcacctggacagatggtcttgccttctccagcggcagaaagcactgaaggggaaagaggttgggggaagggactgtgtaggctgagcagcctaagtctgagaagctgggccacttgcaggtgttggtccagggtgcaagtgcatttggtgaagggggagactaggaagggaggagaaagtctagtctgttactagacctcaccatgctgcaggtgtctgggccagcaggtcgcagctggagctgtgcagctggctgctgtcacatccctttctctcccagctgccttcagctgagcttaacgccagcagaggccgaaacacttcacaaatgcaacttgtcagctgggaggtgcactcagagctcaggaacactgttttccctctttattgttttccatcatttttttttttcagtctgggttttgggccccgtcagttccttttctgttcaacactgagctatgtatccacccctctcaaggttgaaaaagagaaagactgtaaaagtgccctgcaaagaagaggcttccaactctctgggggtggggggggtggggggctctcttcctcctcttgtcttctgggttcattccaaattattccccaaaggaaaaatcactgaaggactgggggcggtggtggggaaaaggacagtctcccaagaggtcaggtgaagccccagcctcatggtgttgagggaggggctgggggaagcgggagcctgttcctaggagacactgtctactggacacctcatcctagaaggcttccctgagttctgacactgttctaggaggaggaatcattattccacgttgtggagaaggaaaccaaggccgggtaaagtaatgtagggcccttaaagttgcagagccaggaataaagtccggattgggactcaggtctgtgggcaatccaaggccatcccctttacacttcaaatgctctttccccctccggaagccctcgcgtcctcatccctaccccacctcttgttccccaagcgtggctagggctaggactccagggctacaccaagcacccttcggtcttcccgggaagaattttccccggccgggggctagggtctggcgctggggcgctcctgggacctgcgggatcaccactacactctggcgcgccgagcgcggtgagctagggcgccaaggcacaggtggggctggagtccagcgcggaggcgcggggggcgggacgcgggcccggggagcggccagggaccgcgacagcgccgcagtgccagcccggcgccggcgactgcctgccccagcccctcagtggcggcttgctcccttctctcgctccgaaccagacacagccgctgtcgctgccatgtggcgtgccgcagactcccgagaacagccctggctgtcagcgggcaccagccgcttcctgtgcccatcgcgtagactggaggggcgcaccacggccaccgagccagaggcgcttcaggaagcaagagaagtccccgcgcgctccgggacccggcgcagctcatggtgagcgccctctggggctcgagggtcccttggctgagggggcgcatcctcggggtgcccgatggggctgcctgggggtcgcagggctgtagttgggatcgcacacaaaccgactctgcggcccagcccgaaatgctgccgccaaggagcaacggcaccgcgtacccggggcagttagcgctgtaccagcagctggtgcaggggaatgccgtggggggctcggcgggggcaccgccactggggcccgtgcaggtggtcaccgcctgcctgctgaccctactcatcatctggaccttgctgggcaacgtgctggtgtccgcagccatcgtgcggagccgccacctgcgcgccaagatgaccaacgtcttcatcgtgtctctacctgtgtcagacctcttcgtggcgctgctggtcatgtcctggaaggcagtcgccgaggtggccggttactggccctttgaagcgttctgcgacgtctgggtggccttcgacatcatgtgctccaccgcctccatcctgaacctgtgcgtcagcaggtcatcagcgtggcccgctactgggccatctccaggcccttccgctacgagcgcaagatgacccagcgcatggccttggtcatggtccacccggcctggaccttgtccagcctcatctccttcattccggtccagctcaactggcacagggaccaggcggtctcttgaggtgggctggacctgccaaacaacctggccaactggacgccctgggaggaggccgtttgggagcccgacgtgagggcagagaactgtgactccagcctgaatcgaacctacgccatctcttcctcgctcatcagcttctacatccccatggccatcatgatcgtgacctacacgcgcatctacagcatcgcccaggtgca

SEQ ID NO: 632 - protein, 355 aa, Homo sapiens [sequence omitted]

SEQ ID NO: 633 - DNA, 1372 bp, Homo sapiens
  source
  (1)..(1372)
  CDS (201)..(1172)
gaaggcagatttctaagctctcttttaaaaaaaggttatttgaataattagagaggttgaataattagaaacggaaatttttttcacaggttctgtcctctatcaaaaggtgcttttccttgggtatactggaccccagtatttccagtcacactctttatctccactctctgtttcctcagggattgagaaaggggacaatgtggcagaagaatcagacctctctggcagacttcatccttgaggggctcttcgatgactcccttacccaccttttccttttctccttgaccatggtggtcttccttattgcggtgagtggcaacaccctcaccattctcctcatctgcattgatccccagcttcatacaccaatgtatttcctgctcagccagctctccctcatggatctgatgcatgtctccacaatcatcctgaagatggctaccaactacctatctggcaagaaatctatctcctttgtgggctgtgcaacccagcacttcctctatttgtgtctaggtggtgctgaatgttttctcttagctgtcatgtcctatgaccgctatgttgccatctgtcatccactgcgctatgctgtgctcatgaacaagaaggtgggactgatgatggctgtcatgtcatggttgggggcatccgtgaactccctaattcacatggcgatcttgatgcacttccctttctgtgggcctcggaaagtctaccacttctactgtgagttcccagctgttgtgaagttggtatgtggcgacatcactgtgtatgagaccacagtgtacatcagcagcattctcctcctcctccccatcttcctgatttctacatcctatgtcttcatccttcaaagtgtcattcagatgcgctcatctgggagcaagagaaatgcctttgccacttgtggctcccacctcacggtggtttctctttggtttggtgcctgcatcttctcctacatgagacccaggtcccagtgcactctattgcagaacaaagttggttctgtgttctacagcatcattacgcccacattgaattctctgatttatactctccggaataaagatgtagctaaggctctgagaagagtgctgaggagagatgttatcacccagtgcattcaacgactgcaattgtggttgccccgagtgtagagtggaataggataagctccttaaattaattcatataaacctctaaagtttttcagggagatagcttccttatgctgttttactactggaagaaaaacacatttaacacacaattccagtattccagcttggtgtcaggtatccaagcactgtggagaacatttgagtagatctttagagaattagggaaaactttttaa

SEQ ID NO: 634 - protein, 323 aa, Homo sapiens
MWQKNQTSLADFILEGLFDDSLTHLFLFSLTMVVFLIAVSGNTLTILLICIDPQLHTPMYFLLSQLSLMDLMHVSTIILKMATNYLSGKKSISFVGCATQHFLYLCLGGAECFLLAVMSYDRYVAICHPLRYAVLMNKKVGLMMAVMSWLGASVNSLIHMAILMHFPFCGPRKVYHFYCEFPAVVKLVCGDITVYETTVYISSILLLLPIFLISTSYVFILQSVIQMRSSGSKRNAFATCGSHLTVVSLWFGACIFSYMRPRSQCTLLQNKVGSVFYSIITPTLNSLIYTLRNKDVAKALRRVLRRDVITQCIQRLQLWLPRV

SEQ ID NO: 635 - DNA, 29221 bp, Homo sapiens
  source
  (1)..(29221)
  CDS (201)..(303)
  CDS (441)..(566)
  CDS (15168)..(15253)
  CDS (16842)..(16951)
  CDS (17294)..(17411)
  CDS (19634)..(19787)
  CDS (20265)..(20325)
  CDS (21836)..(21908)
  CDS (26469)..(26554)
  CDS (26766)..(26901)
  CDS (27401)..(27442)
  CDS (28881)..(29021)
cggctcctctccgggaaggtccccacttgacagctctgggcgaccggaggtggcgcccaaaggctgcccgggagatcggggctgggctggcgggggccaggaccccgcgccctctcggccgctcactctcgcgtccactccctcgcagtcacgccgggcgcgcactcccactccctctccgcacgcggctgcgggacgcgatggacgcggcactgctccacagcctgctggaggccaactgcagcctggcgctggctgaagagctgctcttggacggctgggggccacccctggaccccgagggtaggcgggaggcgagcggtcggaggctgcgcgggctccttctctcgcgcgctgggtgcgcccctgaccccgcgctccgagagccccgcgtccctgcgggcccctctgagccctactgcgctctctcccgccgccaggtccctactcctactgcaacacgaccttggaccagatcggaacgtgctggccccgcagcgctgccggagccctcgtggagaggccgtgccccgagtacttcaacggcgtcaagtacaacacgacccgtgagtgcccccggccctcgctgcctgctctacaccggcctcctgagaaggcggtttagggagtaaagaggattccggacccagcggtacaaagctgctgacggccgcggtaccgcggaccgcgggcgttaaggaccccttacagtgttgggggcgcgccttctgcttctacccccaatacagcgtctaatctcagtaagccagtgatttgcccacaattcccgtgctccatgcggtgacagcccaaaaaggggagaaggaaatacttcctcctcttggagtgtaaacctccttccctcattgtaggttcccgttgcctgaagttccccattagggcttcattgtttagacaatgcttcccctgcccaggagggggacctatcccaggagggcggatatgctaagtcccaaatcccccagagtgagtgcagtgaccagaccctactaccagaggggaggaggagggtaggaggcaggagggctggggcgagcgcatgtttcgtggggaggacatgcaggcgtaggttctgctaagccagagggtgcggggtgttgcatcttccctaatccgaggtcccaggactgacctgctgggctgagtcaggggctgtgggcagcattattcctgcgcccccataatgagtggtgtctgaatcagcaccccaacaccatctctcaaggagaacaacctgtgcctgccttcctcctggcaaatcatggactggcttgaggctctggggaaaagggcagtagaggttgctggagttacacagcctccaggtggggtcgttcagtgtgggttctgggtgtgtgcgtgtgggtaggtgcctgtctgtgccctgtggaacatgggatgggagccaggtgtgtggtctgcgggaggctgtgggggcagcaatcactgccccacctagaacccccctgatatctccagccggaccccagttgtcaagcacgctgagaccctatctggattgtttgtctgaagcctctcatcctggaaacatcctcagagtgtctgtgtctgattggtagcccagctccacctccaccacacatacacacacacacacacacacacacacacacacacacaagctttcagaagctgaggctgagggctttgccatgagagatggttagaaggcaagagagatgtacctgcacctgatgccaagccgcactctcctggctgcaccagctgagggctctggtgggcccagggagcacatgcttcccatccatgattaaaacagatctccctagaaggaagtaagatccccaagctaggaggtgtgcaagcagaaggaatgatttccctgtgccttcctagtcctgaccttataaaactgtatttttaggattccgtgagctgtgtggggtggggcaatggagatcagcatgcctgattcagactgggcccggagattaagggccatccagggtaaagtggggtgatggagcatctcagcccacagcctgtgaacctcagggagctctgctttcgttcttaccccagcctgggctatgccttgttctccccgaccagcctgggggcccccccttcccagggcctgggtctcttcttcatagccaagctgagtacagtaatactcagtcaatttgtggaatacccactatgtgccagccactgcacaggcactgtattgaggctctcactcacaattgcaacagacaaaaagaacagaatgatgaatgccctaattaggggggaagcacaaggtctatgggattggggtgtgggggcggggtgacaaggaagacttcccaaaggtgctgcagacagcacatatcaggccattcatatcaattaagtctaatgagaagctgataaaaggttggggcaccacccaggctggtaaaagtagggccaattagcccctggtatctaatgaacaattttcttcatttagaccaaagtgctgcctgcactgcaactgctggagaatgagaggagcttgtggagggtggggagcacttaccactaaccagcacctggggtgtgaggtcagcctaggtgggaagagcagaggctgctaatggctgtggaaatgcatgattgatttccctcctcccctttcttcacatcagtgctgcttcctgcttctctgtttgccttttccttgggatccttcctttaaaaagaatgacagagggagaaacctccacgagaagcctaggggaagaacaggagcgttcaggctccacttcctgccccaattttgttatgctatagccaaacccgcattgaagcctcattccttagagagcaggaatcgcccgggtggggatagcagtttagatattagtctctgcgatttttcaactcagctgagcacagagaatctgccacaaagctaagtgttgatcattttccaggtgccagctaccactgagagagctttgtatccatatctcaggcatccataatcccactcgcccacactccctctgagatacatactgcttttatgcccatattgcaggcaagaacactgagtctcagacacatgaagtaacttattgaaagtcctaatcagctcctatgcaccagtgcaggcaggtgaatccacagccctcgctattaaccatggggcagtactccctccacaagaggcattcggtttgcgaggagagcttagaggtttggaaagaagactcatacctccggcctggaggatcagggaggacttagccctctgagctggacttctggggacaggttggattttagcaggtgagtgtaataggcacaggagaggccctctaggctgaggggactgagcaaaggcaaggagacaggctgggctttgtgccttgggaggagtgtgttgtatggagaacagggagtaggagaaagaaacaatgaggctggggaggggcatggaggtcaggtgatgcagggcattctacagggcttcaccatctggagagggagcctgggtgagcttgtgagcagagaagctcaattttgggagcacactgtcctctggagggaaaggagaagtaaggggatttctgcacagacccaggtagaccgcaggctgtaagagcaaatgaggttgaagacgccagcaaccttgggcatttgaaattgacaagatatggtgagagatggcaaggtaaaggttgggcacacaggaaacagctgagcacagttggggatgtgttgactttgaggagctggagggacagctgagtggagatgttcaggaagcagctggttgggtgggggaaaagctcaagagagcaccaagagtggagataaggcgtttagaagtcctcaggatgtggggttagcaaatagctacagtgtgtgagtttgggaggctgggtcagagccttgagccatcttacccagagttatttccagatgcagcagggccaagggaagggaagggactagcgcatggccacacatgttagtcagtggcagagccaagttaagcacacgagtctccttgggtgttctctacacaacctgtgctggcgcttcagtggctgagcttccacatgtttgtactgtggtttaactcatttaatccttgcaccatcgagtgacagagacatggcattatcctcattttacacatggggaaactgaggtgtggagcaatgaagtcacttgtaacagaacaaggattcaaacccaggttctgctgcctttcaaaaagcaactctgctaggttaagcagagaagaaattttttaaaaagatattggggagcttatggaatcactgagtgggctagagaaccagatttggggccccaagccaagaacacagggcagagctggccctgtgaggggacctccctctccctgaaaggccctgccaacaccaccagccctggccaccactagtggcatgatcaaagatcactgcaatctcaaactcctgtgcccaagcaatcctcctgcctcagcctcccgagtagctgagactgcaggcacatgccaccacacctggctaatttttaaattttttgtagagttgggatcttgccattttgccagagctggtcttgaactcccagactcaagcgatcctcctgtctctggctcccaaagtgctgggagtataggcgtgagccactgcacctggccaacctggagtcttaagcttcctgcagttatctctggagaggctttctccctgtctccatctgggggcctccagttcactaattccctcgggtaggtgcatctgatgggtgggggaatatgtggagccccaaatcccatgccaaagctctggctacaagggatcctgggaagtaaggatctggcattttagctctaggcggggaggtagcctcggtcttaccccaggattctccgaacccaggttcaaatcctgggtggctagaaacaatcctaaatgtccatatacaatttaattggggcaagtctcatcccttttgtgggcctgtctccctgtctgtaggccgaaaggaagtggattagcatggaagtggtttggccagaagtggggcacttatattccattttcctcccacctctccccattccacacggactcctctgagcccatctctgtgtgtacatctctgtctctgtgtctctctcattgtctccctgtctgtttctgattttctctatgtgtggttctgtttctgggtgtatgtttctgtctttctcagattctctcattttctacctctctctctctttctccatctctccctactgccttcttcatcccccgactccatctccaaacccactgtctccccactcccatccctccttctatctgccctcctcctgcacctcatcttgcctgtccctacggtccttttggctgcaaaggagggtcttgccacctccctcctggccatggtccattttccttctgtggaaccactaagtgcagcttggctgagcctcagcctccttgacctcaagctccgcaatgtcctactgggaatggctggggtcatctgtactgaggcatctgccaggacaggggaagaaggggcatcccatctaacctagccacatggggaggttaggggtccccacttcccagaaccccattctagagacatgcttaagcactgattgtgttacaatggaaacacataagctgagtggtctccagccagaggggtctctcccattgggtctgcctgcttatgcaggaatcccttcttcagccctaagagtcagaggtgataagaaaggctgagacctgccctcaggaagccccaggctgcttatcaaggaggcttgtgcaaatcaacagtcagagatcgggaagaggggcttggtggacactgggacattcctgggaggctttctggagggagtgggggtaaactttaaaggtcttggagcagttgggatgccacatttgttaaggacaggcgcagtgcaggggtgcaagcctcaggaggaccccagatagaccctgccctctgggttgaagaagtagaagctgtaaatccggaaactcaggtctgcattctcagactccagcgagacctgatcccccctgactctattccattctccaagggccacaagttactccatgtgtgagaacaacttccctgctgggagagagggaaggtgggacaggcatggccatcacagaggtttagctaagaaaagaaggaaggaagagaaatagagcagaagtggatgcccttgtggccatccagacaccccagagctgcccggctgcagagcgctctatgttccgagtccagccttcccctccccacttaagggtaggaaatgactggccaggagagggaaacacagctgctcagagttctacagcaagtctgggccctgataggcctctgctggctctgggaactcctggcttctgctctagcttctacccacctctgcatgcatcttgatctttcctgtctcctgctctccccaggaatcctccagccacctgatcgtcttgctcaggctcaccccttattggggttctgagtattttaccctttcccccagaaagaattgaggagcctagagacaagcttttcaaagatgcataagacctgagcctgccttccaggggctcctgttctaggaagagtgacagacaggcagactctcaaagagaactttttgatataggctcccaagtaaaatagcacagtgaagacagtcagagcacatggaagggagttattccaagagtaagggaaagtaaatttggaagacttcatggaggaagtgttgttgaacagtgccttgaaaaattgagctaatgatgtgtcagatggaagggagggtgggagcggaagtggaagaggagggagggaagaataagccagatcatggaggcctcaaatgttggaccagggcatgggcctcgattctgctggctttagagacagcggctgcttgtccgtagccctatggcacaggaccagaatactctggaaggatactgcttttcaaaatgtgccatctaaatctcaatcaagggctggctggggacctgggccttggccctttcctctcctcccacctgctccttaagtcagaggtcccagcatccttccctgtgcactccttaccaccagtgccacagcagagcctggagccctgaagacgggctgaaggaggagccccatctcagtgatcctcagggagctccccacagggcttcttggctgggccccaggtacaggcatttgggcccctctgactgcccaccctcaccaggtgcttcagagtcaggcaggcggtccctttcacacacagcacctgccaggagagcagctggggcaagggagagtgggaggaacctgggctcagatttagcagggctggatctaagtcctgggtttgccatgactcactgagggactggcaggccctccttgtccaagtcccagttttcttatctgtgtgaaggggacagagaacatgctgacctcgtggggccatggcacacaggggagatgatgctgcttggggctccctgtagacagctaaggcattgtcagcaaggggaggggagttgaaggtggcctggggcctggaaggaggggccatcatgtccttgggtaggggaaatcctgctcacaccaagaatggctatcctcattctggggtggtggtctcctgctatctctgagagcccccagaactctgtggcttctggggatgtcctgggagggaggattctgtctatctagattgagaaggtctggtacctaaaagcctgtagagaaaggcagccccttgcccccctggagggatgctgctggcatcctgccagccagctgtcttctccctgcattacttcataggaactaggaactgagagccagatctaatcccggccatcctactgactgcttttctccctttgggcaggtggtctcccctcttcagacctcagttcatctgcaccaggtgggtggagggcttgatgagttctagtgatgtttctcagttccaaggcagcttctgccacaggggtcctgtgttggtcccctccccactttcctccacaggctggcgtcatggcgacgagcccactgagtgttgctaggatggctggaaggagggagccctgtacagtagaggcgggagcatgaggtaggggcctcctcccactgcccctctctggggagggcagagcttacacagtgagctgggttccactcccccttccctttttcatagacccagtatggtctccattaaactgctcagtgcctctatgactcagtttccccactgtctcctgtaagtgtgcttacaggtcctgcttaaggatggcagggcaccatgagtgaaaagtcctgtggaaatagggagttgagggtctctgaaggtccagaacaggcagtcgaggctcagagagctgtgtccatataacactaagaaatggaatccaagttccctggcctgaatcccagacagcaccagcaaagggccctggggatgcctttcccacccagtggctggggttggcaatattagactcccaaactcaatctagcacttctacgtcagtctgggtctgagcttgggtgaacatcaccagctgcctgttcccctctgaccaccaatttgctgtgatcggatcaagacagaaatatgccaggtgggcctcaaagttggtcagtcctccttaacctgcagtggcctccaagcaatgcaggatgctgactcaaggagatgcacctcgtttgggaagctcaggaaaaccatgctgttagtactaggactgtacgtctgaccaccccagctctgtccaccttccccaaaagtctcttaactggggatgaaaagcaatccactccaggaagtggaggccaagctgggaggagacattgattgagaggtttttcccacagaaagcaagaaagatggccaggcatggtggctcatgcctgcaatcccaacattttgggaggctgaggcaggaggatcacttgaggccaggagtttgagaccagccaaaaccacatagtgagaccccgtttctacaaaacaaacaaaaaaataacaaatgatcatggcatggtggcacatgcctgtagtcccattactcaggaggctgaggcaggaggatcacttgagtataggagttcaaggctgcagtgagctaagatcacaccactgccccccaacctgggtgacagagtgagaccccatctcaaaaaaaaaaaaagtaggtaagaaaggtgactcaaagtcatggtcaaagatttctcaactaggccccaggccagacaagaagatggctggatctggagtggcccaactacaggcagtaaagggaactgagggtgggatatctggcccctaaggtattctcttctgaggatctggacaccaagtggtaatgacactgaagaggtggcataactggctgcatctgctgaaacacagggtcacagggagagtctgtctctcctaggtacaccaactccagggtctcccgtgaggaagcgtgtcccaagggagagagatcttctgcctcttcatggttgagtgaccccagatgtgtcagtttctctcttctggtcccaccagaccaaatgcagaagttgtcttccttcctaattcccaaggagatgcctgataactcagtttccaacttgcttcccttggaacagtcaaagctttcatgccaggaacctggagaatgctgcccacaggtttgctgtttgagactgacacccctcccccatgtggggttggactgcaatgtctgcagttttggcagctgggtcagcctacccatggtgtctttgtgtgagaccttgcttcctcctgcatgtatgtgtgactgttttgtatttgccatgcatcttggtgaagcatgggcatacaaggtggcagactgtcctcctggcccactctgagcctcctaccttcaatgagttcccaagtaacctaggaaacagcatcagctttggtccatcctgagatcctgtgtgctcagctctgtgcagtgcttaagaaaaggccagagatgacagcaacccaggacatgcctttagaggctctcagccttgtacaaaataaggtaaacttctgctccagagaacctgggctggttaggaaagtacaacacctttataggggtcagtgaaagatcaatcccagcctagcatgagccaggcagtcacaagcagctggacccttggggagctggaacagtcatggaaactacctggaggagctggggctggagctgggccttgaaaaggggcatgaattagcttgacctcaatgggctgggcccatggccaaggtcggaatatcgggtgggaaggctggttcttaggagctctccgaggtccccaaccttagagataggcagggatgaagaatggagttgtgctgtccgcggtgctgaaagttccgatcccatgtagtgacttcattccttctgtaaatattgcttctggccctccccacctcaatgtcatcaccttctctccctcaccaccactactactactagtactacctcttcttcttctcctcctcctcctcctcttcatcctccttcttcttctatcatcatcatcattatcatcatcatcatcatcatcatcatcatcatcatcatcacagggtctcactctgtcacccaggctggagtgcagtggcacaatctcagctcaccacaacctctgcctcccaggctcaagcaattctctcacttcagccttctgagtagctgagactacaggcgcacaccaccacgcctggctatttttttttttttttttttttttgagagatggggtttcatcatgttgctcaggctagtttcaaactcttgggctcaagcaattcacctgccttggtctcccaaaatgttgggattacaggcatgagccaccatatccagcctctccctcacttcctgtccttttctttgcaaatagccaatgaccccattgttgtgccttaccacagtcccattaactcttttccccatgcctacccctgtcccttgtactccttcccccaaaactaccaccaaaagtagtccctcatggtccctgtctcctatggtccatgtctttccagaaggtatcagagatagaagtgccaaccatttgatggtgatgtcaggatgcttggagttgtcacaatagcttgagggtgctaactggcatttagtagactggggagtctcacataacatataattgatccacctgagatgccaataacatcatagagaatcaatttactgtaatatttctaagaggcaaaactgagaccaagagggaaggggcttagtcatggtcacctagctatctagagacaaaactacagctagaatatagggtctcatgtcccagccaggcttcaggaccaccccaggtaactgcctgaaccaggaactctttgcaaagtgtcagcatctgaaacggggagagcccattgtaatgggggtttttggcaggcctgggccactctgggcatggaaaccaggcctcccagactacagagtcctgcaagagaagaccctgcctgcatcattcagaccctaatgcccctggaagcccacactccacatcatcagcactgatcctcagcaggggcacctgtgttgctatggtaatgggcacccacctctctgcatccagccccacaattctagccttgccatcagccctcagagtgtgtgcccatccgtctacgtttcccacggggtggatgagattctttctgtcttactccctcctgtccgaggctgtgcctgagggcccagtgccctcattggccacagcagacagctcccctgaagagtggggcacatctatcctccagtcctttgatacccagtgtctgtaaccagaagctcatctgcaggcagggctgggctgccagagagggaagtcccctcccgcttctgcatcccacctgctttcccaggggtcagcaggtctgagtcaattctgttcagccgacatttcctcaatggctctgtcctgagggagatatggtggctccaatatggcttctacttacttgtctatccccaaggagctcaagtccagtagcaaagaaaagaaggattaggtccaaagagatgaagttcatagtgaattatggcaaatgcactaaaacagaatttgtatttttcaaactatggattgtgacacaagagtggactgtggagtcaatttagtgggtcatgatcagtgtgtgtgaaatgaatagaagacattagaataggctggaaaggaaaatagtacagctggattctgtgtttgtgtgtgtgtgtgtgtactggattataacataaaatgtatgtgttattgtggttcaagggcaataaagtggaaaaactacgttacaagagaagggaagggatagaggaggaaacaaagaaaggactgcttcagacctaagggtgtcggggatggctccatgcaggaggcggcatttgagtgtggggttaaagatgggtaggagttcatccgtgagcagtgggtaagaaggaggaggtgctttaagtggtggatccacacaaagagggtatgtgccaaacctatgtgtgccaatgccagtggccatgtagaatgctggagatgggtcaggacagttaggctgggacctgggtgtcaagggccttgactatcatgctaagaaattggactttattcttgagcacaataaagagccactgatggctttaagcagaaatcaacatggtcaaggtggcaagaaaagaagcagggaggcaagaggagaggaggctgttgtagcagcccaggcaagaagactagagagcagatggagggatgggcaggaggggagttgactctggaaaaagaaaaggaggagacagaatccatggaacttgggaccccatgggcattggtgtgagggagaggaaaggtctctgatttgcagcatttctatcctgaccccctcccacctgcaagcccaccccatgatcagtgccaccatgagatatcatattcgggaaacaagtattccaaggccctgtcctcagggagcccccacattgatcagagtgaccagactcactcacctagacagctccaggctggtcatggggcaagggctggagtgtggggctcaggcggtcaggactggaggtgctcaggagagagagagctatagagtagaagcaatcaaggaggtcttcctgaaggaaggggcctagcactgagcttcaggaaagctggataatatctatgaacatatagaagataaatttttctgccctttgaagcacaggcaggatcctggtctgcctcacctcacatagactgttcagaggcaccgtaaacccccatcagggagggactgttcatttcacaaaagaacttaccctccttacatacttttgcttttttagttcagtgacatcactatcactgaccctcacgagttgaggtaacctttctctttcatgagcacgaatgttggtaaggaaagatagtgctaggtatcaaattagatcccacctggggagttgggcgccatggctaggggtggggagcaggcttcctcttcctgagagtcagaatcagcatcagaccagggcattccctgactcacttggcagggggatggcagggccctgccagggatgggccttggcccaggaggaaggaataggccagtcacgtccctgggtttgaagaatggatgagctccaggcaccaaactaaaaaacaattaagctaatagaatcttccccattgattttgctcttcggcaagtgctccttcccaattccattgcttccaactcatcgggctcaacggaagtgggtttttaagtaacttaattatttcagaacacactgcttccaaaaacaacctaaggttccccctccagctctgcaactctgtgctctgcaagctatttattttaattagctttacattgtacatctaacatatgctagaaagaaaaattcacagacaactgcccattagtcagagagctgaaccctggtacaaatcacccccaaacaatggaacgttcagcatttgtaacccacccggtaggtcagaaacacactagtgatgaaggccaagcagaggcaggcttcgagagctccgggccttctcaggtgggagggcttcctcctgattggagctggtgtatggagggggtggcttaggagccagaccttgacagttggagctgagatagagagaaaggcaaatgtgagcattttttaactttcctaccttcccccttgacaaaacctgcacttttgtgcacaggacattgctgcttgaaatgtcttttcacacttaaatcatgttccaacttaaatacagaggctggttcttgaacatttagaaacatctcgtggtagcctcccaggcagcagcagcccgagggcggtggcccagccctgagtccccagcattcactcattcctgtttgccactacttgatatggcctaaaggttaagaacagaagacccgaagccacaacttctgagtttgaatcctcttgtcatctttgtatccttggccagtagcttaatctctttatgcctcagtttcctcctctttgaaatgggttcatattaatgcctccttcatgggatggttgtggagattgaattgacatgtatatccatagcagttagaagaggaagtggtacatgggaaacatatgctatataaatggtagctattataaaaatggaagtgctgatattggtgaagtatggacctcataaatataaaacaattgagacaaggatgtaaattatgtggcatgctgaaagcagtgaatcttcaggcacaacccactcctcacagttggattcagttttgaagcaaatgaacaaaatgaaagtgtacaaaatgctagtcaaagattgtgtctaaaatgggttttagcatgcctttagctattttgtaagatgagccttttgtgctattttcacataagtgacttacatgtaaactttcagatgcacattgtatttgctgccctaggagagctgaggtgcgtacaccttatcctgtgggcaccagggagccagggagggttcttgaggaggggagtgacctgactcttggcagttggcattttttgtagggaatgcctatcgagaatgcttggagaatgggacgtgggcctcaaagatcaactactcacagtgtgagcccattttggatgacaaggtgagtggccctcacctgctgtgaccccaggcctcacacaggtatttggactcaggttgagcagagaagatcccaaggggggcagaccagtccttttgtcacccagtcactcccttctgtacctcctgcccctgcccccagtgtcctgccctgtgcttagtgacactgtaggggagtagagaagggggacatggagtcctaccttcaagagagcttgggctgctagaggacaaagccaaggtggcatgtgacacaaaaagggaataaccgtgtaatcaatgctcctaacatcttaggggttgtgtgactgcacaccttcctctccctctgggcctcagtttccccatctggcattctgattctgtgactccacatggaaacaaatgcagccccccaagggctgtccccatgagaagctgggtcctgctctgcctctctggagccctgctccagctctcgctctggaattcaattcagtgctgctgaggcaccgaactcctctccttgaggctacgcctcattcctgacctgaaaggatacatctcagctccatcccctcctcattacccagcatagtcctcagtggggctgggactttgccccagatgaagtccaaattgagagggaaaaacattcacccgccctgagaaagtgattctgcaaaatgtgagccacaggggttctgcagggaggccactcaatgggcaggggggcctccagcccttggtcctcacctccactctctctgcccctccagcagtggagaatcaacacaggggttgggtagggtggaggggtggctctccctggcaggaaggagtatttcatcactaactttgtttcaaattgccaacacttggtgataattaaaagtcaactgacttttattcagtttgaatagaatttctaaattctctatagacagtgcaccccctcgtgtggtctccagggcagactaatctcaatgcaccccaccccaggcctcccataggccattgcttcttaggtaggatggcaggttggccccattgtatagacatcaaaactgaggtccagaaataaaaatcgactcaccctcagtcactcagccagctgggatccgggctgagactaaactcaggagaagcattctagagcctagaattttaaaaaagaatctgtacccatacctctcaaaatgtgcccccaaaaatgcatgttggtgccaggcacagtggcacttgtctgtagtcccagctacttcagaggctgaggtgggaggattgcttcaggcctgcagatcaaggctgcggtgcactgtgatcacacctgtgaatagccactggaccccagcttgggcaacagagtgataccccatctctaaaaaaataaaaataaatgcatgttggaaggcctgaccacagccatttataacaacaagagccacccagggccaacaggaacgaaccctaagagccaggcacggcaatgacacctggagcacttctgcccccaaggtcaggacacagaggtggccacggctggaatacccagccccacccccacgtgcccatgcctccatctgccctgcccatgtctgtctgtccagcagaggaagtatgacctgcactaccgcatcgcccttgtcgtcaactacctgggccactgcgtatctgtggcagccctggtggccgccttcctgcttttcctggccctgcggtgagtctgcccttccgccttgctttctcctcatccctccccctacagcacccccttcacctctcccagacattctcacctccattctggggcccagcagataaaagggcccgtggagaaagtggggtttgggtggggtgccagggcatgaatcaccagcaggcatgtggggtgcagagtgggagctggactcagaggcccaactgtggccaccatgggtgggaagtggctcctagtgcagccctgccctcatcccaggctgagtctctacctggcctcagggggaacccagtcccagttgacccctgaacctggctgacccctgacctgcacctcccacaggagcattcgctgtctgcggaatgtgattcactggaacctcatcaccacctttatcctgcgaaatgtcatgtggttcctgctgcagctcgttgaccatgaagtgcacgagagcaatgaggtcattgctcggggagactcggggctatacctggggggctctgggctccgggggcacccatctgtctgtctggtctctgcttggacccctcctttgtcaggaagctcactacctgctaaagcagccctcttcttcttgagcagcttttactcttacaagctcttcctaatgttgaacttctgcaactccaccccattcttgcccccactctgagaacagatcccctctgctctctccaggctctgagacagaccccttggagatttgcacacagagactgatgttcaccagtccctgctactctcagctggtgacaactgactttctggctgctccttggctgacccatggccagaatgctgtcatctgggctgtggctcaggtgcaaaaccagacctgagctcacctccaccctagccattgtcccaacagagctgggctgggaggagcaggaagctgccaggctgggagcttcacaaagctgactctagacacatttatcctagtccactcctcatcttgtggattcaggtgccctcaaagacccctttgagaaaaggaagctagaactaacctctgttgagctttctctcacttaatcctaatgagaccagcagggatcattttccccattacatagacatggaaactgagactcacagaggttaagtgactcgccaaggtcacatgcagtgatgatacctctacataaggggctatcccacatgctaactgtccactctggatttctgtccattgctgtgtactgtgtccaagctattgtaaaactgtagactagtcttgggccatcacagagccctgtggcacaccgacagagacttctcagtacatttcctttgggtggcctgtgcctgagcagacaccagcctggtgtgatccttaacatggtcccacatagaacactgcctcagaatcaaacaggttcactcgagttgagggtgccttctagctccaacgtgggcttgtgctaatagaacatcatcaaccctggatgaaaagtagggttgggaggaggggcttggtagcttcccacctcagcaggactttctcagaaaaaaggagacagccagccacagggactgtgcagggaagcccagaagcagccaacagctcagcacaggagggttatctgagaactggggctgtcagagccagacagagaggatgggctgtgtgcagaagcagagcccctgacgcacagctccccggaccttgagctggctccatcattccccatgtcccagccttggctctcagggtgccctggggatgagcctgtggggaagatgaccaggtggggtctgttgagaggagctctggcctggaagcccaatgtctagaccctggccctgccatggcccactgcgtggctctaaaggggcagggtcttcccctccctgcctcctttgggaaggtagccttggtgcctggggaagggtggccttgctcagagggacagggacacattcccctctgctgggaaggcacggaaccacagcaggcacaaccacagccacaacacagctaccctcatgcctgtctttgccatcctctatctccttcaaccaccctggaaggcagggttactttttgaggttcagagaggtgcagtgacttgccgggggccgtgtactttgcaagtctccctccagagctagtaataattgtgccaagtccagaagttcccaaacccagagtctttggagaatcccctccctggccgcagccccacttcatacacccttgactcactttactcacttttattttttcatttttttctaaatgaaattccatatcccatccccaaaaggaagcaggtctgacttgctatggattgaaaatgactcaaaaaaactaaaatgaaaacacaacaagatggttgaattccagcctctgcctacagaaagctcagagccagactcttgctctctttactagaatgaaaaattagaaagagttagagagaagttaaaaaaaacacgttggccccagtggagaatggcaccttaacttaatctgaaagtgtgaaagagcactggagaaggatgaagcttttcagagtgaggttcgctggtatttgatggcatgtccacgaaccccctttggggagccctgtgtcttgttgccctgcctggggatgggtatgtcctacctgggccccaagctgcctcctgacagcctctctgccctgcacacaggtctggtgccgctgcatcaccaccatcttcaactacttcgtggtgaccaacttcttctggatgtttgtggaaggctgctacctgcacacggccattgtcatgacctactccactgagcgcctgcgcaagtgcctcttcctcttcatcggatggtgtgagggtcccaggggcagcagggcctagttggggggaggacttctcaccaggccatttcccttcgtcttgggtccaaggaccagagcctggccctgccctccacccccagcgcagtccggtggatgcagctacttccctccatgctggtgaggaacaagcaaaggatctctccaaaggatattcctcaaatagctcttctccccctgccaggaaggacctgtccaaaggcctttgtctctggctcagaaactggctggctctacttctctatcacaaaatcacgcagccctgcttggagagaggggcaggggcatgggccaggtgttgagggacagggcacccctggggttgtgggtggcctgctgttggaagagtaaaaacatgatcctagccctgttgtggtaccccacggtatgtcctacaagaaagtccctgtccatctgtcccctgcagcccaagtctttccttctttcaggcatccccttccccatcatcgtcgcctgggccatcggcaagctctactatgagaatgaacagtaagtggatgggccagccatggggggtcatggggaagggaatgggggtgttaggacaggtcagccttgggctctggccaagccgtggagcaggaattgtagccacacctagacagatccacgttcctgttgtccttaaattgaaaaaaatagtcctgcactcagaggtactcacatggtagggctcaaggaactttgctgaattaagttaggaattgtggttccttgaagtgccccccgacccaacgcatgacccctttggtctttgtaaggcctcctcagacttggatgtggcagctctggcccggggtatgtggaaggggccaaggccgcacatgacatccagagctgtccatgagcatttaaagagtccatgagcatttaacagagcttgtttttttttctgaagtctcagtctctgcctgggtgcagtgtcccatcctgaggttctccctatgccagaggctgtaatatgctgagccacagcccaaatgacagcaactctggccatgggtcagccaaggagcagccagaaagtcaggtgtcaccagctgagagcagcggggaccagggaacattagcctgtatgcaaatctccaaggggtctgtctcagagcctggagagagcagaggggatctgttctcagagtgggggcaagaatggagtagagttccaggagctcaacattaggaagagcttgtaagagtaaaagctgcccaagaagagggctgccttggtaggtggtgagcttcctgtcaaaggagggctccaagcagaggccagaaaccctgggagacagggagaatcctatctgaggcaggtctgcactggatgacctccaagatttcagaggaatgagttccccaaagttgatggcccctccctgtggtccagtagttgctggccgacccagaccctaaagcatttcccctgaccagcatccccggagaatgaattatgcctctggcagccagtgaggccagccaggcagcagctcccctcactgggtgcacaagcattggctcaaagacgcaaaatcccaggctggaggtaggaaggctccacttccacatctgctgctttgtgtggccgagtgagtgcctggcacacggaacagcgggtttcaagcaatatgggaacaggtggcctaaggcaattggccctgggccagcaagggggagcccagctctccctttattcctgtgcctcctgcatgcccagtcctatgcctagcagtctgcaatggggcaggtaaaagaggaggagaaagagacccatggcctgtcctcagtcgggctggggagatcagacccaccatgtagagcaaaagacagcctggtgggtaagggtggtcagtggagctggtatttccaccaaggctttctgggaaggggcagtcctggagattgggtctcaggaagggtaaagctggaggaccctgggcccaagtctgtgggggtcccccagttccagctcaggaggccccctacagccaccccatcttcacaggtgctggtttggcaaggagcctggcgacctggtggactacatctaccaaggccccatcattctcgtgctcctggtaagccctcagcggtggctgggatggggctgggtgccaagaggacagaagagggcccacccaggcagagacgctgggaaagatgtggcatgggcagccctgcgcacacactctatatgccacccccgtaccctgtccatgccaccctgtgccccagcaccacccggccttcccttcctcatgctcgatgccctggcgcagccctgcaccactctgctgacctcagggctctttctctgggaggagaaaggatctgatgggtagacttcctgtgccctcccggtctgacactgtacaatgctgagaaagccaggtgagcaggcagctggtgacaagagaagagtgtgcgggcttctgttcattccagacctacgttcccctcagcccccagtgaccctctccaggtccagcccaccacccccagcctgaagcggtgaataccgggatgcagcataatgaggaattgttccttgtccagctccctgccctttgccaaatgtatttgcatctaaggtataattgccacacatctttaatccacaatgagctttaattaagagagagttcaagtagaggctgcattctgcaaaaggaacccattatatatcatacctttaaaaaaaagagagagagataaagaaagaaagacatacaaaaaagccccgtaagaaattggcatttacgtaagacttatttcaggctcagtaatttcaggctcctgtatgtaccagcttccttaaagggccacagttccttctgggagactcagcgagagtgccatctcctcctgcacacagaaggtgcctggtggggctttcttttgtctaccttggagacaattattatttatctcttttattttcttactctcctttttctgtgacttcgggtttcatttgacctccatctttggagtgtccttgatatatgtgaactgatgaagactaggaaggtttttcacccactgctggaaattccaccgtcagggcttggttcgcttcagaggcagaagccaggttttgtcagcagctagtaggattgtccttggactcccagctgcagtgagtcactcacccctcagtgtgtatggaaaccccatgagatcctttccctcccaaccagctgccaagggccatcctggaggaataaggcttttgatgagcctggaactgagccaaggaaggctggcctggatgggggaccaatggtggcaaagagtaagccccaactgtaaagatgttggaagggtggtgaggaaatgccaagagaaagggaggcgaggaacgcaagagctcagtgtcaagacccagctccatgcttcctcttccagacccattctctggctccacccctgcgtctgtgctcacgagccctttccttctttcctttgggcccagctctttgcaccaacaggggcttccacattccaagctgagcccttccagaagctctatctacattatttccaacccttgcatgctcaagtcctaaaagaagtagggttatgctctccattttacagaggaagaagctgagagagatgaagtggcttgcccaaggtcaccactaatagctagcagagcagaggctcaaaggcaggtctcctgctttgtccccaccatctgcctgttgtcctcgaggttggacacgtgtttggtgttcctgccatccctacactccccagcagctcacagctgcatttctgctgctaagagacactcacttatttctggttctgagaagtgaatcaggtggttgaatttgcaggaagcctgacttcttgctggtgttgtcattgttggtgtcatgggaaaggattggcagtcactaggccagacacaggtcttagtggtctctgtgactatttcagcccatgctgatcttctaaggcaagctctgtggttaggcccctcgggggcagacaaggaagcaggagctcatgaggttaagcaacttacccaaggccacacaactgcaaattggaacagtcaaaatttgagccatgagactaggacttggtgcttcagttcatttgggaggggggcctcatcttcagttcttagcccatctgccatttctccaggtctttttgacaccttaggaaagatgtcatctcccccacccccaacccctccaggcccccagctaggccacaagccctctgcaagcaggggctgtgactgcctgtccacttcgccatcgctgatgcctggctcagagcctgacacatggtccattgattcattgaatgaatgaacaattaaataaaaccagaaacaggctgaacgagggcagggtacaatagacagttcttactaaagaactggagtgtgtttttagcagggaggtagagtccaagaatggaaagccggagagctcagtgtgggcagggtgaccagaaggctccctggagagagaggaaggtacctgtggtggtgtgaagggggaggctgggaaacaggctcaaaggaaagaaggattttcaggttacatagacccaagctgagatgagtggggccacataactaaatgtctgccaagtgtaaggatggagacaaggccttggttgctaggtagatgaatggatagacggatgggccagtggatgggcagataaaagagtaggtggataactgaatggattggttattgggtaggtagatggatgggtagatggatgggtacgtggatggatagataaaacagtaggtggataattgaatgaattggttgttgggtagatggatggatggatggaaggaaggaaggatgaatggatgaatggctggatggatggatggatggacggatggataaaagtaggtgggtaaatgaatgaactggttggtaggtaagtggatagatggatagatgaataaagtgggtggataattgaattgattagtgggttgatggatgttggaagattaatattgaattcaagaaaatgtggcagaaatgagaatatattttgattccaacagtttctactctcagggaagtccggaagaatcagaaaaggtcaaatactttgtattacttgtatgagaaaattaggattcacttatatgttaaggtgacttgtgtcccatgatccaggggaatatgccagagacccaggagctggaaattaggtgagccctaggagaaagctgggggtatcaggtcatggcagccccgctgaaggctttccatccccagccctccctgggacccccaggccataccactatgtggtaagagagcagtagacagtggctgaggtggggtgtgagctctccctgcccctagggctacccgaaagcttgtggggagcatccagaggctacaggttgacagtctcaggatatctgtctgtatcctgtgtccctcctctcccagccaggattcagaacttgggagggttagaagggcccagcccaagcttaagaagcaatggattttcttgacagagtgtcagaggtgtgtgtgtgtgtgtgtgtgtgtgtgagtgggtgtgtgcacacgagccagcagacacccctgggctaacatgtgtctccctctggcccacgagcactttgtcaggaaacagccccactgtgtcaggccgacacacactcccttgcctgcctgcctgcctatgctcggaggcaggtgaagagaaacgcagatgtgcccgggccccagatccatgctcacacatgcacacgctctgtgaggcaaacacacttgcacaagtgcttaaaggatagacccacagacccacactgcagctcccaggggacaacacagtcatagtcacagccaatacagatgaacagacactcgcaggcccatggggacccacacccagcagggagcagctggggagccacacaggccagttccagggccaggtgctgggtggggaggctctggtgctgagggaaaactcagaatgaagataaatgaggcccttcctggggcctcagagccagccccacagcccatccatcttccctgtctagggtgcctacgaaggctctggagttcctgggcacaggggtgggatgctggcagattaatcactcattcggcaactgagttcttaatccctccatctggccttgtccgccccaccatggcagtgctgtcctcagtcagaaggacctcaggccgacctagagccagtgacagtgcaagggactcagagagccccgcagtcaacaagtagggaccccgtggcagtgaggggaagggggctcccatagggtccctatactggggagagggttgggggctttctcagcctcagagggcatgccccgtgctctcggtcacgacccacagaggctgccacctttcctcctcagtcctgggctggagacacaggccctggaaaatggggctgtctccccatcctggcgagggaggagcacaggccttgggatgctggcaggtgctagggggacaggtaggataggtgtgtgcgtgggacatcggtttccaggggtctgcggggaagggggctgcctctcggctcatctcaaacacgtgctccttccttttccctctttcccatgcccgccctccctccagatcaatttcgtatttctgttcaacatcgtcaggatcctaatgacaaagttacgcgcgtccaccacatccgagacaatccagtacaggtatgtgagggggtcccttgaccccacaatggggacaggaggaggtcatcgggccgtccccctgcttcctggcagagccctctgccccaggcctcacccagggagctcgctcaagctcccggaagaaacaccaccactgtctcccgccgcccactgggtgaggccctgcctgccgcatgggctcagacctgtgtccacctctcgcccccaggaaggcagtgaaggccaccctggtgctcctgcccctcctgggcatcacctacatgctcttcttcgtcaatcccggggaggacgacctgtcacagatcatgttcatctatttcaactccttcctgcagtcgttccaggtggggcctgtgaccagatgggggccccacagtgagctttcctgaggctgctctggcagccatgccctcactaagggggtcccgtgggactggcacacccatggctcagttacatccacagagttagaagcccgtacatgctcagcctgagcctggccagttatccccatcccagcctgggtcttcatcctaccagcccgcacctactgtcccagcacctgttctgaggatgcaggcagcccaaccaaatgccctgggacaggtcacacaatattgaggagaccggagtctgcctggctccaggcctgtgaccactgctcactcagagtggaccgtggaatatctgcaccctgaggctaggaccccacccagctctgactccaggggttcctgggtcaaattgtcccccccccaccatcttgtccccagtgccaccccaccaggcagaacagctccgcaggtaggtcactgaccactccctcctttccctcctttccagggtttcttcgtgtctgtcttctactgcttcttcaatggagaggtatgaagctgggccctcggggtggcctgggatatccaggtcctcagaccccactccagggcagctccattggtgctgcccggccttgctggagtgccagggagaggaagccttgagataccacccggccttaggggaacaggaatccttctcacaggggctggagccagtttagaaggtcaactatgcagccccgaaataacatgccagcaccccacatgtgcactcagagctgggtgagcaaggaagcccaggccgcagggcctcatggaagagagaagccagagcagaggtggtgacagaaggaagcttccagaaagagatgtgtgccaagcaatcaggtctgtatggactcagggagcagaagagagaccagcacattcccccgctacctgccacagaaaagcccacacaccaagagcaggctctggggagtcaggcggccgtgaagcttggcatgtgcaagccaatcatgaggcccaaagccccagtgcagctgacgcagggaagaagcgcactcgtacctgggctggggtggatgaggacatggagcaaagagcagacacagcccctagggcctgggagcttccgaacactccagaggaatacacttgcctgtctctgcacagggcactggcgaggtgtctatgcaggcctgtgtctctgtggatgatagcacattccacttgcaaagtccatcagcagagacgggtcctgtgggctggatgagaagaagagagggggccagtaaggcaaacaaacaagggatgtttatggagcatttattctgttcgaaccatgtgcaagctaggatgtgagagacaccatccaatttccaaaaaaattcaattaccaaacaaatgaagcttaaatggcaccgggtagagccaactttagaaatgaccaagacagagagctttccctttcaggcagtaaatgccatggttagtcaggcaggggagtctagcaggaggtagagaaggtggaggggtgcagaggggacggtcttcaggagggaggaggaggcgcaccaggtgtgtgagctgggcgcacaccaccaacgccctgcaaggagcaggggcccaagaaggctgagggggccaagtctccaagctgcgctctctggtcccaagatgctaattttgaggtggcagagtgagtcagggaagggaaggcagtgtgtccagaggaaactggatgatctgggaggacagtgtggagtaaaggaggtgtggagtcaagcttctccaggaaaaggataaggaagaggcccctggagagaggcaacagcatcagggaaggacctgttttggaagcagacagttccttgtcatgagggtggcagtcgacccatgagagcagaaagcagaggaggggatggtcccagaagcccagggttggtccctgggagccagctgagcctctgccttccccacaggtgcgctcagccgtgaggaagaggtggcaccgctggcaggaccatcactcccttcgagtccccatggcccgggccatgtccatccctacatcacccacacggatcagcttccacagcatcaagcagacggccgctgtgtgacccctcggtcgcccacctgcacagctcccctgtcctcctccaccttcttcctctgggttctctgtgctgggcaggctctcgtggggcaggagatgggaggggagagaccagctctccagcctggcaggaaagagggggtgcggcagccaagggggactgcaagggacagggatgagtgggggccaccaggctcagcgcaa

SEQ ID NO: 636 - protein, 411 aa, Homo sapiens
MDAALLHSLLEANCSLALAEELLLDGWGPPLDPEGPYSYCNTTLDQIGTCWPRSAAGALVERPCPEYFNGVKYNTTRNAYRECLENGTWASKINYSQCEPILDDKQRKYDLHYRIALVVNYLGHCVSVAALVAAFLLFLALRSIRCLRNVIHWNLITTFILRNVMWFLLQLVDHEVHESNEVWCRCITTIFNYFVVTNFFWMFVEGCYLHTAIVMTYSTERLRKCLFLFIGWCIPFPIIVAWAIGKLYYENEQCWFGKEPGDLVDYIYQGPIILVLLINFVFLFNIVRILMTKLRASTTSETIQYRKAVKATLVLLPLLGITYMLFFVNPGEDDLSQIMFIYFNSFLQSFQGFFVSVFYCFFNGEVRSAVRKRWHRWQDHHSLRVPMARAMSIPTSPTRISFHSIKQTAAV

SEQ ID NO: 637 - DNA, 43818 bp, Homo sapiens
  source
  (1)..(43818)
  CDS (201)..(251)
  CDS (1767)..(1872)
  CDS (14926)..(15033)
  CDS (17548)..(17568)
  CDS (18648)..(18689)
  CDS (21076)..(21185)
  CDS (21672)..(21769)
  CDS (22245)..(22377)
  CDS (23318)..(23471)
  CDS (23877)..(23937)
  CDS (24561)..(24630)
  CDS (29578)..(29669)
  CDS (40171)..(40300)
  CDS (41802)..(41843)
  CDS (43430)..(43618)
gggaggtggggttatccttggaggctgagagccgtgctgcagggagctgggggaataaggaagggaggtggtcttgcccccggccactgcactgggctcacaggattcacacctttccttcctctctagcccagagacacattggggctgacctgccgctgctgtcagtgggaggccagtggtgctggccaagaagtgtcatggctggtgtcgtgcacgtttccctggctgctctcctcctgctgcctatggtaagggcccaggaacatctctctgggagccccaggctcacctgagtccccgctccagagaactcatgttttttctgtaccctcagctcagctcttcatctggctggtatttctgccaacaccaccactgggccacccagtgcctttgtgtgaatcagaaaagacatgccttcctcaagaccctgtactgatttgaccagaaatgattacaaaatttacaaatctttatgatgcaacctttagagttgcacagtacacaacctgctcaactgaatgcaggagccctggtcagggctgcagaagcctctttcaattttctcgtcaccagcccacaatgccctgccaggatagaactcagaagcctgccccctgctcaggtctctccctgagtgaaggtggggatggggagtgagcagaggaggactcccaggttttggtcccgccactctacctgagagttcagagtagcagtgggtgaggctgtcctcagaaccctgggtaccagtcctgcctctggcctgactcactgtgtggccatagacaagcctgtccctttccctgagaactgcctgcacatctgtgaatagtagggattggactatgtccccaaaaatggcccttggcaatcaaatgccttgtgactgcctccacacttgctgacatccccctgggaaccatccctgccctggggttttgagttaaagggacggcatttggcagcagctgtcatgatagcagtgcatgggctgtgaagttacttggtcctgaacttgaagcccatatctgctattaaccagtggtataactttgggctggagtttcttaacctctctgagccccagtttctccttctgtaaataagggtggcgagtaggccccactaaatagcagcactgctccttagcctgcagctgccgggggcacttttttcctgagttcctggagaagagagaaaatgagctttctcagcctgacttctcccctaccacttgttttctcctctaaactgcagtagtagcctcgtggctgctagagtcaggcctcctgggttcgaatcctggcttttcagcctactgagccatatgactttgagcaagtgacttaacatctctgtacttaagtttccacatcagtaaaatggaaaatgataaaaatagtacttcatagtactctccagatccatacacacacacacatatgacactcagaataatgcatgcacagagtgaagtgctatatgcgcttgctaatattattataagatgtggaaactgagaccccaggagggagtgggacctgtccaaagccacacattgagttggtgactgagaagagcccttatggtgtctctcaaggtgaatgtcagggcccctgctggccctgacatctcttgtcaccctcctctctgcttctgctccccactccccccaagacactgcccctggggctttggtaggagagcttacagatgggcctcctacccgctcccaccatccatcctgtgttctcctacaggcccctgccatgcattctgactgcatcttcaagaaggagcaagccatgtgcctggagaagatccagagggccaatgagctgatgggcttcaatgattcctctccaggtgagcggggcggcagggagcatgccacgtccccagtgccagcttttagaactgttttcctgtgctcaggctcggccagtgagtggtcaaggtatgggtttctggggacttcagaaggccctcgagaatactgatgtcctggatctgctctgggcaatgatgctggggttgctctcctcaaggctgatgtggtctggatgcctcacagctgttctgggtgactggacatggctgccttctctcccacaggagctgggatagcactggtgcctgagctgggcagtggctgtcaagagcttgttagcaggcagcatgggcctggtggcagcagggacacagctattgcctgtggctgagctgtacagcacttggtcaacccagggcaggaaacgtggggtcctttcccacctcttctgctcattgcatcagaagccagagaagaaagcagcagcaggaacttcagtcttgaagacttgggtacaacgcttctcctggggctgcctttgaggagggtcctgcttccctccactggaggaagcacacattgcaggacattgagcgttcttagcctctccctctaaatgcccataacgtccccgatcccaatgacaatcacaaaatgcctcccaagatttcaaatgtcccaagggagtggcacgatccctggtaagaaccagtggccccatcgaacccctctcctaactctccattgtgcagatgggaagctaaggctcacagagcaaaggcgccctcagctcttggcctcaggggaagttggggatttaggggagggggcatcacagaggcctctccaacctcacttttgccttaatcgttgaaggactggctccgtgctgcctaagggtagggctctctgctcaggctggagggattcattttccttctggatcctcctggctcctctgagcaccatgtatttaagcacttgactaatctgcagcccagttaaatggaatggtcccactggacggagctgcccagccagttgcttctcagtgagcattaactggtgagggagctactctggaccgtgccggcctttgcctccgctgagctcttgctcagccctaaccaaggttgaacgtggattcggggccccaccagtgagggaaactgaggcagggggccagaagggcacacagttggaggagacccaaagaatatcccaagaatatctggtccaagtctctgtttggaggatgggactgccgagccctgagggcagggatggtgtggatcacatggaggatcaggctgaggtgggtctggaacccaggtgtcctgctcccaacccagggccattgttcctgcattgcgtgtctcagatacatttggggttgagcgacaaaatcatccaggagggaagaataaaggtaggggctggggtgggacagggacctcggtgtaggctgtgtgcagtttaattgctcacctgcttgttgaactctgggctgacagggcaagacaggcctgtccacagggatgtcgtggcagagaagggagatggatgccaggctggaaatacagcatccctggaagggccaggccagtgctggggaggaggtctcacctgcaggtgtcctcaggagaggaagagatgagttctttgtgggaaggattcatatattgaaactggatccttgcttcttaaacctggctgcacatctgaatcactggggaactttcagaaaaacgtactccagccacaatccaaaccaattaaatcagaagcttgggtctgtcatagtcaccatagtttttaaaagctccccaggcgattctaatgagaagctggtgttgagaacccttgagctaggcccaagggataagtaggcatttgaaggtggtggagaattgagggacagacgaatgggtgaacactgtaggctgaggaatccacaagaggcaggagcctggtgtttttggcagtagtgagtaacctcctgtatttggaactcagtattggagcagatgggttgggctattgagggggcatggctgagggcccagggagcagatattgtgtatttcatgtcatctccactggagatgaaggtgggggaaaacagtggccggctcccactgagctggcatctctgcaactgccccaggggctccacttgtgccctctcagggaccttgtgagtcagggctggccataggaggtcagggtgtgaaggattctccaagaattgagtgaatagctctcctttaaccctgtccaggtgggagaggaggctgcaccctctcacgatctgctaaggagaggatccctcatctatccctactcgtcccctcccttgaatcatagggtggggctttataaaatagagctgagctaattaagcagaagcaaagggcagccattaggtgggaaagaggaaaagagtaaaggcccagttggaccaccaactccatgaccctttcctgctctgggcctcaggagcttctcttttaaaatgagtggagtggggtggatcatgttaatagccagaccctctatagacttcctgtgtgccaggctctgtgccagcacttcattctatcaccacagcagctggagggtgggggtgggtctattatgacccctattttatagataagtgaactgaggcacaaggaggtactttgcttaaggacatagtccattaagaggcagaggcagcctgtaccctcaactgctgggatgcaccacctctaaagagtgacatgctgtgggtcccagcacccccccgggcgcagcaccagccatgggatctttgaagggcccttaacaccttaattttcatgtctgaaaaatggaggaaaaatgatacctaccacataggattattgcattaagtgataaaagcctgtgagaagtgctaaggacagcgtatgggatttactaagcacttaactaagacactgtagttattaggagctgtcatcttggagtgttgggggtttccagggctcccaccttctgctacatcccagttcttctggggagtagagagacatctctaggaagcaggtcagcgccacttggaacaatcctggaagcccctctggaagagcaggggagaagttagggagcagatctgggcttcagagggcagatggagagtacaggaaggtggagagaagcgttccgctggggaagggtggaaagggagcagtgagtaaggtgggtgggcaccgtaacagccagcacttcaaggcgggcactgggttctctgtctctgtctctctcagacacgcacgcatgtgcgcgcgcacacacacacacacacacacacgtacaagaacgcatttaaccctcaccagcctatgggctgggtagagttttacccccacttaacagatgaggctgcttagacacagagacgttaggttgcttgtctcttacctagtaaacccctcagccgggaaggtggagccaagctgtgcatgtggatggttctggagtccgtgccttcacccctgggctgcatttgctgctcagaagaggagtgaggagacgccctggccctcagctttccccttgtcagggtgaaaggtcatacagcagaggcagttgcaatgaggctggaaagaggccttgggagacagggaccctgaaatgtgctccaggtccacccttttcttagctatgaaaaggccaaagggtgtttgtgtttctaaggcccaggagagaatgaggtctcggcctctaatgacttgcttgggaaggagaggggcaggccagggtgaggggaggcccctggggaggctgtcctgagaagcagtgtccatcttgctcactttggggctgttgtctgaagagcttgccctgcaggctgaggttgggggactcccctcaagggcctcaagttcagggatagcattgaccttgctgtcactcatcaggggaggccttactcttcccccattgaaccttcaagaacctctggcctgctcttaggggtacctggctggagctgggcttcttggctccaaattaaacacacttgtgaaagatgggcctctacccctctcatcatacctgcagcactgtagagcccccaggagcatttaaaggtgctgatgtcgaggcccctctccagaccaaagtcctcagcatttgggttgggggggtccatgcagatctgtgttaaaagcctccaggtgattctaaagtgtacccaggtctgagaaccactggccagagcacagcatccaccagggtactcaagtgatctcaggcagagagcagcccctcagggcccagataaaccaggctggggagctcactactagctgagtcaaatctgagcgtaccaaagaatcgacatctgtgcgttgtgttattaatccgtgccagtcctcctgctgcatctctttcctgcaccttccctgcccgggtggtccccaagcacacacgccatgcacagaacgctggccaaaggtcagctgatgtccttgaaacacacttgaaaaaggaaacctggcagcttgttccaatgcctgttgagtgtaaactcacaacagtgtcttttatctaggtttaatatacttgtatatattttgtgtgtctctcataattttttaaatctagtaatatgagtcaattggaacaagagccctgatctgttagttgaattatgtctgtggcactgtgtgtgtggctggggggctccagggggatccaggaaagtacttgtttccttcaagcccctgctcctcactggtcctgggacctctaccctaaagagaacctaggatggtgctgtgcagagtggccttcagagtggtagccaggagacagatgcactgaggggaggcacccatggtagcaggcagcttaatgggggtgaaaaatagagcccagagaggtggccgtggggagtgaaagcaagcttggagcctgccttgcattgtttgcaaaatccttggcatgttttaaaggtgtttattgaggagaggagggggtttggagacatagtcattttgtcccttgttccaaacccccaaatgctaatgggatttaagccaataccaagttggctctgtcatatgatgcccacagaggctgaggccagaggtggtggtcattggccaaccacattgggggccagagccagctctggggtgggatccaggtctgttatatcagacagggagtgccctttctcccacagtgctcttgtgaccagaagggagggacaaaggacgcctgtacctgggaattggcatctccaggccacacagcccccaggctccgttccttctgcagtctgcctgcccagaatgagaccagccagcatctcctctttgcagggctgcaggttttcatcagcccagaaaccttccctgcatctaagcagggttggtcggtgtggtcctccatgggggtccccacactctagtggaggaggaagaggaggcctgtggtggccatggcaggggcagcagagagcagacttggagggaggagggaaaggcctgctcattgctattctgacctggtctcagaggcctgcccagggcaccaaatgccttgaaccagtcctctctacgttcaatagaggggagaggccaagaggaaggaagcacatcagggctgggcccaggcttccccatccttagagcaggaggagcttcttgtctgggcctctcagctgctctgagactcaaaaggcatcaagcctgaggaaagggtggtgtctgcagggaccctcatgctgaggaacttattcgctgtctgacacagggtgtcacttctatccaaacttgtgtcttcgtgaagtctggtcattctaaaacttgaatatcagatcttctgttaaaacacagattgctgggcccacctccagaagtttctgattcagtagatctggatgaggcctgagcatctgcatttccagcaagttcccaggtgattttgccggtctgtggtccatatcttgagaatcactgacttccaaaggcgagggcggcatctttagtcctatgccacccccagcactcagctcacagtgggatcctcatttcatggaacagaaacattggccataaagtaaatttcggtaaattgaattgtttttacccttagattgcatgctaaaatggggaccttgttctaacaatacctgggcatcctcaggtggcttctcaaagggaggaccatggctttgcctgagtctctttggtgccctgctctatggagttttgaacactgtggaactggacaaaatcatcaccatgacaacccaggattagctccttattttgttccagacaaaagctaatagcttatgcgttctctttcagtcgctctgcctgagtggatccctttcctcctgctctcacacttcactgccactcctgggcactttataaggtcttaggtggaagcagctagggagagtgtacgcagcactccccgacccacccctgggcctgaattcctctccccatgtcccccagtgggggcctatacacagatggagccatgaggcttggagtgttgtcaggagtggagaggtctcacagagaacaggatctgttctcattttcaacctctggaggacgaaggggaggacgggaacttggcctgggctgcactcggccatctcctccctgaaacatgttttcctggctgctgtgtcccttgcctgtcctggttttcttcctcagtcttctttgccaaggccttttctaaatgctggcatttctgttggggcccggcctattctctcctgttttcttccctgatctttgctctctcactagaaaaaccatccatgtccgtggactaaatagtatccctgtgctgcctactccctgccctcttctccagttgctacttctctagactctagacttttttccagctgcctacttcgacagctgtctcctcttggctcttagcaccatctcaaactgaacataccccagactaagctcttgctttccaacttgcctaattcccccaacatctggttctcacctggccctttccactgtggtaaatgatccatccatccatccatccatccatccatccatccatccatccagccacccacccacccacccacccatcaatctacttgttcatccagacgctgaagccagaaacctgggagacatccttggtacctctctcccctgcactgtgttggcctcgactctgcagcagtaacaaatcaatcttaaaatctcagaaacttagcacagtaacatttcttgcgtgcatgtatcataggccagtgtgatcagcagaggtaggaggtggagctcaacttcacacagtcattcagggatccaggtttctaccatcttggaacactgctacccttaacatgtggccttcaagggtggtccagagaaggaagaaaggcaggctgtggaagcttatgagggacattttagaggtggattctgcacttccaccctctcaccattggcgtgccctcagtcatgtgatgtgggtgaacactaaccgtcttttgcagacttgccagccaggtccagccagtgtgttgccaagccctgtcagctctgctcccgactctgtctgacacaggactcctctccaaccctgctgccattgctccaaatcaagctttttcatctcacccctagactatagccatgtcctaacaggcttccccatgtctgcatgtctgctattggactatatgatcttccccacacaaccaaatccaagtgtgactccttgtcttaaagcctctctgtggtaggtcgaataatgcccccaccccggcctgagaggcccacgtcatcctaatccctgaaacctgtaatatgttactttacataacaaaaagaactttgcagagggaattaaggatcttgaactgagaattttatcctgggttatttgggtggacacagaataatcacatgggtccttataagtgaaagatggaagcaggagaatcagagaagagagacttgaggatgcaaagctgctggtttcaaagagggaggaaggggccatgggcccaggaatgtgggtggcctcttaactctggaaaaggcaaggaaatggattctcccctagaacctccagatgaaatgcaaccctgctgacaccttaattttagcccagtgagacccatttcagacttctgacctgcaggaatataagatgatgagttgtgccattttaagacagtaagtttgcttacaaacttacagcagcagtagggaatgagtacaccatccagtgtcatctctaaacattgagcataaaaatctaaaattattaacacaacccactggactaagagctctgtgaaggcagagactgggccctttctattcactcttgtattgctctgcattgtctgactcggtatgtcttgaataaatgagtaattaagagagagagggagaagaaagtgggaagaaaaaaagataaaaggaggagggggagaagaatgacaaaaggcatcttgaaatcttccagtctcaacaaaatttagctttgttgagactggagtgtggaacatatgggtctgtagaagctggacgtactgtgtgtgagtggaaggaaaatcagttgctgtttttagttagaaaaacccaaggctgtctcaggagcccaactcccatcctcccaagctccagggaaaggggcctggaaggattcagctccaatccgctgaggccagagcaatttccattcaaaagaggagaggaggtgggagcctgctgggtcctcccatctgtgctaggctgggaggtggtaactgcaagagaaatgggcaccagggcattctggggagccccagggaggcagctgtgagtctcttgagaccccagcaatgcaggctagagggctggatggaggccttcaagctctcgatagggtcagggacattgtctttgggtcctggggtcctgaggtctcattctaggtttcccacctgccctggtactatacgaattgtctttaggactctagagggggctcaggctggggacataagggttaccaggagggctttgagagctgtggaagatgcatcctgagagctcccaggccccggcctggggtggggcaccttagcagatgccctttaggcagctgtagctgccccagccatcctctgggcaccagtaggtcctgggtgaatctctgttccagatttgagctctggtcactcaaagctgggagctcacagagacactcagttgtccctgtgcacataggaaacgtgaatcatggtggagggggcggtgactgtcctgagtcacaagtgagcctgcggcggaaggaaatcagaactcaagttttggggcttccggtgctaatgctgagtagagacctgccgtttcccctcactctatcctcaaacatcaatttcacagctttgtctttttctccaccactggccctggtgcatagatggtccctggcacaaggtaggcactcagtaaatagttgttaggagaatgcatcccctgtcctgctgccaacatgagagcccccttctccccttgtgccacccgcccgacctctgcagccctcctcgccctcaacactcatgaccctgctcattcgctctgaagtggccctgtgacctcggcagtgtcagctggcagcagcagctggctgtgcctgagcctaatgttctccattaagggaacatctgttggctggggcatgggccagacgcagccatgctccacggccgttccacggtcaacatgggctgctgtagccaaagatgtgctattgggtctctttcaaggacatgatgtcacagccaagcacatgctggctagatgtcctctgctaatggttacacaggaattattgatgactggcctactgctattagacctgatacccagctcccctcatctggcctttaatgtctttgccttcttgggttattcttctcagagctttctatggtacatctggttcccaaactctgtctttccatgagcaggatgctatgggccaatgtgactgggtgcgaactccaaaatagccgggtgtgaattctgagagacaggattttctccgtctaaaagctgtggataccttctggtccaaatagcactcaagcgtcacagaccccaacagagactgtgagctcatggcgcctgctccaggcccctcctcttcccagcaccttcccaggggtcctctggacctgtcagcagccctgccccaggccatctcaccttgcaggtccctgctttacctccctgcctatggaggcctctcggggcaatggttcccagggacacctaactgggataatgaaattaatgattctgtcggcagtgaacaggcattgaatgagcctggctctattctgagagctttgcacgtatgaactcattaatcctcacagcagccctgtgaggcgggcactgtcggtcacctactgtccctgacatggcacagaagccctctccatagccttcctttatgatcccctaaaagctgcaggcctctttcctgcaactctactctgctgcctggcactccacactcctgcctccccaccatcctctgccactctctcctgctcacatcactacctgtgcttcctctgcccactccataaatatgggttctccagggttccttcctccatgctcttctcactttatgtcccttctcaaagtgagctgtctcgtcccatggcctcaatcactacccacaggctggaaggaaaagtgagtggcagggccgtaggtagggtcgtaaataccatgttaaggattgagggtgctaagagcccagaaagcatgggattgttggtggggggcttgtgacatggccagatattcattttgaaaagcttctggtcatagctgtgtggggtttgtgtacctgtggtctcagtgaggggtcctgagcctcttcactgagtagggtgaagggatagagagtggggcatggatttcacaaggtttcaaggtaaaaccagcaagggcttgatcaggagcactaaagggaaggagctgaagtggggtgactcccaggtttccagctggggctggaacaggcaatcaggtttgggcaggagatgctgcactgagtcttggactgctgtgtttgaatcatctttggttcttcaaggtgggggtgtccagcaggcaactagctgtgggctctaccctcacagagtgggcaggacagagttgtccacatgaaattctgtaacatccatgagcagggtgagctcatccaaggtgggcagggtgggcggccaaaggcaggacagctaccagcacctgcattcggtcagggccgctgggcgggacccagtaagggctgaaattgttccttggatttggcagtgaagaggtcgctggtgaccttggtgagaggtgtttcagcattgtgggaggacagagtcagagaagcagggatggagcaggaagaggtggtgtcaggcagtgcggggaactctacagaggctggcagggctagaaggagaggcaggcacccgggagaggggagccgctgggccccctagacctgaaaatctggtcataaagcttgacagtttcctcttccttgcagctcatgtccaatgaggcaccaaatcttggggattcctcaacacctctcagttcgtctgtcccttcctctccatcagtctggagatgctgtggggggcctctgcagcaatcccggcctccacctcttctggttccgggtcctttcacaattcttgcttggcgcgtgcaggcttctgcctggctggctttcccctcttctccagctgatgaatttgtgtcccctgctgggcctgccttgggagtaggtggggggagtggagcagcagccttagaccagcctgttcctgcccctccccttagggcggatggggggccctgctgagggggtggatctgaagtgggaccctcagtggtggctgaggaggggctagggtgggcatgtgggagaggctgctgcagagacccctgcatctcagcatctcattcctagggatccagccctggcctgctgtgtctcccctccccacacacctgtgatgttgtgcagctgtggggctgcgggtcttcgggggtgtggggcggtgtaaaaacaggtgagggctccctccttcccgacccaggagctcctgaagtgccttgcgtctccattcctgtttgagggatattaccggtgcagggctgagccctccctcagactgtaggccttgcctttcctctcctaaaccactcccggccccctgcaagggcctggcttgtaagccgtggagcacacctcagtgtgtgtatatataagtgtgggtgtgtgtgtacatgtgtgatgtgtgtgtgggtgtggtgcatgtgtgcacattcatgtgtgatgtgtgtggtatgtgcttacatgtgtatggtgtgtgtgatgtgagtggtgtgtgtgtgatgtgtatgtgtctggtgtgagtggtgtgtatgtgatgtgtgtggtgtgtgtgtgatgtgtgtgtggtgtatatgtgtgattgtgtgtggtgtgtgtggtgcatgtgtgtggtgtgtgtagtgtgtgtgtgtgtagtgtatgtggtatatgtggtgtgtgtgtgatctgtttgtggtgtgtgtaatgtgtgtgtggtgcatgtgtgatgtgtgtgtgttgtatgtgtgtgtgatgtgtgtgttgtgtgaatgtgtgtgtgtagtgtgtatgatatatgtgtgtggtgtgtgtgatgtgtgtgtggtgtatgtgtgagtggtgtgtggtgtgtgtggtgtgtgtgatgtgtgtgtaatgtgtgtgtggtgtatgtgtgatgtatgttgctgtgtggtgtctgtgatgtatgtgtagtgtgtgtgtgtgatgtgtgcggtgtctgttgtgtggtgtgtgtgtgatgtgtgtttgttggtgttgtgtgtgtgttgtgtgtgtagcatgtatgttgctgtgtgtggtgtctgtggtgtgtgtggtgtgtatgttggtgtgtgtgatgtgtgtggtggtgtgtgtgtatgggtgtgtgtggctggcccctctcaccatggctgtcttacccacaggctgtcctgggatgtgggacaacatcacgtgttggaagcccgcccatgtgggtgagatggtcctggtcagctgccctgagctcttccgaatcttcaacccagaccaaggtgggtttagcccagtctctttaggccacgctggcctagcctgctccccaaattcggccccaggcaagcaccaaggacagggaggccaccctgtgggcagacagtccctgctcctgagctcacatgtggtgtgggggatgaaaccacagacacttgcacacacggggacacaggtacacatgggaaccatcgttgtggatgaaagcaaggctgtgccctcacgcgtgggatccatgccagctgtcactcaccctccagcccaggtccctgtctgtcagctgggtatgtggcccggtggccccctcccagggtgcttctgtgagggtaatgtgaagcgatgctgtggacgccacttagcacaggacttggcgcgctttgaacgtgcagtagtaaatgttagctgggataattgtcaccatcctcccacagccacagatcctcagcgcccagtgggaggcatggagagagacgcacatgtagacacccccctcaggcagaatgagacgcgtggggaaggcagctggacacaagacacccacgtccacatgcagagccacttagacgcaggcacaaggcccgttggggctggcgcacactcacgtttgctcagcagagcattttctgggccctagctgccctcaggcagttacacgggctcaagatgggaggagctggaccttgggctacctggggagagggtgccacacacggggagcagtgccacagtgctgtcggtgacttgtggacgtgggcttggaggcgcgggtgtgcgatggcgcctccctgagagggaaggctgggtgggtgcggtgtcctgcagacctgggtttggggcatatctgtgtttgaggtctctgagggccactgaagtgctgtggagatatccaggggccaccaaaacgatagagcagcccgtgagtgggcagagtggctgagctttgtgcacaggtgggatgtagggtgagggcaggggagagaaggcgatgctctacccacaggcagaagccctggtagccccatctccattgcagggggtgtctgagggaaaggggtagctgtagatgacttctttggatatgggtcccttgggctcttccagaacggttcctgcctttcggctgggacctgtgaactcctccatgggccttctaccccatccctgtgagtgtcacaggaggcagggtggccagctgaaggcactgagttggggctgggcagggagagctggagggactggctccagccaggtgacttactgagccacctcctggccatcaagccatgggcgggggctcccgagggtatcagagggatctgagttgtgtgtggccatgtgacctggccttagcgttcttcttttccagcctaaggcttaggctgatgtcctagaaggggcgagtttccaggctccactccagcactgagtcctgcctgctgcagtcccctgtcttctctgagaggcaaaaggcaaatttgctaatttgctgtcaaacctcgaattccaataactgactctgtcctggagggggaggggcttgcaggaggtggcagagaaaacagtggcctgtgttgggggtcccaggtccccccgtctctggctcccaccccaaggtttgtctaagatgcactgcactctgcagcaacacctccacctccagaccaccggccggcccgggaggagggtggcattgaactctcccatctgagggcctggggattgggtgtgacctgagcagtccagagtgaattttgaaaggggatacaggcagcggaagtgctggagtgagagatacagtgggactggggggcagtcaggcatggtggcagccagtgagtgattcagcctgatttccaattcattcctgtagaagccaacttaatcacttcctccattcatgtatttctttcgttccgtcatttatttaaagtttgtttattgaacatctactctgggtcagattccatgccagactccgtcttctcaacaacgaaaggcaaaatgaatcaatggtaaaataagattttcttaagacacactttcctccacactccctccttcctctggcagtggcacaatgaaggtgttatttacacctgattcttaatggttcattaaggcagggccttttagcacctctgttcacaaaacttgattggtgagacttgccttgaatactttgcaaggagagaatgggattcctgtgtttcttctcagttcccaggtagcctgttgtgatgactgtggctgtgtaggatattggagagactggagatgtgggagcacggatctccctcctcctctcaaatgcctctgcttgtttctgttctggaggtctccagtgtccccagcttatagtcctgatgccttctgggtcccccagagcccctctttaatgtttggggttgggaaggaggaggaagtgatcagcaagacccaaggagagcagcccctgacttttctcaccccgctgctcacctctgacttttctctctctctctttctctctgtttcagtctgggagaccgaaaccattggtaagaggaaccttggtgaggatagaccgctgtctttctgtccatccagcaggagcccagcctcaggagatcccaggctccggctgctgggattggggtgggggtggagtaagaggctcactgggtatcaggttctttcctccttccttcctcccctctccccgaccttggccattctggaggtcggggggcacaggaagatgcacaacacaagcacgacctcaggtccctcacaggcttgtttgggaggacaggacttaccaatggaggggctaagaaacaagctcacgcatgagtgtagctgcatatatgtgcatatgcccagacctgaacatgtgcatcagtccatgcagatattgacatccctgacagctaagaagccggaatgcacagtgagcaagagaacagaagagcaaatgatgcagcatgcaggcagaatagtgaagaagtcaggggaggcttccaggaagaggtggcatgtcagctggaccttgggaaaggagttttgagaagcggggatggggtggaaatggggtctcattgctaacagggggtttggcataagaaaagggtggaaatgggaataaagggtagggagagaagaaaaattgtctgaagatgaagtcttctggattccctttgacggagagcagttttggaggctgaggtggagggtcgagcaccaaaaaggaaaccccaagccctgggcccacgttgctgtggtttgccctttttttgaaaaggcccaaccatcccttttcattttctcccattcctctccattctggaggccctcccatcctcctggcagtgcccatttccattacctgtggtggtggagaactgagtcctggaccatcctgaacgtcacagaaatgcaaagcaagtgagagtggtgttagaaggtgtagtgtgtgagaaaggtgcgcggctgctatgtgtgatattgcctcttggccaggactccatcccctacttcctgtagaccaggggtagcctgagccttccagggtggagagtaaacagtagctaactgtaagccaggcattttgatatatgcctatgtctgtatttttcaggagagtctgattttggtgacagtaactccttagatctctcaggtaaggggttaggctggggttgaccatggactggctggagggagggcgtctgctgacatgtgagctttgagaaccccatcccaggctgggctctgctcctctgtggctgtgtgatctttggcaggtgactttttttctctgataaaggtacagattatcttcatggaaaagcacacagatagaacatcgtgtgtagaatttcaggggggccacagatgtcttagagtccctttgtggacttcaaataaagagctcctggattggatgatccttgactgtttctgaactccagcatctagaacagtagctctcaaactttaaccgtgcatcacagctaccttgtgcacttgttaaacccaggttcctggcagtctctaatttattccgcctggggtggggcctgagaatgtgcttgtctcgccagtctcccaggtgatgctgatgggctgatccgggacgggcaccccttcgggaaacgctgcccaaaagtttcgtgttcctgtgcagttactggggcgaatcagcctagtgaagtaggcacaatgaccgcggggttttgacaatctcaagagcactccatcttccggagatttctatcagaacaatacagtggcaaattcacagaacagttctgaacaaaagggtttatacttctctgagcccacactgtgttataaaaaggaaaaaaagaaagaaggaaaataaaagaaaggaaaccgcttttccttctagaacactgttttcaaaaaaattgtttttcaaagcagcttccctttcctcttcccaccatcctgatgtgagcaaagcagagaggaaatgaggcccagggaggggaaggaacttggccacggtggtgatttccctgggacattcagactttctgaaagaagtgttcagagggacttaaaaggaggttgcctgagacagatttgctggaagaagggacagtttggcatcagctgtgggacagaagtgagctcctttgctctctctgggcttgccaaacttcccccttagcctgtgccgtagaactcagagctggagaaggactgttggagtctccctgttgtgggcagaactctcctttcgggcagagttacccatcccaggaagttcatttctgactttcttggctaaagagaactggccttagatcttctaatgcaggaagcgagggacacagattggaaaagtggaaggatctcttctcttggcctctgcctcccacagaggctgacctgctgccctccttgcctctttcctgagctccctggaggtggccttggccacagaggggaggtttctgtccagcagtatgggtactggagccccttttctgcaggtgtctcttgttttatacaatgtcttggtctttgaatgctgtgaagggaagaaccaaccacatgtgtcctgatagaccgggtacgctcccagtgtcaggcgggggccacactcaggtgctgggctggaggaaaagggagctgcttgctcacccccctgccctggacatgagtggctcaccattataaaccatcgggtgaagggagagtgaaaaagcaatcatgaaagactaacatggccctgggcagggcaaaaaccagcctggacttcactgtgcagccagcaaatgactcatttaatggccatgactgatcccaccccctcgagtgtcccactgaatggccttaaagtcaaccaaaagcaaattaaagtacattagtgacaggaaacagccctcccaaactctgaaagacaacactttaaaagaaacccaaatatatatcttcgtaagatccggccctacgttagtggaaatctggaccttgttaatgaagcaagccctgtgtccccttgatgtgagatgttgcagctgctgtgaggcttagagctctgagggaaagcatcacatcaagctgtgttcccaaggtgtgccaaggaccccacccacaccctgcagtcaccagaggggattcctgaaagtgcccagatctcctgacagagaatccctaagggcaggcctggaatctgcatttgtgatcagtctcctaggtggttctgcacactgacatttgagaagtgctgatccagggcccaggggaggactcaggcccatccctgatgagcatttggaaatgttcgagaggggagggatgcagggatgctggattcagctggcgcagtctccccatctttggttgagatgagcttgctctttgtctctccatccctctgatcagcaatcactgatttctgaaacctttccccatgcttcccagttggtcataggggtttccaggaattcccactgaatacgtaatttttgcataagaatttcagggccctcttaatcatttctgggcctcgctgagttttctttttgctgcagacatgggagtggtgagccggaactgcacggaggatggctggtcggaacccttccctcattactttgatgcctgtgggtttgatgaatatgaatctgagactggggaccaggtgagtgtctgcaccctgctccccagaggtggtgagggtagggctgaggaaatttaggtcagtaggcagcattcatgagcacctgctggggctgagaagcaactgggatgctgcctactcctccccacctgcacctggctactcttacaggatactggaattaatgccactgggttaatgccaggcccagcaaggggcttcctggacctttgtgtagtccaaggctgtgtctgttctgattggacagcgctcttgccttcaacagcatatattgagcatctgcagaatgctgacagtgtgcaaaggggaccaagaggcttggccaggggtgggaggtggtggagatgatatcagcagaagagaggaaggaggagctaggcctggaggtgggcaggccctggcctgggagactgggtgcaggcctgaggcagcctggctgtgggcaggtctcacatgaagtcctgcatgtcctgtgctctgcttcaggattattactacctgtcagtgaaggccctctacacggttggctacagcacatccctcgtcaccctcaccactgccatggtcatcctttgtcgcttccggtgagaccctcagcaacattcaagcaagcaccagagctggccagggcctcagaggccttggtgcatctctcccctccccccttgatgtcagccctagaagacccctttgaaggcatttctcccaccccaaggataacagatgggaaacttcactccagagagggcaactgacttgtccagggctatgcagccaggcagagcctgggcaggagatctgcattccttgcttttgtcttcctggtctagaaagacagaggccacaggagggagaagtctggccatgtggggtggtggagctgggttataggggcctggaagtcagtgaggatttagagaggtggcaggaaggagggtggcctgggtgggagacctgctgagataaagccacagagttggcccaccacagatgcccacatggagggtgtgaaatgctgtggggtccaaggcttctttctcccctggcccactcatgtaggaagctgcactgcacacgcaacttcatccacatgaacctgtttgtgtcgttcatgctgagggcgatctccgtcttcatcaaagactggattctgtatgcggagcaggacagcaaccactgcttcatctccactgtgagtgagccaagcagacccattaggctctgccgggaaggtcccgcaccatccccttggttccccaggacgcacattacctgcctgacaccctgcagatcaagtgtgtccctgcaggtgaaggcattgccccacccccccggtttatgtgaaaactcacgaattaagttactagtagctgatgagccaatgtacgacatcacttccagccaaaatgcttcctgtctcttggcctgggtgttgcatttggcaaggcagaagaggaaggtcaggtgggaacaccaagtcccacttgaatgaagaggaaactgatgctgagagagggcttacctagcccctggtcatttaactagcctgggatggagcccaggtgctgattggccaggggtctttccagacacctccccaggtctcacacttctggaggaggtagcatgtggagaagctggtctttgaggaggtaggttaggaagaagagtgtaaagtccagggccttgaccaggaggacatgcttggggagcctctatgagtagagatttctggaagctaggaatatgtatccccccacctgaaaggtgtccaaatcctcattataccaaggagcctcctgcagggtcctctggctgcttctctccctactcctctcctctgtgggagatagggaaggagcaggaaagtgaaggaggatgagctggtggtggggaggctctgtgtctgccacccgtctttgtcctgtgtgtgcagttttgcctccatgggcagctttgactcagaatcatgggatgctgcaattttcaactctttgatccaggaatattgactctcttagatccttgggatgtttgaacctgagcatgccagagccaacgggccctaggattctcccttgctcctgttcctgttgggctcacgcccctcaccctggcgcttctccctgcaggtggaatgtaaggccgtcatggttttcttccactactgtgttgtgtccaactacttctggctgttcatcgagggcctgtacctcttcactctgctggtggagaccttcttccctgaaaggagatacttctactggtacaccatcattggctggggtaggttcctggctgtggcttggacaggttcaggtcccgtggtcaggtgtgtccaggtgtgtctttggttccatcttcaggaagtgtcaggtgaggaggggccactgccctgcccgagtctaatggcctaggctctgtcttggactctttctcaatcttcttgcctgtggaaagcccactatctcagggaggagttaaatccaggagtcctctgagagacaagacagcccttggtctgagggagatatagaccctcaggaggcctgggtgtgagggacagttagaattcccaggaattccaagtctcatgggggagcaatagcctctcggagccccaggtctacggtggacattggacatgttggttttcctgttctcacggacctctttttcttgttctcccagggaccccaactgtgtgtgtgacagtgtgggctacgctgagactctactttgatgacacagggttagtacatgcgcgagagtcagggccacagcacagagtagattcttacagatgggttctcagtagctgccctgacttcacatgaactgcccgcaacaaaccattcaatgccaggcccagactaaagcccagcactgggcaccacctgagccatggccccatgcaggtgacccacccagctgcgtctcagccagcaacccagcaagagaatgtgctaggtgtctgagcccttgtctacttctgtactcagctgagtgtctgttttgcttttagggaggggatgaagcatgttgagggggaggtcacatcctaagagctgtaggtcttatggggaaaaatggtcctttcccaggagctcactggtgatactgacttttgggcttcatgccctgccttgataggtgagcagagggaaagatagaggctcagaaggaggggattttcagagccaggaccaggctggagtctgtagcccgctggagagctcttgttccagccagcccctcctcagagagctgcggtggtgaaagtgtcgggcacccagctaggcagggcagtgtcccgcaggcttctatgctgccgactcacagacgtgatcttgcttctctctgtccatctttcagctgctgggatatgaatgacagcacagctctgtggtgggtgatcaaaggccctgtggttggctctatcatggtgagtgtccttgggatgaagaggaagggaagagacagggtcttgggcagaaaggcacgcgaggaagagaaatgaaagagtccccacacaacctgacttcctcctctgtcatggctgcattataatctgtaacagggatgcacaaactctttagctattcccctaacactggagatttatattgtcccattttttccttattacaaaaaatagaaatagttttgtgcataattttgagcatgtggaaatatttctttagaataaatccttagaagtggaattgctgggttgaaaggggtacacatttaaaatttcagatcccaaattgctttgcaaaaaccctttaacaatttattcctcctcaggaagagtgattcatttccccatttcattgtctacgcttaatcaataatttaattttttgcacaggcttctggaggataatgctggcttataattttaatgtacatttctccatctcgctagcgtaactgagcacttgtttccaaacattaattgacaatttgtttttatcgtgaatattcctgtttatttctcttgttcagttttctatcagattttattagttacagtttaaaggatagttaacacttccgatgttgtgtatgttgcaagtatatttccatttctgcatagcatttatacagtcaaatggtcaagatttcccttagtgaattccaagccttatttctggttgatggaggcctttcccaacccaagacataaaaatattgttcttgtttgtaacacttttgtggatgtaaaacaaagtctacactttttgtggactattacatgtgcatcttcaatccagctgaaattttattgttttgtctggtctgaaatgatattcaattttatctaattttcaatggatggacattctaccctctcaatcctttttattgaatcctttctccattatgttgaaatgtcattttattataaacactcaatatactggtctttggttccagactttctattctgtgttactaatgtatttgtccattcccatggcagatgcaccattatgctagttactgtaaccttgtagcatgttctggtatgcagattttcccttcattattcttttgttttcttcagattttccttgcacgtttactgtttctggtgtacttttgaatatccttgtcaagttgcaccaaaaatgtctagttaagatttgtgtaggaattgcattgcgtttacagactaatttggaggagaatttattttcttaaaagattgagtcatcctctccaagaatgtggcatgattctccatgtattcagtctttcttatagagtcattttggttaagttttttagttttcttccttgttcttgttatgtttacctctaaggtgttttccagtttgggctttaagtgagtctaggaatcattctttcattgtattttctaatgggctattgctggtgtacaggaaagctattgttttttatgtattgtgtcctttcttagttgtgtttctgaattctcttattggtttttatcccttttcacttggttctcatggattttctaggtggaaaattatataatcttcaaatgaaaataaattttgctctttctttccagtgtttacatctcttggcccttgttttgtagggatgatgtttgctctagttttggcagttacccttcattgaattgggaaagtttttcatcttggcttgtttcagttttttttttttttttttaatcaggaatgggtattgaattgtatcaaatgtgttttggaggcattcattcaagtaatgatttatttagtcatggctatttatagtattccacttttccttcattatgagcagtgccgcaatgaatatatttgtgcatatcttgagcatacgtgaatacgtccttagaataaatctcaagagtggaatttctgggacgaagggtatgtacatttaacattttcatgcagatcagattgctctcaatgagcaaggtacaagagcgctcatttcccatgtctttgttgatgtttctgttgctgaattatacttgctggtcttatggaggataatggaagcttgttttaatctgttattgtaacaaatattagatttttgggggtgcatttctgggataaaacctttattaacatgatctgtttattcttttactgtattgctaaattttgttttttaatattttgtttaaagtttttggcattgttcataaaattctatggtcttaggtacacgtgtgtgtgtatctgtgtgttttctctccttattctgtttttgtagcaaaattttgttagcctcataggtaatcctgaaggttttcttttttttatttgccttgaaacaattaagcagtatgtaaattacatctttgttaatgttattctggaactggtctataaaattatctggacctggtaccttttaatgcatacacctttaactactttttaacttcttctgaggttattgctctacttagattttctatttcttcttacgttgattttgttgatatttattttcccatcttattcaattttctctcatcatttaaaatattgtgtatgtctattgtcttgccatctttctcattcctaaatttgtttaattatattttctcctttttcattgactaacacatacagttagcagtattactaagtaccaggtattgatgtttttcctttttttaaaaataatttcaacttttattttagatccagggaatacatgtgcaggtttgttacataggtatatcacatgatgctgaagttatgggtacaattgatcccgtcacccaggtagtgagcatattacccaacagttagtttttcatcccttgccccgatcctcccaccctgtctagtagttcccagtgtccattgttgccatttttatgtccatgagtgctcaatgtttagctcccacgtctaagtgagaacacgtggtatttggtttttctgtttctctgttaattcacttaggataatggcctccagctgtgtccatgttgccgtaaaggatgtggctacattctttttatggctgtgtagtagtccatggtgtatacgtgccacattttctttatccaatccactatcgatgggcacctatgtgggtcccatgtctttgctactgtgaatagtgctgtgatgaacataccaatgcgtgtgtcttttttgtagaatgatatattttcctttgggcatatactcagtaatgggattgctgggtctaatgatggttctgttttaagttctttgagaaatctccaaactactttccatggtggctgaattaatttacattcccaccaacagtgtttccatgttcccttttctctgctgcctccccagcatctgttgtcttttgactttttagtaatagccattctgactggtgtgagatggtatctcattgtggttttgattctcatttctctgatgattagtgctgtggagcattttttcatatgtttgctggctgcttgtacatcttctttagagaagtatccatttatatcttttgcccaatttttaataagattatttgtcttttgcttttgaattgagttccttatagatgctggatattagacctttgttggatgcataatttgcaaatatattctcccattctgtaggttgtctgtttgctctgttgacagtttcttttgctgtgaagttctttagtttaattaggtcccacttgtcaatttttgattttgttgcaattgcttttgaggacatagccataaattctttcccaaggcctatgtccagaatggtggttcctaggttttcttctaggacttttatagtttgaggtcttatctttaagtctttagttcatctttagttaaattttgaatatggtgtaaggaaggggtccagtttcactcttctgcctatggtgaaccagcaatcccagcatcatttactgaatagggagtcctttccccgttgcttattttcgtaaacttcagacactgatcaaactgggcattgtagcagagaacacgattgacagaatcctgccctcatgaaacagcctttgtcattcaattcatctgtaaaaaccaacaaacaagataaaagcaaaaataaaactttatttttattgatcagttctcctattttttcttatttctttctgataattttttataattattaatttctttcttatataagttacgtttgtggtaatctttccctagctcttgatttgaatgcttaagtgtttttcagtatttattgtttttttaatcagttagtttttggctcttcatttttttctccaagggctgctttggctatgcctgaaagacattgatgtgtagtcctgtggagtcctgtcattgtgccttgtttctatttctttgcttcccttcctcctcctttgtgaccgttcacatagcttcctactttgtttaggaagcttttgtccctagtctttatctgaaggcaatgctactattaccactcccaggcagccctttaattagcaatgcttatggctgtccattctggttccccatatttgatgactctgaacttggaatttctctacagaacaactctcacttctgcaatagtcttactttatctcttttgggctgtagttttcccatcaccctgatcctgttttctctttctcttttagaaatggcttacttttctgacttactcatgatgtcctttcctatttcccgtacttctatggaatcctttttcttctatctcttccttcattttaatgatactgtgggaggctggagagataaatgggaattatcacaccgccatcttggattagaagtgtagatgggatcttgactaggtgggggagggtcctgctggggaaataatagcatctttgcccagaatcatgtccatctgctttttttttttttgctccttaggttaactttgtgctttttattggcattatcgtcatccttgtgcagaaacttcagtctccagacatgggaggcaatgagtccagcatctacttgtaagtaccattgtgtggctgccacagccatttctgacagccgagcgggccctgcattcaggtcacagcagaaggcggcctgggctttgctgatagggtgacctagcatcagcatttgcagatcttcttctgattaaagagcctttaatatagttgcccttccagaattcagcaaacccaggagctcctcagctgcatggccatcatatggatgggcaggaagagagagagagagagagagcctgagagagagactgactaggaaagtcaagaaggaaaacatcagatttcctaagggaggtagggtcttggttggttagaagttgagtttcctttggggttcctggttctgtgggaagctcatgaataccactgaatacattgttgcctgatattccgacccccagcccagactgtggaagttgcccagttcccactagcgagtcaggcggacacattctcactggtctgggtgttggaaggtgggtactttctttcctccacaggccctcggggcagctctacctctgcatgtggtcctatttcttcaactccttcctttctgatgaacatctaattggttggggattattgggttacagggcagcctcttaccatagagcgtagggctttctccacttccatggccacttgatttccaagaagtatttctgcagtcatgtccctaacagcctatctttgcctgccctttcccatttctctctccgccctgtctcattatgaaatcagacatagcagcttccacctcccatctctggctgtgaatgggagcatgaccagctgggtgtgtggggtatgaggacatttctgatgctggggaggaaggttggttgtcccctgtggttggctggaggggtggatgggcacactctggttctgagggcagtccttggggtccgtctgttggtaaggcaaaagccctatgtgtggcttctccgctccttcagaagaaagcagatgaggaggagctgaggtatcttcactgggtgcctcattgggtccatggtcctgccttcatcagagaccccagtagatgctggggtcacagcatctactggctgcccagtagatgacaagtgggacagtgagagatcccagtacagggttcccccagggtccccttcctcagccattctcctagagggagaggcaagaactgctcggagaccaaatcctagatccttccctaaggctccctgaggcttcctcagggaggtggagcttgttcttggtctgtcaatctgttcagcctggggaactccccatgtggaaacccttcctcaggggtgggggactagcacagggcctggggtgttcagccaggttttttctacctatacaatgattacattacattggaaaaagtgctttttttcctatccatttactgttttttctttcatgtttttgcaagtttttaccaattcttgcttatatgtgtatattatgtagtagaaaattattcatcaatataaatcataaagtcttagaggccctgccctgtggggtggggggccagccctttgctactacataacctgccctagagatagcattcctgccttcatctcaaggattcacaaaatagggccccgctgctcgcctcatctcctgtctagtgttggacactgcccttgtgtctggcctcagtttctcctgcttgggcgtggatcaggtcacacactaatagttgtctcccatatttgaagctggcagggagctaagtcaacctcatctctcgtttgagctctagtggtcttgatttcctccccttcctggtaggatttgttcttctactgagggccccccaacctcttctctgggggggtcctctcagctttccctactaaataggataccctactgaaccctgaacatactttgccaactcagacattctgctttgggcagcaagaacccccagggcctggtgggaaagaagtgcccgccaaggtttcaggttctccacggaccaggagccttgagtcttgttaggtcttcctcatgcatagataagagctacctgtaattagcacatggtttatacatttaagtactgtattaatctgggacatttaaagatccagctagttggtttgcttctggcattaaaaaaaaatccctttgcaatctcagcaaatcttttttttttagagaaagtcaaacctctgctagtcttgagtgcccatgattaaaaactcagatggacaaagtctgtgagagtgggagtgcccacacaggacagggaatcagcttgatcccattcagtccagcagcatgtttgagtgacagggtcaaggagaccctgtcggccaaagtgagtagtaatccaattgaccacactgctaagaactgtagagcacttggaaatactcgcgaccacatccatgcacatttaacacctgcaaacatccagtgaatctggtggaataggtaaatcactgtcaaatagaatcaccatgttacagctgagggaactagttatcagtgaagtgacgtgaatccaggaggaaggaggatgccatggctgtggtgcgggcaggcctttcaccccaagcttgacagcaccgtcatccctgtcctcaaggaatgcacagatgaaaagatagcattaaacaagtgtgcaaaattaggcttcctggaagaagaggcccctggtgggttccagcctgtgtgaaagccccctcagcccagagtgcttggcagagctggctttgagctgggaggtgtctgcactgggaggaggggagaatgtcaggcgcaggggaggtgagagggcagtgaatggggggagagggagattccagggctgtgccagagtcccctggggtaccagagttatgtgtggggccaagaagccccttcagatctgcccacaacagctctccggttttttcctcttatttccagaacaaatttaagcccgcgagtccccaagaaagcccgagaggaccccctgcctgtgccctcagaccagcattcactccctttcctgtaggttggttccagctgctcaggtgataagggtttgtcctccatagaccaagacggtattcctggcccagcctcagaagcacctgatggggtctggggcctctgcggggggacggtggcactgagccactcgtcctctctgacctgatgctcctggtaggatgagtggctggggacaggacttgggcagtgggcatcaggggctgggtcagggcttagcatgtgctcagggtcgacttggtctggggcaggggtgaggggggttagggcttagccctcagctggggttggcattaagcctcgggtaggtcagggttaactggagttgacctctgtgagcaggtaactggttcagaaaggggagaggtgaggcttccagggtagacattaactgttcggggagagcctcagccccctgccttgaagtgagccggcttcattctaggggtctcctccctggaagacaagcactggaagctgcagcttgggtggaggagggaaaacccatttgtactcccatggggtctccttggccccattggggaggatgcacacatctctggagatggctgtgccggggccaggcagaagtgcggccaggcagctttcagtctagaggcttcctccacatccagagccttccagctcacaaagcctccatcttccacttccacagcacctcctcccctgccaaggagcacctgatcctcaaagttcatgttaggggctggcagtagggactagttaccctcatgttgcagacagagaaactgaggcccagagaaggaaaatggcaccacctaagatgacccagcagtcagtggctgagcaaaaccctgagctagggtgcccagacttctcagctgggacccctccagaccggctgggagtatggaggagtggctcgtccttgtggttgcggaggaggtggtggtgggcaggaagttcccaggatctgtgagctgtgctgctagctggggtgccagtgtggtagggagtacttcgaggactgggcagggctccgggggtgcacagcatcttagcatcaggagagaccctatggagtgtgttcagctcagtccaccacattctgtggaccgccaagtggccagcaccacagtgatccctaggaatgcagacgtgaagaagacagggatgctgcctgcaaagggctccctgcaggtgtctctgtctagcgttcctctgggtgtttcccagggctgtagcccaaccaaccctgcacaccacagctgcggaagcatttctggagtttggccctcatagaaactgtgctggatccccggctgacagatgtgagtgctaagacatggaaatagctgtgactttcctgcagacacacaatgaagctgtggcgtagccagccccagaggccaaggctctctgaaaggcagacgtgggggtgagccctgcacctgtgatagggtctcccactttctgaatcaggctgctctgctctccagacagccccacccaacacccttgcctgagcttttagtctcttttggatccaactcagaatttaccgcatcagtcagtctaggttcatcccttcttcctgacttaatttattttcccttttccctaattgtcgtgacttttaagacattctgacatcttcctttctcccaccgtgtctctggctttcctgcactatttgttctttttcttttccatgagtccttttgtgcagagccattgaaggtttggggaaagccttttctttagacccatctccttcaagagccctccagggccagtcctcccccaagctgctccttgatctgccctccctgacccccatcagagccacacaactttaccaggtgcagggtttcccagtgaacttgtcactaaatggtctttggaatactttcaaaaaatccttaaaaaaaatcagaggagtctgtgtttaccatggaaacatctagggtccgggagggacaggaacaatcttgaagctaaagaaagcagggctgcagaggagaacttcagaatttggggtgaaggtttaagcttggcatgtaggaggcaacagatacagttgggggggggtctcctggaccctgatttctgtggtttacccaagccaaggttgaggggtcactggccgtaggagagaataaccaattattattatttttaatttttagacagagtcttgctctgttgcccaggctgaattgcagtggcgagatcttggctcactgcaacctctttctcctgggttcaagtgattctcctgcctcagcctcccaagtagctgggactgcaggcacctgccactacgcccggctaatttttttgtattttagtagagacagggtctcaccatgttgcccaggctggtctcaaactcctgaactcagccaatccacccgcctcggcctcccaaagtgctgggattacaggccactgcgcccagcctgagactaaccaacttttcagctaggaaaaggtacataataaatttgaagaatagaataggtaccatttctgtatacccagttaagctattttaattattgagaaaaacatacttatttgagtctgtctctttgtatgactgtgaaacagacttttgacattcattgaggaatcatgaagaaacttctcagatagatgaatacctcctaatggcgcttctcaagctttggcatgcatgtggatcccccagggatctagttaaaatgcagattctgaccacaggtccgaggtggcacctgggattctgcatttctaagaagctctcaggtggtgttggtgttgatggtctggggactgcagtctgagtagcaaagcatcaaaccaaacctcgacattcctcttctggaaaaggggatctgtagtgcccacctcacagtgtggtgtgaattgaatggtgctgtttgttgaatgagaaccccaaatccattatgcacagatgcagcggggcgggggggggggggggacctgggcttgccccatcttggaaatgtgtgacacaaattctggcctcagcgaaatgacatgtcaccacctgtcaggtaccttcaggcttactcttaaagagctggaatcacacaaggcagatcctgaatgccaagggtgtggtctctgtagctgtcctcatttgcatcaggtccaatctgatttattaattcattgaccagcaccgggagactcagagccatgtggtacctgaggagagttagtgaagtagcaagtcttttgcaatctgagaagataatacagctcatcatctatctctgacacatctgtcagagaaggggaaagtgttcatggcttgtgtcagcccaagtccaagcaggaccactgtgggctggagacacagagagtcagcctgagacctccctgaggagacagaagtcctgggtccacccaggagaatgtagagtgagactgcagcctgggcccccctccttgaggtggtttgtttctgcaagccatggggcagtgcccaaaggtgctcctctcagtcttcagcccctgcccattgaacttgtatcaagaagtccagcccaacactgtcccctacaactccctgcagtgatgggaatgtcctatgtctgtgctgtccgatatgataaccactagctccatgtggctgttgagcccttaaaatgtggccagaacaactgaggatgtgggtttttaatttgattaatttaaattcaaatagccacatatgggtagtggctatcatattggaatagtttaggtctggatgaattaacaattcattcaatctgacttacctctgtcccctatgtatgtgctgattctgagttgctggggggctcacagggaggaagctgtggaccagaggagagggagagggtagaggggaaagaccagtggacggacacccaagttgaccttcacagccaagcccagaactggcctgatttgaggctcaggttgcctgtgctaggcagtgcagaagatcggcagtgtgagtttccagctctcatcttgttgagtgggaccttgacgaggcggggctctaagcttggagccaactctggaggcagcctctggctccctgtgtgagacctagcccaggccaccttctgaatacacaccttccctctaaacccacccacctagcagtggtcccagtgtgagtgttcgtgcgtgtgtgcgtgtgcagccatgcacactcatgtccacgtataggcgtgcgtttctctgtccagagctgcccatgtcttggcccttggctccctcattctcctccacatgactgccctggccctgtctccataccctcctcttttctgctttccctgtaaactgagtttcttcactgcctggtgccccccagctgacagaagtgctaatcttgtcacacccagcagctgcgtgcagaaatgctactgcaagccacagcgggctcagcagcactcttgcaagatgtcagaactgtccaccattactctgtaagtgtgcgtggccgaggctgtggccgggaatcctggaggggtgggggacgcatgctgccactgccgctgctggaggagagtggagagccagcctctgcctcccagccccaacccattcccggctgttgcatgttggtgtctgtgtgtcttgtgagttctctgcagcctcgtggtcatggggtgggtgggcagggtgtggggatggatctacggccattgtgggtgcttcctgaggaagcagcacccccatgttctctgctgctgctgcctggtgtgtggccttcctcagtccccaacttctctgagcttcagtgttttcaactgccaaattatttccaagagtcttagagcctgagttcgtatagaccttcccccacacagggcagggaacttcactccagtgtccacagcactttgtgtgtgagtcagcattaactcactaaatccccacaacaactctatgagctgggtcctggtatcatcaccattttacaaatgagaaaactgaagtgctgagagatgaagtcactcactcaaggacccctaattgacagagggaggatttgaacccagagaatcctaagcacttcgccccaaggagtctctggctggaatatcagatttattcaatttggacatcccttttacttaaggtgccattgctcccctgggcagcccactgttatttgggcatctctgatgcccttcttggtattttgggactcttctgcccattgctggctcctcagggcaggaggacagaggcctaggccccgtgtcattttgggtaatggctcacatcatatgtttctgttgcaagacgtcagttagcttagaagcacagtcccagaaccctgggctctagagactccttgtctgtccctactgccccatttgccaaagtggccaccgggatgccctggctccccagcagaagtccctgtctgttctggggctgctgtggggctgctggggagggaaggtgttgcccttggactgtgctgtgggatgccctcactaccatcactgcatccaccttgtggctgggaaaggcctgaagggtcactgtttctcacactctgaatccatcccatgtaattccaccacagaagctggagagatttgacttattggtttccagggccctttttagactacagggacaagtacttggaaatggtcccacctatgggaacagatgccaggaggaggaaggcaggggccacaggcatgttctggggccagcttcctttcctgggctccttcaatagatatctttttaaaagtagcccctataggtagggccacagaggagtccccaagacatccatgtccctgtgtttctggccattttcctctgcattcccgactttcattccttctgcaagcaccctctgttgccttctggtgccaggcatggataaccagagatgaacaagacccgagcgcccaagagagaattcagttttgaggatgctgaggctctcaaagtaggcctgtgtgccacatggatttcttcatggaacaggcagctccctgccccagataaatgaggcaccacccccaccttcagggagtcacagtcagagatagacagataagaggaaggatggaaggatggactggtcaggattgcatctgggcttagcaggaacctgctcggatcctggtggcccttgtctgtgagcagggcggaaagggtggacacccacactcatggtcctcttcctttacgggctgagctccctctgcctaaagatctcctcaggctgctcctcctccccctgtgtctcctccttccttccttctcctctctgaatgtaagctaggaagtcaagggcctcacacagactccaagagttcagcttctctagagatctggagctcccatgttcaacagaacattctctcccagaaaggctgaatgcgggagagagggacacatggtgtaattgccccaaatcaaacgactgcctcatgcctgctgtccaccccgggggacttagctgtgctgggagatggggaggctgatcctctggaggagatgggccaggtgcagcctgggggcaggccacatctgcggggcaggccacatctgcagggcagagctggactctctgggggagacccacagggagccagtgtgcccactctgggtgaatgcttgtgagtgtcccctatagagcaggacccacaagtgcacatggtccaggtgtcctagctgtgggcttctgtggccctgtggcttcagaacagagccccaccgtgctgtcagcctagggccagaggcaggcaggggaactccaggagagctgcctcaggaagcactgcagtcctccggcccttcctcccctgcctggcccacttcagagcattctcttccacctttgactcagtttcccagcaggaggttcctcctgcccagttggagattgccgatgcccagggtccgtaagttcctcctagaatccctcccgagtttcttcctctgtgatccactcactgagcctttcctccctccctgccatcagcacttccccatcacttggtgagtgtcccggctagccccaggctccaaaaagccaactgtctctgtggcccatcgagggctgcttctttcaggcacaaagagctttcttccagaacaggagagcggctgctctgcctgaggaccctgcatttcccacaagcttgtcagtctgatccctgtgttttgccctgactttgcttttccagaaggttttgcacgtcacccaaggggtccctgtaaatcgtgtgcacatttttagtggttctacaggctattgactgagtgtcttgcagactggggatgtctccccacaatatcccagagtcctggcagcccaggccacttgtactgggagagaatgctgaggggtctgtggacacgggccccagcttggagggagaataagggactggggctgagttctctgccctccgtggctctggccccgagccctggaagtccccagagcagatgttttgctttcctccgacaggcgactggcccggtccaccctgctgctcatcccactattcggaatccactacacagtatttgccttctccccagagaatgtcagcaaaagggaaagactcgtgtttgagctggggctgggctccttccaggtaggtgtggcacatggggaggacagaactcactgggagccagggcctggttgctcacctgcaagtggtgctggagcctctttaatcttgactgtaaagtgagtgctagagtagaggtgatgagggagccctgtctgctgtctacccttagggctcctgtaagaagacacactggtgtctgcccatcactgcatctgagtatcctgagccagctgcccccactcctggcccccaccctgggtgacctgagatggcatctcccagcagcctggggtgcagggtggagtgtcctcaagagcccagtgtgtccacatcctgccttcagctttttaggccatgtaccccttgagttctgtcttacctacatctagatccccagcacagggcctggccacagagagcccagtgagctgcacaaatgcatgagcaaacagacatgagtgagtggggggatgagagggtgaacagaatgctgccttagtgcctggaggaaggagtggatggactggaaatgagtaaggggctaggtgaatcaccatgaggaaatgagcaggcaggagcagcagtaggtggatgaaggcaggggcagctccctggagtgtctggggatagagcgcctctccctaagccagctgtttgaattagtatttgatcttgatggtcagaaagttactctccatatctgacttgaccttctccaccattttaatccaaggccatttaaccgggcccaggttcttagtctggtgagactgactatgggtctcacctgagactggcctcatgggctcatagacaaagccctggcccaggagtgagagcccagggctcttgtctctgtgcttgctgaccagttctggggtccttgagctatcattcttccaacaccttcaaacgacagcacagggcacagggattgcaaggaactaatttgcagcattcaagaaaatgctcctgcttttttggtgtggatttaaagaatatatagagaatagctaagtgcatacgctgtgccaagtactcgctctgcgtggtgttctgcattgctgtgtatgatagtatctggcccaaggagggcagattggggagatgatggtggacaaggatggcacaggtctgttctgtcctggagggttcctaccctcagaagcctgcaggatggttaggagctaagagaaattctagggcattcagggaaggcttcttataggaagtgggatagagctggcctttgggaatgggaaggatctgaccaagggaatgtgagatccaaagctagaatgtatctgtgggacaggacttgaccaccagccacgtggcctcatgggtgtgcccatcttggtagagtagaactgtcccatcttaccccagatccctgggcaggtgcccccatccaggtcatggtgtatttctgcttcctagagtcatcccctccatgccccacacagcatttcagaaagtcctttgctagcatcctcaggcttattttctctattcccagggctttgtggtggctgttctctactgttttctgaatggtgaggtaagaccttggccctctggcttcttggcagtggaagtggggctttctggggagcagacaggggaaccacctgttggccacatgggactgactcttcagagagggctctgccaggctcccagcactgagaggaggggctggtcatacagctcctggcattgtgtggtgccaggacctcctgatacccacaccctgtgctggaatctgtcccactttgccagctgtgcagctaaggccccacccaaagagcaaagctcctggtaaaagcgtcggctctgctgagcgcagatctccctgggagggtcctctccataagacactccgtggtgaggaggaattgacaataaggaagggtggggcacaggacataggacctacaggccatgaggctgtgctaggcagagctgctgagccaggagctgcctggcactcagggttgcccttaactggccagccagcctggcccaaactgtcccctggtagaagggagactgtgagaatttggaagagaccccagggagagacctggaaccttctattaatactccattgccagagctgtggttcgggggctccctctgtaccctattggggtaaagcgcttgagcacaacccaaaacagaggtgctggggcagcggtggggactgaatggctagggtggatttgagagtaggcgggagtctttgcaccagtgcttgggtcttagctgcatcaccttggcaggctcctccctcttttgcatctgagcaacagagattgggctctgtgatcgcccagacaacctacagaaggatcagattaggacagacaagagaggcagaaagggccctgcaggtagtggccaggagagcttagaagtgggcatgtatgtagcttgttcagagcttgcagtgaaagtaggagctggaactggagagggtgggtgtaggcgctgcttccagttgtgcagtctgtgcactgcacgaaggtgcttgactgagaaggcacatggaggctgagactcagcatggcccccactcaccatgctaagagctacatgggtgtgtgttttcccagaggggtgcattatttaatggttctcaaccctgactgggaagctttaaaaaatatgatgtctgggtcttgtgcagaacttttgatataattgttctggggtatggcctgggcatctggaatttttaaagccccccaggtaattctaatgtgtagcccactcttactggtcagccaagagtggggatcctttcctgatccacctgccctgtgggactgcttgttaaagatttcctgaaggacccaatggactattctctgcctggcctgaaaacaacagggagccattagagggccttgctcagaaagtggcaagggaaggggctgttccggtcagctcctcagaggcttccttgcctacagctgctaaaagcccccactggagaccttgagggccgcaggctgcaactggggagtggggagggtgctgagggtggcactgccagcctgggaagggccccaggccaggacagggcctggaggctgcagaggatgtccatctggaagtgaccgcccagtttgctccctgcaggtacaagcggagatcaagcgaaaatggcgaagctggaaggtgaaccgttacttcgctgtggacttcaagcaccgacacccgtctctggccagcagtggggtgaatgggggcacccagctctccatcctgagcaagagcagctcccaaatccgcatgtctggcctccctgctgacaatctggccacctgagccatgctcccctcctcctcctctcctccatccacaggctgggaccgcaggcaggtgccagcccacgcatgtttgcgcctcttccctccccttgggcaggccctgggctggaagcttggctcctgaggggggagaaggaggcagggcacagactggaattgtcccctccttgttttggtactggtcccacccactgtggt

SEQ ID NO: 638 - protein, 468 aa, Homo sapiens
MAGVVHVSLAALLLLPMAPAMHSDCIFKKEQAMCLEKIQRANELMGFNDSSPGCPGMWDNITCWKPAHVGEMVLVSCPELFRIFNPDQVWETETIGESDFGDSNSLDLSDMGVVSRNCTEDGWSEPFPHYFDACGFDEYESETGDQDYYYLSVKALYTVGYSTSLVTLTTAMVILCRFRKLHCTRNFIHMNLFVSFMLRAISVFIKDWILYAEQDSNHCFISTVECKAVMVFFHYCVVSNYFWLFIEGLYLFTLLVETFFPERRYFYWYTIIGWGTPTVCVTVWATLRLYFDDTGCWDMNDSTALWWVIKGPVVGSIMVNFVLFIGIIVILVQKLQSPDMGGNESSIYLRLARSTLLLIPLFGIHYTVFAFSPENVSKRERLVFELGLGSFQGFVVAVLYCFLNGEVQAEIKRKWRSWKVNRYFAVDFKHRHPSLASSGVNGGTQLSILSKSSSQIRMSGLPADNLAT

SEQ ID NO: 639 - DNA, 15576 bp, Homo sapiens
  source
  (1)..(15576)
  CDS (201)..(257)
  CDS (4966)..(5068)
  CDS (5195)..(5302)
  CDS (5999)..(6096)
  CDS (7251)..(7348)
  CDS (8095)..(8227)
  CDS (10117)..(10270)
  CDS (10561)..(10621)
  CDS (11103)..(11172)
  CDS (11909)..(12000)
  CDS (12561)..(12690)
  CDS (13413)..(13454)
  CDS (15251)..(15376)
ctgagctgggcaggtgtcctgcaatcctggtgaatattcagcggtctgtgtccccttggctagctcctgcctatgcaaacagccacctgagaaggggaagcagagggtgcggtggaaacggctgtgtcaggggacagcaggggaaggaagatagccaaggcttactgaggctggtggagggagccactgctgggctcaccatggaccgccggatgtggggggcccacgtcttctgcgtgttgagcccgttaccgaccgtgagtagccagctgagaccctctggcctctgccactgggctccagatttgggagccacagggccaactggagcctggcggagaccctactgcccttctcctgctctagagtccctccctacgagcaggtggcaggctgtggcttggagagcccctgacactggggctccctccctcatctccctctgcccagcaatctgtagtgactctgggtagtgctattaacatgtccttccaggggctgagctgagctcaccttcttgttgcttcccccagggcctggctgtgcctctgggggccacagagactctgtctgccacaagacagtgcctcagaattggtgaggcaaagtcaggctcccctcttagtccctgcagtttgctctttctctcagctgtgcacctgtgatgcttccacacgctcctgtggtaagctttctggacccttccttagccctatgactccctgagccactctccagtttggtggtttcctttgaagagggtgtggccagggaaggaatggaacctaaggagttggtggagaccagctgcttctgctccagcacttaggggatccatcatcttctcacgatgctgagggctggagaggcttttggcaaccaaattgtactccatgggctagagcgctggagcacggggcatcaggagagagggcccttcctgaatgggctgcagtttcccagtaactttccaggaggttactgcaagtgacagcagggaccaggctgggagtcacaaggttctgggatggtgagggcctgaagcattcttcctccgctgccttattggagggtgctgcccctcccgagcaccttgctgcacctgctcctgagtgcacaggctttgagcttgaatcctggacgcatgaaactagccgtgtgaactgcaagttcctcagccttcctgagtcttgcttttatctcttttgttaaaagagaaaatatccgctggcccgggtcactgtgcattgagtggaatctgatttgtcaagggctgggcataggggtgcaacacaggaaacttcgactgcccccctgtctgccatctgtgtgcactctacagcaaaagctttatttttagcaggggtacccaagatctggtggtggccattcagcagatggtgctagtaccaaagctagaactcaatcactgtttgccagtgtgggcatcatcccctgcagataccaggaagagcagcaggcatagatgcaaggcctgggggtccagggcgatggagcctcccctcaggggtgggtggggtccacgatgtgtgtgggggggtgactgggagccccaggatgtgtttcgccagtcctaattcagcaggagcatttggataaatcttagaacgatctatccttccactcccaccacttccctccctagaatctctccttacatctggccctatgcccacacatcctgagtcattagtggggcttctctgaatttccctccttctcttagaggtgtgggcactgtctgttcatccttttggcatgaggctgctctcctggcatcctttgccctcagttgcttccccaaattggccctgaaaagtttcccaggcagggttggggcttgccagactgtgcagtaggcagaaggataggcagagaccacagctcttccaacagcccagggtcaatatcaggctgatggtgtgagaaagtcccatacaggcccatctgccctcctgctcttccttccccgctttgtgcgctcagtctgttgggagatgtaggggagacgcaacggggctctgccctgagatggacctgaggttactgagtcctcgggaggaagccaagagctgagtccggggcacccaccaaaataagacctggagcctgggtagtgggtgacatctgcaccctggggccttgcagggccaggcaggagatggcagagctgcgtccaagccatggacccatggggtcagcagggcgggacaggagtgacttctcctgccagggtagcactggtgggggtgaccctccttactgggctggctctccagattttctcctatcccacaaatctgcggcagagctctcgggtctctccacgtggtcacccaccatctattgtccccactctggtggtcaaagtctctactctctgaccccagccctggtcttacatctgctacactatttgctgtgcctgcatttctcccaaagaacactagctgttaattaaacatttgctgacatggatcctgctagacattgagggtgtgtgtgtgtggggtgggggtgggggccatggggagagaaacattagtcctgagctgatacttcccaaatacaccttttcccacttcccttgtccttgcacatgctgtgctttctgttccagatgctcttctccccactgtgtgtgtctggctctaaaaaatgctcccttgtccccaggtccagctcaaatgccacctccccaatccctgtgagagggacattccctcccatggtacctgtcttgcttctttttgttttttttttgtttttctgagatggagtctcactttatcgcccaggctggagtacagtggcacaatctcagctcactgtaacctccgcctcctgggttcaagtgattctcctgcctcagcctcctgagtagctgggattacaggagcgtgtcatcacacccagctaatttttgtatttttgtagagatagtgttttgccacattggtcaggctggtgtttaactcctgacgtcaggtgatccgcctaccttggcctcccaaagtgctgggattacaggcatgagccactgcgcccggcccctgtcctgcttctgatcacagtttgcgcagggtctattaggatccagcccttctcccttccccagcccctcctctcctgtgaaagcctgggggaacagacatctacactggttgacttggatgtgtgttttatacaaaaatgtgtatgctgtatacccagttcacagtgcagaaagtatgttttgtaaacttggcttcccttgtatgtatctgtttgggctctggcctgctgggcgatcagttttggttttccttcggtttggggcggtgggagggagaagtgctagaaattcctgctgttcacttccagtttcctggagaacttgttaaaatacaaagtgctggatccaccctagatctctacatattcctgcttccatcccaatggatctctagctggttcttgaggcacactttcagaagtactgctagaagattcccaaaaaaaccccaacttgtttccagcttccagagatcatttctcatggccactgtgtagcacaagatctgggaggctcctaaaactataatctttcaaggttgctcagccatcaaggttatgatcctttcatctacacatccatgaagccacacatccatccttacacagctctctcactcatccaccatgcacccatccatgcagccagtcatctgtctatccatccatccacctccccagccatatatttgtctgtctgtctgtatactcatccattccactagccttccttccttcttttctgccttcctgccttcctgccttccttccctccttcctttttttatgcagccttcacctcattcatgtgctcactcatccatgtgctcattcattcatccatcttctctctcacttactaagctacccatttgctcatgtgttcctgcctgtgtgcacccctaaaagcagagactgagacaaaggtcagaaatttaaaatggtttccagtggggtaaatccaaagtattggcagagctgcattcctcctggagactgtagagaataatccatttccttgccttttccttgggttcatgccctttctccatcttcagaccagcagtgtggcatctttaaatctcagttcccacggcacacatcctcatgtcacctcctctgattctgactctcttgcctactgcccatcctataaggagccttgcgattacatcaggcctactcagataatcaaggatgagctttgcatctcaagatcctgaactcaatcacatctgcaaagtccttttgccgtttaaggtaacatattcacaggttccacagattaggatgtggacatctttgggggccattattctgtctaccattattatgcagaactgcttccagggagcaggagtggagagcaaggagaatgacacagggaaggaggaaaggccctgatgagaatggagttggccatccctgtgagatcttcagaagcatattgtctaatgtgtctcagaacttacttacatgagacagaatggagaaacatccatccaaacctaggcagacctaggtttgtataccaacttcctcttttccggggtgactttgggcaagtcggtcaaccctaacctctgcttcctgagctgtgaaatggaaagaacaagagcattaactgcacaagagaggattagaccttctgttcctccctctctccctccctccctccctccctccctccctccctcccttccttccttccttccttccttccatctgaacatctaccaaacacacctgaaactactgtgagcaggtctttgcctaggattagggcacagatatgaatcaggccttgtccctgttctcaggtcatgtggaccacagagcccagaaagacacccaaatggcttggctcatcctgttcactgtttccagcaggtattgggccacatgcacccagaatgtgacttcatcacccagctgagagaggatgagagtgcctgtctacaagcagcagaggagatgcccaacaccaccctgggtatggggcctaggaggcaggtggtggcttctctgattcctttatatcctccagcctcacccctcggattattgggacagccctgcacctgggctgagtctctgctgctcctggctctctatccaggctgccctgcgacctgggatgggctgctgtgctggccaacggcaggctctggcgagtgggtcaccctcccctgcccggatttcttctctcacttcagctcagagtcaggtgaggggtgctgggtgtggcggtgggaaagggaggtgctttcatctggaagtggcagaatcatcactggatttgggggcaggctaacctgggtttgtataccaacttcccctcttctggggtgacctcgggccagtcagtctatcctgatctctgcttcctgagctgtgaactggggagaacaagagcattaactgtgcaggaaagtattagagtgcagaacctgtaagtgctggacctggatgccctccaggtgttagcagaagcctggctgcaagggtggaggagggcaggcctgcctgactgccaagacaccaccaactgcccaggatggagagggtggggcactctgctgctctgcttcacttccctggcctaggtgctgggacagtgagggcctcttttctccctactgcccttaggatgctggcagcccagctcaccactcctcacccctcaggggaataatcctctttgtgaagagatggcacctttgaagccagagaaggaaggccccatagtgtgtccctgggcaggctagacctgggccccaggcctctggagccaccctctctgttgctcagaggagctgtccatgcaaaccctgccagggtcacttgatggtccctggcacccccagccccctcctggggagagggaaggagttgtggctagagagtcttgcttgcctcccaggggctgtgaaacgggattgtactatcactggctggtctgagccctttccaccttaccctgtggcctgccctgtgcctctggagctgctggctgaggaggtaagagtcttctggcatcttggaggaaggactgccatggacatttgtatgggtgggtgcacaactgtaggggccgccattctctagcctgcagattggaatactacttacagcagttttccagcagagagcagtgaagtgtctggaggagatggggtcttttgctaagttactgaagggtgacccacgggccaagttacttggagggagaagcggggcagagggcaggtgggagatctgccggctgctgtcttggttctgtgtccaggcctccagggcagggagcttaaagtggttccagaggaaacaaggctcctagcagccctgggaagctcctttccttctctggccctcagtctgtggagcagtgtgcatggttgcgatgtgggcaagtgagggaaactcaagcccagggtgattgcagagagctcctaacaccagccagcacaccgcacacttgtgtatccagcagggcctttgccaggcactcccaaacccatcatcccatttctctgtccccttgatctctgagaggtaaagcatgactgtaaccatttttcagatggaaagactgagtcagggacaggaagtgattgcctggaccccacaggagagctgggattggggccagtgcccaggcccctgctcccttcccttgcctgcaccctctatcttcagggccaggctggactctgactgatccaaacacttggccacggaaaccttttgcctgcctgcctgtggctgtccccaggtgtccctggctatctcctttatttggatacattgtgttcccaagctggtgagcaagctggatgtcaataaacaagctgatttcctcttgggcttttgtcattccccagggacatgtagtttctgcggctgcctctcctcaccctcagagcatcatgaatgttaagcatctccactcctcgccactacccctccctcacccgcaggtcaggtggaaggcaggctgtaaactaaagctccagtgcacagggggagctttccatggtactcgcggacacctctgcctccagatggggagtgttggggtggaatggcaaaggcttcacctgcttgattgtcaagcctctctttcctccaaaggcccagaagctgagactttcttctgtctctgcccttcccaggaatcttacttctccacagtgaagattatctacaccgtgggccatagcatctctattgtagccctcttcgtggccatcaccatcctggttgctctcaggtttgtcatcctcatcaccagctcaagaaccttccttggctccttatttcccagagggtcaagtctgcttccttgcctacatagccatgaacttcccagatctaggcgccatacccatgtctaactttcccttcccttttccccaccatgtagacccatctcttcaaacaccagaactcattcctacctctgcccctttgctcacgtggtgctcattctatttgcttggaattcctcattgttctcagtgtatttataactgagaaagcccagctcctatctgcatctgacagtcctctgcctcctgcccagagcccctcttgactgttataactctctgaccactgtcccctttaagaccccaccccctcctccagccttcgaagtctgagcactgcatctggcctgtgctgttcttggtctcatggggatgagtgtctctgatcatccagggggctcccatgggcagtacctgccgtttctgcctctgttccctgagactgtgagcaccctcgaggcagggaccagatattcctctctttccacacttaccctgagcacaggaatggttgctcagctgtcctgcaagggttaaactgaagcctcaagttcagctcaattcaattcagtttgattgcatccagtttgattcgattcacctcctgccctgttcagcccagttgcagcacaccagaatcccctctccctgcttgcttcttgttcctcatttctcccattacccccaggaggctccactgcccccggaactacgtccacacccagctgttcaccacttttatcctcaaggcgggagctgtgttcctgaaggatgctgcccttttccacagcgacgacactgaccactgcagcttctccactgtaatggccatgggtgaaggggctgggcaggtgggggagagaggaggtaggattacagacccagatgtgcctgcgtcaggcttccctgccctgtgggctgaccctggggctcccgcatggccaattacagaacaggaaaatgctcctttcccatgtcaccccctaagtcctcacgcctttcctggactgtggtgtcgatccatgtcatttcccatattgcatgctctactccgcgttctgtagtccaacctagaccacgtttcactatgcacagccttttcctttcctttcacccctccctgagcactcataggtctgtgctgggggtgtgtacgcaaggggctgggaggagctgggtccctccttcaggaagagcccatgggacagaatgcacacagattaggggactcccaagtggaggaagctgagagctaggagagaacgagagggggcttcagggaggagaggaccctggagctgtattggcagcaacaatagggagatggggaaggagaacatttcaagaggagagaccagggtgaacaaactctcaaagacaggaggacctgggccatgtccaagaaactgggaaggcaccatgggagagatggggtggagacaataagaggcaattgaaattaaagggaagttgggcagaatgtggagacccagcacctgctagatcctctgcaagtgtgctggaaatgaacagcgaaatcagggagcaaactaacacatgacctcaattaactgatgaaagaattaatcatacttcatactgagcacttattttgtgccaggcattgcactaagtgctttacatatgtagttgtcccttgaacaatgtgggtttagtggtgttgacccccctttcagctgagaattcaagtataacttttgtgtcccccaaacttaactattgattgcctactgttgacctgaagccttaccaataacataaatgaccgattaacacatatttgtctgttacacgtgttatatactgtattcttacaataaagtaagctagagaaaaaattttaagaaaatcatagagaaaataaaaattggctgtttttaaatggaagtggatcatcatgaaggtcttcatcctcatcgtctttatgttgagtagcctgagggggaggaggaagagaagttgatcttgctgtcttaggggtgacagagatggaagaaaatctatgtgtaaatggacttcagcagttcacacctttgttgttcaagagtcagctggcattatctcttgaatttttaaaacagcttgaagaagaaagcatcactttaatcccattttgtagaggagagacagttggcaaggtcacccagtggcacacgggtggggctgggatcaaacctgggccaactgaactcagaggtggtcctgctcccctgccggcaggtgatcaagtcatgcagtgagtgagtgaatgcacgggtgcctgtgtgtgttttttgcaagacagagctgtggctgaataagtcacagctctagggattgacttcagctcaggaaggatgggggtaagtgaaaatagaagcaagtcttaggcagtttccatttaatccttatgatgaggacttgatctaggtattggaggtttttccttttacagatgaaaagctaaggtgtgaggagatttgcacaggaaatagatagtaaattagaagccaggctgtctagataccaaatctgtgctcttaaccctcactgtatatcaccacatcccctcttgggtggcccaaggagctgcaggtcccagcctaacatggaggggcctggaggttctgtatctgagtagggtagaggagactgggatggggctccagtgggtgtcccagctctgaagcacccaggtcctggcccccaggttctatgcaaggtctctgtggccgcctcccatttcgccaccatgaccaacttcagctggctgttggcagaagccgtctacctgaactgcctcctggcctccacctcccccagctcaaggagagccttctggtggctggttctcgctggctggggtgagcactgagggcgggttgggcaccatggggaggtaaagggctggaaaggcccagggagtttacataaaggcccctccacctcactctgaggcccagagaaggagagggacaggccacagtccggcagcaagtgttggagggtgggaccagggccctggctctggggtcctgcctggccctgcctttgcagtgccctacgtggctgatggtggtggtgggaggtggcgccagatctcagagtcaaggatgcagactccctcgcttgtgtcttccctgtactcctgtagggctgcccgtgctcttcactggcacgtgggtgagctgcaaactggccttcgaggacatcgcgtgagtcggagcggccaccttgtcatacccgctggtcctacatggggtgtggagtggacagtcaggccatgggctgttctccaggctgggaagaggaggagaagggactgcccggctaggatggggggtgggagaacagtctgtgagtagcacagaaggggcatgagccaggcaggagagtggagctcagattcccagggctgtggggctgggggaaggtggggtgagggagctgccagggggccagcaaggaggcattgaacagagttcagaaacgtttgtccatctaggtggatagaaagggtgagcccagcctggattggggtgcccctttgggtgagaccttaactggctgagacaggagaaaaggctggaggggaggtgggtgagaccagaaggcatgaatgcctgagagggaggtgcctgcgtcaccacagtgaaggggactttccaacaacggccttctttcctctctccccaggtgctgggacctggacgacacctccccctactggtggatcatcaaagggcccattgtcctctcggtcggggtcagtccctgggccagtgccctttgctttattcagtcaacttccctggaactactgacgggctgtgcacagcaggaaatgcaactccaggctgggtgtcttgaaaactgggctccagccttgctctgccactgattctctgtgaggccctctctgggcctcagtatcccattggtaaaactagaggggtggtggtctccatcagcatgcaggctgttccagctcaattttgatgagcctaatgtgctggttgcagatcatttaccaccacagtgagagactaggggtgccgggtgggggcagtaaatggagtctgcagctaaacccctctcctccctctgctctcacacacaacacagaggcagtgaagactgctttgcatggctttggtaaatgtacaaatgttttgcaacttagcaactgtgcaaagtgagggacatctgctttgtgctagagaagagcctgggaggtggctggaggcaggtggcaaggcctgatcgccccccttgatcccaggacttggtccttctctgtccaatgctcaaatgtgggacccccgcccccccatctccaggctaccagttctggagcaatgatctgtgcattcattcacctgcacattctcacgtctcaaggatttaaattttctagtccccaaatgggctggggctcaccccagccacccaaggctaccccctgacccttgtcttccaccttcctatgcctctatttccaggtgaactttgggctttttctcaatattatccgcatcctggtgaggaaactggagccagctcagggcagcctccatacccagtctcagtattggtactgtgtgtttgtgtctggggatactgggaaagggtaactggagggggattcaatgtgtctgtctcatccaataagcactcatgacctcagccccatactctttcttccctatgttcccagagacagaatagacctggccccttccttctaggggatcacaatattggaaggatgaggactccaaacagccagctcccatgccaaatagaacgatgagtgctgggatcaatttctatgggagcctggggagagggatcctttctagttgaagggtggtgtggtcaaggaagacttcctggaggaagtggttttgatccacactttgaaagatgcatagactttgggataaactggggcaataacagttggtaggggaatcagcaggatccagcgcccagaaataaaaaagcccagagtgattgtggggaggtggcgtttcccaaggtggctgttccacagagtggatatagggaggtggtaggaagtgagaggagatgaagtgcacacgacagtttctaatcccagtcttgggagcctaggatttgtctttcctgcaggcgtctctccaagtcgacacttttcctgatcccactctttggaattcactacatcatcttcaacttcctgccagacaatgctggcctgggcatccgcctccccctggagctgggactgggttccttccaggtgagggcccccacaggcactctttctttccattgagggtgctggagggaggtgctgttgcccacgggccttggctgagttcatgacagggtgagggctatgtttttcatccatctattcaaatatctgtctgtctgtccatcttccagccacccatctacgtattcaactacccatgcattcttccatccatccatccatccatgcatccatccatccatccgtgcatccatccatccatccatacatccatctacccacccaccaacccatccatccatccatccatccactcacctaaccacctacccacccacccatccacccacccattcatccacccacccacccatctatacatccatccacccacccactcatctatccatccatctatccatccatccacccatccatccaatctattcaactcttactgatcccctattatgtgccaagtgttgtgctcattcacaagggatgcagaaataaagtcagagaaatggggccaacagtacagccctggcaggcttgctatgacaattctatgacaatatgcctggcacatagtaagtaatgaatgcatttaaattcccctttcaatcaaacctggcccaagccatagcctggggatgagtagggaaaaggtagcagaaagacggtggacaccttcaggccaggccaaagggttctgatggggtctttcttctttggacccacagggcttcattgttgccatcctctactgcttcctcaaccaagaggtgtgtgatttttgaggctatccctcatggagtccccctcccaccagacctaaggcccctcctcctctctcccactcaggccctgtaaaccccagctcaggccacaccttcactcttgtgagcttttgtggtagtctgtcctgagcttctggatcaagctgaaccggaatgtttcctgtaaacatctcttatccatccttcctctgagctgggccaagttctactagctactcttcaggaggtggaggaggcctttcagggataaggagggggattagggtagggagtcagaaggaatcccccaattctgtgttcctaaaattgaacaaaaaggagagttggggagggggtacgccagctgagggagagacaatcagagagaacagatagaggagccaagaaagtcagaggtaaacatacagggaactaggaaaataatcagatgcagagacaaagaggaagatctggagcccaagaaacagagagagcacctaaagaaaacagacacacaaagagagtggacagaaggggagatagacatgaaaagacagaacagatggtgctgctgcacatgtggaaacgtggggacacgacagagactgacgcaaagtgaattccacccaggagacactgaatttcccccttaggacagtcctgctctggggagagaggcgggggagaattgatctcaatgccccggactcccaagttccacctttgtgcacctgcagggccatgcgctccctctgctggccatggatttgccatgggctctgcattctgtgagagttggctgcagatgccctgtccccttcgctgtggagttttgctcccatctcatctgccacctctgtcccttactgctccttccactctccctctctttattcctcacctgacctctctaagtcccatgcagccttatctggtgtctggctgtagcagaccatgggccctgggggtcctgggaggggcaagaagcatcccaggctgaggctggtggggtgtggaaaaagtgtttccacagagaggtgtgaagggagctgtcttgggaagcagtgccggagaccaggtggttacatacctctggtgacagtgagcttactacatcccaatagctctttctgttgtcaggcagctgtggaaagatcatctttatgttgaacagatatctgattccttttatctttcaccacaaccccagttcggctctactgcatgaggcacattctctcagcaccctatgcccctgaaagccccttggagatgtgaagatacagacagcacccccaccccccaatcccaccgttccatcttgccccaggctacttttcttttacttactttcagtttcctcaactgcaacccctcagacagagttctgaatcctctctcccttcaggtcatgtcctctggacagatttccagtggccagagttgagctcacaaaattgaatcccagagcaaggagtggtctaagtgattaagagagaacagggtggttatttggccaggaactcaagaaagcacctataaatgtctttaactgggctcagacaaaggcagggctaaaaggcagagaaaggagctaaaagaatggtgagaaatactcacaggaaggaaaaagtagtatcctccagaggtagtacttagcagtacctgttgccaagcatgacttttcctgccccatgtctctgtttctcttacacggcctctccctgcaccttagtctcattggggttgagtagcaaagccacagggggaccttcctaacgtcctcttccttgtccctggaggtgaggactgagatctcacggaagtggcatggccatgaccctgagcttctgccagcctggaggacccgtgctaagtggaccacgccttcccgctcggcggcaaaggtgctgacatctatgtgctaggctgcctcatcacgccactggagtccacacttgaatttgggcagctaccacgggtctgccatgctctggaggagcaagggggccacatccccaccccagctgttacccagcccggggcaggtgcagcccttcctccctgtctctgcatctgactctcttttgaggtccctgtatgtctacctctgacttctgtggtccct

SEQ ID NO: 640 - protein, 423 aa, Homo sapiens
MDRRMWGAHVFCVLSPLPTVLGHMHPECDFITQLREDESACLQAAEEMPNTTLGCPATWDGLLCWPTAGSGEWVTLPCPDFFSHFSSESGAVKRDCTITGWSEPFPPYPVACPVPLELLAEEESYFSTVKIIYTVGHSISIVALFVAITILVALRRLHCPRNYVHTQLFTTFILKAGAVFLKDAALFHSDDTDHCSFSTVLCKVSVAASHFATMTNFSWLLAEAVYLNCLLASTSPSSRRAFWWLVLAGWGLPVLFTGTWVSCKLAFEDIACWDLDDTSPYWWIIKGPIVLSVGVNFGLFLNIIRILVRKLEPAQGSLHTQSQYWRLSKSTLFLIPLFGIHYIIFNFLPDNAGLGIRLPLELGLGSFQGFIVAILYCFLNQEVRTEISRKWHGHDPELLPAWRTRAKWTTPSRSAAKVLTSMC

SEQ ID NO: 641 - DNA, 44979 bp, Homo sapiens
  source
  (1)..(44979)
  CDS (201)..(1083)
  CDS (44262)..(44779)
  modified_base (36324)..(36423): a, t, c, g, unknown or other
tcatgtggccttctgagggttcccagggctggccagggttgtttcccacccgcgcgcgcgctctcacccccagccaaacccacctggcagggctccctccagccgagaccttttgattcccggctcccgcgctcccgcctccgcgccagcccgggaggtggccctggacagccggacctcgcccggccccggctgggaccatggtgtttctctcgggaaatgcttccgacagctccaactgcacccaaccgccggcaccggtgaacatttccaaggccattctgctcggggtgatcttggggggcctcattcttttcggggtgctgggtaacatcctagtgatcctctccgtagcctgtcaccgacacctgcactcagtcacgcactactacatcgtcaacctggcggtggccgacctcctgctcacctccacggtgctgcccttctccgccatcttcgaggtcctaggctactgggccttcggcagggtcttctgcaacatctgggcggcagtggatgtgctgtgctgcaccgcgtccatcatgggcctctgcatcatctccatcgaccgctacatcggcgtgagctacccgctgcgctacccaaccatcgtcacccagaggaggggtctcatggctctgctctgcgtctgggcactctccctggtcatatccattggacccctgttcggctggaggcagccggcccccgaggacgagaccatctgccagatcaacgaggagccgggctacgtgctcttctcagcgctgggctccttctacctgcctctggccatcatcctggtcatgtactgccgcgtctacgtggtggccaagagggagagccggggcctcaagtctggcctcaagaccgacaagtcggactcggagcaagtgacgctccgcatccatcggaaaaacgccccggcaggaggcagcgggatggccagcgccaagaccaagacgcacttctcagtgaggctcctcaagttctcccgggagaagaaagcggccaaaacgctgggcatcgtggtcggctgcttcgtcctctgctggctgccttttttcttagtcatgcccattggtaagtcttgaacacccctcactttagcatctgggggtcttcaccctcctcggcttctgttaccccagactcccagtccgggatggaagaggaaggattagcatttcaaacagcacagctctagggcaattagaaaaggctcccttgtagaaaagtgaattttcattctctttctactccagtctcatttatattaggtcctagagcactttttcgactgtaaagtggcttccaactgatgcagattaattggtctctttaataagaatgtcaacttttcttaatgcctataagcacgtgttcaatttaaatgcatctgctctctctagtctcagagtctccaccaagtgcttaggctgactgtggaatgccattttcactctgctacagaatgcaaattctcttggcctgaaaataagtaccatgcttattctggacaaatgtgtgattttattattgcattaggttattcataagggtttgttataatggtctgtttatgttctatatctgtgctaattttattttctggattcagtatggaaggaattatggtcagccactaagaaaaaaaaatgattttatgtccaaaccaatttaagccttaaataattaatcatagtatttccaataagtaaatacttatttttttattttaataataagtattaaaacaaacacttctcttatccaaaatcatccgggaagttgcagataacactgtttgaaaataatacagtacacataatgttacaaatccaatttttgcagatgctaaattagctgttgtcaaaattaattagctcattataagtatcagcaagctgatccacttggaatagacatctatctccttcaatgagatcccaaaatggttgtgtgctatttttagtttgtaagctcaaatacagacccaaacatcgattatccaccaactctaaaaaacaaaacattatgcctaacattaataaaagtccatttcaagtgctttacagcctaatttaaatggcatatacttaaagtactttaatttgcaactctgtggaataatagcaactattatttttttgtgccacttatgttccagacattttcctaagctttttatttcattagtcccctcgacaactcagtgagttatacacaattatcctgcaatcacaagccatgggaagggattcttcaggttctaataccatagccaccagccaaggatagctatttaaatgttaattgaaattaaataaaattctttcagttcctcaattcctcagtcccactgaccacatctcaagtgctccatagtcacacgtggccagtgactactgttttagacagcagagatataggtcatttctatcattgcagaaatgtctgtcctgtagggctgccagagaggccctccttaatccaatacctggccttccattgtgcctgcccatcattattacttactctgctcctggaagtacatcacagctttgaaattatagaaattacactctttacctgagcccctttgcacacgtattcatgcgtgtgctcgctcaacaagtatttatggaccatctgttctaggcactttggatgaacagggcagaaaagtccttgccaatgagacggttgtatttggaaagggtagacataagcaaatgattgtatcctaaaatgtcaagattaacatgcactatcaaaaaatcaacaggatgagaggctagaaagtgacaaagacaatgagggcctgctttagtgggtagtggggaaaattctgtctaaagaggtgatatttgagcagagtcctgactggactgaagagcaaagcttgcaagatctgggaagaagagcttcctgggcagagggagcagcgagtacagagatgggaaagagcctgacctgttcaatgaagatcacagaggccagtatggctcaactacagacagggagggggcagtcaagttcaagaagagattggagagatagacaacaccaaagtcatatggggtctttcaggccaaagtaaagtttgcatattattctaattgtggtgggaagtcattcaagggtgtttagcaggtgagtggccagtctcatttatatttttgaaggatcattctggttgttggggggaaaattggctgtttgggggcaagagcagaagcagagactagttaaaaggctattagaagtcgaggggagagaggtcatgacatcttggactcaggtgagacaggtagaggtggtaagacgtgatcacattcagcacttattttacaggtaaagttgatgagtgtggacaagggtgtgagaaataggtaggtttagggcctgaatagctgagtaaatagtaatgcacttcactaaaactggcaaaaccaaagagttatgtggctgcaaggggctgcagggagtgagaagtatgagcctttcttttgtatcactgtgttgagaaacattcattagacatggaagtagagatggcaagtagggagttatacactttacatagatttggagcttagagaggaggcgggctacagatataaacttgggatatatcaacatctttaaagctacaagaatggagaggttgacaagagaaaagataaagagagtaaagagagataagaacagagcctctgcacctttagtcccagctatttgggaggctgaggcaggagaatcgcttgaacccgggaggcagaggttgcagtgagccgagatcatgcctgcactccagcctgggtgcagagcgaggctccatctaaaaaaaaaaaaaaaaaaaacagagcctctgggggtcaggtcaggaaaaacaggagaaacagccagcaaacaagattgcaaaggagtagccagggagaagaaaaatcaggagaatgtgatgtcctggaagcctagtgaaaatgtttcaagaaggcaggagtaatcagctgtgtcacatgcagctgagaggtcaggttagaggaggactgggagccaacactagatttggcagtaagcaggtttttagtgataggaggaaggcacgtgaggctcacaggtccagaggagtgatggaaccaaaagcctgattgtgtactttctagaaagaacaaaggataaaaaaagtgggaacagggaaaatagacaactcttctgaaaggttttgctatacactggagctaggagatgcggtgtagctggaggggtatagagagagctttcaatggtgggaggtggggatatgacatgatatttatattctgatgggaacgatgggatagagagaggcactgatgggataggcaaaagaggcaacgggattcagtgcccaaggggagcattgggaagtgacaaggagagcaaagtgtgtgagccctgaggcaagtagagacagagggagagagatagtgatctctttaggatatgtttatgtcctcagtgaaatatgaagcaaggtcatcagctaagagagagtcaggaatggggaacgatggcagttttagcctcagagaaggtgtgaaagattcatctttgagagtgggacagtaaacattttatggaagtttggtagagtcactgggaagtcctgaaggcctatctgagatttacggtcataacattaaagtacagcgggaaggagggttgtgtgtttttctctaagagctaagcagctgagggatacaggaggcaatgctgaggacctactgtgagtcccagagagtgtgtgtgtgaagagacacagactcggtcaggttagggagcatccacagccaggttgtagaaggagcccaggtgacgatgggtggcctgagagtttggagcttgcagtggtggctgagctatgcatagagatgagaaacaatggcctgggtcctggagtcatctaggggaggtggatgctctgactagtcatagcccgctcttggatttgctctcccagggagtcagcagtgtggaggagaagatgttgtggtggagagaagtggtggtagacaggagccctcggaatcactgggcttcttttaaatcctagtgaggtgccaggcgcggtggctcatgcctctaatcccagcactttgggaggctgagcaggcggatcacttgaggtcaggagttcgagaccagcctggccaacatggtgaaaccctgtctttactaaaaacacaaaaattagctgggcatggtggtgcacgcctgtaataccagctacctggtaggctgaggctggagaatcgcttgaacccgggagacagaggttgcagtgagctgagtcacaccactgcactccagcctgggtgacagagcgagattctgtctaaaaaaaaaaaaaaaagaaaaatgatatgacaggagggaagtagggaacatacagttcacagggtctgagtagctgctcagtagtgcaaaggatccctgaacctgccagtctgtggctctcaatttcttcctgacaccaattgagtaagagatgatttcctccaagaatgtactggctatgtaataagcaccaggctctcagctacacagaataaaaaagatgaataaaacacagtgccctcaagggcctcacagtctagttaaggagacaaattgtcaacaattattgcaagtctatgacataggtgctcagagtgatattattacatggtgctcaggatggtgctcagaatgatattattacagtgtgctaaggaatatagcagttcattgtgccgagaggtcactgagaagcttctacatgcatgaccattgacagagcagagacttaaagaagatggcactacttctgctgggtcgtcaacgagatgttatatgtttttttattaactgtcttaagtatgtttttcatgcaaaatgtgagcagaagaataaatatactatcatattattatattcaagggacatacattcttaaatatgacgtgctgttttggagaaaagggctgtcggtctgcactaggctgcgggagaggaaagagattaaaaactgaaaccagggcagggatgagtgtgctatccacagctgagaagtgaaacacccatgtttaatagggactgacccaggaaaatcaggtgagtaggctatttgactgcaaaggtccttcctgtatattgtgagaagtctcacgttcccttttcccaagcttctttccactaaggctgggttgcttgctgcattgaatagcatgactgttgggaggaatctgacttgcctgcttccaagtctaaatcttgctaatcttgttccatttttgcatcctaaatgtttggttgaaattcagaatgccttcaagggaggggggtgccatgtgcagttgttaacagtcatttatactttggagcaaatgctttcaaaagcaaattttggccatggagatgagtagagagactatgacggtgtcagccttcaacctacgaaagagaaggaaggataagaactctgcttctcaggaagctccagcatctaaagcctatgaatcatctttgttgatttcatctcattgtctagagcccactagttccagaggcagtgtgctgctgaatggagaaactgttggcctgagatttaaacctaggctttctttttcatataacaggggatgttatataggtcagctgcccagcatagtgcctaactcagagtaaatggtaataaatgttcatcttaccagaattcaaatgattcacagaccattactgatgtatgtcaacatgcagatgttgccatgaggggtggatgtccttggcattctaagaaatagaaagcattggaaagaagatgaaaaggcaacaatcactgaaaacatagttacgtgtctgaattctggatatgttatctgatttaaacacaaaacccagcgttattataggacctaagccattgattgctgttgccactgaatcaaaggaggcagcattgggctgagatgtggcttacatagacatagaatatttgaggattatgtttataaaagaacaggaggcagcacattgatagagcagaaaaatgtgttttaagattggatgtttgaggagggcacagctggcagtggatttatcaggtggaggcaatgaggcagagaatgattcattcattcattcagcagtttcattgaacatatactgtttgccaggaagctatagaatcactggagataaagacaaataaatccctgccctaatggagcagaacatctgaacaattagatacctagcaaaggtatatgaaaaatgacaaggaaaaaggacaagtacatacaatgatatatgataatcccaaaccctctgcggatgcccaagataaccaggggttgagggttgcttcactgcaggtacaaagggagcagttccctagttctcatggaaaaggttcacctcttagagataatggtgtgaagaaaaactagtgccattaggatttattttattttatttatttatttaatgacaggatctcattctttcacccagactggagttcagtggtaatcatagctcactgcggcctcgaactcaagtgattctcccacctcagccttctgagtagctgggactacaggcatgcaccaccatgcctggctaatttttatattttatttttatagaaatgggatcttgctgtgttgtccaggctggtcttgagctcctgacctcaagcaatcctttttctttagcctcccaaaacattgagattagaggcatgagtcaccacacctggctagaatttattttaagataagaagccagcgtttcagttactcttactacaccacagaccatcccaaaaggtagtggcttaaagcagcagccatctatgtctcatgattctatggtcaaaagtacgtcagcacccagcttgcctggcaattgaagctggctgtgagtcttggtggcctctgttcccttctaaaccaccttcttatagcatggcagctctcccccaagaaagtcaaggcagaaactgtgaggcctttgaagagctaggctcacacctggtccagcatcactgctgtttcattctgcagtcacagcaagtcaggagaccagcctaggttcaaggggaagcgagacagactcatctcttgatgggagagcagcaagtgtgtacacagaggggcagatcattgtagtcctcttgcagatcaccgacctcacaagtgtgccaaattacatttctctttaatccatcagttatattgagaacttcccatatgccaggcttcatgcaatgcactgagtaaaaccaactgggatctttgcctccctgcaggcttctaatctccagaaggagatagacattaatcagatagccacactaagttatcgaaaaccgtgtacagagcaatgaagggaacataaatggtgccttgaaaatatgtcctgtggctaagggtggtcctggactgggagggtagaaaggtctttctgggaaggagggcttgactattaagtccagatctattgaatgagtaggtgtttaaaggcaaaaatggggagggagggaagagaacgtgcgaagactttagtggggctggcttaatgtccataatgactttctagaaggccactgtggccagaaacaagaggccaagagataactggtgtccagtgaagctggaaagggaagaaccagactaaacaaggctttatagccattatacaagtttgtgtttttatccaaagatgagcaggaatgacatgatagagtttatacagcatttcaagattatcaaaggcttagtgaaaacaagattgtggatagaccagttgggagacctttatgcaggacaaggggagctgtatcctgccaagtgcaatccttctaccgtgccatttaaaaaacttatttccgtgagctgccacatcgttctggaatgcctcttttgtcactgccttcagagcttagatttatgagaaaagctttctcgtgatcagaaatagtataaccagacttggctttaaattaattttggctctttccacaagacaaatctgtcaatgaagatttaccatcattttcaaaagaacgtgctgcaggctcagaagacatcaacaatgagctctaacaatgctttgaacaatagctgactctttcaagtcaggctatagacaagtgagttattacttggatggagtaataatccttagtcacttagtaacaaagtcattgctgtgttctgtcacctcatggtttcatggtggatatgaggacagttttctaaggcattttctttgtctaacaagtttactgtattttagccctgctatttggtttgccagtttgacacttgcctagtggcttttcatttttatgttttctatttcttcgctatttgaatgtttcttttcttttcttatttttttctttaagttctgggatacaagtgcagaatatgcaggtttgttacataggtgtacatgtgccattgtggtttgctttacctatcaacccattatctaggttttaagcctggcatgcattaggtatttgtcctaatgctctccctcctcttgccccccaacccccaacaggctccagtgtgtgatgttcccctccccgtgtcatgtgttcttatttgaacatttctttttatatttttatccatcacttatatttctcctcttgtgaaatttcctatctgtgctttttggccactttttatacagcagtttttctgtctttttttttttatcggtaagctcattttatacattgaagataaataattacttatttatcacaaatcctgggttgccagtcttctcacactatatgcaaatgtgccaagaagatgtagcttattttccaaaaacggatgtgatcttttctacaaacttccatggaaatacacatatgcatgcactcacatgcacacacacacacacatgcatgcacacacacttttagttaaatttaataaactcattcaaatccaataatttatgcatcatctttgcatattcagtctcttggatgccttggtgtcctagtccattcaggctgctataataaaatgccatagactgggtggcttgtaaacaggaatttatttctcacaatcctcgaggctggaagtctgagctcaatgtaccaacagatttagtgtctgaagaagacctaccttcatctttatggatggtaccttctagctgtgtgctcacttggtggaaggagtgaggcagctccctggggcctctttctgcatcacctcccaaaggccccatctcctaatatcatcacactgggggccaggattccaacataggaatttcgggggtggggcacaaacattcagaccacagcacagggcctttcagatctgccctctaagatactgaccacgcctaggggcttacaaatgtcatagtagtcagagagggtttgactatgactccattgtttcctggctccagtgacactggctctgttgctgttggccagggagtcactttgtccctgcagccctgtgaacaactttgacaacctcctgcaccaaattctcaacaatgtttccatcccagtctcagggcacagagagcctggtgggttccttccacaccacactctctaccccaccacactggctgccacactaacaggtatggtggctctcatggaaaggactgactatacccagaatggagaatgggagaaagcacctctgcctgccccccccgcccgccccgctttaacttcaggcatttttttgttccagacatggtcttgctgtgtcacccaggctggagtgaagtggcacaatcatggctcactgcagcctagaaccctgggttcaagtgatcctctcttctcagcctcctgagtagttggaactacagacatgcaccaccgtgcccagccaatcttcaggcattcctaccactcttgttgagagagagggctcagaacaaatgccaactgcctctttccactaccttcttccccacctttctcacagtccctcagggaagacagggaagtctttcctcttccttgttctggctaaaggggacactcctcctcctttccagagtggcatccaccttctatggaatagcaaagccaagtggacagcagagagagagagaggcagagagagagagagaggcagagagagagagaggtttactaagaaaagaataaagatgaggaatattttaaaatattataatccttatacatatttaaaactatcttttccacttggttatttgcattttgttgttttatggtttttgcaaatgtttagacatttaaaatatttatatagtcaaatattttcatgttttttcattgaatgtgccttctcagggatgctcagagagaccttccacaatgtaagtctgtttcctcctcattcttttagagcatcatttgtaatctacctggaattcatgtttgtattttggtagattatgcctcacagtatttattttgaaatggttagccagatagtctcaaaaggcttatcaaataatccatcatttcctttcttatttggaaaaccacatttgttatattaaaaagaattttggatctattttggaatacactcgcttcttttccatttatctgtctctctgctctagtattgctgtcacattactttaatggctgtggttgcataatacattttaatattctctagtttaaggcctggatgaatattctttttcaaaattattttgtctattgtacattcattctgccaagaaaactctggattcattttgtcactccatttacttcccaaactacttttgaactgttgtttagactttagttttaagcacatctgctaacatctcctggaaaattgattaaacaatgaaattgggaaatgctgctttgatattttgacagatatgacactgtccattggttttagattgatatactccatcatatcaaagaaatatctttctagagtttacaaaactatacagatctagatttaaaatgtattttaatttgtttgcatttttaatattattcaataaaaatgaatttttaattttgttaaattaaacatttgctttattgatatccatcaatataatcttttttcattgacattgatttgataaaattttatttcatattattaacctttccatgtattcttggattaaattctactcagtcaggtgacatcaccgttattcatgttgctgtatcacaggaaatatttcacttctcatttgcatctgtgtttctgtgtgaaatgagtctattgttttacgttaatgcactgtctttgttacattttggtagcacgtttatgttaatttcataaagcgaattgtgacacttttcattttttttctataaaccgtaacagcttaaataccgtaagaattatgtgttccttgaaggtttgaaaaacttgcctataaaacattcgggcccagctccttttatggatgcaattctttgagactggtttctatttcttccatggatagtggtctgttctgatcgtcagatttgataatctttattttcgtattttccatttgccttctcattgaggttcaagtttttagcatagacttctacatgaaattctgtaactttttatttctttgctatctttcttctttctttttgtctttgctcagactttctgaaagcctgtatattttattagtttttttcaaagaatccaagtcctgaatttattagtcattttaatctcttttccagtacattaatgtaatctctagagatttctctcttttattttctggttatattttgcttttcaatattagcttacccagaatgtttagttcatctattttaattctttcttgtctaagattaaaaacaatccaagctgtacatttgcttctacgcaaagtttagtttcttcccttatgtttgggtaggcagtgctgtcatccaatcagtctgccttcctgcttttaatatttcccttgtcctgtgtagacaggaaaggattcattgtgttgttgttgttgttgtttgttcatttgaaaatcattggtaattttatctcccactttctcaaatgtaatttctaatttaatgcattgtggtcagagagtgtgagctcaataatttttagcttatgggacttattgagattttcttaatgacttaatatgtaatcaataattaatacacaatagatttaatctttagtgtatatattaactaaacattaatagtggtgttttccagatcttctttatccattaatctttatttatcttaccattatctattatatactttacttgccaaatattgagagaagtatgataaagtttccctttgctaccaggtttcttcccactatttcttacatttttaacaagttttgctttatatatgtttatgtttttgcttcatgcataaaagatcaaatcaataatatcttcatttaaagatagactttttgttctatttaattatttttcctggatatgcacatttaaaaaaataatatttcaatctctaatctatttttattcacatttgttcaccattttatatagcagcttgtgtacttcacatcaaatggatttctcataatccatgtttctaatatgggtatttgtccttaataaggatttaactaattttcatttattgtgacagattatttggtgtgatttttgtcaacttatcatatgctttctggctctatgcttccttcgttttcactattttcagtctttcgtaaaacgggtaacttttttctttgctttttaattctgtggtggtttggaaagcttgtctcctgtttttaattttactagacataactttctagtttttcaaaagcatgtttaaaccttcagttctctctgttactccaccacccacctttgcccatggaaggtgagaagtttagcacactcttcttttcccttctctttaaaacctctatcttttagttaataaaatagtgcattttaaaactagattattttcattaaattttgtattgcctctcctgtcttttgtatctctctataatttagtttaccaattgtcctcctattatatattatgacttactcactcctgtgctctggatttttcttaatctcccagatggaacagaggtcggcaaatcatggcctgcttttgtgagtaaagttctaccagctaggttggccatgccctgtaattgacatattgtctgtggtgcttccatgcgacagtggtggacttgggtagatgctacagagactgtatggcccacaaagtttaaaatatttattattatattagagaagactatagcaccaaacaaaattttacctataaagatataagcaagggccatgtgcagtgactcacacctgtaatcccagcaatttgggaggccgaggtgggcggatcacttgaggccaggagtttgagacaagcctagccaacaaggtgaaaccccgtctctattaaaagtacaaaaattaggcgtggtggcacacacctgtaattctagctattcaggagcctgaggcacaagaatcacttgaactcaggaggcagatgttgcagtgaactgagatttccacactgcactgcatcctgggcaacagagcaacactttgtctctgacaacaacaacaaaaaagatataagcaaaacacattttctcagcccttccaggcctaaaccttaacacatgaaagacaacttatgtgacatagaattcaagtgagggttttgtttttcttttttgtttgtttgttttgcatttcaaaatactcttgttgcttctttgtttcttggcatttaatgcttcataaatgacgtgaggtccccttgattattgtttttttgtcaagtactctctttgtgtatttatttttcaactaagatgtttataaaatttttttctctattaaattaaaaagtatatatactggggacttctgtttggggtaacttttcattgctattgcttgagatccagtgcaccttttgctctaaagccaaaggcagcctcctttaatgatgatgtcctctgctctgatcttcctcttggaatttcaattcctatacctgccctgttttttttttgttttttgttttttgttttttgtttttttttttttgcatttctctctcattagtcacttttttactatttttttttaaatttccatttgaatttctcaagttcatgttccactttacttatttggtttttgtaatacacaatctccatattccctccatcccactccatatggtgggcacactgtccatcttcgtcaccccctacacttgttttgtgagcctaatagctgcttaagtcttgtttgaatacaatttagagatcatcctccgcatcaccattttaaaggtgtacacttgctctgattcctgggatcaatctcctctattgaatagctgaagcttttcataggaacagtactttttctctttttcttcaacctcatagagggtgacctggtattaaaatttgaaatgggctttgtttgaaactgggtaggttcctcttcaaatctttcagatccagattaaggggagaaggaaatggattgtctttgttgtgattcgaatctgccagagtacagaactctttatccttcaagagatggaagtaacatgttttgattttgcacagcaaaggctgtttctcttgtctgtttggtgcagggtgtgtagtgccctctcctccgggtggcatgactgaccgcctgggcacctgttgtagagaacctccttcgtctgctgaccttgcctgggaaagttcagggtccttcccatcctgcctggatgtaagcattgagatttacctttgacaagctggccttgatcctgtgtgtgtcgcagtttctgctctctcaagcccctggggctattcctgagaagctactggagccattccgtctttcccgtcttttgttgatgtgaaccgaggattcatcagttttttattcaggctggtcctaaccaaactatagtttcaagaaacttctcagagattctggcttatgaactttggctttccctaaggtttttagcagggaggtaaaatttcacctgtatgtgtattcttttagatagattgagaatttagaaagaggacctgagagttcagctccgtctggaattcactgcctgtgtgcaggctccttttcatggggatatcagagtgtgaagcagaagtgagtcacccgcagtgcgattctctccttcagtccttcagaagtttgtggttcaagacaaagcagacccatcctcctatagcctttgattctcaacagttagaggaagacaactgtgcagtgagacagtaacagaatccctacacagttcagtaagctgagctttcccttgtggctgtgatcacaagaggattgtgtgaaacgtgtagagtttaatgactcttttcctaggaaagaagaagtgaaaccattcacagacctgaggatgtgtgtgatgtcaagcggtagacttgtcagctcaggctgccataatggaatacctgggcaggtatagactgggcagcttaggcagctgacattgatttctcagagctctggaggctggaagtctgagatcagggttctagcattgtcaggctcttggtgagggttctcctgctaggtcacagatggttgccttctccctgcattctcacctgatgaagagagagagagagagagctctctggtaccttcctctttgtataagggcatgaatctcattatgagggttcaccctcgtgacatcatctagtcctaatcacctcccaaaggccccacctcctaacaccatcacactggtggttagggtttcaacatgtggatttggggaggacacaaactttccatccatattagtggtacttgcatggcacttactgtgtctaatttaaatcccagaagtagccaggaagatggaggttgctatgctcatgtagagataaggaaactgaggcacgcaagggattagtgacatcttgcaggagctgcctggctgccttccctgtaacagaggaaaggggcctgtctacagttaaaagccctggaatcacacgtggtcccgccctttgctctgcactccggtgtcctcatctgtaggagaggggcttgggttgagccagtggctttcaaacttctcagcttcagaactctttgtgcaaaataaatcccactcagaaatccaagacataaaatggataaaggcagcactgcgctggtgaagcagccagggaaccctgcgtcctgaacactcagccctcccttcctgctggcagcggctgctgagggggatctggagcacaggttgctctctgtgctaacagtgtctgatcccagactcattaaatggtatcagaagaagtttgggaagaagtgtggtttgtattttcaaaggagaaggaggcaaggttgacaaagggcacatgagctgtcattatactggaatgctggcagagcagtcgtctttgcccaaaaagggtttgaaaagggaacattgcacattcactttttttatgtgctatccacatttagcttattgccagggcattcgttgccagtgagaaacctactgtctacaagtggactgcgtagtttagttcctcttaatgaaaaaggttttggacatttacctggaattttcatgttgttttgtttcatgagtttgctgtcatttggaaattactaaagaacaatctcagaaatgggtttttaaaaagaaactttaggagaggaaaaaatcccaggataataaacttttcctaaagaggtcacattagtagttctcaatcgggggtgatgttgacctccaggaggcacttggcaaggtctggagacgtttttctttttgtttgtttttgtttttgttagtgtttttcttttgttttgtttcttttttttatttattattattatactttaagttttagggtacatgtgcacaatgtgcaggttagttacatatgtatacatgtgccatgctggtgcgctgtacccactaactcgtcatctagcattaggtatatctcccaatgctatccctccctgttccccccaccccacgacagtccccagagtgtgatgttccccttcctgtgtccatgtgttctcagtgttcaattcccagctatgagtgagaatatgcagtgtttggttttttgttcttgcgatagtttcctgagaatgatgatttccaatttcatccatgtccctacaaaggacatgaactcatcattttttatgactgcatagtattccatggtgtatatgtgccatattttcttaatccagtctatcattgttggacatttgggttggttccaagtctttgctattgtgaataatttttgtttcgttttttgagacgatgtctcactgttacccaggctggagtgcaatggcgcgatcgcggctcactgcaacctctgcctcctgggttcaagtgattgccctgcctcagcctcttaagtgggtgggattacaggtgcctgccaccacgcctggctaagtttttgtatgtttttagtagagacagggtttctccatgttggccaggctggtctcgaactcctgacctcaagtgatccacccacctcggcctcccaaagtgctaggattacaggcatgagccactgcgcctggcccaagatctctttctgtcatagtgtcacaattggggtgggagatgctgctggcattgtgtgggttagaccaggggtgctgccgaatgttccacaaccacaggacagcccccacaacagagaattaaccagcccaaaatggcaatagtgccaagattaacaaactctggtttatgctacaggaattcctgaaatttacaaaaatacatcagaaacagcacatttaaagcagacatcagttattattattgttcagattttgtttactgtgttgccaacatcttagctagtgattcaaaacaaaacaaaacacatgaaccaaacaaaccctgaggtctccagatgccttgaggtccccaaagaggcaatatttgtctactcactttgttttaattgtaattaaattcacataacgtaaaattcacaattttaaccatcttaaattgtaaaattctgtagcatttaatacattagcaatgttatccaactatcaccactatctagttccaaagcacttcatgaccccagaatgaaatctgggtcccattagcaatcactcggcattccccactccccaagtgcctggcagccatcaatctgtatggatgtgctgattcctgatactgcatatgaatgggatcatatatgtgaccttttgtgtatacctcttcattttgcataatgttatcaagcttcatccatgttatggtatgtttcaggacttcattccttttgtatgactgaatactatttatttgtatgaatgtaccatattttatttatctattgctccattgagggtcatttaagttatttctgccttgtgaccactatgaatagcattgctatgaacatccatgtacaagtttttgtttgagtaccagttttcagttcttttaggtatacccctaggagttgaattgctcggccatatggaacttctacgtttagctaattaaggaactgccaaattgtttttcacagcaaacgccccagtttacatacccaccagcaatgtttgagggctctagtttctctacatcctcaccattacttgtcattttttaaaatgatgtccatcctagtgggtgtgaaatagtatctctagtgatgttgctttgcatttccctaatgactaataatgctgagtgtcttttcatatgcatgtttggctattcatgtaacttctttggagttatatctattcacatcctttgcccattttttaattgggttatttgtctttttattgttgagttgcaggggttattaatatattctggatgccagaccctggtcagataattgatctgcaaatattttcattcgtgggttgccctttcacattcttgatagtatcctttggtggacagctgtctttaatttttatgacatccaatttatctactttttcttttgttgcatgtgttcttggtgtcatatatctaaggagtcattgtctaattcaagcttgtccaacccatggccaggacggctttgaatgcagcccaataaaaattcataaactttcttaaaacattatgattttttccaattttttaaagctcatcagctattgttagttttagtgtattttatatgtgtcccaagacaactcttcttcttccactgtggtccagggaagccaaaagattgaacacccctgacaaagttgcaaaaatgtatccttatgttttctcctaagagttatagtttctcctaagagttatagttacacttaggtccttgatccattttgagttaatttttatacatgataggaggtaagcttccaatttcattcttttgcttgtagaaatccaattgtccaagcatcatctattgaagaaattattctttctcccactgagtggtcttggcacccttgtcgaaattcaactgatcatagataaatgagttcatttctggagtctaaattctattccatcaaatggaattgtattccacatttcatatgtcctttatccttatgacagtaccacactgttttgattactgtagctttgtagtaagttctgtaattactacccactattttttacatctctaaaagtttaatagaaactttcaaaaagactacctctttttaaagaaaatgatgtagaataggacaggtacacaatgtctgtattcctaagttcaaaagctctgaaaattgcaagttctcgattaataatttggggccaaaatctgaccttatcagaactcatttggcagtgaactcaatctgaactcaggtgagtccatttgtagattttatattttacacgttgtgttgcagaaatatttctgtgtttgattgtagggtgctgacccatatcccactggtagtagtatacaatatacaacatatgatccagatgacctttataaaatctgaaaaatcctgatttccaaaacacatctaataccaaagtttttggaaaaggaatggtggacctgtatcacaatacttgttatctcatgatgctcaaaactcccatgatttttaaatctttgattagaaaaacacaaagggaaacaaataatcataacttgctttatgcactaacatttatggcacaacacgtgttcgccaatttattaagcactttaccactgtgtctctgcagccattgtggtccgtttgtgaattccttcagatatttacacaatgtaaaatattgcacttgaatcagttcctttgttttaaactttgcccttctggatcatcccttaagatgaaaatgcccagcttttccatgaggcagttgcactgtgattctggtacatccaatcctatattcttagcccattactcattattcatttaattccatagttcctctatatgttgatgaggaggtatttttatcctcattttatctgacaaaaaaaattttgtctacatagttttaactgcctcatagagccatgttgatcatatggcaagcaaggtgttcaccatggccatcagttccaagagaaaatagacaatcctacactctctactccaaccctgatcagcccatgtggtttactggacaaagggaagaagtggacaaatgagaggaattgaagctgaaaagagccaggagaaatagagggatgagcaggaaactaggggacaaagggagtaaattattaacaaggcgagtctaatgttcactgagctctcagatgttgtcacatccagttcttatcctgcacttgctgatgaatcaagacatgttcacaaagcactgagcatctgctgcgggctcggttctgagctaagtcttctggaggtcaggaagaagaagagccactttcttcaagtctaatctggggaaaaggatagcacacttgaaacaatagtcatcaggacaagataacactcattataaatggtctaggaatccagaggggagatatgccaggcaggtcttaattagggaagtttccatagagggaaggagtctttaactgggtcttgaaaggtagaatttgaaaagccaatagcggatttgaaaagccaatagaagctccaagacaggagtgaacacagcacattcatgagcttgtgagataatccttgagtggtgtgtgtgtgtgtgtgtgtgtgtgtgtgtgtagaaagagagagagggagagagagagtcatggaaaaccagacttggtgggacaatattattatccagacttggtgggacaatattattgacccagaccagggatgatattattctgggtgtctttttgaaaaccagacaaaggttttggccatgaaatcagaggaagtggggagccactgggggtttgaggcagggaagcaacattgcagagcagtgttagaataagatccggtctgcagtgatcgcaaggtgtgttgaagtgagagattcaggctggctgtttaggtttgaatgaggacctgctcaggggtgtggcagtaaaatacagaaggtcggggagagaacagggatatttcaaggcaggtcaatgggaatcagagactgcgtctgaggaatcagagtggaattaataaaagaggcttttgagctttgcatgcagtagggagtagttgtccatagacagagaggctgggagaggagttggttccagaaaacctttagtattgatcatattttgcctgaaatgatggtgtttaagtgaaactatctggaactatgctgtccaatatggtagcctctagccacatgtaataaattaaattgaaattgaaattagataaaattaaaaattcagttttgcagtcaggctaactgcatttcaagtactccatagctccatatggctaatgtccactgcattcaacagcccaggcagagaacatttccatcctctcagaatgttctgttggacagggttgacctagagatcagcagaaataattggcatttggtgaagaagagctcttgagatgagagtcatgggaatagaaaatagcaaagctaagggaatgggtcatctcctaaggagggctgaatgttagaatatgttggcatcagtaggcagaagaaaaaacaagcagaacttgcacaacgttttggaaaagtgggagactcaccacagcataaaatcctggcaacaaaaagaagagagaattttagtgaagagaaagtggcgccaatatcaaatgcagcagagaagtcaaggggaaagaaaaggagaaaaaaaatagcgtttagtaatctgaggtcatttgtgacctatcaaagctgatgcagagttgggaagagatgtcactaaataggaatgccaccagctttctcttgtgctagggtaggagtttgggatctaggaacagtttcagctgaatgttagggacaggaggcttgtcatggaggatgtggaaataaaagtggaggtgaggaacagagccaggacctgagaggacaaagcaaagggatgaaagattgtgctgtcaccatcaagggctccaccaagggtccaattttgtttttgtttttttccaagaaaagaaaaatgagtacagaaggaggggaatctgcaggcagtggttgagaggatttgaatgcaaaggatatctgggaaagcccgatgccttcacagttagaagggagtaagaaaggaggtgcaagggtggggtaggctttggtggctcagacagtgggtggtaaaggaaactgtaggtggccttgagactgtggtcctctgagattggaacggtcacttgaagccaacctgtcagcgtgatctgcctgctacttcccacttcccttccactggattctttttgtgattgctttccatttggatttcagtttatgctttatgtgctttatttcattgaatccatgtgaacatttgggggcagttgggcattttgattctcatttccaacctgaggaaactgtggtagagggtggttaagtaactggcccaggatcatgcagcaagtaagtgacagagtagaaattgaacctgttccctctggtgcccttaatgtcctctgtattcttcacccagtgcactcatgcaaccagcctattcctgctatcgtgactggcttgctacaactgtgatcatgcccacataaggctgtgtttgctctctatagccataattctcctgtcattactgagaggtggaaaaatgtttgaggggaaataacacaaataacacttcctggtgtcaacccagcctccataggggacaaaaatgcttagcaactctttcaaagtatccaagacaaaacttgacctttaagcggtttctccatttagagttaaatttgtctttagcaaatatggtttgaataaatcaagacttcctgttttagctatttaatggggaaggtaatatttccaatctgattttaaatttttcttttgccaaattccacagggcaagaaaaaaaaaaaaagaacgctaaagttcaggataaaaaagaaacttcccaagaagtgcattggtacaaaccactgctgtggtcatcataaatgtcttttacttttactttccaaaccaaagtctagggtttccatggtaactgctttggccccagctggtttgcatcatgttgtttgtatagaagccagtggagcagggctcgactgtgtcacaaagttcaggtgtcaatatggatctcccgggacaaataccagaaagaaaaatattgcatgcaacaccttctcctacccaaccgctactttcccaaaccccagcactctgctactgtgctgaccaaatgcccagggatttccagtctcccatcctctcaaagtcaaacctccagctgcatccagttgtgacttctgtatatgtctaactgtgtccattggaagggaattaaagcagcaggcttttaatttacaaatgttgcatccattcgaatgttcttgagcaatagtgtttcataagggttacaacatagattcaacaaccccagccaagtgcaaacttgagaaattgcagattgccttcctgtgattcacccagaattccagatggaaattatttctcaaggtcagtgcaaagctccgtacaaaggtgtctcctatagagaacatgtggtgtgaggctggaccgagggtcaaggcttccattcctgtttgctccttgaccttggcagagttagcctgcctccgagagcttctctctagccgtaggggaatcacatagtttgtgcctttcctccccacacacccttcccaccatcccaccccaagacctgctcctattttctaggcttggtgagggcactaaggaagaaatatgcctccttccgccaaattacttccatttcttaaaataaatcccagcttttctcttctgggaagccaccccagagtggactaagatctcaaaatatcttttatttactttattcaagaaacattgagagtctaccaggcgccagacaggaacagaccctgacttcaaggtggagactagcatgtaattaagcccaatgaaggaccaaaatcattgtacaggtacagtcagaggaggctggttttccagtttgaagtttaggaagtcaaaaaacttcttcaggccgggcatggtggctcacgcctgtaatcccagcactttggggggccgaggcaggtggatcacaaggtcaggagatcgagaccatcctggctaacacagtgaaaccccgtctctactaaagacacaaaaaatgagctgggcgttgtggcaggagcctgtagtcccagctacttaggaggctgaggcaggagaatcacttgaacccgggaggcggaggttgcaatgagccaagattgcaccactgcactccagcctgggcgcagatcgaggctccatctcaaaaaaaaaaaaaaaaaaattcttcacagagaagtgaagcaccacttaactagcacccttattactttctaataattagcatgcatagtccatcattatatcatatgctttaaatacacaaatttgcttgcaagtctatcttgatatctattgaaataaaaatctctaatgtaaagacctggttttcattatactgggtttaatatctgacttgtccaggatagagctagtcacatggtgagggtcaggtggccttaactctggttccagagctgaggggacacattagaggacacactggtggtttacctgagggggtggccctatgcagacattaaggagggaggcctttcctctgtgtccaggtaaggaatggatccacatctaaggccaaagctacagaatagggacttgcacacagtacctttatcttctaccacttttttgatagtaatggcatctacatttttaccatttcaaatttttgaatgaccctggttctcccttgctttgtgccattgggaagcttccttctctccagggctcagttcttcaccagctgaatgatgaaagtggcttaggtgatcatcttgtaagctctaaattgtattccataggcctaacctgaatcagtcttatcagcttggaatcctcagggcctaagcacagtagtaagtcctgaataaatatttgttcaattaaattgaagagactcaaagtcaagtcctgcattattggagagcatagagattccagttattgtcctctatttcagatgagcagcggggtgaagggtctggattttctactcatcactaagcctcggaaggtggtgtcagtgactgggatctgcttgtaagctgctccaacttggcttcttcagatatagattcatacagagcctagacctgtgccttgctttgttaaatatctgaatgtaaaaaggaaaaatacatcaattgtccaaagtacttacatgtggtcttataaactaaagaaagtaaccacatagatttctggtgcctgaaaaaaagaaaacatgttgtagaacatctgtatcattaaacgcctgtcctggtttgtactcaactacttggcttaactttgcacagtcctgagaaatacaagtcttgtgattggtatagacagccaactggagcaactcaagccggaaaaacaacacaattgtcctggttgtacattgcactgcatacaatcactaaaagacaattctaattctgtcttccgtattactttggtagagactaaagtaatgtattgagataggaatcaaaggcagtaaaagtgggaacattctgagcatacatgggaggtactgagcttctactcattgagccttctccaaacatgtcagctcactcaggtgtgtgtcagaatagcccttgcaaaattctctcataaagcaaagcttttttccttgtgctataacacatccccactgtgggcaccggttaggcctcaggctatctagcccaatggctactgtacactttttttttttttttgagacagagtctctctctgtcacccaggctggagtgcaatggtgccatcttggctcactgcaacttccacctcccaggctcaagcgattcttgtgcctcagcctcccaagtagctaggattataggcatgcaccaccatacctggctaatttttgtgtttttaatagagatggggtttcactgtgttggctgggctggtctcaaactcctggcctcaagtgatctgccctcctcagcctcccaaagtgctgggattaccggtgtgagttgccatgcccagcctggctattgtagactttaataggactcttaatttgactttaatgtgactacttctcttcctatctgtgcttcttcatatagactctgcaccgcacctggagatattttatcccacataatcaatgtcagacaaaaataaatttaaaaagcttttttaaaaagcctgaagaggtccaggcacatgcctggtagaggaaggtgaattctatatgcttttttttttttctattgacaaggacaaatatctctcagcacttatatactagccattgtatatctacctttgtttagtaatcacagttctattaggcagagtgaggtgagggcccattacccagttaggaagtggcaaagctgagattcaaaccaaaacccttggattctggaaccaagggctttcccctgtactatgctgccttcctgggctggtcgtttgcccttctctcagctctttggaactgcattcactggcacacagtctgaagggacctaagcactccccttcacttgccactcagcccaaataccactgctggcccctcctgaagagcacagagaagagaatctccttctgaacaatgagcagagattttgtttaaaatttctcacatctctttgtagtttatttttgtaaacttggcctataagacgctacttatttgctcttatatgtgttacctgcagttttaagaaagaactaccagaccaacaatatcactttggttttggtttatgtagcctaaataactcgctacacgtctcttcttaaagtgtttaatgagagtttttagtgaaatttgctgttttgtggaaatattcacactaggtgatggattatttgaaattttcttcctaatgcagcgctgctgtgtaagaacatcatcattgttcagtttggtgggttttctcttcaaggtgtagataacagtagaagggacttttgcaggattagcatttacaatgctttgtcagtcagggtcatgggattagactcactgagtcagtcatcagtagctccattaactgagacataaacagattcattaaagagtggaatgaggtccaaagttgatgtctttgctgagggtcacactgagctaccagctgcatcatgagcatctttagaagtcagcaccttggcaaaagacatgaagaccaaaatcaagaactacaagactgccccttttgacagacgcttccccaaccagactaggaactgctggcagaacttcctggacttccacctctgtgagaaggcaacaaccgctgaagggtgtgatgtctctatgtgtgaatgataccagtgtgtgtacaagttcttctgccctgctcctgggtttcagtctaggatgacagctgggctaaaggcacatttcctggaaagatctgaactggctgcatcttacccctcctatgtccttcatccttctcccaggcaaagggaaacctgggtacatggtgatcctcaccctggggccctgaatcatgacttaactatgaataaaaatgctttggaaaagcagggggaaagaagtggaaataacaaaaaataatgaatcagggagggcattccagggtgcattccagctttgtcagtaacccctttgaccatgtcactgaatatctctatgaggaattgcatttcctacctgacatagtttgagtatatccccacccaaatctcaccttgaattgtagttcccataattcccatgtgtcgtgggagggacaagtggaaggtaattgaatcatgggggcagtttcccccatgctattctcgtgatagtaagttctcacaagatctgatggttttataaggggcttctcccttcgcttggccctcattcttctctctcctgctgcgctgtgaagaaggatgtgtttgcttcccctttcagcataactgtaagtttcctgaggcctccccagctctacggaactatgagtcaattaaacctctttcctttataaattacccagtcttgggtatgtccttctagcagtttgagaacagactaatacactatgtgagaaattgggtttgtaaaaactgccccaactacctcaaaatagtgttgttggagaggaaaagaatttgcacactacaaaaagttaagtgttataaaaatgtaagattgtcttgttacttagatcacaaggcataaagaattgctagctaaagtagtagccagttcccttgtgatgagttatataatggtgcagtcagttgataagggtcaggccaccaaagaaaataagtgtttaaggacatatacggcaacatgacagagtaacttgatttctatgaaatgtagtaataaaaataggggcttgtatttgcttgacattggctttctttttaatttcattgtttatgatttatttttcatacacttaaaaaacatcatggtgcacaatggatttgagaaaaactggccctttacacgatgatttgagagcttggtatatgtggcatcaaaaatcccaggaaacaagtgaagaattaaaatagaagtctgcatgttttacctatccagcaaaaggtggaagtggaaaaagtccagagttccaactggatgggtcagttctctgccagatgttggtgtcctgtagacccggccagaggacatgctttgatactctgcccttggagatgcactcagtattgtcagaggaatacaggtccaaagtgaagaactatctgactgcaggggctgatggctcttctgggctggtgggatctacgtggagattgctgtgctctacaaggctaaataacactcatgagaatctatggtcaactgaggaaagagagaatgttaatttccatgtctggaaacatcagaaatggctgaataatcagcagatgtcctgatttgtgttttggtcttcctatctgtagatgaatgcaacttaaaaacacatcctaatatcaaataggaaaagctccccctttccacccatctcattttagtttttcacctataattattcttccaggtaaaatttagaattattttgtctagttctaagtaaactctttgttgaaatgctgttaatttataaatcagaatggataaaactgatatcttcacaacctaaagacttcgatcccagaatgtattacttctttcaagtcagttcatctttgtagctttctctattgtttattgtatacattgcttattaaatgtatcccttggtattttatagttttgttgctactgtgagtagaatatttacattctaattacaattaatgctggcatataagaaagctatagattttaatatatttaacctttacccagctaccttcctgctttcttattacatactactaataactttttccagctaataacttttgagttatccagacatacaaaaattatcaatgtttactaactctgctcctcctccttctcaatacatataactcaccttttccttggctcattgcattaactattatttccagaacaatgctaaatacatgaagatatcctattgaaatataaaaggctttcttttcatatcaacagaaataagttattttgaagccatatgccagcttcctcttcctctccatagtttcttaaacacttgctgatagaaacaaaatctcattcagagaagtatgaaagacagtcttgaggaaaatatgcaagccgaatgaattgtctctgctttgccttagcaatatggtgctaggagaaggtgggatttagggactgattgtatgtctacttatcaggttcctacatgttttacagcagcttaattgctctcaagaggagtgactgagtcattgctgagcttcttagtttgtgctgggtcagagcagttgcctgaattttccagcaccctatgcaaagttctgccatggagatagctgggtgtccttctgaggtgtttactttgaattttatttttggttccagtttgaacccatattcaaggtacccaaccctgacaagcaaaagggagacaaaatttatctcttggttctattcccaacccattcaaaaatagaaggcagtcagagttctcaggagctaagacgatggggggctgggttgcatggcttccatgtggcgaggtcaagggaaatcatccggccagtgtcactgctgtaactgcccaggctgagagtcttgtctgtttcccactggaatggggtccagtgagtcttcagactcaccagtgttagaaataaattttatactctgagaatcagagaccctcttttcttctgcctactctcatcctttatcgatttccacacacacgtatatctataactttactaatatacatacatgtgatcatgcacccgtgcaatgggcgctgcagtgtgccttctgtgtcccttccctatggtgctgggagggccaatgcctggcagctcccaactgtgtctcactcctggtggctgcccactgcaaatgagagtctccttcttcctgcaggcagccaacatccaatgactgggcagctgtccagagcaatgctgccttccccgggatgggctgaggcttttgtcctgactgcatggcagcccagcttctccttccaccccatcctgcttgcctccctcccccacaggtgtgacaaggagggcacatcctcctgcaggcaaacctccgtctcagagtctacttcccagagcctgtttctcagtctacttccctgccctagacaatctgcttgaactgttaaagtgtcatcatttttctcattttcttttcttttttgtttgttgggagcgactaacccctcttcatctcttgtgccatacaccatcttcagcttccttaatttctcccaagaaaacacatgtccacaacctgatttgtgtctgccagtgttttcattaagttttctctgaacggtgtctgtagtctattgtattcctcctttcctctatcaaggatacttatctagtttccagacttttgcctccgcaaagagtgcacattgtttacagaggtccctttatacctagatgcttttacttctatgggagagattcctaagagggggatttctggtttaaagggaatgcgtgcttgcaattttaacgatgttgccaggtcactttctcaggcgtctgggacagggtttcaccagcaaggcaggagagcagcctgctgcttgttctcaccatgagcgtcccacctggagatcccacctgaagatcaaagggctaatccactccaaagacttcgttcccaacttcaacatttctcgctgcaaaccgaatctcctcccttcccttgtgaaaggaaggggagattgggagggggaagagaaggctggtgggccagaggagcgtccctggattctcagatggctccttcctctaaatggatgagaaatgtggggtgagaccagcaggcctctgtccccactccagcctacaaaccacacggccaggcccaggtgtctcttagggagaggtgggagccagcctggagcacaggactccacagggcagggagcccacagcgcaggggcggtggctgctgacagccccagagaccatgacaaggagcactagacagcaaagaagatgcaaggatggaaaggaagctgcatgcagcgtgttccccccaaggcccaaaagggtccttcattccctgcgagtgaaactatgttcttcttgtcctggaaagaaaacaagaagacaattggcatgtggctgatctacccaggctggaaagaagaaagattgaagtgactattctcaaatttaggaaaatctatttaggatatttggacacagatgtacctcctccagtgtctaggacattgggtgtgacctgacacttccgtgacctctacaccctttccaaactggccatgatcagtggtggggtgtgggcagggggttggtactgggcaatcccagcagagctcagtatcagtctgcccacttgagcactggccatggcatagcaggctctctctctttctctctctccttctctctctctctctgcctcgtcatcattggcatctcttctccccttacttgtgtgtgaaattaagctgaccttatatgctgtttttgtgacacagaatcatccataataagcatttcataactcaatctgtttctgccaattgttttaaatctctcttattagctatgttaggcatgctattatcttaatcttcttaacatccatatgagagtttgacaagtcagcaggggatcttgcctttgctgccaaggatatgtgattaggttacagctccagagactgtgatggcagagccccaaccaggccaatctcctaagtatatttctttaactataaaagacctcagtcccccaaagtccaggaagtaacagtgcatccatgagaacaaagacacttctacagaccagtatctggggctttcatccagtcatttaactttgtgtatataagataaaaagaaaaaaggtgagaaagactccctcccgcccgcaatgaccctaacctcatctgggaggctactgcaacaacccagctttgttctggcaggctacagaaacaattttaatattccaaaagagttaacacaagcccagagggagtagttgacactctggtagaacttgaatcatgctttcccctaggatcatctcagggtaagaaaataatttgagttttggcagctgtgatgactgtgggtagaacagcttatttcttggttaattccttaaataaaccttcatctttgcaaattcttgttacagccacaactgatgagaaggttcaactatgctgtctctctagccaaaccgtctttggtttaaccctctgttaactcttcccctttctttgttaggagaatattgtctggcttcagggtgtcatcttttcatggccatttatttccctgtggtccagtcatgtgttatcctagaacgaacaagggagtcttgattagtacatttgggattctggagatggcagaagaaaacaaggctccaagccagctttcagactgcaagatcttagggagcatcataataccacagccaagttcctcccctttcttggaaataagggtttcaagagctgccttcaagctttgagggcaggtgcagaagaaataaaccatgaagcatctcttccaataccagtcctgtgtgtctacccatccttcggctttctctgcaggggacctgcctggaagcaatctgagaagcagggtcagctctgggtgggaggtgatacattaacagttttgggctaggctgggttattgacagttctgacacagatctcagaatggagtccattagaggcccaggacagtgctcactctaatatacacttagtgctgtcttcaaacatccgacattccttctccctgaaataccacaatccttccccacccacccccaccccccagacacacacccttgacatttaggagtgtggagccactatttcccaaatgtgttgacctctacttggcttgtttgtaccttagctaaggattttcatgttcttctgcaaaaacttaccaggggcagcgtggggctgtctataagtgatgtgttatggaattgctgatttttttttccaggtttcaattttctactgggttgtccttctgaattccattgcagcctttctgcctatatttataataaactccaaatacagggagtgctccttgtttccagatgtggaatccaggattatgtaacttggagctgtatttctttgagaggtgattaagcatgttatcatattatcatattaccgactattcacttgttatttttcctttcgtcattcattcaatcatccttctttttcctaactatattttttcctaagggtaaaatttataatctaattttaagtaccaaggaaaattctattagaatgacatatttattaaaaatatgagatggattgggatctttgccatatctttgctttaaggagcacacatagcttattgtttcctcacttttgagaaagttccccaggcaccatcttgttttttgattgttcctttcccagggcagttctgttttatacacgccaccagtagccacttgaatttgccttgctttgtagccactttttgtcagcctatatttctctctctctttatatggtcttgtgtcaagcaggatttatctagaccctggctttggcattaggtgagtctcccgagcattgtgagtggaggttcagtgcctgctctggtgacaactggaaggcaccactgctcctagtgtgtttcccagctcccagcagtcatgtatgtcatgtggctctgatgtactgccatgtgacgcttttacaaaattatcacacaccagccactatacacttgatgggcaccatctcatgcataaaaccttataaagcaggtactgtgctttttaaaattataaagaagaaacaaaagaatcctaagattaagcgatttggctcacagggcaggtatttgggaaaggcagggttggaatgaggtcctgggctcttacccagaattcnnnnnnnnnnnnnnnnnnnnnnnnnnnnnnnnnnnnnnnnnnnnnnnnnnnnnnnnnnnnnnnnnnnnnnnnnnnnnnnnnnnnnnnnnnnnnnnnnnnnactcatgaaacaatggtgaccttagtaaaattgacaaggcttggaaaatacactggcttatgaaaggagatctgcttttaaggaagcagcccataaaagcacatgatgacttccttattgctagctttttcctgaacaaataatcttttaaataaagggagtggggtagagaatcttgctatcttctgagagtgtttcaaatcaaattatttattggacacaaggaggtcttctagggagaaatgtctacatgtggggtcccctattactctttccagcgttcttatgggcgttggggtccaaatcatgcatttgggtggacctgctcctttttcctaaaaggagaaatgcttcttaggctttgttaactggtgagacgaaccatttgacaagttttaattccagcagctcagactcatccaggatgaaattcctgattcctcagagctctccttggccagccagacagatcctgtcaagagaactttagctgccacttgcagaagtttgagggatgagaggacatctccccaagtgacctctttccttgcctggattggaaggagcaatggtttttcacagtaaccatagaccaacgtgcctcagtccctggaaaagtgggcagcacttccatcccacactgggcaggccccagggtgccctgagcctgtctccttcggggatgtgtgcccagcacagtgtcgccggttccccttactcactgtaccctcccatgccatgctcccatgctttgccccatgcaagaggagagctaattccattcctgctcagtgccaccttcctcactttaccaaccactcaagttttctgccagaaagttcagaaaagactccacatgccaacactctcaagtgagcatacacatgactttactcagatacatgaatggagagctgtacaatttcaggccccagttaaataggggaaaaaaagactagcgaagtccttccaaagaggcaccgaaatcacatctgcttgctctgttggtaagctagattctatcattaggacatacaggctaagtgaggttccccagccagggtacagcttgtcctctctacctgggatccaggctgaaccatctttaccatcaccagagagcactgcgagaagctaatacaagctaaggactcttcccaggaaaatgtatctctggacatacacatttcatgtcagtcatgggaagtctgtctgtgaacctgaggttgcaagcctaaggttactgtccatggttattctgaccaccttcttagagagccctggtcaccatctaaggtagataatctaaaaacttcttgctgactgagagctgcccaagtggccccacataaaccccaggagggttcaggccaaagtagttcagcacaaaggcatctggtagactctggtctgctcttaaactttgactctatagcttgtctctggggtttaatttgatggggcagttttcttcctggtaagaaggagccattgggtctggcctgaatgttactggcactggagctccttggcctgttggtgtggcagcctgtctctctcctctgctcattggatgtgtaccaggcacatcggagagaccactcgctgaacaaggagaaacaattaaagattattttctcccatggtcatgtaacattagcttcttctttggagtccacatttttttaaattgagatcattcaaacttcatttctcagaatgtaaggccctgctgacaaacccttctgaacagcacactctgacttttaaaataatgcaattattgaggatactactcccctctcttctttctccttatctctgcaaaacctgttgtcattcagtgaaagctggacatactgccattaacacttccatgtcatcgtagggttgctaaacggcacacaaagatcaggagtggaaatgggtgaggtggagccgagtttgggtccagctgtgtgatttgggggaactactcgcgtcttcagccttgctgtcttcacatataaaggacaggttgacagctctgatctctaagtgcctgccagtcttcacattttagccttatgcaactccagctaagtagggtttaccatagcccagtgtctctcaaggttgtcattaagatgtcaagttttccagggggtaaaatgaagcgcagaagctggaggctggaaccaagaagactgactcacagctttcagcttccatatcaagtcaccctcattctgagagaaacagttgaactaaggaggaaccccctaatgaccagtgctggataggaattcgagaactcagttcctactctcaccaacttttgaagctaaccatagcactcaccggtgtatcaaattcatggaggagaccagcatgggcaggaaaaaatggttttatcttgtattggagccattgaggcaaatgttgctgtaattttataactgtaaaaggtgactctagtcgccaagcctttactgggatgcctcctagtgccccctcataagcctattagatgagccccagttcaaaaatgaagtcagattttcccaatggatatagcattcagtggaaagacatagaggcaacattttaaattattcgtttcaatttcttcttggcatctagaggcctttacagtggaagtgaggattctgaatctccatgaatgagaatgttgatggtgtttggccataaactcctgttctatccacctcagtctgaccggcgtaagttggtcagggtgtccagagggtcaggaaagaggcagaaattctgcagcagaccaaatggtggaaagaaactcagtgacaggaagaatccttaggctgtggggattttccaaagcccaagaattaaaccaggcaaattcacatgcaaaggatggcttgagctgcagggcaaggtgttcaggggattaagtcaggagctgttggctcttcttgaagcagagattgttgaggagaaaaccatagctacggtgaccaaagaagtaggagcccctattctcatgtgggtgatttggaagtctggctcttcctatgaagcatcatgagaaaaactagagggtctgatgccagatgatagagcaaggaaaaaatggtagtaaaataacattacaaaaaaaccaaatgactgaactgaaatggtgggcaaaaaaaagaagaatgagacagcagaaagaagtcagggttgggagataatatgaggctacagccatcacgcagaaaagaaaaccaagccacactgtgaagaagaaccatggcaagaacacagagacacagccattcattcattcagtcagtcagtccatccgtctgtcagaaggtcggccattcatgcagcaaaaactaggagaatgccttcaagactctagcattttactggattctggagctccgtgagtgagcaaagccggccggatggctgctcgaatggacttccccacagagtgactgggtcagaggcacccacccctgaaccaggctggttcagccctgaccctctaggtcctgatggctggaggccaggaacaagcattctccagctgtcttcccaccctaaaaacatagccagtcctcaggaagaaagagatttgggaagaatggaggctgaggatagaactaatgcagagttcagagaaaatagaaccagacggggaaggtttgggcagagaaagagagagcaggaggagggtttggggccatgcagctgctttccaagcccaattccagccccatctctcctttctaggagaggaaaaataaaggaagaaatacgtggatgggaataatgtcaataaggagaggagcagttcttttgctgtcctttttttttttttttagacaggggttcactcccgttgcccatgctggactgcagtggtgcgcattagctcactacaacttctacctcccgggctcaagcaatcctcctacctcagcctcctgagtaactggaactacaggcacatgccaccacacccagctaatttttgtatttttagtaaagatggggtttcaccatgttgcccaggctggtctcaaactcctggtgtcaagtgatctgcccaccttggcctcccaaagtgcagtgattacaggcgtgagccaccatgcctagcccttttgctgtcttttctcactctttggaaagttcttgaaggaagcatagctatgagtctctcatctaaccccagccagtcagcagctgctcaaagaaaatcacatggctcccagcacctgttccccatcacaagggaagaatactccaagcatgagaatggatcctgcaacctgcccctggtggaactatcagtttgggagcatgcaaatccgtgctaggcttacacacatctggctgctgtcacacacttaataggataaaccaaacattgtcatttacaggaaggtctctggtctggaagcataagccaaaatctagagatttgcttggattaaaaagaaaatattcctggggttaggcctagagattatctgacattcagatcttagtgtaaattagttttaatcaactctctttctcaccctatacctatacctgagccatgttgaagaaatgagtgttttgagtggggtacagagagggggaggccaggattcacctgtgaagactggaacacagcaagagactagagagagggcccaagagcttggctctgggtcagccatacctggaattaagagcagggccacgcaaggaaagaagggatgggaaggaagtgactaaaaggaaatgttgagatttacgagtgcaaaactgggttctgtaagcagaatgagtgtaattgaaggaattatgggaaattccaagactctcaaaccatatttattagcattcacattcatagtgcatatttttttttcttttttaaaaattgaaattcttcaaataaggaaacgaccctcccctccctcgctgatttacagagtagtgacattcccagacaaggtgggtttcagtgtgctcagctcagacattcttgtagtcattaagcacaggcccaggcaggtctttgtgaaatgggtttccttaatcacatcactgtcactattagtaggaaatattggacaatatataggtttcataatgtaagacaaatttttttctggaactgaccgcatttgcacaaaaccatcagtcatgttggcattagcatctttttccatcacagatgaggttcgaaaaagcatttttccaattcagcttcccccagctgcacactttatcactccccatcagctatcctcctaagagatgtattattgcagtatatttggagattccacaaaggagcatgggccctgaaatcaatcacactgcctaatttcaaacctaccagtaactatgtgagtgacctcggttgagctactcaaactcattaagccacagtttcttcatttgtaaaatagggaagagtcacataactcttcatgttactaacgatgattaaatcatatggaaagtgttcagcacagtgccttgcctgtttcaaatcaggcattcaaagactgtaaactttattataattataggacaacatgaaaagctttagagctaaagaataaaactttctcactttacatgttttccaaataaacacccattgtgtgtgtgtgtgtgtgtgtgtgaatttgagacacatggaacttagcagggagtgtgcttcagaggtaataaatgctcccatcaacaaccacactattgtgtcttctttgggttcttcagtatttaagtttactctttgtttatattgatgagctttttgacttaatttcagagcactgtttgccagagtggattttaatagcaccagcaatttgtcacggctctgataggtccacagagcagagaggaaaagaaagacataaaatcaagaccttaggtttgaaacaacagcaacaaaaaaattgttcagggccattaggaatcatccattcaacatactcctttttcagataagaaaactggaggcccaaaggcatcataggagtttcccaaagccattctaccaactgtacacgaagctgtgactaaaagcccgcgcagaaggaaaaggagcttgggagccaagaaagaaaagaaaggaggtggaaggaaagtcaagatgttattttgcaatttctctgaaaggagtgaagagggacgtttgggatttcataattcataaagctcctttagcaaaagcccttggaagtctgagaatcagagaataaagaacattggattgggagtcccataccctttatccatcactcttatcagtattgtagctatgaggtttgtgacaatctctttaataagcatttttaagagttcagctttttattgaacgtgttataaaataggtttactcaaaaaaaaaaaaaaaaagcccatattatcatcagactccagattcttctttctttgcttccaccttcttcttctcggcctaggccacagtgacagaagggcaggacctcccgcaggtacaccaccagctgctgagcaggtcttcccaccccgcccctccactgcagaggaggctcccgaagttgacgatggccagggccttggcagacaagccaggccaaaagccgtcatcatttaccccagctgctttagaaacgacattgaccttatcctatgtgatgatcccctcagcgttatacagaatgagggctgagtcagtgcaggcgagctctgagatggagtccgtggtgtggacaagtgcaaggctgggctgcccggagtagtgctagtgctggatgcagtgagggcctgaccccaacgcagcctcagctcagaagggcagagcatcttggcggcacgtgggaaaaggctaaataagcattttttaaatttgtaaattgagtaattggaggagataatccttaaggttgttccattttaagacttcacagttttgttcttctgctgcgaaatgccctgtggcagtctctgcgcaggatgtgacgggtcctgaggcctggttcctgccgtgcacatcaacgggtagggtttgggtaggtagagaaggtggaaaagggcatcaaggacacagtggcccaacttgagaggacaaaaaaaatgatcaatgacctggagaaaaagtgtagtgagtctggctagagaaaaaatagcaactagtcatattagaaagctggttagaccagaggctgtggaggactccgaatgtgaagcaaagacacacatttgggagacatcgagggatattgacaaagggagctaacggtgacatcaaaagacatcatctaggaaaagtgattgagaatcactggcccaactttggcaaggccaatattgtgtaaagttgagattctcatcaaaatccataattctaacatttgggaggggaggaattcataaacactgaggctgtgtctgttgcataacactgcatcagagaataaagggcatgttcagataaccgaattttaatatggattacttgcatggattccaacttacttttcaatttaggcaaaacaatttacatatgtggactcagtctgagtttcacattttcatttggtaaaacttcacagcagctgttggtcactgagagccagtgcaaccctacccactgggcctgctcctgtaattaatgacacacgcggaccaagtaggaatggtctttgaagatattgcaaaagggtgacagtcataggagctagtcagtcaaatgtgagaaactcatatgtgtttgggatcattttaaccgtttaaaaatacagaaagatgtctgtttgattgttttcctagccaattggcttgctggctttcaaataatatgtataaatctgtgtgttttcttccagggtctttcttccctgatttcaagccctctgaaacagtttttaaaatagtattttggctcggatatctaaacagctgcatcaaccccatcatatacccatgctccagccaagagttcaaaaaggcctttcagaatgtcttgagaatccagtgtctctgcagaaagcagtcttccaaacatgccctgggctacaccctgcacccgcccagccaggccgtggaagggcaacacaaggacatggtgcgcatccccgtgggatcaagagagaccttctacaggatctccaagacggatggcgtttgtgaatggaaatttttctcttccatgccccgtggatctgccaggattacagtgtccaaagaccaatcctcctgtaccacagcccgggtgagaagtaaaagctttttgcaggtctgctgctgtgtagggccctcaacccccagccttgacaagaaccatcaagttccaaccattaaggtccacaccatctccctcagtgagaacggggaggaagtctaggacaggaaagatgcagaggaaaggggaataatcttaggtacccaccccacttccttctcggaaggccagctcttcttggaggacaagacaggaccaatcaaagaggggacctgctgggaatggggtgggtggtagacccaactcatcaggcagcgggtagggcacagggaagagggagggtgtctcacaaccaaccagtt

SEQ ID NO: 642 - protein, 466 aa, Homo sapiens
MVFLSGNASDSSNCTQPPAPVNISKAILLGVILGGLILFGVLGNILVILSVACHRHLHSVTHYYIVNLAVADLLLTSTVLPFSAIFEVLGYWAFGRVFCNIWAAVDVLCCTASIMGLCIISIDRYIGVSYPLRYPTIVTQRRGLMALLCVWALSLVISIGPLFGWRQPAPEDETICQINEEPGYVLFSALGSFYLPLAIILVMYCRVYVVAKRESRGLKSGLKTDKSDSEQVTLRIHRKNAPAGGSGMASAKTKTHFSVRLLKFSREKKAAKTLGIVVGCFVLCWLPFFLVMPIGSFFPDFKPSETVFKIVFWLGYLNSCINPIIYPCSSQEFKKAFQNVLRIQCLCRKQSSKHALGYTLHPPSQAVEGQHKDMVRIPVGSRETFYRISKTDGVCEWKFFSSMPRGSARITVSKDQSSCTTARVRSKSFLQVCCCVGPSTPSLDKNHQVPTIKVHTISLSENGEEV

SEQ ID NO: 643 - DNA, 1336 bp, Homo sapiens
  source
  (1)..(1336)
  CDS (201)..(1136)
cagtgagctgagatcacgccactgcactccagtctgggcgacagaccgagactccgtctcaaagaaaaaaaaaacaaccgtaacaaagggctatgagctatttttacaggcttaagcttatgaaagaagctgtcttggtcaaactgccctttacatctctcccactgcttctccaaaccctatccaggaagtccagagacatggagataaagaactacagcagcagcacctcaggcttcatcctcctgggcctctcttccaaccctcagctgcagaaacctctctttgccatcttcctcatcatgtacctgctcgctgcggtggggaatgtgctcatcatcccggccatctactctgaccccaggctccacacccctatgtacttttttctcagcaacttgtctttcatggatatctgcttcacaacagtcatagtgcctaagatgctggtgaattttctatcagagacaaaggttatctcctatgtgggctgcctggcccagatgtacttctttatggcatttgggaacactgacagctacctgctggcctctatggccatcgaccggctggtggccatctgcaaccccttacactatgatgtggttatgaaaccacggcattgcctgctcatgctattgggttcttgcagcatctcccacctacattccctgttccgcgtgctacttatgtctcgcttgtctttctgtgcctctcacatcattaagcactttttctgtgacacccagcctgtgctaaagctctcctgctctgacacatcctccagccagatggtggtgatgactgagaccttagctgtcattgtgacccccttcctgtgtatcatcttctcctacctgcgaatcatggtcactgtgctcagaatcccctctgcagccgggaagtggaaggccttctctacctgtggctcccacctcactgcagtagcccttttctatgggagtattatttatgtctattttaggcccctgtccatgtactcagtggttagggaccgggtagccacagttatgtacacagtagtgacacccatgctgaaccctttcatctacagcctgaggaacaaagatatgaagaggggtttgaagaaattacaggacagaatttaccggtaaaaggaacaaaatgttggtgtgtcataattaagacatgatcgaagagattatcaggttattcttccttagtaactattttccacgtggcactcaaagaggtcatgaaaagtggtgttggataccaataagagaattgacctaggagcaaaacaattagtttctatgcatgatcttaaccaaatacatattcagtctcaggc

SEQ ID NO: 644 - protein, 311 aa, Homo sapiens
MEIKNYSSSTSGFILLGLSSNPQLQKPLFAIFLIMYLLAAVGNVLIIPAIYSDPRLHTPMYFFLSNLSFMDICFTTVIVPKMLVNFLSETKVISYVGCLAQMYFFMAFGNTDSYLLASMAIDRLVAICNPLHYDVVMKPRHCLLMLLGSCSISHLHSLFRVLLMSRLSFCASHIIKHFFCDTQPVLKLSCSDTSSSQMVVMTETLAVIVTPFLCIIFSYLRIMVTVLRIPSAAGKWKAFSTCGSHLTAVALFYGSIIYVYFRPLSMYSVVRDRVATVMYTVVTPMLNPFIYSLRNKDMKRGLKKLQDRIYR

SEQ ID NO: 645 - DNA, 8897 bp, Homo sapiens
  source
  (1)..(8897)
  CDS (201)..(344)
  CDS (1572)..(1717)
  CDS (3449)..(3582)
  CDS (3901)..(4104)
  CDS (4714)..(4885)
  CDS (5312)..(5476)
  CDS (6698)..(6805)
  CDS (7669)..(7849)
  CDS (8533)..(8697)
ttcaccagacacagagcaaccgccagccccaagagcagctccaggctggatctgcgccggacacaggagaaagcagcgggtaggctaagcaggggtgctgaggatggaggaaagttgggaggctgagcacagctgaagtcctgagctccctgtgcccttgacttctctgtgggctcgagcaaggaccatcccaactcaggatgaaccctccttcggggccaagagtcctgcccagcccaacccaagagcccagctgcatggccaccccagcaccacccagctggtgggacagctcccagagcagcatctccagcctgggccggcttccatccatcagtcccacagtaagcctgggcgagcatgtgcatgcacagagccttccctgaccccttcctggtcccctcctggccacacacaagggctttgacagggagatagaaaaggtctgaactctgctgtggggccttgagccattactggacctctctgagcccgcccctgataaacaggctgatagaggagggtgcaggcaatgtccttcctcatggagagcattcaaggaacagaaatgccagccctgaggacaaggggctggaatggccagacctgtccttggctgcactcattcctttcagaggttgctcggatgccccatggagccctccagggaggagggcacaccctgggcctctggatctgccaagcccacagtgaagccttgggtgccttctgccacctccatcatcctagcccaggcccagggccatattccatcaacaccactgctacctggggaaggccgagggcaccctcaggacctggggatgctggcccaggtgctggacaggatgggaaggctccggtagctataggggccactgcggcaggacagagaccaagccaccctctcttccccagaaaggggttagggtgggaggagtctttaaatccctttgtcctgacctgatatggtcatgacctcccttcagtgaccctgggaggcctaagctttctttctaaagggaattcccttcattttcatgccaggcatcaaggttagctgtacccagctatgctattgggcaatgcagcttctcctctaaggctcagtaggggacgggactcttgagaggggctccacccgactcaccaccccagcgtctagaggcctcaaaaactgtcttgggcccttgggctggagtccatactgcaggcagggatgcacccaggagttggctctgtcttctccctaaggaaagatagggtgacccgggccatgtccctgcttgccagtcacatgtctgtctgtcctaccagcctccagcaggtgatctgagcccactcctagaaggcccctgtgccatgttctaggagcttgggctggactttagaaaggacctgcacttcccttctgcttttggccacttgtgagctgtgtgtgcaactggctttgccactctgagcctcagttttcccacctgccctgttgagaatcctaactcttccttctcaggactatttgaaggtgacaagcgataacatgattccctcgtttctctgtctctccgcaggcacctgggacttgggctgctgcctgggtccccctccccacggttgatgttccagaccatgcccactataccctgggcacagtgatcttgctggtgggactcacggggatgctgggcaacctgacggtcatctataccttctgcaggtgcctggttggtggtgctgggcccagggcactgagggtggcagccatgcagacagggaagaaaatgcaggcaggaatgttgactctagctctggccagggcactgttgaggctaggcaaggagggcagggccatgccttcgatgatctcaggcccagaccttcctgaaggtcacggaaagggccaaaaatggtccagggagacttgactgactggcactaattgagacccaggtgcatcctctgtggagggtgtgtgtgcccagagtatgtgggtctctgaccattctgccctgctctcagcgcacctctccgtcacctgccccagagagcatcctccccctgcgttgaagagcagctctaggccaggcgtggtggctcccgcctgtaatcccagcactttgggaggccaaggcgagcagatcacctgagatcagggttcgagaccagcctggccaatgtggtgaaacccccgtctctactaaaaatacaaaaattagccaggtgtggtggtgtgtgcctataatccaagctgcttgggaggctgaggcaggagaatcgcctaaacctgggaggcggagtttgcagtgaaccgagatcatgccactgcactctagcctgggcaacagaacaagactccatctcaaaaaaaaaaaaaaaaaaaaaagagcagccctggggaccagcatcctcaagtccctcaaacacccctgacacccacccccagtgtccctctccatctgcccccctgcctggctcagtggctgagacaggcaggtggagaagggaacccaggctgcagggccacacagccccctggctctcccacctgccagctgaaggactgggcacgtcatttctcctccttgagctcacttttctttccgcaaaacagagctgtgcttcgtggagtcactgtgatgatgcagtaagttcacggatgtgcgttgccccacagatgagccacttactgagtgctgtgcaccggagcaagtcacttcatgagtgggagcatcttgtctggaaaatggggacaatgacgcctccctcagggtagatgcaaagatggatgatgacaggagccgaggctggtgaaagtgcctggcccggccgtggtgcacagccatcagctcctctgcccttggccatccccaagcatgaggattacagagacagtgtgcagggcagggtccaggcaggacgtgacactggagggagagtgggagggggacccgcggaggagggaagcgtgagaagccatgggaaagcacagtcagggcacgcaggaggaggaacctagggagaaacctctagggagaccttggcctagagggactcaaggaaaccagtgaattggtcaaggaaatggtgtgagtcgtgcagaggaatttagagggcaagaagaggaaacggacatgacccaagaaccggcctgcgctgggccacgcctcaggttttggaaagaaactgccccctgcttctctctgagggagccgtcttggggtcctcactcagcagacactgctgggttcaacagctgcttggctggtccctgcccgacagtgggatagctctgtggcccggcagctcgtgcctgtttgcttgcccatgtgtgtgtgcatgtgtaagtgtgtggcacgtgtgtgcacatgcatacctgaggggtgcgggaagctctccatagctctggaggtgtcaggaagcgcctcctaacagcttctgatcctcccaggagcagaagcctccggacacctgccaacatgttcattatcaacctcgcggtcagcgacttcctcatgtccttcacccaggcccctgtcttcttcaccagtagcctctataagcagtggctctttggggagacaggtagatgctggggctcccttttgctggagggaggaggagggttttgacctggggatgccctcaatggagggtggcccaaaggaggtgatttgctgcttctgggcagagagtgggtagctgccctcagtcctgtgagtaagcaagaagggaagatgcagtgttggtcctaaggcctctgccagccttggccagatgtggcaggtggagggggtggagtgcgctcagtcctgctcttcctgtgaggtgaaggccagagcagagtctaccctgtccccagaccctcctccccaggactcagagcaggggctgtgcccacaggctgcgagttctatgccttctgtggagctctctttggcatttcctccatgatcaccctgacggccatcgccctggaccgctacctggtaatcacacgcccgctggccacctttggtgtggcgtccaagaggcgtgcggcatttgtcctgctgggcgtttggctctatgccctggcctggagtctgccacccttcttcggctggagtaagtgggctgctggaactggaaggggggcagatgggctgggaggggcacattcaaggggaagtaggtggacttgggtcagccagctggcgggagcagggtgcccaggagctacctgagcctcaggtgagatggacattcaggggacatgactggcagcaagggaaactgacactgccccatcaggggccaaaggatctcctgggcaactgatcccaaaatacaaaggctttctgggtggggcaaagtgacaggtacttctgatgctgtgtcagactaggcagggggctggggtgtgaggactctgaaggtggaacggtggagagcaaggtagtagccctcctggggtaagaccaggcctctggctgaagccctggcaagcaaaaccttgaagttatggtgagctttctgctcaaatctagcaggaatgggaggcagtgggctttgcaggccatcccagttccctccagcttcctcactgcatgggacagggccaggtcagggccagggctgtgtatggggacccgaatgccacatacaaagctcctgccagataaggagccgtggtcagtgccgccccaaaggctgagcacctgccctggctcccaggcgcctacgtgcccgaggggttgctgacatcctgctcctgggactacatgagcttcacgccggccgtgcgtgcctacaccatgcttctctgctgcttcgtgttcttcctccctctgcttatcatcatctactgctacatcttcatcttcagggccatccgggagacaggacggtaagagccgagcatggaggggggctacaggagggggaccggcccctcggccaggcggcccctgacccaccactcacacctgcaccagcctaccagagcatgaccagtgggtgaaggcaagctgagcaagtgcttatggggcagcagtgtctaggggagcctcaggagacaagggcttctggggcgggcttttcggcatggcagagggaggagagaaggcacacagaatcaagagggagtagggggcagctgagacctcatgtcacagaaaactttctggaagtcagggctgcctgcactggaaggaatgacactctcacgagtgccctgcaaggatagtccagagaggctccccaacagcagccgtgaccctggtgctgactgccacccgactagggtcagacctggacgatgcgtccttcctagggctctccagaccttcggggcctgcaagggcaatggcgagtccctgtggcagcggcagcggctgcagagcgagtgcaagatggccaagatcatgctgctggtcatcctcctcttcgtgctctcctgggctccctattccgctgtggccctggtggcctttgctgggtaagcagtggctaaagggttggggaagaggctgaaggtgtgggggcaggagcaagaagcctggccagcctctccttcccagcccaaccccggccagccatcctcgcaccctaggaccagcttcacagcttattctctccctgggtaaggtgcccagccccggggtgggtggggggccacctagttcctggaagcaccagggcacatgcagaggagctctgggccccacaaagctttgggcggacggcctgccagccccctttggaacacacagttcctcttgaggtctcctccctctctgcatgggctgtggttacatgaccagaggtgctgcccatctccaggaatgggtccctgagagctgcccttctagccctttgtggctagagtctggggattgtgacatctgcagcagcacagatgcatgctcaacttcagaagtgtttttgagaagtgagggctattaaaccctggaagtgtttagataggagaccttcttgtggaggaatggcctggtccccccagggccctactgtggggtttctctacaatagccagggcaagagagggcatcacggttggggtggggtgtgagaagagctaggcagagggtgcaagggccagagtcaatggggggaagtgggatatcgccagcagcacaggctccaaggaacagtggacctgggaacctccaccccaaattcggcacatcttccttccagagctgcaccctcaaccacccactgctccctcctactcactcagatcagaattctcctggcataggccaggcatggtggctcacgcctgtaatcccagcactttgggaggccaaggcaagtggattacctgaggtcaggagttcgagattagcctggccaaaatggtgaaaccccgtctctactaaaaatacaaaaattagccaggtgtggtgacgggcacctgtagtcccagctactccggaggctgaggcagaagaattgcttgaattcaggaagcagaggttgcagtgagctgagatcacaccactgccactccagcatgggcgacagagcaaaaaaaaaaaaattatcctggcactgccaattcctccctatggggctgacttagctgtgctggtttgggctggattaggatttgggctttggcagggcctggcccagaagagaaggtgtgtcaggagggccagctagcttggggaccacaccttctctgtcctaggtacgcacacgtcctgacaccctacatgagctcggtgccagccgtcatcgccaaggcctctgcaatccacaaccccatcatttacgccatcacccaccccaagtacaggtgtggctcttttccagaaccccacaccttggcctccaagggcctggcctgccgatgggggcagaggccaccacctttctgtctctcgtgtgtgtgtagaatgggggccaccagcagctgggagcggccaatgacactgagtggggtctggagttggtgtgcctccctcccccgccccagcttcccaggggtcacggtgtggagggaggtcagggttccctgggcagtgtccagtcctaactatgggaccttcagacctggcgtgtagggcagccaggacagccctgtgaatttaagcacccccccgccccgccctccccgacagtgtcatcctgaagaaatcacagcagggagagctcagctctgctcccagggcctggcaggagcctggggtggctctgggccagtatgcatgctgatagcaacccggcaaggctgcttctcccttagtgcttccttttgcctggtgatgtcagtcactcaccaccttcccaaggccagtggcaggcctgagcccgtccagcacagaggctgctccagagtgtccctggtctccattaccagagatgtggcttgagccagccactgagggctggaaccaacatccccaggctctccctgcatgcctaccacccagaatctctctgtccctcccaccagccttgtgagcctctcaatctccccacccagcatctgtctttctgtcctcatcacctgccatggttcccagggtctgagcctccccatttccccagaggctctcggtcaccgcacattaggcctgtaccagcctgtgcacccatcccctcccctgcatctgtctgcccatcccctggccctaatcagatgtgtggcccctgcagggtggccattgcccagcacctgccctgcctgggggtgctgctgggtgtatcacgccggcacagtcgcccctaccccagctaccgctccacccaccgctccacgctgatcagccacacctccaacctcagctggatctccatacggaggcgccaggagtccctgggctcggagagtgaggtggtaaggatgctgggccctcaccagcttgcgcctggccatcccttcctcaggcagccctggggctctggggaatacataggccctggcagggctgcctctgagactcagggacactgaagacgctggcaccctggcaggaagagcccctcccaacacccccatgaagttcgtaatcctccctgataggcaggggcactagggccagagcggggatggtttgggggttcccaagagcggggccaggattgaacacaggtcttccaactccaggccatccttttccatgctgacactctccctagagccgcagcctgaagagatcagcacatctggctctagatagggctccagagagacaaggcaggagttagcttggagctccttgctcctcagcattaagccccctcctcctgggagacttgaagagctcacgggatgggcatgggccctggagatgggagatgtggctttgagcctcagcttaccatgtgctcactgtgggagcctgggcaggtcacttactccctctgaggctccacgtcctcctctgaaagggaaaagaggcttctcagatcaacgctgtccaggtgtgcccagggatgggtgtcaaccttcctcggggccaggtgtgcccagggatgggtgtcagccctcctcagggcctgcagctctgcttcccctagatgtccccaggaaagctccgtgcgccaccggctcctgttcccaccacacttgggctcctccttaattctacctacagagccctctatgggcctcagcaagactgccgccaactgaccggccagcgatctcctcccactgcccacatccctggggttctcggttgagggactgagagaggagctgtcagaggtccctcctgtaaaccactgtagtgaataacaaggagaaatctaatctgttattggaggcctagaccctcgtgaagaccacccatctattcaaaaatataaatagccactttcttagcaaggtgtgccggtgtgcagatggggagcaaacctgcacacacatacacacaccctag

SEQ ID NO: 646 - protein, 472 aa, Homo sapiens [sequence omitted]

SEQ ID NO: 647 - DNA, 11898 bp, Homo sapiens
  source
  (1)..(11898)
  CDS (201)..(592)
  CDS (1385)..(1579)
  CDS (7449)..(7602)
  CDS (9244)..(9440)
  CDS (11440)..(11698)
gactgggctttgtgctcagcccagctcatctttgcctgagacctaggagtggccccaggctctcctgatgtgccaccacgcttggcatctgctcctctccctgcccccatattcccatgctctgaaggggagttctctttcatagcaaatccgagaggagccgaggagccaggtcctttgttccagacccagaagcagccatggggacctgtgacattgtgactgaagccaatatctcatctggccctgagagcaacaccacgggcatcacagccttctccatgcccagctggcaactggcactgtgggccacagcctacctggccctggtgctggtggccgtgacgggtaatgccatcgtcatctggatcatcctggcccatcggaggatgcgcacagtcaccaactacttcatcgtcaatctggcgctggctgacctctgcatggctgccttcaatgccgccttcaactttgtctatgccagccacaacatctggtactttggccgtgccttctgctacttccagaacctcttccccatcacagccatgtttgtcagcatctactccatgaccgccattgctgccgacaggcaagagggtccttggggaagctggggggagcctccccactgagccggggctcagataagggtggtgacatgcctgtgattacacagcaagtttgggtagaaccatgggaatggcttcccaaatctggtcatggtccaaaactatgaatctggaaggcagggggactgtggagctgaagaaggtagactgagggttagacacagagaaggactttgcactagatgcactagacaggttgttcaagtctgtaggggaagtgggcaatgttttagcgaccttctgaagtgttctttcctggagttgatctttgttttgttgtctttatttcactccaaagatatgtcttatacagttttttttttattattccggatagattacacgaggggaaaatgttaagtttgcttgcagttacaatctaatagggccaattattttcccaacgctgctcagggctgagcttcaggctaatgttggatgcttgatcttgccctgagatgggcttccagtgtggctttcttgtggccgtccacgggcatgtccatgcccagagggaaatggtgggccgaggtgcctgggccggggttccaaggcatcagtgtgctgtgtggctgtgggagagtcacccagcgggctctctgcaggtcggctgatactatgatatcagcagatggcagcagtgcggggaatggctagaaggcgtgggcctgggttgggagagagggagacaggggaaagggagctgggctaacaggagggcccctgccgctcaagctgccctctgctcacaggtacatggccatcgtccaccccttccagcctcggctttcagctcccagcaccaaggcggttattgctggcatctggctggtggctctcgccctggcctcccctcagtgcttctactccaccgtcaccatggaccagggtgccaccaagtgcgtggtggcctggcccgaagacagcgggggcaagacgctcctcctgtaaggcctctgggggattgtggagggcaacagtgtgtgtgtgtgagtctgtgtgtgtgtgtgtacacacgcgtgcatgcatccatgtccatgcatgtgtggtgtgcatgcatgggtgtacacatgagtgagtgtacacgggattgtgtgaatatacctatatgcttagtaagcaacacacacgatgtagccgatctgtttttcacactttacatatattgacccatttaattctcctaactatgtgggatatatattatattattattcttaccattttttagatgaagaaactgaggcactgaaaaactaagtaacatgcccaaaaccacacagctagtaattcaaatccagctagtcatttgaatccagctatggattcaaatctaagcaatcctgcccagggcccaatctcctcaccactctgctactcaaatatgcacccttgcatccttagataaggatatgcatgcatgcacacgtgtatgtgactgtacatgtcacgtgaacatgcggcacccatttctgcctgtgtgtacacgtgcaagtgtgtgggcatatttgtagatgtgtttgcacacaggcacgtgttagggacatgtgtaggcgtgtgtctgggggagactctctatatgctcaggccacaaagcggcaggagactgaggcagaacgagtccatgatggagcctgggacattttcaggctgctgaggtgggcatcacaggctggaggcagggagggcagggttagaggaattcaggcatggcccagctgctgtgtgaccctgggtgagtcctttctccattccggcctcagtttctgaggatctcacgatgtgtctttgtggtccccaggcactgagccattgcttggtagaggctaaagaaccgactggggttctgggctcagtcaggcccaagtcgtggcctggtcccacgtggccggaggatgcctcacactcacgtaacctctgaacctctggctttctctctctaaaatgaggattcataatagtacctcgctctgtgagcataaatgagatagtgtacctgaagcccttagcaccatgcctggcacagaactggtacccagtatgtggcagcttaaataggggacacatgaaaacacacctgggggtggcagatccttcccacaaagtcccagctgccccaagcatgagggtgtgcatggtctgaggtgagggctgccaggtagccatggcaacacacctctcctccaacatcctccctgcctggtctccatctgtcctgagcacctgccaggagaaggctgctcttgtgggcttcagggatagggaaggtgccattcttctgagaagccgttcctggggactggcgagtctcgagggcaggccctgcccagggtctctgccccctccctgcaccccaccctctcacggagggcgatatccatatatggggaatgcccggctttctggctcagcaaagggtggagagcagaacatattgagaccggccacttggggtcggtatttctccatcttcatacaggaccactgtgcgtgccagctctctgagaacagcgagttccatcccagattcaggcgactgggaaaaacaggcgggcaggggtgggctaggaaagccatactttggtgttgcttaaaattccgaaaggatttggggaaagcctggttttaagtgtgagaatgtgttattgtttttcttgggggagagcctaatttaggatgagggctccatccacacaggctcatgtaactgtgtgtaattaggaatctgatgaaattaaagatgccctcttcaggaacatgcgcacacacccccaaaatcaaaatacaaaaagactacctttgggaggccaaggtgggcagatcacctgaggtcaggggttcaagaccagcctggccaacgtgatgaaaccctgtctctattaaaaatataaaaattagctgggcttgatggtgggtgcctgtaatcccagctacttgggaggctgaggcaggagaatcgcttgaacctgggaggtggaggttgcagtgagccaagatcacaccattgccaccagcctgggcgacaagagtgaaactccgtctcaaaacaaaacaaacaaaggcggtccctggaactcttcccctctgccttctgcatggagacctagcccagggtgaattcctgtcctgcacaacatcctaggagcaagcaacagaggagtgtggctcctgctaaggaaggacttagagatggcctcctccttttacagatggggaaactgaggctgagggaaagccctgacttgcctaagatcatgctttaaacaagaggctggacaagagccctgtactgactcccacagtgctgaccctcagaaaaggggaaatttggtcatgattaaatctgtagacgggtatgacacagacttcctgtgcctctctgggcctcagtttcctatctggacactgagataggtggccctgtagatcctcactctgtaaggtgatgggccctggccctcgttgcccctcctcccctcttatctgctccacactggggttctcaacccaaagcctacttgaggatcagggagtctaggagcgcctgaacctcttgtaattggcatgcttgccaaaagaacccaagcagaattctaaacacaagactttaggagagagatttactggagccattataatcacccagtgggttcaccttgcctgctgcctagacagaaattatttatcaagacaggggaattgcaatggagaaaaagtaattaatgcagagcctactgtgcaggagaccagagttttataattactcaaatcaggccaggcgcggtggctcacgcctgtaatcccagcactttgggaggccaaggcagtggtcaggagttcaagactagcctggccaacatggtaaaaccctgtctctactaaaaatacaaaaattagtagggcgtggtggcaggcacctgtaatctcagctacttgggaggctgaggcaggaggatcacttgaatctgggaggtggaggttgtggtgagccaagaccccaccattgcactccagcctgggcaacaagaacaaagctccatctcaaaaaaaacaaaatcaaatcagtctcccttagcattcaggaatcagagtctttaaagataatttggcagctagggccttggcaaatggggaatgctgattggtcgggttggagatggaatcacagggggtcgaaatgaggttttctcgctgtcttctgttcctgggtgtgatagcagaactggttgagtcagattacccggtctgggtggtgtcagctgatccactgagtgcaggctctgcaaaacatctcaagcactgatcttaggttttacaatagtgatgttgcccccaaggaatttgggggaggttcaaactcttggagccagaggctgcatgacccctaaataatttctatccttgtagctaagttgttagtcctggaaaggcagattggatcccaggcaagaagggggtcttttcaggaaagggctgttatcaattttgcttcagagtaaaatcatgaactgaattccttcccaaagatagctcggcctacacccaggcatgaacaaggacagcttaaggattagaagcaagatagagttggttaggtctgatttctttcactgtcgtaatttcctcgttatttttgcaaaggtggtttcaccatgggtccccttcccttggggtagcagcacctctagaaaggggcgcagcaagcctagcatgtggcaggtagaagcaggaggtttgggaacacctcagtcctcccagtaagaaagaaaaagtcaaatgacgggaccaggggtctcaggcccattggtggaatgctctaaggactctgttccatgaaagggacccccaaatgccaaaggagcccagacccaaagaaggaggcagaacaaatccagtttgtcaatattgggtgatttattgagggaatttacagaccgaagtgggatcttgggtggccacaagacaggtggagctctgcattctcacaccccagatgcaaggcttagataccatagggaaagggtattcgtgctccagcaagacaaccaaaggcagccctccagaacaggcaagaacgctacgtgagtcacagcctacgatttgtggagtaacatcaaggttgacatgttcttacactaggggcagtaaataaagtagaaatcagaaggcattcacaagactggggcgaatcggaagtcaacacaggggagtggcatccaagatggagtcacttttgtctccacaggttcccactgcagacctgccgaggagtcagtccccagcctgcagctcatcagagagaggctgcagcgtcactcataaaccagagatctgagaactggggacactgtcgtttttttgttttttttttttgacagggtctcactctatcgcccaggctagggtgcagtggcccaatcatagctcattacagcctcgatctcctgggctcaagtgaacctcttgcctcagcctcctgagtagctggaattacaggtgtgccccattacgcctggctaatttttttaattttttttaatagagatagggtctcactatcttgcccaggttggtctcaaattcctgggctcaagcagtcctcccatcctggtctcccaaagtttagggattacaggcatgagccaccacgcctggcctacactgtttccaaaaggaaatgaaaagcctcaacacaacccagtgtcctccctggggacggggtaggaagccacgcaatggtactctgcatcacttcctcaaaggtggtatgaaagagcatttgctgacacaaacgaggttcccagccaaatgctgataaaccataagcagatgacacagcagcatgtgatatatggcgcttttccactgtcccatgcctccatagcgatgttggtgcagatggagccttattaacaccagtcattctatccatccagacagatacagattatatatatatatatatatatatatatatatatatatatgtatatatatatatgtatatatgtatatatatatatatacatatacatatacatatacgtatacgtatacatatatggctatactgtaggatacactccaagacacccggtggatgcttgaaacttcagatagcactgaattctctctatatagatatatactgtttttttcctcaacatacctatgataaagtttaatttataaattaggcacagtaagagattaacagtaactagtaataaaacagaacaagtataacaatatactgtaattaaacttctgtgaatgaggtctctccctctcaaaatatcttgttgtactctcctcccctattttggatccgcagttgggaggggttactgaaacccgggaaagtgaaactcccatcaggggtgactactattcatacatatgattctggaaaaaatatgccagatattaatagttaatgttaatagtggtgggagtgggataattttactgcctcctttgtgcttaatggcattttaaattgcaaacaaattatttcttaatttgtttcattcacttttcctttttttgacacgtgtctatcacgtggaaggatgtgatatggaaggacgcagggctactgctggcgtcccttttgcagggaagccgtctcctggcacacaggctacccaatgccacctttatttttgtttaaatcaaaccaagtccctgggaggcgcccagggtgggcccgcaggggcggctccacagtgcccgcggggtcccaggaccaggcgctggcagacttcggagtcgcccccgggccctccgctgcccaggcctcggctctccctgcaggtaccacctcgtggtgatcgccctcatctacttcctgccgctcgcggtgatgtttgtagcctacagcgtcatcggcctcacgctctggaggcgcgcagtgcccggacatcaggcgcacggtgccaacctgcgccacctgcaggccatgaagaaggtgggcgcgggggcgggggcctggagggggcggggcctggagggggcggggggctggcgggggcgaggcctcatgggggcggggccggacggggtgggacgggggtgggacgggggcgggacgggggcgggacggggcctgaccccgccctggggagccgcccttacggtctcaaggccggtccgcaagagggcgcccgggagaagcttgcggaagctgccttcgcgcgaagtctggggccagagcctgaccgcgttcctcccagccgggcggatttgcctttggtctttggccaaatacaaaattaaagaaacttgccgggcgcggcggctcacgcctgtaatcccagctctcagggaggcagaggcgggaggatagcttgagcccaggagttcgagacctgcctgggcaacatagcgagaccccgttctccacaaaaaggaagaaaaaaaaaagacaaaaaaaaattaacttcccagaatgttaggggagtcagggactcctaaagccccgtagaattcagatacccccaagaatcttagaatgataaaatattaaaatcttagactttttgaataatcagaatgttgaaattgagaagccccacagaactatagaaggtgcctgacagtcacaggagagccctcaaaggctggaactgcggaccccggaggtcgtggagaccagatagttgtccagcttcatcaaatctgtctccagtttcttccggaagtggcagtgtccccctactccctgccatccagggtcccccgaaggtcctgatgtagccctctgtgcccaagacccccttcaccctccttcagtccaagcttgtccttgcccccttcctaccaggcaacaggggaggtaatgggttaaccacatcatgtagccaggtcaaagccatgcttctcacccaaaagtaggcatctttcacagggtggttcggggagatagctgcacatgggcgccatctggtgcccctcatggagcactggcctccatctgctccacactaggggtctcaacccagatcctacgtgaggatcagggtgcccaggagcccccagaccttttgtaattggcatgctgggctgccaaacggagcaggagtgtgcctgcaggggccaggctctgaggagggggaggtccaggagctgacccgtgggcagaggcaggggtccctggttggaaccttacagcccacagagagaagggctgtgccgatacggatcccagagagggggcgtcctgggaacgcatagctgacacaggggctcccccagggatggggttaggagagagagctcagccactctccagggagggggagctgcagtgaatgaaggggtcccagacaccttttgtaggaagtggccattgagctgggcttcaaggagtgaggacttcaaaggaaggatggcagtatgggcagagggacctgcctgagcacaggcctctgaggttgggggctcaggaaggtctgggcaaaacatgctcagaggcctgagtaatagagctaacggggtctgtgtgtggagcagttcccaggtgggtgcaaggggtcctctgtgtctgccctcggagggctggggctggggcttgggcactaagaagtaacttgagcctctcctggaccagtttgtgaagaccatggtgctggtggtgctgacgtttgccatctgctggctgccctaccacctctacttcatcctgggcagcttccaggaggacatctactgccacaagttcatccagcaagtctacctggcactcttctggttggccatgagctctaccatgtacaatcccatcatctactgctgtctcaaccacaggtgagcccccactccagccccaccctctgccctcagggccccactgcccagccccaggtgggctcccctgcacagctcaagcatccatcctcattcctgccggaacctgtggccctgtgcccccagcctacatgagaaagccgtcctcacactcagcccccagcacaataatccctctggcctgggcctagcttgagcccccttcctccccaaatcctcaccgtctcccaggctgtagctctcactgtctgtctgttcctgctggctcttctgggttctgtgtctggggcaagagaagagagaagggagggccagagagatgaaggggaggggagagtcacagagagggggtgggacagacagacgaaggaaagaaaagctaagtagcgggagggagggactgacttctgttctagtattttcacaagcttcctactgagggctttcctggagccaagtgaatggcacccatccggcagtggaagcagtggatgggggctggggccagcacaggggtggggcaggctgctccctggaaagctcacagtgcatgccctgtcctccagggactttcagggcagctgggaagtgaccctgtcagagacagccaggaaggagggggccagaatctcactctcctggcatcatccagtttccctacgcctcgtgattctgaggaaatgagtcccagagaggggcctgcacttgctctggggcacctggagaggtggggggtggtgagtcagggaggaacccagccccaggagttctgcagagcaggcctttcagtggcaggaaaccctgaaggtggggcaaataaggggcggcaagaggtggacacagtctcacctcagtgagacaatgatgtgggcgaagttggccttggacctctttgttcatgttttttgtcacctccctggccaggtagccaggctactcataatgccattgggatctttgtggctcagacatttcacccgcctggggcaggccaaaaggaaataaggagctatgattttttgcaggaggccagaactctctatctcctgagagggaagtagataataggagagaagcaggtgtcacccccactctacagatggggaaactgagcttcagaaagtaagatgctcccaaattcatacaacaaacagtaaagccaggactccatgggtctccaaggcctgtcatcttatccccacaccacgcatttctcttttaaagacttgtgggattgaaaacctggagacagggactctgacatctgggaggggccaccagcccactgtgtctgtgggttgatcactctcctgctacccaagggagatacagtccctgggagtctaaacaacaccccaggctctacaagatcctgacatcacttctggatcattcccttctctgagcagccagcgttccctttctgccgtctgatttcttccactcaccgtgtgtgcttcctctgaactcccgttcagtgctgccatggggagagctgtttgttttcaagcaaatgcatcagaacttggtggctccgagtgtgggtttttcaatgtagtccccttgggaaaagcatccttgttctcccaagttgccaaagcctccattgtgttttagcaggttcttctttgactcatcccttagaagccagttaacaagtcagacaagaacatctgctggtttttttgtttgtttgttggttggttggtttttttagtaattatgctggggtcattttttgttcgtaataacagatgacctaaatcagcttagtcacccacttcattcactagacccagctccagaacactctggcagtttccaaaaatcaaactcacccacgaaggcatctctcaagagcccctgagccatgggaggctcttggagagagacagtgactttcctctggaagggagtcagtttcctgggggtgggggcagtcacatcacagctcctgagcccctaactccctggctcaaggtgcccctcgctcccccaggtttcgctctggattccggcttgccttccgctgctgcccatgggtcacacccaccaaggaagataagctcgagctgactcccacgacctccctctccacgagagtcaacaggtgtcacactaaggagactttgttcatggctggggacacagccccctccgaggctaccagtggggaggcggggcgtccccaggatggatcagggctatggtttgggtatggtttgcttgcccccaccaaaactcatgttgaaatttgatcccaatgtggcagtgttgggaggtaggggttagtgggaggtgtttgggtattggggatggatcccttatgaatagattaatgccttccagttgaagtgaatcatcactcttgtgggaatggactagttcccaaaataacaagttgttagaaagagtgtggtgtcctcagtttccctgtcttgcttcctctctcaccatg

SEQ ID NO: 648 - protein, 398 aa, Homo sapiens
MGTCDIVTEANISSGPESNTTGITAFSMPSWQLALWATAYLALVLVAVTGNAIVIWIILAHRRMRTVTNYFIVNLALADLCMAAFNAAFNFVYASHNIWYFGRAFCYFQNLFPITAMFVSIYSMTAIAADRYMAIVHPFQPRLSAPSTKAVIAGIWLVALALASPQCFYSTVTMDQGATKCVVAWPEDSGGKTLLLYHLVVIALIYFLPLAVMFVAYSVIGLTLWRRAVPGHQAHGANLRHLQAMKKFVKTMVLVVLTFAICWLPYHLYFILGSFQEDIYCHKFIQQVYLALFWLAMSSTMYNPIIYCCLNHRFRSGFRLAFRCCPWVTPTKEDKLELTPTTSLSTRVNRCHTKETLFMAGDTAPSEATSGEAGRPQDGSGLWFGYGLLAPTKTHVEI

SEQ ID NO: 649 - DNA, 1099 bp, Homo sapiens
  source
  (1)..(1099)
  CDS (201)..(556)
  CDS (587)..(899)
tcttgggattaaaggatcttccagagcttcagcccatcctctttgtactgttcctgctaatctacctgatcactgtcggggggaaccttgggatgttggtgttgatcaggatagattcacacctccacacccccatgtatttctttcttgctagtttgtcctgcttggatttgtattactccactaatgtgactcccaagatgttggtgaacttcttctcagacaagaaagccatttcctatgctgcttgtttagtccagtgctattttttcattgctgtggtgattactgaatattatatgctagctgtaatggcctatgataggtatgtggccatctgtaaccctttgctttacagcagcaagatgtccaaagggctctgtattcgcctgattgctggtccatatgtctatgggtttcttagtggactgatggaaaccatgtggacataccacttgaccttctgtggctccaatatcattaatcacttctactgtgctgacccacccctcatccgactttcctgctctgacactttcattaaggaaacatccatgtttgtggtagcatgatttaacctctccagctccctcatcataatcctcatctcctacatcttcattctcattgccatcctgaggatgcgttctgctgaaagtaggcgcaaagcgttctccacctgcgggtcccacctggtggcagtgactgtgttttatggaaccctgttctgcatgtacgttagacctcccacggacaggtcagtggaacagtccaaagtcattgctgttttctacacttttgtaagccctatgttgaaccccatcatctatagtttgaggaacaaggatgtgaaacaagctttttggaaactgatcagaagaaacgtgcttttgaagtaaaatcagtgtatctttattagtcaaataaaaaaatctttctatttatgagaactgtatttaactttagtagctttacagtaaagtcaattttagatccccaatgaaaaactataatctaacaacaaaacatagacatagatagagaaaatttatggttttacatgttacatatgagtgaaatatgtgtgtgtgaagggtag

SEQ ID NO: 650 - protein, 222 aa, Homo sapiens [sequence omitted]

SEQ ID NO: 651 - DNA, 1327 bp, Homo sapiens
  source
  (1)..(1327)
  CDS (201)..(1127)
ctggaccaacttggagaaggcccagggaactttagggagacaaagcagaggtatcaagtttagagacaatgaaaactatgactcagtctgttagctgctgtcaacctcccttatgcaatttggttttgtttggaagagcagtgagggtccatgttaaggtaattcatactttctattttcacagaaatgcctaaagaagaatgaccatggaaaattattctatggcagctcagtttgtcttagatggtttaacacagcaagcagagctccagctgcccctcttcctcctgttcctgggaatctatgtggtcacagtagtgggcaacctgggcatgattctcctgattgcagtcagccctctacttcacacccccatgtactatttcctcagcagcttgtccttcgtcgatttctgctattcctctgtcattactcccaaaatgctggtgaacttcctaggaaagaagaatacaatcctttactctgagtgcatggtccagctcgttttctttgtggtctttgtggtggctgagggttacctcctgactgccatggcatatgatcgctatgttgccatctgtagcccactgctttataatgcgatcatgtcctcatgggtctgctcactgctagtgctggctgccttcttcttgggctttctctctgccttgactcatacaagtgccatgatgaaactgtccttttgcaaatcccacattatcaaccattacttctgtgatgttcttcccctcctcaatctctcctgctccaacacacacctcaatgagcttctactttttatcattgcggggtttaacaccttggtgcccaccctagctgttgctgtctcctatgccttcatcctctacagcatccttcacatccgctcctcagagggccggtccaaagcttttggaacatgcagctctcatctcatggctgtggtgatcttctttgggtccattaccttcatgtatttcaagcccccttcaagtaactccctggaccaggagaaggtgtcctctgtgttctacaccacggtgatccccatgctgaaccctttaatatacagtctgaggaataaggatgtgaagaaagcattaaggaaggtcttagtaggaaaatgagtcctgatttgggggatttatagatgggaaaaatgaatagttccaatgaacatatattccttttttctattttcatgttcttctgttgtaacatacataatatctagattttaaaaatactttcccatctatgattgattcaactttctcaacaaaataaaagaattgtgtaaagcaggtattaacattcttatcttttg

SEQ ID NO: 652 - protein, 308 aa, Homo sapiens [sequence omitted]

SEQ ID NO: 653 - DNA, 1336 bp, Homo sapiens
  source
  (1)..(1336)
  CDS (201)..(1136)
cagcagcacctgccctggccatggaggcggggcttgctccagagggagccgcagcaaagccccctctgctgaagttcaaaatctctctgtgtgcctcctattctcaagaaggaaggagggatgactgggagggcagcagtggtctctctctctctctaaataactttttcccttgtccccacagaatgccttaaatgacaatggctgctgagaattcctccttcgtgacacagtttatcctcgcaggcttaactgaccaaccgggagtccagatccccctcttcttcctgtttctaggcttctacgtggtcactgtggtggggaacctgggcttgataaccctgataaggctcaactctcacttgcacacccctatgtacttcttcctctataacttgtccttcatagatttctgctattccagtgttatcactcccaaaatgctgatgagctttgtcttaaagaagaacagcatctcctacgcagggtgtatgactcagctcttcttctttcttttctttgttgtctctgagtccttcatcctgtcagcaatggcgtatgaccgctatgtggccatctgtaacccactgttgtacatggtcaccatgtctccccaggtgtgttttctccttttgttgggtgtctatgggatggggtttgctggggccatggcccacacagcgtgcatgatgggtgtgaccttctgtgccaataaccttgtcaaccactacatgtgtgacatccttccccttcttgagtgtgcttgcaccagcacctatgtgaatgagcttgtagtgtttgttgttgtgggcattgatattggtgtgcccacagtcaccatcttcatttcctatgctctcattctctccagcatcttccacattgattccacggagggcaggtccaaagccttcagcacctgcagctcccacataattgcagtttctctgttctttgggtcaggagcattcatgtacctcaaacccttttctcttttagctatgaaccagggcaaggtgtcttccctattctataccactgtggtgcccatgctcaacccattaatttatagcctgaggaataaggacgtcaaagttgctctaaagaaaatcttgaacaaaaatgcattctcctgagaaaagggcaatgctcaggaaagaaacactgtttctcccataagtgatttggactccactggttacatggaagaaatataatttttcctcaaacaggttcatcatccccattttaagggttctttaatttacaaacattcttaagagctttgaatactcacacagtaagtcttgaggatcatttcactcagttccccgct

SEQ ID NO: 654 - protein, 311 aa, Homo sapiens
MAAENSSFVTQFILAGLTDQPGVQIPLFFLFLGFYVVTVVGNLGLITLIRLNSHLHTPMYFFLYNLSFIDFCYSSVITPKMLMSFVLKKNSISYAGCMTQLFFFLFFVVSESFILSAMAYDRYVAICNPLLYMVTMSPQVCFLLLLGVYGMGFAGAMAHTACMMGVTFCANNLVNHYMCDILPLLECACTSTYVNELVVFVVVGIDIGVPTVTIFISYALILSSIFHIDSTEGRSKAFSTCSSHIIAVSLFFGSGAFMYLKPFSLLAMNQGKVSSLFYTTVVPMLNPLIYSLRNKDVKVALKKILNKNAFS

SEQ ID NO: 655 - DNA, 1351 bp, Homo sapiens
  source
  (1)..(1351)
  CDS (201)..(1151)
ttgcttcagtcattagtagacagcacatctagtactacaagtcttttgatttggcatcaaatccaacataccttttattatgcttttcactttttgctcttctgttagaagttgtttcactaaaaatatattatagctccatcatgtattcatctgactaaattccactgtgcatcttctttcttattgcagctcaaatgatgagacttatgaaagaggttcgaggcagaaatcaaacagaagtaacagaatttctcctcttaggactttccgacaatccagatctacaaggagtcctctttgcattgtttctgttgatctatatggcaaacatggtgggcaatttggggatgattgtattgattaagattgatctctgtctccacacccccatgtatttctttctcagtagcctctcttttgtagatgcctcttactcttcttccgtcactcccaagatgctggtgaacctcatggctgagaataaggccatttcttttcatggatgtgctgcccagttctacttctttggctccttcctggggactgagtgcttcctgttggccatgatggcatatgaccgctatgcagccatttggaaccccctgctctacccagttctcgtgtctgggagaatttgctttttgctaatagctacctccttcttagcaggttgtggaaatgcagccatacatacagggatgacttttaggttgtccttttgtggttctaataggatcaaccatttctactgtgacaccccgccactgctcaaactctcttgctctgatacccacttcaatggcattgtgatcatggcattctcaagttttattgtcatcagctgtgttatgattgtcctcatttcctacctgtgtatcttcattgccgtcttgaagatgccttcgttagagggcaggcacaaagccttctccacctgtgcctcttacctcatggctgtcaccatattctttggaacaatcctcttcatgtacttgcgccctacatctagctactcaatggagcaagacaaggttgtctctgtcttttatacagtaataatccctgtgctaaatcccctcatctatagtttaaaaaataaggatgtaaaaaaggccctaaagaagatcttatggaaacacatcttgtagagccatgttacccatcatttgttacgtagaagaaaatacattttcatgttaactgtattctctgattgtttaagctgtttctctgtgttaaagtagataatttaaaatgaagtatactttttaatatcctagtatctcatatatatatacacacacacacacgggtccctttgatgcaccaatacactagatgaaggttg

SEQ ID NO: 656 - protein, 316 aa, Homo sapiens
MRLMKEVRGRNQTEVTEFLLLGLSDNPDLQGVLFALFLLIYMANMVGNLGMIVLIKIDLCLHTPMYFFLSSLSFVDASYSSSVTPKMLVNLMAENKAISFHGCAAQFYFFGSFLGTECFLLAMMAYDRYAAIWNPLLYPVLVSGRICFLLIATSFLAGCGNAAIHTGMTFRLSFCGSNRINHFYCDTPPLLKLSCSDTHFNGIVIMAFSSFIVISCVMIVLISYLCIFIAVLKMPSLEGRHKAFSTCASYLMAVTIFFGTILFMYLRPTSSYSMEQDKVVSVFYTVIIPVLNPLIYSLKNKDVKKALKKILWKHIL

SEQ ID NO: 657 - DNA, 14325 bp, Homo sapiens
  source
  (1)..(14325)
  CDS (201)..(485)
  CDS (6716)..(6825)
  CDS (7853)..(7989)
  CDS (9241)..(9431)
  CDS (10391)..(10477)
  CDS (11512)..(11517)
  CDS (11969)..(12296)
  CDS (13932)..(14125)
agcaaaagagtggcagaaggcccaacatttttagaaaattcttagccgtaaaccttaaaatcccgagttggaaaattctcattattaaatgccaggagttggtcttcttcctggagacctctgcaagaggccctctcactgacaccttgtgtccatttttcctggccagagcctggccacccagtggctccaccgccctgatggatccactgaatctgtcctggtatgatgatgatctggagaggcagaactggagccggcccttcaacgggtcagacgggaaggcggacagaccccactacaactactatgccacactgctcaccctgctcatcgctgtcatcgtcttcggcaacgtgctggtgtgcatggctgtgtcccgcgagaaggcgctgcagaccaccaccaactacctgatcgtcagcctcgcagtggccgacctcctcgtcgccacactggtcatgccctgggttgtctacctggaggtaggtgggccccctgcttgctccagcactttctccagcagggccctgcactggacactggggactctagctccccactggcttttaccaatgagtttcctggtgcttccccaggtggtttttccttcactctgggcttactttttctccttacgaaatgggtagattgtttccttaataatcccaactaccatttgtaaagtgcttactaagtgctgggcctcacgtagggactttaaatatagcattttcctatataaccctcacagcagcttagaggctggcattattgccaccattttgcagttgataaaccaggtggtcagagatgttaagtaactgctgcagcatcacacggctggcaagtccaagctggaattctggcctcagagttagttccttaggtcatattggaaataggagtaaccggcaaggatccccaaggaggggcatgtttatgctcccaggcccctgaaaccttcactcccatctccccacttcagaaatgggtctgctgctttatgctccccatatcccctctccttcccacagcttatcctggggccctgtccaggacctgcaggtagaggctgccatggactgtgctgtagcccttttgttaggaagaattgtgtagtcactcatttcttggcccagctctgcacctcaaaatggggagtaggcagcacagtctagacactgtgcctggtgcattgctgacacagacccagtgaatactcttggtaaccctgggagtccatgctactcttctcactttacaaaataggaaacaggccgagcacggtggctcacgcctgtaatcctagcactttgggaggccgaggcaggcagatcacgaggccaggagttcaagaccagcctggccaacatggtgaaaccccatctctactaaaaatgcaacaattagccaggtgtggtggcatatgcctgtaatcccagatacttgggaggctgaggcaggagaattgcttgaatctgggaggcagaggttgcagtgagctgagatcataccattgcactccagcctgggcgacagagcaagactctgtctcaaaaaaaaaataaaattaaattaaaacaaaaacaaaataggaaatagaagctttggagaagttgcctttcttcacccaggtcacagggagaaatgctgatggagaaatcccaaagcagatattattctccaggaagacaccttcagagccagcgagcagatgtgggagcatttagggatcatcggtgggcacaagctggatcctgcccctttctctgcccagctttctaggatggcatgtccaggactcaagcaatctgggagtctaggtgcatgggaaggcatgggatcaggcatttaggaaagtgccggtgctctgcccactgaaccgttaccttccttccctgagcaggagaggaattgaccagtgcctctgaggccatccctgcctgagagggaaggggttgttgaaagaaaatgagaaagctttgtaggtttaaacaggggagaaatctagatgaggacgctcaggtgaggaggcgagactggtggaaagtggcacacctccctgtccctgggcccccaaggggctcgtgcgcttactgttctcaccaccaccccgggcccaagggagctctgatccatcaccccttggcttcctttactacagccaatgcaggctgcaacttccaaaatgacctgactggatattaaggaagaaccaaaaggaaacacaaatacaaaaccacataaaaatattcagttgacacaggccaggagtccaattccccctggatccatgtttatgagggcccctagactctgtccatgccttcttaattcttacgcttgatcccctccttcttccctcttccaaaggagggtcctaggtctcagaccatagggaaaaatggtagagcaaacaaactctctgtgcctcagtttcctcatctggaaaatgcagataataatagtatcatacatcatagcattgttgaggatcgaattagttgatgtatgaaaagtgattagaatgatacatggctcacagtgagcactgtgtaaatgtcagccatggcgatgatgataaagatgaagatgacaatagacatccagcactgctccacatagggaggactctgtctttcctattcaccgcccccttgggataaagaggaaggagagagtactccctatgttcgccccaggcaagtaggtaccctcttcccagaggaacgtgtgttctacccagggctctgggcatggcttctgttagcttccagaccccctgtccctacccaggcacttgggtagggacaaatccatacatgggctatagggggttcccaggaatctgtaagtctttcgaacagatcctttaaacatgcttgttcaccttattttaaaggtgaagctgagtgtgtcaggggaggagggtgcagaagccattctcagagggcagggctcagacttccccacagcatctcatcaaactagagctgggcactgagccttgtttaatggacattatctcagcgatttgttgtccctagagaacgtcccaggtgacgtctcaccctgccctgatgtcctatcagcgcaccctcacaaccacgcactgtcccctctctaatacatgctcttgtcatccagattttttcctcctgttccatttccagcaatgccatgccaacatctgtctggcttaggactaagtgtgcgttatttatcttgctaagtgtatgaaaagcacgctggttttggagtgagaggaccaggttcaattcccagctccattcctttccatctagatgctattggaagagttcctgatgtccacatgtgccattccatgtcagcctcacaaccctttaaggagcggcttcctgtgtgcatttattttctagatgaggagattgagaagatgaacaaatatctcagagttattcattcactcagtcagcactgactgagcactccgaggtcttaccccaatccttgtgcaatgggctaaggcactgacctgctggggatgcagaggttgacagggcccctacagtgcagtctgctgccggtgacagtggagcagtccccataggaggtgtggggcataaggcccagcatgagggtgtcagggaagactttcagggagaaatgatgctttcggaaaaattatgcaggagagggagggagacacttgcattctcaagaaagccacccagcagggagagggagtagctggctggaggtatggaggagaggtggttatgtcatttgcctctgaggcttactgtctgcattctaagatataagcatcaagtgtttggaacagtgcctgacacatggtaagtccttagtattattacagttattaggacttagctgagccagctcagggcctgtactgcaggtctcagctttatgtgagcaagagcattaaggaatgatgcctggatgcctgggggtgtgaagaaaagagccttgggttcgactagggaacctggggccactccttcctctgctactaaatcaccaagtgatcttgttctgttttcttctctgaccctccctagttttgtccacccttgaaataatcatctttccttttcacatttcatgcttaccaagtacttgtcacctaattatctcctctcttgataagctagatggtcccttccagggcagcttagtagagagcatgggatgtgatgtttcagattccagctctgctgcacacctgccaggtgaacttggccacgttacatggcctctctgggcttcagttccctcacctatgagtgggataagcaagcccttcttgtaaaagttttaagaacgatacatgagataaagtgcaatgcccacagtagatgtcttatggacagtggccaccaatgcattttcttgagtctttaagttagcagccctaactactctccaaggcagcttcccctgggaccacagaggaaatctctttgttattctgggctccagataggccagtgcaaggagagatttaagatgtccatgaaggcaggactgtgtctgaattgctcacaactgtgtccaggagcctaggatagaggctggaacacagtaatttgctcaataagtgtttgtaggaaagaagggatggcagaaaggagggaaggagaggaggaagacagggaggaaggccctgatatctcaacctagatccccagtggctcccaagtactggtcccaggaggggcttcaaagtgggatgtaaatcaggtagtgctggttttctgcccagtggtaccctaaaggcacactctgtttatgccaggaaagccctttacgtaccctcctgcctccacccgcaaaatgggcatccagctgttagctcctgccaaactggtcagcgcagcagcacagggagctgggagagaggccctggtacggggcccccatgtgagctcccaggaagacagtgccgcatgagaggcttgctgtgttctggggcaagctgctgtttctgccacacaggatgacagcagctgcattgcccatcattgagcttaaatgccagcatttggttggatgcctaggagcagaagagagggcagtgatcagaatgagcaaggttataattagccctgctgccaagctacacggtgacacgaagtctgccctactccgggttgcgggagggggctttcacgctcctctctgctcctattggtagaagccaaaggtgcatctccctgtcctgactccatcctcagggaactggggctgctccaagcttccagagcgctagggacagctgccgtgagtgtgtgcctgcgtaatctgccatgagtgtgtgcctgtgtgtgaatgggtgttacgtggggaggggggagggcggtgcgttcatgtgtgtgtgtgtgtgtgtgtgtgtgcctgtgtgcatgtgtgtatgagaaacgtgctcctgccaggagctagactcttcatttcccatcctaccaaggacacagctcatcacagcaacccctccgcctaccccagcccactcgggtgttcctcgagcactagcccagatctgccttctttcgttctctgggtataagaaggagcagaaatttcttctctgtttcatggcgagtcttcatcttcaccattattcttaacagatcattttggggccccgactctgccatgtactgggccaaccactgaagggcttgcctggctcagccagagcctgggccagagcaggactaggaactgagcccacaggccttggggaaatcactgcactttttggaggcttggtttcctcattggttctcagtttcctcacgggcattctaaaattttacctggaatctaatttacagaggtatggctgagtgataacacagggaagccagtgccattgggaagagtttaacgtgatacacaatgtccctagaaaccagatgctcagcccgccatgtggggtgcagggggaagcagcaggcttgggtcaagagtcagaatcaggggtgagggaaagcccaggctacagccctgttggggctcccacaggaagtgcaaggcagggcagattaagcaacctagggttggctagtctcaacatcctggcaggctttgggctacaggggtgatctctagttgtctctctggtacctgagataatttgggacaggggaaatattgtcttggtgtgtgtgtgaattagagaaacggggtggctggcttgcatttgagaggcatccttccaagtcagtcattttctgtcttcaggaattaactagctctgggacagtaagtctctctctgggtctgtgaggctcccaagtgccagaatatcaggatcagagaagatagaaaaatatagtcaatataggtgtctctgtgatgaatgggtgccaaatacacaaatacagaatctaagaaaacacatggggttaacaaaggttgcagagattaaggtttaaagttgaggccctccgtataagttggctgtctttcttctagcacagtaattggcaataagtggtcttatgtatctgggagaagataagcgaggggcaagggcctcagacacccatgggcatcactccccacaccccagctggatgcccacaagacttgcagctgcctcctgagtctgtggcctcatcggctccaggagtaccaggctacaggacctaagctaatctcccactcctgctgtccatccattatgttgctttgtccccaggtggtaggtgagtggaaattcagcaggattcactgtgacatcttcgtcactctggacgtcatgatgtgcacggcgagcatcctgaacttgtgtgccatcagcatcgacaggtgagcccagccagggtggaagaggttgctctggccactcaccattctggctgccccagcttttctcaaagccaggctgtgtctcgtgtctgtgatgctgtgcagctggctgtgtgcatgggggtccatgtgtttgtgtgtatgggtgtgcatgtgtgtatgtttggctaggagagcacacactccctaaagagaagccatctatggacagtgatgctgccaagcatactcagacagtgactggtacaaaaggggaaagattgtgattctgacggaagccctagctctagcacatcttactcatgtgaccttgggcagatgatggacgttttcagagctctcagtttcattttctagaaacctacattgatgacacctgtggcctggagctgcagtatctggttatgcattttatgtccttggcacatggccaagggtcccaggccatgcacaccttgctaagctgcatccttggagccttccactaatttgcacagatatgaccctacctccctcacaccattcttggaagatgaaataagttaatgaatgagaagggctgggtaaaaaaaaaaatgtgatgaaggattgtagacaattgccattgttatttcctgctaactaaggcttaaatcttgctctgaggggcctggctaacaatttatcaacaaacatttccaccttatgggctcaacacaagtgcagtgggtacagtttcaaaagtgcaaagatgcaggccatggttcttcgaaaagcctgaaatccaggtggggccggttagaataatagatatgagctaagagtaaacaatagctcaccagtgattaagtgtttgggctttgccaactgtcctcgccatctgagtttggggacaggagggagggttgagttagcatctcaggcaagcttcatagaggtgtgtcaactgtttagccccaaggagtgagggtgtctctggtgtgtgcatattgtggagtgaggggtccctgggcctgcaccccagattcagggtcccccgcccttgcaggtacacagctgtggccatgcccatgctgtacaatacgcgctacagctccaagcgccgggtcaccgtcatgatctccatcgtctgggtcctgtccttcaccatctcctgcccactcctcttcggactcaataacgcaggtacattctgcttttgtttgcctgaggctcagctggccctgggcccctgctccctcgaagggccctgagggagcagagtccctggcacagatatgggtggaggcccaatggaggcctatcactaccctggactgagtccaggctacgtgtcctgggccaagccccactcaagagttgttctaggttggcagagaggaaacagtggcccaggacacaacggagttggatgaggagtggggataatggttcaggggtatgtctgggaattttcaactttggttattaagttgaagaggcaagacgtgcttcacaaactgcatgtgtgtatatgtgcacatgaacatgggatggcggaggctactgggcttccatccactcctgacaatagtatttttgtaatgaagctgcagccctcagggcctgctaaacccaggtcaggccttagccacctggagcaggaaagctagaagtgaataggaggtaagctgaccacatgcccatttctgtgggaggcagagtcaggagtgtctcagacagaggcaacacaaagcccccgccagcgtggaacttcctctcatcagggaggcaagagcgatggcaggtgtgcacctctggagatcgtaacaacaaaagatacagtgaagccttgaaaatgtgtggttcggtatctattataagcatcacaggaattctaagtgggaataacactaaacatacttggattaatgcacaaggccctgagatagaggacaggcgtctggtagacctagaagggcacgcaaacatatgaaacacataggaacacaagtgagttcaacagacagagccaagttatcttgctgcaaacattaaaaggtggccaacctctcccaatacacaggtcagactaaaaagatggtttactcttttaaaagttttcttgtgtcattctttctggatacatcggcttcacttgttatgcccagacatggcaaaactaatgaccaagtaatgagggaatagtaatggaaagacttgggagcagtccatcatcacagcttaactttttgctcacaaccgtgtttttaatactctggtatctgctgtgcgtttgtgtatatctaagatgaccaggcagccttaaacatctagttgcgttcatattctctgtaaaatcgctccttgttcctggaaggacatgaatgggctcttgtggaattatggccggtgggcccgctgactccctgcctgcccgggctctccctcccccagaccagaacgagtgcatcattgccaacccggccttcgtggtctactcctccatcgtctccttctacgtgcccttcattgtcaccctgctggtctacatcaagatctacattgtcctccgcagacgccgcaagcgagtcaacaccaaacgcagcagccgagctttcagggcccacctgagggctccactaaaggtctcaagacaccccccaaccaactccaagggtccccacctaaccattaccaagagggctcatcttatgctcaggtgggggcttgggaaacctcagcaagggttaggtctaggctaaaggaattcccaggagccgggcaagggcagattttgaaggcatggacctcagtggagcaatctgagtctccaggagagggaggcagggtccatgacactaaataacaaggggaagtctttgcttggagatctttgtgactgaaggcggcaactcttgcttggtacccccgtgggctcctctcttcctcttttctggtttctctgtctcactttagctccctctgactcctccatcctctttcctttaccttccgtactctctgtcctcccctccaaacacacatcacttttcctgacttcctctccactatgtctctcctgtgcttctctttcatttcccccctgatgtcttgtgaattctccccttcactcagtccttcacaaggaagacagtgtgtgggcacagaaggaacaagagctcttgggctagacgcatcaggttcagatcctgtcactgacactttttttgctgagtgaccttaggcaagttgcttaccttctatgagcctgtttcctcatctgttaaatgggaatcaaaataccagcctcacagggtggtcttgaggattccacgtgagaagggacgtgagtgtgcctagcacagtgccaggcccttagcaggtgctccataaaaaaccaggtccttgtgttcctcgtcatacccaccactttttgtctcattccagccttcccccttgccccaactgcctcctctggcccccaccctcctgatctctgagcccttctgcccagtctgagttccatggactgctgcactttgggtttctgtcccccctccatccccaccactttgtgtgacccatgtgctggctcactccacagggcaactgtactcaccccgaggacatgaaactctgcaccgttatcatgaagtctaatgggagtttcccagtgaacaggcggagagtggtaagtgctcaggccagggacccagagccaggtctttctgcccctagggaagcccactggccatggttctgagacctcagaagctggccaatgggagaagcaccccagaaacccccaccttgcctcagctgaaggcagactcaccgtgcacacctccaagcaggcatgaagtgagacacctcggttctgcaaggcatggatgtgtacgagaaaatggttggccataccaacgtaataaaaatgataataatggctattcacatttctcaaacatctaccatatccctattatctcatcaaatcctcaccacgaccccgggaggtaagtctctttgatcgaaccgatcttcagttgacagaagaggaaacaggctcagaaagattaggcaactcacccgtctcaagagttggtgacactaagcccagacctgtgtgactctgaaatccacacctgtgttctttccactgacatgagctgccttatggatgggcaggttctggggtaggacgcagcagagcagctgcggggactggtggcggagcagtttgtgtacatagagccctcaggtgcggaagcacagcagaccccagcctctgccaggtggtagctgtaccaacatgcaagcagcaggcattccatcctccagagggatggagaacagggccagagaacccacagagggccgcatacaaaatccaggtctggtgtcctgccttcacctgcactgcaagggcaggactctaagaagctgtttatgaggcaggtgccaaaacagagcctcagagtcagggccaaggcagcagcccagtcatgccacctaggcacatagtgaggctgcactttagaagttcagactaacacctccaaggcctcaaacaagagaacctatggaagaacccaggaggccatgagtggatccatgccagggctctctaggtcaccccagcagggaagatgtggggccccaggggtcagccttttggcacctagattagtctatccaggagaatatggagcccacgtgtgtacgcaggtgcaggtacccatgaagtgggagcactgggccccttgtttgacagggagaacaggggtgggcaccctctttgcagtcggaacatgagtttctggaggcagggccaaacatcatcagctcttgaccccagcagccactgtggcacctggcactttgctaacagtaagtgttgctcaggccatgagagacaagtccctggtattcagccctggcagaacagaagtggggtattgaggctgcatgaggattgccatgggaaaaaggacaggggcaatcctgcaggggctgccatgggtcctgggtcccatgcctcagtgacatccttgcctccctggcagggtgaccctgtggtgtttgcaggagtcttcagagggggaaagggaggggccagtgagatgggtggctgatgcctgggaacttgtccggctttacccagagccctctgcctctggtgcaggaggctgcccggcgagcccaggagctggagatggagatgctctccagcaccagcccacccgagaggacccggtacagccccatcccacccagccaccaccagctgactctccccgacccgtcccaccatggtctccacagcactcccgacagccccgccaaaccagagaagaatgggcatgccaaagaccaccccaagattgccaagatctttgagatccagaccatgcccaatggcaaaacccggacctccctcaagaccatgagccgtaggaagctctcccagcagaaggagaagaaagccactcagatgctcgccattgttctcggtgagtcggccctggctgctggccacagcccggtctgtgaaaggtcccattccctgccatgtccttcctaaccatggctgcaggatcatggggctagcatttcctcaggcacaggccaagcccattgacatacagacagccctattaggtagattctgtaattgtgctcactttacagatgggcaaacagagttttagagtggttataaaacctgaccaagaggacccatggtttgaactcaggcagtctgactccagagtctggaaatttgactagtctattatgctggcaccagaacctcatgggcctatgtgcccaggaaagtcactttctctctctaggctcctcatctgtagagtaggttacttctcagggctgtcatggcaatcagttggtgaaagcattttctaaactacaaagcactatccatatgtaagtgtcactattatggtttttattactattgctctttttgaggaattgggaaattcagttcacttgcactcaaacaagactccatgggaccagagctgtgaaaaataaatgagatgttggggagtggcccccaatctaaatgaaaagcatccctgtccataaagcaggatttttcaatagaagtctagaaaaccacatagtaaaggtcaaaacccaaaaggtggactgatatgggtggctgggaaaaggagggtcccctgtgactctgtcttccaggaagcacctgaatcccctttgactgccggatgatcctggggcgtgagtggggcagctgttacctcccttcttttatgaatgagagcacttgatcccatgggactactcacgatcatgggactgggatatggtaggctaggattggagccaggccctctgctgcagtccataggggctcagctctgtggccctactcttcccagacaccattcagtctccagggatgcctcctgtgcctgtagggcattccatgtacacattgcttccaggataaatatcacacctgtgcaggaggtcctggaaaaagtgcacctgagttaggtgagcagagcaggtaggtggctgccctgggtgagagggcatggttcaaggcagggactagcaagggtgtacccaccaagactggggaaattgggggaaggctagagcgagatcatctggggacctggatagaccggagttcagctctcagcctcgctgctcaagagtgaatgaccttgggtatattgcagagctgttgtgagtgtttttcttatgtaccttatgaggatgctataagaactaagtggcatgggtctatagccctcaaagatgacctggaagtagagtagatatttccatttctactggctaacctgggtcagaatggtaaccttttggatttattgttaaaccatgtacccttttctaggaggtgggaaagggacaaatgagggaagtgaggctgaaggagctgaagggatacttcactgcaaatgggtgtcagaggcaggtctaggatccaagacctggactcctcctacagtgcttctgtggctacagcccaccgtcttggcatacgagccagggcgcactgggtgtgggtgttcccagccgtgcctccccggctctggggaccagcctgaccatgccctctcccccaggcgtgttcatcatctgctggctgcccttcttcatcacacacatcctgaacatacactgtgactgcaacatcccgcctgtcctgtacagcgccttcacgtggctgggctatgtcaacagcgccgtgaaccccatcatctacaccaccttcaacattgagttccgcaaggccttcctgaagatcctccactgctgactctgctgcctgcccgcacagcagcctgcttcccacctccctgcccaggccggccagcctcacccttgcgaaccgtgagcaggaaggcctgggtggatcggcctcctcttcaccccggcaggccctgcagtgttcgcttggctccatgctcctcactgcccgcacaccctcactctgccagggcagtgctagtgagctgg

SEQ ID NO: 658 - protein, 445 aa, Homo sapiens
MDPLNLSWYDDDLERQNWSRPFNGSDGKADRPHYNYYATLLTLLIAVIVFGNVLVCMAVSREKALQTTTNYLIVSLAVADLLVATLVMPWVVYLEVVGEWKFSRIHCDIFVTLDVMMCTASILNLCAISIDRYTAVAMPMLYNTRYSSKRRVTVMISIVWVLSFTISCPLLFGLNNADQNECIIANPAFVVYSSIVSFYVPFIVTLLVYIKIYIVLRRRRKRVNTKRSSRAFRAHLRAPLKGNCTHPEDMKLCTVIMKSNGSFPVNRRRVVQEAARRAQELEMEMLSSTSPPERTRYSPIPPSHHQLTLPDPSHHGLHSTPDSPAKPEKNGHAKDHPKIAKIFEIQTMPNGKTRTSLKTMSRRKLSQQKEKKATQMLAIVLGVFIICWLPFFITHILNIHCDCNIPPVLYSAFTWLGYVNSAVNPIIYTTFNIEFRKAFLKILHC

SEQ ID NO: 659 - DNA, 1345 bp, Homo sapiens
  source
  (1)..(1345)
  CDS (201)..(1145)
tcaaaaacctgggtaatctttcatccagtggtggcatactgacttgcagacacagtgagtgcatagggaaaagagcttcctcctaattctgagccaaatcttaagtgaaaagacaacactagattttaggacctatcaatattatttaactgcactattatttcttccagagatgaacctgataaaggatctgtgattcaatggatcagagaaattacaccagagtgaaagaatttaccttcctgggaattactcagtcccgagaactgagccaggtcttatttaccttcctgtttttggtgtacatgacaactctaatgggaaacttcctcatcatggttacagttacctgtgaatctcaccttcatacgcccatgtacttcctgctccgcaacctgtctattcttgacatctgcttttcctccatcacagctcctaaggtcctgatagatcttctatcagagacaaaaaccatctccttcagtggctgtgtcactcaaatgttcttcttccaccttctggggggagcagacgttttttctctctctgtgatggcgtttgaccgctatatagccatctccaagcccctgcactatatgaccatcatgagtagggggcgatgcacaggcctcatcgtggcttcctgggtggggggctttgtccactccatagcgcagatttctctattgctcccactccctttctgtggacccaatgttcttgacactttctactgcgatgtcccccaggtcctcaaacttgcctgcactgacaccttcactctggagctcctgatgatttcaaataatgggttagtcagttggtttgtattcttctttctcctcatatcttacacggtcatcttgatgatgctgaggtctcacactggggaaggcaggaggaaagccatctccacctgcacctcccacatcaccgtggtgaccctgcatttcgtgccctgcatctatgtctatgcccggcccttcactgccctccccacagacactgccatctctgtcaccttcactgtcatctcccctttgctcaatcctataatttacacgctgaggaatcaggaaatgaagttggccatgaggaaactgaagagacggctaggacaatcagaaaggattttaattcaataagggtaagatagtacccatatttaaagatagacattaaatttcactttctcaaaatgggaaaggagcttgttcatgcccaaaacaaagagatacctatggccaccatcgagtcctaaaagaagttattccatcatatatgttggggaccacgtggatgatactgctctaagacaaaatccactcaagtctttccctactca

SEQ ID NO: 660 - protein, 314 aa, Homo sapiens
MDQRNYTRVKEFTFLGITQSRELSQVLFTFLFLVYMTTLMGNFLIMVTVTCESHLHTPMYFLLRNLSILDICFSSITAPKVLIDLLSETKTISFSGCVTQMFFFHLLGGADVFSLSVMAFDRYIAISKPLHYMTIMSRGRCTGLIVASWVGGFVHSIAQISLLLPLPFCGPNVLDTFYCDVPQVLKLACTDTFTLELLMISNNGLVSWFVFFFLLISYTVILMMLRSHTGEGRRKAISTCTSHITVVTLHFVPCIYVYARPFTALPTDTAISVTFTVISPLLNPIIYTLRNQEMKLAMRKLKRRLGQSERILIQ

SEQ ID NO: 661 - DNA, 1849 bp, Homo sapiens
  source
  (1)..(1849)
  CDS (201)..(1649)
atataattgtctatcagagaatgcttttatgtggtcccgtgtgaggtgaaggaaggcaaactaaaacagcgtgaggaccttctggtttcatgatcccacatctttatgtgggaagattagaatcctaagaatatgtatgcattttcaaaaagatactgtttgttttaacatttttttcatctttttgcagaagtttagcaatggcgtctttctctgctgagaccaattcaactgacctactctcacagccatggaatgagcccccagtaattctctccatggtcattctcagccttacttttttactgggattgccaggcaatgggctggtgctgtgggtggctggcctgaagatgcagcggacagtgaacacaatttggttcctccacctcaccttggcggacctcctctgctgcctctccttgcccttctcgctggctcacttggctctccagggacagtggccctacggcaggttcctatgcaagctcatcccctccatcattgtcctcaacatgtttgccagtgtcttcctgcttactgccattagcctggatcgctgtcttgtggtattcaagccaatctggtgtcagaatcatcgcaatgtagggatggcctgctctatctgtggatgtatctgggtggtggcttttgtgatgtgcattcctgtgttcgtgtaccgggaaatcttcactacagacaaccataatagatgtggctacaaatttggtctctccagctcattagattatccagacttttatggagatccactagaaaacaggtctcttgaaaacattgttcagccgcctggagaaatgaatgataggttagatccttcctctttccaaacaaatgatcatccttggacagtccccactgtcttccaacctcaaacatttcaaagaccttctgcagattcactccctaggggttctgctaggttaacaagtcaaaatctgtattctaatgtatttaaacctgctgatgtggtctcacctaaaatccccagtgggtttcctattgaagatcacgaaaccagcccactggataactctgatgcttttctctctactcatttaaagctgttccctagcgcttctagcaattccttctacgagtctgagctaccacaaggtttccaggattattacaatttaggccaattcacagatgacgatcaagtgccaacacccctcgtggcaataacgatcactaggctagtggtgggtttcctgctgccctctgttatcatgatagcctgttacagcttcattgtcttccgaatgcaaaggggccgcttcgccaagtctcagagcaaaacctttcgagtggccgtggtggtggtggctgtctttcttgtctgctggactccataccacatttttggagtcctgtcattgcttactgacccagaaactcccttggggaaaactctgatgtcctgggatcatgtatgcattgctctagcatctgccaatagttgctttaatcccttcctttatgccctcttggggaaagattttaggaagaaagcaaggcagtccattcagggaattctggaggcagccttcagtgaggagctcacacgttccacccactgtccctcaaacaatgtcatttcagaaagaaatagtacaactgtgtgaaaatgtggagcagccaacaagcaggggctcttaggcaatcacatagtgaaagtttataagaggatgaagtgatatggtgagcagcggacttcaaaaactgtcaaagaatcaatccagcggttctcaaacggtacacagactattgacatcagcatcacctagaaacttgttagaaatgcaaattctcaagccgcatccca

SEQ ID NO: 662 - protein, 482 aa, Homo sapiens
MASFSAETNSTDLLSQPWNEPPVILSMVILSLTFLLGLPGNGLVLWVAGLKMQRTVNTIWFLHLTLADLLCCLSLPFSLAHLALQGQWPYGRFLCKLIPSIIVLNMFASVFLLTAISLDRCLVVFKPIWCQNHRNVGMACSICGCIWVVAFVMCIPVFVYREIFTTDNHNRCGYKFGLSSSLDYPDFYGDPLENRSLENIVQPPGEMNDRLDPSSFQTNDHPWTVPTVFQPQTFQRPSADSLPRGSARLTSQNLYSNVFKPADVVSPKIPSGFPIEDHETSPLDNSDAFLSTHLKLFPSASSNSFYESELPQGFQDYYNLGQFTDDDQVPTPLVAITITRLVVGFLLPSVIMIACYSFIVFRMQRGRFAKSQSKTFRVAVVVVAVFLVCWTPYHIFGVLSLLTDPETPLGKTLMSWDHVCIALASANSCFNPFLYALLGKDFRKKARQSIQGILEAAFSEELTRSTHCPSNNVISERNSTTV

SEQ ID NO: 663 - DNA, 1516 bp, Homo sapiens
  source
  (1)..(1516)
  CDS (201)..(1316)
aatgcaatagtgcctggcatgtaggaggtaccagagaggcatttgttcaataaataaaatagcaaagaaggaaatggttaaatcacaaaactggacttgctcagagtcagggggaacattgttggtcttgctggtattggtcaacctcttaaagccaactctagggttcctctaatggtccctgtcttctcttgcagagaatggaggatgaagattacaacacttccatcagttacggtgatgaataccctgattatttagactccattgtggttttggaggacttatcccccttggaagccagggtgaccaggatcttcctggtggtggtctacagcatcgtctgcttcctcgggattctgggcaatggtctggtgatcatcattgccaccttcaagatgaagaagacagtgaacatggtctggttcctcaacctggcagtggcagatttcctgttcaacgtcttcctcccaatccatatcacctatgccgccatggactaccactgggttttcgggacagccatgtgcaagatcagcaacttccttctcatccacaacatgttcaccagcgtcttcctgctgaccatcatcagctctgaccgctgcatctctgtgctcctccctgtctggtcccagaaccaccgcagcgttcgcctggcttacatggcctgcatggtcatctgggtcctggctttcttcttgagttccccatctctcgtcttccgggacacagccaacctgcatgggaaaatatcctgcttcaacaacttcagcctgtccacacctgggtcttcctcgtggcccactcactcccaaatggaccctgtggggtatagccggcacatggtggtgactgtcacccgcttcctctgtggcttcctggtcccagtcctcatcatcacagcttgctacctcaccatcgtgtgcaaactgcagcgcaaccgcctggccaagaccaagaagcccttcaagattattgtgaccatcatcattaccttcttcctctgctggtgcccctaccacacactcaacctcctagagctccaccacactgccatgcctggctctgtcttcagcctgggtttgcccctggccactgcccttgccattgccaacagctgcatgaaccccattctgtatgttttcatgggtcaggacttcaagaagttcaaggtggccctcttctctcgcctggtcaatgctctaagtgaagatacaggccactcttcctaccccagccatagaagctttaccaagatgtcatcaatgaatgagaggacttctatgaatgagagggagaccggcatgctttgatcctcactgtggaacccctcaatggactctctcaacccagggacacccaaggatatgtcttctgaagatcaaggcaagaacctctttagcatccaccaattttcactgcattttgcatgggatgaacagtgttttatgctgggaatctagggcctggaacccctttcttctagtggacagaacatgctgtgttccataca

SEQ ID NO: 664 - protein, 371 aa, Homo sapiens
MEDEDYNTSISYGDEYPDYLDSIVVLEDLSPLEARVTRIFLVVVYSIVCFLGILGNGLVIIIATFKMKKTVNMVWFLNLAVADFLFNVFLPIHITYAAMDYHWVFGTAMCKISNFLLIHNMFTSVFLLTIISSDRCISVLLPVWSQNHRSVRLAYMACMVIWVLAFFLSSPSLVFRDTANLHGKISCFNNFSLSTPGSSSWPTHSQMDPVGYSRHMVVTVTRFLCGFLVPVLIITACYLTIVCKLQRNRLAKTKKPFKIIVTIIITFFLCWCPYHTLNLLELHHTAMPGSVFSLGLPLATALAIANSCMNPILYVFMGQDFKKFKVALFSRLVNALSEDTGHSSYPSHRSFTKMSSMNERTSMNERETGML

SEQ ID NO: 665 - DNA, 1354 bp, Homo sapiens
  source
  (1)..(1354)
  CDS (201)..(1154)
tgcagcctgtgatgaccctggcattttcaccaccccgtaacactgccaaattactagtttactaagttccaaaaggttgaccaccattcatccatcctgttttataattgggcttctgggaccaagtgggtaccttctattaccccacagctatacccttgtgcttttcccatcatctttcctcctcaaacaggccccagatgctaaggaatggcagcatagtgacggaatttatcctcgtgggctttcagcagagctccacttccacacgagcattgctctttgccctcttcttggccctctacagcctcaccatggccatgaatggcctcatcatctttatcacctcctggacagaccccaagctcaacagccccatgtacttcttcctcggccatctgtctctcctggatgtctgcttcatcaccactaccatcccacagatgttgatccacctcgtggtcagggaccacattgtctcctttgtatgttgcatgacccagatgtactttgtcttctgtgttggtgtggccgagtgcatcctcttggctttcatggcctatgaccgttatgttgctatctgctacccacttaactatgtcccgatcataagccagaaggtctgtgtcaggcttgtgggaactgcctggttctttgggctgatcaatggcatctttctcgagtatatttcattccgagagcccttccgcagagacaaccacatagaaagcttcttctgtgaggcccccatagtgattggcctctcttgtggggaccctcagtttagtctgtgggcaatctttgccgatgccatcgtggtaattctcagccccatggtgctcactgtcacttcctatgtgcacatcctggccaccatcctcagcaaagcctcctcctcaggtcgggggaagactttctctacttgtgcctctcacctgactgtggtcatctttctctacacttcagctatgttctcttacatgaacccccacagcacacatgggcctgacaaagacaaacctttctccctcctgtacaccatcattacccccatgtgcaaccccatcatttatagtttccgcaacaaggaaattaaggaggccatggtgagggcacttggaagaaccaggctggcccagccacagtctgtctagcaggaaggccctgaaaggaaagctccttcacctggggaatgggagagttaccccatccccagccctggcagatgagtaactctcctatgctgaaaggctccaggaaagagcgttcatggcttccttggcactagaatcagacctgaaagttcctcctgatgtccaatgtcctgatgttatctctctgacttcacttccac

SEQ ID NO: 666 - protein, 317 aa, Homo sapiens
MLRNGSIVTEFILVGFQQSSTSTRALLFALFLALYSLTMAMNGLIIFITSWTDPKLNSPMYFFLGHLSLLDVCFITTTIPQMLIHLVVRDHIVSFVCCMTQMYFVFCVGVAECILLAFMAYDRYVAICYPLNYVPIISQKVCVRLVGTAWFFGLINGIFLEYISFREPFRRDNHIESFFCEAPIVIGLSCGDPQFSLWAIFADAIVVILSPMVLTVTSYVHILATILSKASSSGRGKTFSTCASHLTVVIFLYTSAMFSYMNPHSTHGPDKDKPFSLLYTIITPMCNPIIYSFRNKEIKEAMVRALGRTRLAQPQSV

SEQ ID NO: 667 - DNA, 1492 bp, Homo sapiens
  source
  (1)..(1492)
  CDS (201)..(1292)
agagccttgctggctttttttttttttttttttttttttagagatttcgtagtttcctggtaaccattcagtcatctatttcaacaccctgacatgacataaaggcaggcgtggaaccacacgttcaccacacagacacacacctccttgctggagcattcactaggcgaggcgctccatcggactcactagccgcactcatgaatcggcaccatctgcaggatcactttctggaaatagacaagaagaactgctgtgtgttccgagatgacttcattgtcaaggtgttgccgccggtgttggggctggagtttatcttcgggcttctgggcaatggccttgccctgtggattttctgtttccacctcaagtcctggaaatccagccggattttcctgttcaacctggcagtggctgactttctactgatcatctgcctgcccttcctgatggacaactatgtgaggcgttgggactggaagtttggggacatcccttgccggctgatgctcttcatgttggctatgaaccgccagggcagcatcatcttcctcacggtggtggcggtagacaggtatttccgggtggtccatccccaccacgccctgaacaagatctccaatcggacagcagccatcatctcttgccttctgtggggcatcactattggcctgacagtccacctcctgaagaagaagatgccgatccagaatggcggtgcaaatttgtgcagcagcttcagcatctgccataccttccagtggcacgaagccatgttcctcctggagttcttcctgcccctgggcatcatcctgttctgctcagccagaattatctggagcctgcggcagagacaaatggaccggcatgccaagatcaagagagccatcaccttcatcatggtggtggccatcgtctttgtcatctgcttccttcccagcgtggttgtgcggatccgcatcttctggctcctgcacacttcgggcacgcagaattgtgaagtgtaccgctcggtggacctggcgttctttatcactctcagcttcacctacatgaacagcatgctggaccccgtggtgtactacttctccagcccatcctttcccaacttcttctccactttgatcaaccgctgcctccagaggaagatgacaggtgagccagataataaccgcagcacgagcgtcgagctcacaggggaccccaacaaaaccagaggcgctccagaggcgttaatggccaactccggtgagccatggagcccctcttatctgggcccaacctctccttaaataaccatgccaagaagggacattgtcaccaagaaccaggatctctggagaaacagttgggctgttgcatcgagtaatgtcactggactcggcctaaggtttcctggaacttccagattcagagaatctgatttagggaaactgtggcagatgagtgggagactggttgcaaggtgtgaccgcaggaatcctggaggaac

SEQ ID NO: 668 - protein, 363 aa, Homo sapiens [sequence omitted]

SEQ ID NO: 669 - DNA, 1462 bp, Homo sapiens
  source
  (1)..(1462)
  CDS (201)..(1262)
ccagacagtctctgttacaagcgctcgactcccccttgtagcatgaacacagctgtagataatacgtccaggaatgggtgtggctctgtgccaataaaactttattgtccaaaaacaggtgacaggttggtttggctcataggctgtagtctgccacttcctgttttattctaccttctgttcatttcaggtcactgtgcatggcatcatcctggccccctctagagctccaatcctccaaccagagccagctcttccctcaaaatgctacggcctgtgacaatgctccagaagcctgggacctgctgcacagagtgctgccaacatttatcatctccatctgtttcttcggcctcctagggaacctttttgtcctgttggtcttcctcctgccccggcggcaactgaacgtggcagaaatctacctggccaacctggcagcctctgatctggtgtttgtcttgggcttgcccttctgggcagagaatatctggaaccagtttaactggcctttcggagccctcctctgccgtgtcatcaacggggtcatcaaggccaatttgttcatcagcatcttcctggtggtggccatcagccaggaccgctaccgcgtgctggtgcaccctatggccagccggaggcagcagcggcggaggcaggcccgggtcacctgcgtgctcatctgggttgtggggggcctcttgagcatccccacattcctgctgcgatccatccaagccgtcccagatctgaacatcaccgcctgcatcctgctcctcccccatgaggcctggcactttgcaaggattgtggagttaaatattctgggtttcctcctaccactggctgcgatcgtcttcttcaactaccacatcctggcctccctgcgaacgcgggaggaggtcagcaggacaaggtgcgggggccgcaaggatagcaagaccacagcgctgatcctcacgctcgtggttgccttcctggtctgctgggccccttaccacttctttgccttcctggaattcttattccaggtgcaagcagtccgaggctgcttttgggaggacttcattgacctgggcctgcaattggccaacttctttgccttcactaacagctccctgaatccagtaatttatgtctttgtgggccggctcttcaggaccaaggtctgggaactttataaacaatgcacccctaaaagtcttgctccaatatcttcatcccataggaaagaaatcttccaacttttctggcggaattaaaacagcattgaaccaagaagcttggctttcttatcaattctttgtgacataataaatgctattgtgataggctaaatgattactcccgtagattggggggtacctaatccctggacttgatgaatgttaccaaattaagggtcttgagatggggagatgatcctgaattatccaagtgggccctatataatcacaagggt

SEQ ID NO: 670 - protein, 353 aa, Homo sapiens
MASSWPPLELQSSNQSQLFPQNATACDNAPEAWDLLHRVLPTFIISICFFGLLGNLFVLLVFLLPRRQLNVAEIYLANLAASDLVFVLGLPFWAENIWNQFNWPFGALLCRVINGVIKANLFISIFLVVAISQDRYRVLVHPMASRRQQRRRQARVTCVLIWVVGGLLSIPTFLLRSIQAVPDLNITACILLLPHEAWHFARIVELNILGFLLPLAAIVFFNYHILASLRTREEVSRTRCGGRKDSKTTALILTLVVAFLVCWAPYHFFAFLEFLFQVQAVRGCFWEDFIDLGLQLANFFAFTNSSLNPVIYVFVGRLFRTKVWELYKQCTPKSLAPISSSHRKEIFQLFWRN

SEQ ID NO: 671 - DNA, 1336 bp, Homo sapiens
  source
  (1)..(1336)
  CDS (201)..(1136)
caatccagatcaatacgtcagtttaaaagaaaaaaagtgactattgacatatctgcattctgttttttactttttacttttatttcaatagtaaatttatgcattttctttcccaaaatgatttaaatataaatctgattccccatctatgtttgcaccgtcattcagtaattgctggtgcttttacaattcacaggcacatgaaaatcttcaacagccccagcaactccagcaccttcactggcttcatcctcctgggcttcccttgccccagggaggggcagatcctcctctttgtgctcttcactgttgtttacctcctgaccctcatgggcaatggttccatcatctgtgctgtgcactgggatcagagactccacgcccccatgtacatcctgctcgccaacttctccttcttggagatatgttatgtcacctccacagtccccagcatgctggccaacttcctctctgacaccaagatcatctcgttctctggctgcttcctccagttctactttttcttctccttgggctctacagaatgctttttcctggcagttatggcatttgatcgataccttgccatctgtcggcctctacgctatccaaccattatgaccagacgtctctgtaccaatcttgtggtcaattgctgggtacttggtttcatctggttcttgattcctatcgtcaacatctcccaaatgtccttctgtggatctaggattattgaccacttcctatgtgacccagctcctcttctaactctcacttgcaaaaaaggccctgtgatagagcttgtcttttctgtcttaagtcctctgcctgtctttatgctctttctcttcattgtggggtcctatgctctggtcgtgagagctgtgttgagggtcccttcagcagctgggagaagaaaggctttctccacctgtgggtctcacctggctgtggtttcactgttctacggctcagtactggtcatgtatgggagcccaccatctaagaatgaagctggaaagcagaagactgtgactctgttttattctgttgttaccccactgcttaaccctgtgatatatagtcttaggaacaaagatatgagaaaagctctgaagaaattttggggaacataaaatgttaatcaaaaaggtccttgcgtaattaatcttgtctttaattttggggtttaaaaaaaaaactggtcttggccaggcgcggtggcttacgcctgtaatcccagcactttgggagcccgaggcgggtggatcacgaggtcaggagatcaagaccaccctggctaacacggtgaaaccctgtctctactaaaaaatac

SEQ ID NO: 672 - protein, 311 aa, Homo sapiens
MKIFNSPSNSSTFTGFILLGFPCPREGQILLFVLFTVVYLLTLMGNGSIICAVHWDQRLHAPMYILLANFSFLEICYVTSTVPSMLANFLSDTKIISFSGCFLQFYFFFSLGSTECFFLAVMAFDRYLAICRPLRYPTIMTRRLCTNLVVNCWVLGFIWFLIPIVNISQMSFCGSRIIDHFLCDPAPLLTLTCKKGPVIELVFSVLSPLPVFMLFLFIVGSYALVVRAVLRVPSAAGRRKAFSTCGSHLAVVSLFYGSVLVMYGSPPSKNEAGKQKTVTLFYSVVTPLLNPVIYSLRNKDMRKALKKFWGT

SEQ ID NO: 673 - DNA, 1336 bp, Homo sapiens
  source
  (1)..(1336)
  CDS (201)..(1136)
taatgcttaccaactaaccaaccaaccaaggagaaaagatcctctctatgacagagtttcatctgcaaagccaaatgccctcaataagactcatcttcagaaggctgtccttaggcagaattaaacccagtcagagccccaggtgttcaacctcatttatggtggtgccttctttctccatcgcagagcactggagaaggatgaaaggggcaaacctgagccaagggatggagtttgagctcttgggcctcaccactgacccccagctccagaggctgctcttcgtggtgttcctgggcatgtacacagccactctgctggggaacctggtcatgttcctcctgatccatgtgagtgccaccctgcacacacccatgtactccctcctgaagagcctctccttcttggatttctgctactcctccacggttgtgccccagaccctggtgaacttcttggccaagaggaaagtgatctcttattttggctgcatgactcagatgttcttctatgcgggttttgccaccagtgagtgctatctcatcgctgccatggcctatgaccgctatgccgctatttgtaaccccctgctctactcaaccatcatgtctcctgaggtctgtgcctcgctgattgtgggctcctacagtgcaggattcctcaattctcttatccacactggctgtatctttagtctgaaattctgcggtgctcatgtcgtcactcacttcttctgtgatgggccacccatcctgtccttgtcttgtgtagacacctcactgtgtgagatcctgctcttcatttttgctggtttcaaccttttgagctgcaccctcaccatcttgatctcctacttcttaattctcaacaccatcctgaaaatgagctcggcccagggcaggtttaaggcattttccacctgtgcatcccacctcactgccatctgcctcttctttggcacaacactttttatgtacctgcgccccaggtccagctactccttgacccaggaccgcacagttgctgtcatctacacagtggtgatcccagtgctgaaccccctcatgtactctttgagaaacaaggatgtgaagaaagctttaataaaggtttggggtaggaaaacaatggaatgatttctcaatgcattaccacatatctttagaaagtcaagggaacttttaccttaggtggtgtcaccctgagcacattcccatgcccacccctgtgaatattgggcatgccctctggtctgcaggtgcttctgcatctacctgccacagaagaaatgatggtgtcctagagactaagaagtgagaagggtgtgtctgcttgt

SEQ ID NO: 674 - protein, 311 aa, Homo sapiens
MKGANLSQGMEFELLGLTTDPQLQRLLFVVFLGMYTATLLGNLVMFLLIHVSATLHTPMYSLLKSLSFLDFCYSSTVVPQTLVNFLAKRKVISYFGCMTQMFFYAGFATSECYLIAAMAYDRYAAICNPLLYSTIMSPEVCASLIVGSYSAGFLNSLIHTGCIFSLKFCGAHVVTHFFCDGPPILSLSCVDTSLCEILLFIFAGFNLLSCTLTILISYFLILNTILKMSSAQGRFKAFSTCASHLTAICLFFGTTLFMYLRPRSSYSLTQDRTVAVIYTVVIPVLNPLMYSLRNKDVKKALIKVWGRKTME

SEQ ID NO: 675 - DNA, 1381 bp, Homo sapiens
  source
  (1)..(1381)
  CDS (201)..(1181)
taaaatcatgtttgtgtacataaatgaatgtgtgtatgtgtttttctgtgtctgtgtgtgtctctgtatgagagagaagaggtatctgtgttcattatgtcatgaataacatagctcaacttagtcttgggtttatagatttagggattccatcagtgttacagaaaataatcctgaccaaaattattttattgttcaaaatgtatgtgtcaaattgcaatccttgtgctattcacagaaaaatcaattatccaaataccaaactggatttcgagcaagtgaacaacataacggaattcatcttgcttggcctgacacagaacgcagaggcacagaaactcttgtttgctgtgtttacactcatctactttctcaccatggtagacaacctaatcattgtggtgacaatcaccaccagcccagccctggactcccccgtgtatttttttctgtctttcttttccttcatagatggctgctcctcttctaccatggcccccaaaatgatatttgacttactcactgaaaagaaaactatttccttcagtgggtgcatgacccagctctttgtagaacatttctttgggggagttgagatcattctgctcgtggtgatggcctatgactgctatgtggccatctgcaagcccctgtactacctgatcacaatgaacaggcaggtatgtggcctcctggtggccatggcatgggtcgggggatttcttcacgctctgattcaaatgcttttaatagtctggctgcccttctgtggccccaatgtcattgaccatttcatctgtgaccttttccctctgctaaaactctcctgcactgacactcacgtctttggactctttgttgccgccaacagtgggctgatgtgtatgctcattttttctattcttattacctcttacgtcctaatcctctgctcacagcggaaggctctctctacctgcgccttccatatcactgtagtcgtcctattctttgttccctgtatattggtgtaccttcgacccatgatcaccttccctattgataaagctgtgtctgtgttttatactgtggtaacacccatgttaaaccctttaatctacaccctcagaaacacagaggtgaaaaatgccatgaagcagctctggagccaaataatctggggtaacaatttgtgtgattagagaagataaacacagaacctactcatattttaacaacaggtatgactaatgaaaagggtaaaggtcttgaggtcagaatagtgagtttaagtatattttattcccctcattttctggaatctttaatgatgccttttcataaaagatcaatatctgattaaatgatgactaatgtttctgccaatttgaaacttcttcac

SEQ ID NO: 676 - protein, 326 aa, Homo sapiens
MYVSNCNPCAIHRKINYPNTKLDFEQVNNITEFILLGLTQNAEAQKLLFAVFTLIYFLTMVDNLIIVVTITTSPALDSPVYFFLSFFSFIDGCSSSTMAPKMIFDLLTEKKTISFSGCMTQLFVEHFFGGVEIILLVVMAYDCYVAICKPLYYLITMNRQVCGLLVAMAWVGGFLHALIQMLLIVWLPFCGPNVIDHFICDLFPLLKLSCTDTHVFGLFVAANSGLMCMLIFSILITSYVLILCSQRKALSTCAFHITVVVLFFVPCILVYLRPMITFPIDKAVSVFYTVVTPMLNPLIYTLRNTEVKNAMKQLWSQIIWGNNLCD

SEQ ID NO: 677 - DNA, 1510 bp, Homo sapiens
  source
  (1)..(1510)
  CDS (201)..(1310)
tttttcaatttaagagtatgtctgagaggctaaaccagaaatgtgtaaatttggtgagactttaaacagcctgtgaccgacgggccaatcttcctcttttccttccagatgtcacactggatccttggcctccagggtccattaaggtgagaataagatctctgggctggctggaactagcctaagactgaaaagcagccatggacatggcggatgagccactcaatggaagccacacatggctatccattccatttgacctcaatggctctgtggtgtcaaccaacacctcaaaccagacagagccgtactatgacctgacaagcaatgcagtcctcacattcatctattttgtggtctgcatcattgggttgtgtggcaacacacttgtcatttatgtcatcctccgctatgccaagatgaagaccatcaccaacatttacatcctcaacctggccatcgcagatgagctcttcatgctgggtctgcctttcttggctatgcaggtggctctggtccactggccctttggcaaggccatttgccgggtggtcatgactgtggatggcatcaatcagttcaccagcatcttctgcctgacagtcatgagcatcgaccgatacctggctgtggtccaccccatcaagtcggccaagtggaggagaccccggacggccaagatgatcaccatggctgtgtggggagtctctctgctggtcatcttgcccatcatgatatatgctgggctccggagcaaccagtgggggagaagcagctgcaccatcaactggccaggtgaatctggggcttggtacacagggttcatcatctacactttcattctggggttcctggtacccctcaccatcatctgtctttgctacctgttcattatcatcaaggtgaagtcctctggaatccgagtgggctcctctaagaggaagaagtctgagaagaaggtcacccgaatggtgtccatcgtggtggctgtcttcatcttctgctggcttcccttctacatattcaacgtttcttccgtctccatggccatcagccccaccccagcccttaaaggcatgtttgactttgtggtggtcctcacctatgctaacagctgtgccaaccctatcctatatgccttcttgtctgacaacttcaagaagagcttccagaatgtcctctgcttggtcaaggtgagcggcacagatgatggggagcggagtgacagtaagcaggacaaatcccggctgaatgagaccacggagacccagaggaccctcctcaatggagacctccaaaccagtatctgaactgcttggggggtgggaaagaaccaagccatgctctgtctactggcaatgggctccctacccacactggcttcctgcctcccacccctcacacctggcttctagaatagaggattgctcagcatgagtccaattcagagaacggtgtttgagtcagcttgtctgattgaatgataatgtgctaaattgattacctcccc

SEQ ID NO: 678 - protein, 369 aa, Homo sapiens
MDMADEPLNGSHTWLSIPFDLNGSVVSTNTSNQTEPYYDLTSNAVLTFIYFVVCIIGLCGNTLVIYVILRYAKMKTITNIYILNLAIADELFMLGLPFLAMQVALVHWPFGKAICRVVMTVDGINQFTSIFCLTVMSIDRYLAVVHPIKSAKWRRPRTAKMITMAVWGVSLLVILPIMIYAGLRSNQWGRSSCTINWPGESGAWYTGFIIYTFILGFLVPLTIICLCYLFIIIKVKSSGIRVGSSKRKKSEKKVTRMVSIVVAVFIFCWLPFYIFNVSSVSMAISPTPALKGMFDFVVVLTYANSCANPILYAFLSDNFKKSFQNVLCLVKVSGTDDGERSDSKQDKSRLNETTETQRTLLNGDLQTSI

SEQ ID NO: 679 - DNA, 1348 bp, Homo sapiens
  source
  (1)..(1348)
  CDS (201)..(1148)
agcctgggtgacagagcgagaccccatctcaaaaactaaaactaaaaataaataacatatttttgcacatggagtaaccatggcttggacagatgaagaaggcgctctcagatgtcctcccaggtgggagtcactagacacccctgtgctcctaaccactgggtcttctttcctctctccaccaactaggggtggccgccatgcaggggctaaaccacacctccgtgtctgaattcatcctcgttggcttctctgccttcccccacctccagctgatgctcttcctgctgttcctgctgatgtacctgttcacgctgctgggcaacctgctcatcatggccactgtctggagcgagcgcagcctccacatgcccatgtacctcttcctgtgtgccctctccatcaccgagatcctctacaccgtggccatcatcccgcgcatgctggccgacctgctgtccacccagcgctccatcgccttcctggcctgtgccagtcagatgttcttctccttcagcttcggcttcacccactccttcctgctcactgtcatgggctacgaccgctacgtggccatctgccaccccctgcgttacaacgtgctcatgagcctgcggggctgcacctgccgggtgggctgctcctgggctggtggcttggtcatggggatggtggtgacctcggccattttccacctcgccttctgtggacacaaggagatccaccatttcttctgccacgtgccacctctgttgaagttggcctgtggagatgatgtgctggtggtggccaaaggcgtgggcttggtgtgtatcacggccctgctgggctgttttctcctcatcctcctctcctatgccttcatcgtggccgccatcttgaagatcccttctgctgaaggtcggaacaaggccttctccacctgtgcctctcacctcactgtggtggtcgtgcactatggctttgcctccgtcatttacctgaagcccaaaggtccccagtctccggaaggagacaccttgatgggcatcacctacacggtcctcacacccttcctcagccccatcatcttcagcctcaggaacaaggagctgaaggtcgccatgaagaagacttgcttcaccaaactctttccacagaactgctgaaatggctgactttctctcaagagatgtagcgaatgggaacactttagtcttcctcctttatttcttttcctttcctccctccctcctttcctccctccctcccttccttccttctttccttcctccctccctcctttcctccctccttctctgacctacagtccaccctccctcccccctcctccttgccttccttccat

SEQ ID NO: 680 - protein, 315 aa, Homo sapiens
MQGLNHTSVSEFILVGFSAFPHLQLMLFLLFLLMYLFTLLGNLLIMATVWSERSLHMPMYLFLCALSITEILYTVAIIPRMLADLLSTQRSIAFLACASQMFFSFSFGFTHSFLLTVMGYDRYVAICHPLRYNVLMSLRGCTCRVGCSWAGGLVMGMVVTSAIFHLAFCGHKEIHHFFCHVPPLLKLACGDDVLVVAKGVGLVCITALLGCFLLILLSYAFIVAAILKIPSAEGRNKAFSTCASHLTVVVVHYGFASVIYLKPKGPQSPEGDTLMGITYTVLTPFLSPIIFSLRNKELKVAMKKTCFTKLFPQNC

SEQ ID NO: 681 - DNA, 1342 bp, Homo sapiens
  source
  (1)..(1342)
  CDS (201)..(1142)
atatatatacacacacacatatatattctatatatacacacacacacacacacacacacacacacatatatatatatacacatctggtctcataattagcccaaatgagaactgggatgtgatcgcatctaactttccaaaaccatctccctgtcattcctataacctcccctttccatacttccagaggaatcacacccatggaaccaagaaaccaaaccagtgcatctcaattcatcctcctgggactctcagaaaagccagagcaggagacgcttctcttttccctgttcttctgcatgtacctggtcatggtcgtggggaacctgctcatcatcctggccatcagcatagactcccacctccacacccccatgtacttcttcctggccaacctgtccctggttgatttctgtctggccaccaacaccatccctaagatgctggtgagccttcaaaccgggagcaaggccatctcttatccctgctgcctgatccagatgtacttcttccatttctttggcatcgtggacagcgtcataatcgccatgatggcttatgaccggttcgtggccatctgccacccattgcactacgccaagatcatgagcctacgcctctgtcgcctgctggtcggcgccctctgggcgttttcctgcttcatctcactcactcacatcctcctgatggcccgtctcgttttctgcggcagccatgaggtgcctcactacttctgcgacctcactcccatcctccgactttcgtgcacggacacctctgtgaataggatcttcatcctcattgtggcagggatggtgatagccacgccctttgtctgcatcctggcctcctatgctcgcatccttgtggccatcatgaaggtcccctctgcaggcggcaggaagaaagccttctccacctgcagctcccacctgtctgtggttgctctcttctatgggaccaccattggcgtctatctgtgtccctcctcggtcctcaccactgtgaaggagaaagcttctgcggtgatgtacacagcagtcacccccatgctgaatcccttcatctacagcttgaggaacagagacctgaaaggggctctcaggaagctggtcaacagaaagatcacctcatcttcctgaccaccaggactcaggaacttctggggggtagaatatatacatctgggagtcttgggctaacatctggaattgcatgagttgaagagtaggcactttgaattttattattattattattatttagagatggggtctcactatgttgcccgtgctggagtgcagtggcgtgatcatagatcactgcagcttcaaacttctct

SEQ ID NO: 682 - protein, 313 aa, Homo sapiens
MEPRNQTSASQFILLGLSEKPEQETLLFSLFFCMYLVMVVGNLLIILAISIDSHLHTPMYFFLANLSLVDFCLATNTIPKMLVSLQTGSKAISYPCCLIQMYFFHFFGIVDSVIIAMMAYDRFVAICHPLHYAKIMSLRLCRLLVGALWAFSCFISLTHILLMARLVFCGSHEVPHYFCDLTPILRLSCTDTSVNRIFILIVAGMVIATPFVCILASYARILVAIMKVPSAGGRKKAFSTCSSHLSVVALFYGTTIGVYLCPSSVLTTVKEKASAVMYTAVTPMLNPFIYSLRNRDLKGALRKLVNRKITSSS

SEQ ID NO: 683 - DNA, 31857 bp, Homo sapiens
  source
  (1)..(31857)
  CDS (201)..(234)
  CDS (722)..(772)
  CDS (974)..(1090)
  CDS (2531)..(2686)
  CDS (7919)..(8050)
  CDS (8647)..(8793)
  CDS (9224)..(9370)
  CDS (9458)..(9504)
  CDS (9631)..(9708)
  CDS (10418)..(10595)
  CDS (18690)..(18797)
  CDS (19158)..(19381)
  CDS (19906)..(20079)
  CDS (22511)..(22708)
  CDS (23358)..(23593)
  CDS (28067)..(28133)
  CDS (28706)..(28797)
  CDS (31245)..(31413)
  CDS (31499)..(31657)
ccatctcaaaaaaaaataaataataaaaataaataaatcattttaaaatttttgagctgggagccgtggctcacacctgtaatcctagcactttgggaggccaaggccggcagatcacctgaggtcaggagttcgagaccagcctggccaatatggtgaaaccccatctcactaaaaatacaaaaaattagccaggcaccatggtgggtgcctgtagtcccagctatttgggaggttgaggcaggagaattgcttgaacccaggaggtagagattgcaattagccgagatcgcaccattgcacttcagcctgggcgacagagcaagaccctgtctcaaaaagaaagaaagaaaatttaaaatatggcggtactcacctgtggtcccagctactcgggagggtgaggcagggggatcgcttgagcctaggaattggaggctgcagtgagctataatcgcatcactgcaccccagcctgggtgacccagagagaccctgtgtcaaacaaaacaaaacaaaacccacccccatgaggacagggtgacagactctctggctttgagcatccgagtgggacgtgacatctgctcactctgtttgaacgatgggcaggatctgagcctgagaggggtcagcatcctcctcccacaaagtgcatcacccttacgcctcctttcccaccctgggatcccctctgaccccctttcctttctctgttgcagcattctgtgtctggctgactctgccgggagctgaaacccaggactccaggggtgagtctgctgggaagcagaaagcacagtccacagccagagcctggggagggtcctggacccccgcccagcccccttcagcccagggaaagagagggctcgtgcacgggaaactcagcgctctgccccatctcccccagtgccccctttttgtgtattcccttacccctcaccttctgaccgtgctccctgctcttgcaggctgtgcccggtggtgccctcaggactcctcgtgtgtcaatgccaccgcctgtcgctgcaatccagggttcagctctttttctgagatcatcaccacccccatggagacttgtgacggtacagaggcttgagggcagcgcaggggacatctgcgattatgaggcatagcccagtgccagtgggggacagaggttgttgtgaggggccacagccttaccttccagactatcatcatggccagagaaaagagaaagagggcaggtgtggtggctcccagcactttgggaggcagaggcgggtggatcatttgaggccaggaattcaagaccagcctgggcaacatggtgagaccctgtctctacaaaaaatacacaaaatagccgcgcatggtggcacacatctggagtcccagctactcagaagactgaggcgggaggattgtttgagcccaggagtttgaggttgcagtgagctatgattgcaccattgcactctagcctgggcaacagagtgagatcctgtctcaggaaaaagaaagaaacaaagaaagaggccaggtgtggtggctcatgcctgtaatcccagcactttgggagggattgtctgggcaacaggagcaagaccccatctcaaaaaaaaaaaaaaaagacagaaagagagaaggagagaaagaaaagagaagaaaagaaaaagagagagagggagggagggaaagaaaaaggaaaggagggagggagggagggaggaaagaaggaaggaaggaagggaggaaaaaggaaaaaatatgaagggggagaagtaagaagtgaataggcatggcttcctggagagagagaagctgcgtgctcaggaatctggagtctgtgcctcagtttaccgttaagactgggaagggggtacattctggccataggtttttttttctcccttatttttcttttttctttttttttttgttttttttttttttttttgagatggagtctcactctgtcgctcaggctgaggagtgcagtggcgcgatctcggctcaccgcaacctccacctcccaggttcaagcgattcttctgcctcagcctcccgagtagctgggattacaggcatgcaccaccatgcccggctagtttttgtatttttagtagagatggggttttgccctgttggcaggctggtctcgaactcctgacctcaagtgatctgccggcctcggcctcccaaagtgctgggattacaggtatgagccactgcacccggctgccatggggtttaaatttctacaaaaagactggggatggggatatggcgcttcctgtccatcccccacctcagcactgtccactgtgtccaaatctaggatgccagccagagaactgagatcaagtgtggtcttcaggaatggcctgctccagctgcagcatagcctgtgcagtgcaacttgagatcctttccaaaagatactaagcagcaggccccatgttggggagtcaggacgggggtctctgccctgacggaactcacatctttgggagatgacctcctgtcctgttgtgttccagacatcaacgagtgtgcaacactgtcgaaagtgtcatgcggaaaattctcggactgctggaacacagaggggagctacgactgcgtgtgcagcccaggatatgagcctgtttctggggcaaaaacattcaagaatgagagcgagaacacgtgtcaaggtaagaaccaccccacatcctccatcaccactgtccatgaggtttggggtcaccagagctgtttctgcagcatccagggagcaggtacccaagtataggttcagttcctggagtctgagatgagacaggtgtgcatgtacctgtttcgccagcccagagaggcagcgtggtgtgaaggccaagggaaaactctgggaccagctacctgggcccaaatcctggctttgccacctgttacctaaatgatattaccaacatcactactgctcttagagccttggtttacccatctataaaatgaggatgataataatggcctactcctatgccttctaggaggaccaaggaaagaataggtgcttctaacagagcccagcacacagcaggtgctacaggcatcttcattctttaaacgttattatgcactgtaatcccagcactttgggaggccgaggcggatggatcacggggtcaggagatcgagactatcctggccaacatggtgaaaccctgtctctactaaaagtacgaaaattagccgggtgcagtggtgggtgcctgtaatcccagctactcaggaggctgaggcaggagaatcacttgaaccagggagtcggaggtttcagtgagcggagatcgtgccactgcactccagcctggtgacagtgcaagactccatctaaaataaataaataaataaataaataaataaataaataagcaatggatgccttttaggagttgttcagacaagctgggctcctgtggggccacactcctggctggcactcagaagaaatctatttcgacacagcctgcctcatcccttgccatggtcttattccacactgcagctccagcccatgagaagccaggcccccatgcatcactctgctttgccttctttccagtgggaactagttgggtgcgggagggagcttcagacatctgcaaggccagatgggaaccagtagcaggtggacagagaagggagattaacacagagtacacagagtgggaagggaaggtgagcaaaggcaggaaatgaagaagctgaggctgagccaagggtcccaggggacattaagggggttcagcagacctgccctgctgtaaagagaaaagtggcagtgctcctgttcccagccctgtccctcctgttctccctgcagtcagtagagcctccctggtgggaggaaagtgaggacagagcagaggtgtacgttctgagagcacgcagctgcatagagcccagcaggggggctggttcacaggggtcccctgtgaacagatgctacattgcatgcacatatcttgaccaaaggacagagccttcctgtgaattagaaaaaggactctccgggccaggcacagtggctcacgcctgtaatcccagcactttgggaggctgaggcgggtggatcacctgaggtcaggagttcaagaccagcctgacaaacatagtgaaaccccatctctactaaaaaatacaaaagttagccaggcatagtggtgagcacctgtaatcccagctactcaggaggctgaggcaggagaatcacctgaacccagaggcagaggttgcagtgagccaggatctcaatattgcactccagcctgggtgacagagcaagactttgtctcaaaaaaaaaaaaaaaaaaaaaaaaaaaagaaaagaaagaaacaaaaagaaaaagagaaacagaaaagcctctcctctccaggtagacacagccccatttggggaatggagaggttttcagcctctgctcaccgccttggctgggcatccatatgtagtcagcaacctacacaactgtacgtggtggtcatgggtccttgtcagtgagagcctctgttttagtctatgttgtgttgctataaaggaatacatgaggctggatcatgtataaagaaaagaagctgatttggctcatggttctgcaggccatgtaagacacatggctccagcatctgcttctggtgagggccttagggagcttccactcttggcagacgggaaaggggaagctggcatcccatggcaagaggaaggaagcaagagagaagggaggagataccaggctttttccaacaagcagttttcatgggaactaacaaggcgagaactcactcatgacccaaggacagcaccgagatgttcatgagggatctgcactcaggacccaaacacctcccacgaggctccatctccaacactggggatcacatttcaacgtgagatttggaggggacaaatatccaaactgtatcaccgcatgcacaggtggtgtttgtaattattgaggaggtgtgttgccatgttagaaacaggccagcactggccgggcgcagtggctcatgcctgtaatcctagcactttgggaggccgaggtgggcggatcacaaggtcaggagatcgagaccatcctggctaacatggtgaaaccccgtctctactacaaatacaaaaaaattagctgggcgtggtggtgggtgcctgtagtcccagctaatcagagactgaggcaggagaatggcatgaacctgggaggcggagcttgcagtaagccgagatggcaccactgcactccagcctggacgacagagcgagactccgtctccaaaaaaaagaaaagaaaaggagagaagagaagagagaaaagaaaagaggccaacactgagagagggggcttagttggtggataggcagagacacagatgagcaggaatgaagtgggagagggctctcatggaccccatccgcacagaacagcctgctagttcggagcaggacctgcctcttgaagcctcagctcagggaagggctccgtggggccctgtctgcatccccctcacccctcagcattcttgttttttttgtctacctggtgtcacaggcctcataggcaggagacctggggccactccctcagctccttgccccacttactccaggcatcacagggccgtcccaaacacctggtcacctgtcgctatccaaacctcaaggttcagaaccctccacagagggtcacttccaaaagctcagaacatccccctgcccatctggcatcttatttgtttgttttgttttgttttattagtaaagatggggggggggtgtctcaccatgttgtccaggctggtctcgaactcctggcctcaagtgatccgcccgtctcagcctcccaaagtgctgggattgcaggcgtgagccaccatgtccgacctggtatcttatttgtacaaaacaaaaagggggctggcactcaggatattcgatgagctcactgcgtggtgcattccagcgcagtatccattctctctgctatcatcagcgactgccaggatgagacagtctccacacagctctgctcacctggaactctctctgatcccccagctcatcatggacccaggcaccctgtccagaaatgaaggaggagggagatttgaaggcagggccactgtccccagtcgaacctgccactggccaacaaccccacctggagaagatgcctcgtggagccctgacctctttttctgccactcagtctctgtccctttcactgagcgagactgccctgacccttcctgatagttttggtccacctgagtgcactggaggatgttgtggctaacggtgggcacagtgacatggactccccatacttggagagttgagtgaatggaagaggcactagtgtggacccaatggcaagagaggttaacatcagggccattgctccaagcctgatcctctcccaggaggtcaacccagatcccatgggagtggaaccattcagaaataggtctgtgtccctggtggaatgccaagagatgagatgacagatacacctccatctttgcccatcagcatctgtgcccctctccagccactaaaccttcacccagggccagtctttctcagctatggattctcactacatcctgccatttccaagacaccttcctgaggatcaaaaaaaggcaccttcacagccctggggcaacccagctgtatgtcggtccccactgtccaccctggcctgggacccactgtccaggcagccctggcctatgcagcaccagactcatgctcccctggggactggctcaggggccagtcttggtccatgtgcctggagctgggctctcagagctagtgtggatgggagagcaccatcctgctagggccaccgggattctgataactcagccagtgagcagctgtcctggggaaatcaaggccaccagaagcagatgctggagccatgcatcttacacagcctgcagaaccatgagccaaataaacttcttttcttgcaacacaaaacggactaaaccagagggttctcactgagaaggacccatgaccaccatgtacagttgcataggctgctgactgcatatggatgcccagccaagagggtgagcagaagctgaaaacctgcctactctccattcctcaaatatgactgtgactacttgaagaggagatgcctttttccaattcacaggaaggctctgtcctttggcccaggactgccactgggaaccaagacaggtcctacctgggcaagcagcatgccccctgcacttggtcccaagaaaatcccaccctgacctttgtcctgaatcctcaggctgggacatccctgccccagctgggagctgcccagggaggcaggggagatggggaggactcagatgcttccagccatatctgaacaacagaaggcctgggccaccatgctcaccatgggacacctctgtgtggattagaaaagggaggagatggccaggcatggtggctcatgcctgcaatcccagcactttgggaggccgaggtgggctgatcacgaggtcaggagatcaagaccatcctggctaacacggtgaaaccccgtctaatactaaaaatacaaaaaattagccgggcatggtggcgggcgcctgtagtcccagctattcgggaggctgaggcaggagaatggcgtgaacccgggaggcggaggttgcagtgagttgagatcaggcaattgcactccagcctgggtgacagagcaagactccgtctcaaaaaaaaaaaaaagaaagaaagaaaagaaaagggagcagacagtggtgccttccagatgcttccgtgccaggaaacatggcggaccctcagccccgaaagctgctcacagctacgggcattcttcaccctctccttcctcttgcagatgtggacgaatgtcagcagaacccaaggctctgtaaaagctacggcacctgcgtcaacaccctcggcagctacacgtgccagtgcctgcctggcttcaagctcaaacctgaggacccgaagctctgcacaggtagaggccccaggaagacgctgtgaggctggacgggagctggggatggagctgagtcaggtcctccaaagcagccgaggaggagggagaagatccgcaggttcccacaaggtcaaggacctgctaagcccctgcctaaggattcacctcccaggaaggactcgccacacggcagggaggcggcagggccttcagggcttggagtgcccttgtgggcccccagacctcaccccttcctcatctgtcacgtgcgagtggaagaaggtgtcacttccagttctaagaaggggaacctccaccatagtgagggagggagcaggagagagattttagtcagaaagtccagctcccatgactcagtttcccttttggtttcacctcctataaactggggaccatggtccctgctgtgcccatctggtaggaagaccatcataagatgctttgaaggtgaagttgaaggtcaccaagtggtggcacgtgcaataatggtcttcagtctgaggcaatgaaaagataggggagtgggtgcagtgagtggagggcaggcccaggctggtcagggacagggtttgaccctctggctttgtcctcagatgtgaatgaatgcacctccggacaaaacccatgccacagctccacccactgcctcaacaacgtgggcagctatcagtgccgctgccgcccgggctggcaaccgattccggggtcccccaatggcccaaacaataccgtctgtgaaggtcgagagctcagatcccacgttcccagagacccacaaacatctgatcacatgttcaacggcgcccacacaaaccaagcagaatgagcgctggaggcgcccgactgtgtcaggcgttcattcttctgaggctagatgagaaaagagcaagggtcctgcggaaggagctggggtactgaggggggaggctcagggggaccccaggcaacagctgatgactcactgggaggaaggcgtttcaccatattcataacctgctcatctgcacggggcccacctgctgtgcccaggcctctccacgcttccataacccagcgtccacctctccaaggggggcactaatgccgggaggaacgagctgggggcacagacaggagacaggaccctctccaggctgggacaggacctgacccccttcttcctgtcctcagatgtggacgagtgcagctccgggcagcatcagtgtgacagctccaccgtctgcttcaacaccgtgggttcatacagctgccgctgccgcccaggctggaagcccagacacggaatcccgaataaccaaaaggacactgtctgtgaaggtatgacctggccctagaagctccccacccccagcacacacactgacacgctcccgcctaatgagccgcttgtcttgttccctacagatatgactttctccacctggaccccgccccctggagtccacagccaggtgagtggcccccacagggacgaggcggcgggaactccatccacacagcactgcatccgtctccttgttctaaacttcccacccgccgtccaggctctctgacccccacatctcctctctctgcagacgctttcccgattcttcgacaaagtccaggacctgggcagagactacaagccaggcttggccaataacaccatccaggtaaggacaggacccagggcaagggggcgaggcaggaaggtggctgcatcccacagaggcctggggcagtttgggtctgggaggggacaggacccaatgcagtgggtgctggtctgactcccagcatctttcagggctggtggaagctaatggacacccaagtgcacttaatatctttcctcttgctttccctggactttgggtttaggtcagcattgatattgcacagaagtgttggcctctgaggggccataaccagagtcaaggatcacctagggaatcccatccaatgtcattttttttttagacggagtctcactctgtcgccagtccagagtttagtggcccgatctcagctcactgcagtctctgcctcccgggttcaagcgattctcctccctcagccccctgagtagctaggattacaggcacacgccaccacgcccggctaatttttgtatttttagtagagacggggtttcaccatgttggccaggatggtctcgatctcctgaccttgtgacccaccctcatcggcctcccaaagtgctggaattagaggcgtgagccaccgcgcccagccgccaatgccatcttcatcccccagatagacagtctctaggatctgttccctggggctgagcggttggagtcttcatgcgggccctctggcccatggctcactaggtctgtgtccacatccctccagagcatcttacaggcgctggatgagctgctggaggcccctggggacctggagaccctgccccgcttacagcagcactgtgtggccagtcacctgctggatggcctagaggatgtcctcagaggcctgagcaagaacctttccaatgggctgttgaacttcagttatcctgcaggcacaggtaggtccctgggtctgccccagactccagctctgcatgttttctgtctccttcctttcccagtcccaccagagccaagtgaccacacctgtatatcagtgttactctcatcgacaaactaaaataagagattaaaaagaaatacataccagtctggacaagatggcaatactcaatctctacaaaaaaaaaaaaatcttttaaattagacagatgtgatggcacaactgtggccccagctagttgggaggctgaggtgagaggatcgcttgagcccaggaggttgagtctgcagtgaactatgattgcatcactgtactccagcctggttcacagggcaagaccccatctcaaaaaagagaagacgaagaggaggaggaggaagaagaagaagaagagaaggaggaggaggtgaagaggaggaggaggataaagaggaagaaaaaggaggaagagggcaggagggggaggacagaaggaggaggacaggaggagaggaggggaggaggaagaggaggaaagaggatgggaggaggaggacaagaggaagaggacgggaggaggaggacaggatggggaggagaggaggaggagagaaggaggaggagaggaggaagaggaggaatggagaaagagaggaggaggagaaaaggaggaggagaggaggaggaggagaggagaaggaggaggaatggaggaggagaggaggcagaggaagataggaggaggagaaggagaagaggaggagaagagaaggaggagaggaggaggagacgagaaagagcggaggagaggaggagaggaggaggagcacaggaggaggaggagaggagtagaggaagaaggaagaatagaaagaaggaaaggaaaggaaaaagaaatgcataaataacatgcattttcattgtaatatgaattatcagcagtaaataattatgatgaagaatttaaaataacaaaatagaaatcacttcaaaagagaacaatttatttaatttggaatactataaattaatatcatttgatctctaagtatgatttctttcttgtttgtttttgtttgttttgttttgttttgttttgtttttttgagacagagtctcactctgtcgcccaggctggagagcagtgacgtgatctcggctcactgcaagctccgcctcctgggttgacagcattctcctgtctcagcctcccgagtagctgggactacaggtgcccgccaccacgcccagctaattttttgtatttttagtagagacggggttgcaccgtgttagccaggatggtctctcgatctcctgaccttgtgcataatccacttgcctcggcttcccaaagtgctgggattacaggcgtgagccaccacgcccggcctgcataataatttttaaagcatgaaaatgcatatagcattaattttattaagataaaattcacataacatcaagttcaccactttaaagtgtctgtttcacgtggggcgtgcctgtaatgccaggcgctcacacctgtaatcctagcactttgggaggctgaaatgggtggatcacttgaggtcaggagttcaaatccagcctggccaacatagtgaaaccccatctctactgaaaatacaaaaattagacaggcgtggtggtgcacacctgtaatcctagctactcaagaggctgaggcaggagaatcacttgagcttgggaggcagaggttgcagtgagccaagtttgcaccactgcactccagactacgtgagacagagtgccactccatctcaaacaaaaaaattaaaattaaaaataaaaataagaaaaaattttaaaagcgtgtgtttcggtagaatctagtatattcagaaagttatacaaccgtcacctctatttctaaaatgcttgcatcagcccaaaagtgaacactgcacatggtaagcaaccactcctcattcctcccttcctccaacccatggcagccgctaatctgctttctgtttccatggattttcctaatcaggatatctcacataaatggaatcatacaatatgtgaccatctagtctagctcctttcacctagcataatggttttgaggttcatgcatgccatagcatttatcaatatttcattctttttcatggctgaatactattctattgtatgaatacatcactttttttttttttatccatccatccattgatggacatttgggttgtttccaccttttggctgttgacaaaaagagtcaaactctgtaaaatatttgaagagatttattgtgagctaaatatgaatgtatgactgaccatggcccgtgacacagccctcaggagcccctgagaacatattcccaagtgaagtggtgttgttttctggggtaatacctgaggttcattgcctcatgccaagaaaattaaggacacagacacacaccaggagtgagtttatgagtggaggtttaataggcaaaagaaagagaaaggagaacaactctctctcttgtgagagaaaggaatgcccaaatgggacttcccacccatgccagagggcaccggattttatagacaggcttgaggaggcagtgtctaatttacatagggcccaaagattggttggaacaggtgtgacgtttacataaggtgcagggaagctggctgccccaccctaatcttattatgcaaatggagtcttcgccagctccttactgtatacgtggttggcaaagagatgggaagatggagccgccattttcaacatgcctagtcccaggtggccttttcctattggcacagctgccagcattcacctgtgcaggcttccagcttgcttgcctatgtctgcagctcgattttacaggctgctctttgttagaaaaaaaaaaaatgatataggggctgattttcattaaaaggaaagacttacccaggacttccttacccacactctctgcctaaataattcctttttaacttctatatcacaaggtagtcgtggtacagcttgttgtgattgttgttgttgttgtcttctgttggagacagagtcttgctctgtcaaccaggctggagtgcagtggtgcgatcctggctcactgtagactccacctcccgggttcaagcgattctcctgcctcagcctcccaagtagctgggactacaggcgcccgccaccacgcccggctaattattttgtgtgttttcagtaaagacagggtttcgccatgttaaccaggatggtcttgatgtcctgacctcgtgatccgcctgcctcggcctcccaaagtgctgggattacaggcgtgagacaccacgcctgcccccgcaacttggttttatacattttagggggacatgagacatcaatcaaatatgtttaagctatacattggttcagtccagaaatgcaggacaatttgaagtggaggtgtggggcgggtgcttccagattataggtagatttaagcttttctgattggcagttggttgaaggagttattatccatagaaaagaatgtctggaatacgataaggggctgtaaaggctgaagttgtatcatccagatgaactcttcaggtatcaggcttcagagagaatagatggtaaatgttccttattaagcttcaggtctgtgttatgttaaatgctggtcagcttttcctcaactccaaaagggaggagggcatgacacatgtcagaccccccacttcccaccatagcctgaactagtctttccagttaaatttagagtgccctggccaaaaaggaagtccattcagatggttttgaggggggcgggagaggacttcgaattttttttttttgtttagatggctggtgtgaatagtgctcttatgaatattagtggacacattttgggttgaataactgtcttcagttctttggggtatatactaaggagtggaattgctgggtgatatggtaattctatgttcagcttttggaggaaccaccaaactttttccaaagcagctgcatcattctaattccccaccagaaacatacacgggttatcctctccacaccttcagcaaaacttgttacttccgttttcttttgttctgtttttaattgcttttattgatacataaatcttacatatttatgggtacatgtgatactttgttgcttgcctagaatgtgtaacgatcaagtcagggtatctcaggtatccaccactttgagtacttatcatttgtatgtgttgggaacaattgaagtcctcttttgtaactactttgaaatacatcatacagtcttgttaattatagtcactctgctctgctgtcaaacaatagaacttgggccgggcacggtggctcacgcctgtaatcccagcactttgggaggccgaggtgggaggatcacgaggtcaggagatcgacaccatcctggctaacagggtgaaaccccatctctactaaaaatacaaaaaattagccaggcgtggtggcgggtgcctgtagtcccagctactcgggagactgaggcaggagaatggcgtgaacctgggaggcgaagcttgcagtgagccaagatggtgccactgcactccagcctgggtgacagagtgagactccgtctcaaaaaaaaaaaaaaaaaaaaatctgcttaataagcggagaggtggctggcttggtggctcacacccgtaatcctagcactttgggaggtcaaggcaggcagatcacctgacatcaggagtttgagcccagcctggccaatatggtgaaaccctggctattaaaaatacaaaaattagctgggcttagtgacacgtgcctgtaatcccagctacctgggaagctgaggcaggagattcgctggaacccaggaggcagaggctgcagtgagctgagatcgtgccactgcactccagcctgggtgacagagtgagactccgtctaaaaaaaaaaaatatatatatatatatgtataacttatactttttgtctaactgtatgtctctacctgttaactcacctctcttcatcccagtgatacaggagtgaaaaagaaattatttaggcagttagcaagggtcagagagtcctcagtaaggtttcccttttaataaaaaccagcccccaaatcatttcttttctaataacgagcagcctgaaaattcgagctgcagacatagaaaagcaagctggaagcttgcacgggtgaatgccggcagctgtgccaataggaaaaggttacctgggggcccggcatgttcaacgtgggggctccctcttcctttatctttgtcaaccacgtgtacagtacagaagcaggcaacgtggagccagccaggtagagaatccatttgcataataaaagattaggctggggcagccagtttcttcatgctgtatgtaaatggctcacctgttcagaccaatctttaagccttatgtaaatcggacaccgcctacccaagctcatctataaaacttcgtgcatttcaccacgcaaccggaagacccacttgggagcccctgtctctctgcaggagagggagttattctctttttccttttttttttttttttttttgagacggagtcgtgctgtgtcccgcagactgcagtgcaggggcgcgatctcggctcactgcaagctccgcctcccggggtcacgccattctcctgcctcagcctccggagtagctgggactacaggcgcccaccaccatgcccagctaatttttttgtatttttagtagagacggggtttcaccgtgttatccaggttggtctcgatctcctgacctcgtgatcctcccgcctcagcctcccaaagtgctgggattacaggcgtgagccactgcgcccagccagagctattctttttttctttcgcctattaaatctccactcttaaactaacttcttatgtgtccacatcctcaatttccctggtgtgaaacagtgaaacttgggtatttacaccacttcactagtgagatgatacctcattgtggttttgatttgcccttccctgataactaatgatgtttaacatcttttcatgtgtttgctcaccatttgcatgtcatttttggagaaatgtctattcaaatcctttgcctatttttaattgtgctgtttgtcttttggttgtccagttgtaagcattctttaaacattctgatagtagatcatctgagatgaatgatttgcaaaatattttctcccgttctgtagattgtcttttcattttcttgtcttttcactttaatgaatagaagttttaaatcttgaagacatttattttatctaatttttcttttgttgcatgtgcaattggtgtcatatttaagaattcattgacagggggtggtggctcacgcctgtaatcccagcactttggaaggccaatgtgggcggatcacctgaggtcaggagtttgagaccagcctggccaacaaggcgaaaccctgtccttactaaaaataaaaataaaaataattaaccagatgtgttggcacatgactgtaatcctagctactcaggaggctgaggcaggagaattgcttgaacctgggacacggaggttgcagtgagctgagattgtgccactacactccagcctggatgacagagcaagactctgtcccaaaaataaaaataaaaaaagaattcattaccgcatccaagaccaggaagatttacccctgtttcctcctaagtgttctagttttagcttctaagcttaggtcactggcttattttgagttaatttttgtttgttgtgtgagggtagggttaaaacttccttattttcatgttactatccagtaatcccagcactatttgttgaagagattattctttcccccattgtatagtcttggcaccccttgttgagaatcaactgaccataagatggatgggtttattcctggactctcaattctattctgttgtgtccttatgccagtattactgtcagtttgtagtaagttttggaatcaggaagtgtgaattctccaaccttcttgttcttcttcaagattgtttttgggtatttggattccttacaacaccatatgaattttaagatgaacttttcttattctgcaaagtaataataggctaaaatattgatagggattgcattgagtctctagaccactttgggggagtattgttatcttaacaatagaaagtcttccaatccatgaacataggctgtctttccatttagagagggccttttatttctttcaaacacttttgtaggccagaagcagtggctcacgcccaatattgtcagaggccaccaaggtgggagaattgcttgagcccaggagttcaagcccagccttggaaatatactgaaacatgatctccacaaaaaatttaaaaattagctggctgtggtagtgagcacctgtagtgccagctacttgggaggctgaggtggaaggattggttgagcccaggagactgcagtgagctatgatcatgccactgcactctagcctgaccaacaggtgagaatttgtctcaaaaaaaaaaaaatactcaaaaaactttcctataagtcttgagtctccttcgtaaaatgtattcctaacatttttgctgaaaatttttgcatctatgtccataagaaatattggtctataattttattttcttgtgatgtcttcatctggttttgttatcagagcaatattagcctcataaaattacttaaatagtgtttcctcctcttccatatttttaaaaaggtaaaagattcatgttcattctttcttaagctattggtagaactcaccagtgaagtcatctggtctgggctgttagttttgagaggttttgattactgatttaatctgttataggtctgttcagatcttctatttcttcttgagttggtttcagtggtttgtgtgtcactaggaatgtgtccatttcatctaggttacctactttgtagatatacagttgctcacactattctcttccgatattttgtaacttcagactatatatgtatatagtatatatattaagtcatagtatatcaaccactgcaggcacgattcctaacctaactccccttatgtaattcccacaactcatagaattgtccctggaggtgcagaagcaagtagacaggagtgtcaccttgagacagaatcaggcagtgatgcagctcgactggaatcaggcacagaaatctggtgacccaggtaatggctgagatggggaggtggtcagtgaagcttcatggtgggaaaagatgcccaagaatgtgaaaaataagagatttaaagattaaagggaagtgtgggatgtttggagtggggctgtaagaggagagtccagctgaggaggaacggaccttgttggggaccctgagatattaaccgtggccttgtcctgcaggatgtgatacacatagaactaaagattgaaggaaagtgtgggaggggtgaagccaaaggaaggtagcccatctgagtagaaagttctgtgcagggcagaggaactctggtgtggacccagagattcaacctactccaagattcaaccttggcctcgccctgcaggcccttctgtggtgggccttgtctccattccagggatgggcaagttgctggctgaggcccctctggtcctggaacctgagaagcagatgcttctgcatgagacacaccagggcttgctgcaggacggctcccccatcctgctctcagatgtgatctctgcctttctgagcaacaacgacacccaaaacctcagctccccagttaccttcaccttctcccaccgtgtgagtgctggtggagttggttggtgggtgaatagtctgagtccgggcatagccttgctgctcagctcagccctggggctcaggggtctctgttatgggtacattatctccccaggaaagtcagtccttcccaagccggctttgggtaagcatttctgagcatccgacccaccagctcacacctgtgttcttttttttattgagacagagtctcgctgtgtcagccaggctggagtgcagtggcacgatctcagctcactgcagtctccgcctcccaggttcgagcgattctcctgcctcagcctccctaatagctgggactacaggtgtgtgctaccacgcccagctaatttttgtttttttgttttttttttttttttagtagagatggggtttcaccatgttggccaggctggtctcaaactcctgacctcaagtgatccacctgcttcagcctcccaaagtgctgggattacaggcgtgagccaccatgcccagcccacacctgtgttctgttcctgcagtcagtgatcccgagacagaaggtgctctgtgtcttctgggagcatggccagaatggatgtggtcactgggccaccacaggctgcagcacaataggcaccagagacaccagcaccatctgccgttgcacccacctgagcagctttgccgtcctcatggcccactacgatgtgcaggtgagacccttaggaggggatgcactctgcatttattgccgtgtaacaaatccccagagacatagcagccttttaaaaaaatatatgcattatctcacagctctgggtcagcaagctggcatagcaagatggcttttctgctcagggtcttacaagactgaaatcatcatgtcaccccacccccagggctgccatttcatctgagacttgaggtccttctccaagctccctggttgctggcagaattcagtttcttgtgattgtaggactgaagtctcactttcttagctgtcaggaaggcatcacattcagttcctagaggccactcatatcccttctcacatgaccctctggcaaacttctagcattcctatctggaggacaaggaaaaaaatttcctcacgcagaatccctcttaagctttgtattagtcgaggttctctagagggacagaactaatggaatagatagatagatagatagatagatagatagatagatagatagatagatagatagatagataatttctgcctgcttatattctagccacactggcagctgattagatggtgcccacccagattaagagtggatctgcctttcccaacccactgactcaaatatatacatatatagagatatatagagagagatctatatatatagatatatataaaggggagtttattaggtattaactcacatgatcacaaggtcccacgataggccgtctgcaggctgaggagcaaggagagccagtccgagtcccagaactgaagaacttggagtctgatgttcaagggcaggaagcatccagcacgggagaaagatgtaggctgggaggctaggccagtctctcttttcacatttttctgcctgcttatattctagccacgctggcagctgattagacagtgcccacccagattaagagtggatctgcctttcccagtccactgactcaaatgttaatttcctttggcaacaccctgatagacacacccaggatcaatactttgtatccttcaatccaatcaagttgacacccagtattaaccgtcacaagttttgaatctgattctccaggaagagcccagagcttataaagactcatctgattaggtctggcccacccagggtaaactctgccttttttttttttttagacagggtctctgtcacccaggctggagtgcagtggcacagtcatagctcactgcagccttgaccttctgggttcaagggatcctcctgcctcagcctcctgagtagctgggactacaggcatgcaccaccatgcccggctaatttttgtatttttactagagatggggtttcaccaagttggccaggctggtctcgaactccttacctcaagtaatccacccgcctcggcctcccaaagtgctggtattacaggcaggaaccaccacacctcgcccacctgactttcttatctcatcacttagagtagatccaagggacatcatcatcatatcctgcgggagaaagggccaaaccacccttttgttttccatgacaggaacatcttatcaatatcctcccaggcagcaagccataccgcccagcccctcccgcccagacctgtaattaccccagcctgtaagcggcagtgggttctggcacgaagctagctcccccctccacaagtctcgtgctggacataaacctgcattgctgtagagctgccaactctctgtctttctttaactctcactttcccttcaaaacctaacgggcccacacctggaatctctgtgctttgggaggctgaaacgggaggatcacttgagcccaggaattcgagaccagcctgtgcaacacagaaagaccctgtctctacaaaaataaaaaaaaaaattaggacgggtgtggtggctcacgactgtaatcccagcactttgggaggccgaggcgggtggatcatgaggtcaggagttcaagaccagcctggccaacatggtgtgaccctgtctctactaaaagtataaaaattagcctggcatggaggcacatgcctgtaatcccaactacttgggaggctgagacacgagaatcgcttgaaccgaggagacagaggctgcagtgagcagagatcgcaccactgcactccagcctgggcgacagagcaagactgtcaaaaaaaaaaaattagcagggcatggtgccatacatgactataatgcacacccgttgtcacctacatgactacgcctgtattcctagccacccatgaggctcgggtgacaccttcgcaaattaaattaaattggtgacatcttcacaaatttacctggctccctcattcttgaatgtgctatgccaaagtaaaaattttaaatggtggtggggtcattaccccagagcaggaaagcatcactgtgaactcttcttttccgggtcccaggaggaggatcccgtgctgactgtcatcacctacatggggctgagcgtctctctgctgtgcctcctcctggcggccctcacttttctcctgtgtaaagccatccagaacaccagcacctcactgcatctgcagctctcgctctgcctcttcctggcccacctcctcttcctcgtggcaattgatcaaaccggacacaaggtattgacagcggtgttccagagggctcccttccttgacgcaggacacgctggctcatggaatgatgcggcatttgattccttaatataatagcccggctgggcgtggtggctcatgcctgtaatcccagcactttgggagactgaggtgggcggatctcgggagtttgagaccagcctgaccaacatggagaaaccccgtctctactaaaaatacaaaattagccaggcatggtggcgcatacctgtaatcccagttactcaggaggctgaggcaagagaatctcttgaacccaggaggtggaggttgtggtaagccgagatcgcaccattgcatgccagcctgggcaacaagagtgaaattccgtctcaaaaaaaaaaaaaaaaaaatatatatatatatatatatgtgtgtgtgtgtgtgtgtgtatacgtatatatacacgtatatatatataggcccttgagtcctggggaatattagaagagaacaccaccaatttcccattgcctgactcaactacacagcaaatattctctataatgccatcaaatatctcagaattctccccaacaacatggtacaggagaagccatgggccacactcaaatctgatcgccgctctgggcgtcttttacttctccgccaggtgctgtgctccatcatcgccggtaccttgcactatctctacctggccaccttgacctggatgctgctggaggccctgtacctcttcctcactgcacggaacctgacggtggtcaactactcaagcatcaacagattcatgaagaagctcatgttccctgtgggctacggagtcccagctgtgacagtggccatttctgcagcctccaggcctcacctttatggaacaccttcccggttagtgcaaattctcacaatccttatcttctccggcataaccatggccattgctagaacctagatagcatttttatgacacctgcttttaattagatcagtagggattttaggctctattggttggattacactgcagctccttattcttagctattgagtttatttcaattacatttcaagctaggcattgtagaagagggttttcggaaattttctgaatgaaataaagggcaagcctttggaaagcacgaataggacaaagacactatgtcataatccctagggcatctttctgctagaagattataataattaaggagggtcaggctcagtggctcgcacctggaatccctgtgctttgggaggctgacacaggaggatcacttgagcccaggatcttgagaccagcctgggcaacacagcaagaccccttctttacaaaatttaaaaaattagcagggcctactggcacacacctgtagtcctagctactcaggaggctgaggtgggaggatcgcttgagcccaggagttcgaagttgcagtgagctatgattgcaccactgcactccagcctgagcaagagagaaagaccttgtctctaaaaaataataataatagttagggataatgcatttaaatctgtctcactgaaatagtaagaatgaaatcaaagtgctcaagacagcattttttaaaaatctaacctactttatctaaatcttttaggatactccaatttttcatttgaaaaagtagacctgatttgaataactaaaataattgatattgtcatagttaagatttatgagatgcttactttgtgccaggtacttttctagctagtttgtttgtttgtttgtttgccaattgcactggttgaaacctccaggacactgttgactagaacagcagacaattttgtcttgctcctgtacttagggagaaagcattgactctgtcctcattaatgtatgatgttagctgaggatttttcatagataccctttttcaggttaaagaaattcttttctattcctcatgtgttcggtattttgatgaagaaagagtgtttgattttgtcaaatgcttttccgaagcatataatttttaattatatggggtaaaaattatatgatcacataattagataatcatataattatataattatattagattattttatatgtaatttttatataaatatatatctatgtaatttatatattaatattatataactataaataattatataacatagctataaataattatgtaactatgaataattacataacatagctataaataattatgtaactatgaataattacataacatagctataaataattatgtaactatgaataattacataacatagctataaataattatgtaactatgaataattacataacatagctataaataattatgtaactatgaataattacataacatagctataaataattatgtaactatgaataattacataacatagctataaataattatgtaactatgaataattacataacatagctataaataattatgtaactatgaatacataacatagctataaataattatgtaactatgaataattacataacacagctataaataattatgtaactatgaataattacataacatagctataaataattatgtaactatgaataattacataacatagctataaataattatgtaactataaataattacataacatagctataaataattatataactataaataattacataacatagctataaataattatgtaactataaataattatataacatagctataaataattatataactataaataattacataacataactataaataattatataaccataaataattatattacataactataaataattatattacataactaaataattatattacataactaattatattacataactataaataattatattacataactataaataattatataactataaataattatattatataactataaataatatgatcacattaaattgtataatcatatattatcatatcattataattatattatatatgtatatatcatatataattacatataattatataagcataattatatgcttccttaattctttattttattaatacacatattaatagaataaaggattaaaattatatgatcacattataattatatggttatataattatatggttatatatgattaattatttacctttgagtcctggggaatattatatggttatatatggctaattatatggttatataattataatgtgatcttataattatatgattacataattatataactataatgtgatcatataactttaatcctttattctattaatatgtgtattacattgatggatgattagatgttaaactagccttacattcctgggataattaccacctggtcagggtatataatccttttaatatgttgcaggacttggtcggctagtatttttttgaggatttttgcattcattttcataagggattttggtctgcagttttcttttcttgtgatgtctatttctgggtttggtgtcagagtaacactggcctcgtagaagatttggaaagtgcttcctctttttccgtttttggttttgtgaactattaacactaatcctccaaaagttaaccatagagctaccatatgacccaggtatatacccaaaacaaatgaaaacgatgtccacaaaaaaacttgtacatgatgcagccataaagaataaggagatcggccgggtgcggtggctcacacctggaatcccagcactttgggaggccgaggcgagcagatcacaaggtcaagagattgagaccatcctggccaacatggtgaaaccccgtctctactaaaaatacaaaagttagctgggcgtggtcgtgggtgcctgtaatcccagctacttgggaggctgaggcacaagaatcgcttgaacctgggaggtggagtttgcagtgagccaagatggctccattgcacttcagcctggccacagagcgagactccatctcaaaaaaataaaataacaagatcatgtcctttgcagcaatatggatggagctggaggccattattctaagtgaattaatgcaggaacagaaaatcaaataccgcatgttctcacttataagtaggagctaaacattgggtacccatggacacaaacaaggaaacttcagacaccgaagcctgcttgagggtggagagtgggaggagggcgaggataaataaacgacctatagagtactgtgctgatgaccagggtgacgaaataatctgtacaccaaaccgccgcaacatgcattttacctacataacaaacctacaaaatgtacctctgaacctaaaataaacgtttagaaaaatgttgtacatgaatgctcatagaagcagtatttagaatagtcaaaaattggaaacaatgcctatcactgatgaatgaataaacaaaacgtaatatatccacaatgaaatgttattcagccataaaaaggaacgttaagagaccattcagtcattatttatttatttagaaacactctgtcacccaggctggagtgcagtggtgccatcttggctcactgcaacctctgctctctgcttcctgggttcaagcaattctcatgcctcagcctcccgagtagctgagattacaggcatgcgccaccacacgcagctcattttttgtgtgtttttagtagagaaaggatttcaccacactgggcaagctggtctcaaactcctgatatcaaatgatccacccgcctcggctcccaaagtgctgggattacaggtgtgaaccactgcacctggcctcattcagccattttaaaatgctgcaatataggtcttgctctgttgcccaggctggagtgcagtagtgcaatcacagctcactgcagtctcgacctcctggactcaagcgatcctcccacctcagtctcccaagtaactgggaatacaggtgtgagccaccacacccggctatttttttattttttgtagaaatggggtcttgctatgttgctcaggctggtctcaagctcttggtctcaagcaatcctcccacctcggcctcccaaagtcctggtgtgagccactgtgcctggcacaaccttccatttttgtttcattgtttgaatgtgtctgattgtgtgtatcttccttgagttgaaattttggggatctaagaccgtgttcattttctccaccactgtatcttcagagccaaccacagaccctatcactaaagaaacacttaatattgttgacgtaggaaggaagtgaggaagtggtgaggagggatggaatagatttacataactgttccatatctccaaaaactgatgcattttttttaatctctcttttttcagctgctggctccaaccagaaaagggatttatatggggcttccttggacctgtctgcgccatcttctctgtgagtgacatcatctgagcatcctcgctgccccgctgagggtcattagaaaaacaagataataaagatggtgacaagagcaggaatgtcccctgggttgtcatgggttgggttaggtttcctaagaccactcttgaatcttcaaactcaacactgttactcaatatttaagaaaaagacttacgtgtataattcatattagacaggctaggatgaagagataatgggcttcaggcccggtgtggtggctcacgcctgtaatcccagcactttgggaggccgaggcaggcagatcacttgaggtcaggagttcaagaccagcctggccaacatggtgaaaccctgtctctactaaaaatacaaaaattagccaggcgtggtggtgggtgcctgtactcgggaggctgagacaggagaatcgctcgaacccgggaggcagaggtggcagtgagctgagattgcaccgccacactccagcctgggcaacagagcaagaccctgtctgaaaaaaaaaaaaaaagagataacaggtttcaaaatctattcaacaaatcttctgtggttttctgaaggtgaatttagttctctttctggtgactctctggattttgaaaaacagactctcctccctcaatagtgaagtgtccaccctccggaacacaaggtaagatggagaagggggtgataaccacacagacatgtatggttcccaagagccaagccatgtgcctcagcagccactgaggtcccttctcagggtcttttgaagggacccagaaaaaacagacgcagccatccttctatggcagccatcacagattcagtggtatcctgttgagaccccatgcaacatgttttgtccatgtctaatctcagtttgtgaatcccagagcaacaggaagaatcttcattgactggtaaatggtatatatacaaaataggatacgattcgatcacaaaacagaatgaaaccatgtcatttgcagcaacatggatgaaactggaggtcactctcttaagtgaaataagccaggcacaaaaagacaaataccacaggttgtcacttacatagagaggagccgaagaagctgatcttgtggaggcagaaagtagaatgataaaagttagccgggcatggtggcaggcacctgtagtcccagctactcgggaggctgaggcaggagaaccgcttgaacccaggaggcggaggttgcggtgagccgagatcacaccactgcactccagcctgggcaatagagtgagactctgcctcaaaaactaaaaataaaaataaagtagaatgatagattccagagtctggaaagggtatgtgagtgggcaaggcgatgaagagaggttggttaatgggtacaacatacagtcagatagaaggaataagttataatattggatggcagagtagggtgactctagttcacaatatgttgtatatttcaaaatagctagaggggagaatttgaagtgttcccaacacatacaaatggtagacacgcgaagtgacggataccccaaatactctgacttaatcatgacacactctatgcatgttaacaaaatatcacatatgtccccacaaagatgtacaaacattacgaatcaataaactaaaaggttaaaaacttctttggacttttgtcagcagtcctataacaaaagcacaaagaaggccgggcatggtggctcatgcctgtaatcccagcactttgggaagctgaggggcgggggcagatcacaaggtcaggagttcgagaccagcctggccaaagagaccagcctgaccaacgtggtgaaaccccgtctctactaaaaatacaaaaattagctgggcgtggtggcgggtgcctgtaatcccagctactccagaggctgaggcaggagaattgtttgaacctgagaggcagaggttgcagtgagccgagattgcgccactgcactccagcctaggtgacagagcaagactccaactcaaaaaaaaaagtgcaaagaacacgtacattttcttgcctgttcccacagcccagtctgcaccttcataccgtaccctcagttcaggctcctcatcacttctcatgcaatcctccctctgggaaaatcctaatcaacattaaatcctttacgggggccaggcatggtggctcacgcctgtaatcctaacactttgggaggccgaggtaggcggatcacttgaggtcatgagttcaagaccagcctggccaacatggtgaaaccccatctctactaaaaatacaaaaattagccaggcatggtggtgggcgtctataatcccagctactcaggaggctgaggtgggagagtcacttcacctgggaggcagaggttgcagtgagccaagatcacgccactgcactccagcctgggtgacagagggagattccatctcaaaaaaataaataaataaaaataaaaataattcctctacagggtttgagcagtttgttgttccaggcacccttgtgcaaaattaatgaactttcttctagattcctatcattatcctttccaaattttgtgtgtcatgcctggttgtattggtgatttgaagagactgtgtagttcatgaacacagaaatctctttgcatattcaaaaataatcctttttttttttttgagacagagtctcgctctgtcactcccaggctggagtgcagtggctctatctcgactcactgcaacctccgcctcctgagttcaagcaattctactgccccagcctcctgagtagctgggattacaggcgcccccccgaccacacctggctaatttttgtatttttttagtagagaccaggtttcaccatgttggtcgggctggtctcgaactcctgacctcaggtgatctgcctgccttggccccccaaagtgctgggattacaggcatgagccaccgtggccaaccccaggtggcatttctactgtgggctatagttgacagtaaatatctaagctgaccacagcccagtctgagaaatcatctacaggggagggcaggggactccatgggcacagatgaaatagccttgattctctttctctgggtgcatcaccagcctcctttcttactcaatccaggatgctggcatttaaagcgacagctcagctgttcatcctgggctgcacgtggtgtctgggcatcttgcaggtgggtccggctgcccgggtcatggcctacctcttcaccatcatcaacagcctgcagggtgtcttcatcttcctggtgtactgcctcctcagccagcaggtaccactgcccagctcccacccaggactcttcctgtcctcactgctctctgtgagctgacccagtacacactttgcctctgcaggtccgggagcaatatgggaaatggtccaaagggatcaggaaattgaaaactgagtctgagatgcacacactctccagcagtgctaaggctgacacctccaaacccagcacggtaagatcacgcattgctccagagcacttcactaaccgacccacctgaggagcatgtgcctatcacacaaggaaacctgggaatacagcaggcaatgccctagaaaggctcgcatctgagtacgccttgactcattaaccattagcaatgatctcagtttaaatgtttttttttaatcagtcatagcctgtcatcccagcatcactgtcatcccagcatttgggaggcctaggcaagaggatcacctg

SEQ ID NO: 684 - protein, 837 aa, Homo sapiens
MVGACSPSYLGAFCVWLTLPGAETQDSRGCARWCPQDSSCVNATACRCNPGFSSFSEIITTPMETCDDINECATLSKVSCGKFSDCWNTEGSYDCVCSPGYEPVSGAKTFKNESENTCQDVDECQQNPRLCKSYGTCVNTLGSYTCQCLPGFKLKPEDPKLCTDVNECTSGQNPCHSSTHCLNNVGSYQCRCRPGWQPIPGSPNGPNNTVCEDVDECSSGQHQCDSSTVCFNTVGSYSCRCRPGWKPRHGIPNNQKDTVCEDMTFSTWTPPPGVHSQTLSRFFDKVQDLGRDYKPGLANNTIQSILQALDELLEAPGDLETLPRLQQHCVASHLLDGLEDVLRGLSKNLSNGLLNFSYPAGTELSLEVQKQVDRSVTLRQNQAVMQLDWNQAQKSGDPGPSVVGLVSIPGMGKLLAEAPLVLEPEKQMLLHETHQGLLQDGSPILLSDVISAFLSNNDTQNLSSPVTFTFSHRSVIPRQKVLCVFWEHGQNGCGHWATTGCSTIGTRDTSTICRCTHLSSFAVLMAHYDVQEEDPVLTVITYMGLSVSLLCLLLAALTFLLCKAIQNTSTSLHLQLSLCLFLAHLLFLVAIDQTGHKVLCSIIAGTLHYLYLATLTWMLLEALYLFLTARNLTVVNYSSINRFMKKLMFPVGYGVPAVTVAISAASRPHLYGTPSRCWLQPEKGFIWGFLGPVCAIFSVNLVLFLVTLWILKNRLSSLNSEVSTLRNTRMLAFKATAQLFILGCTWCLGILQVGPAARVMAYLFTIINSLQGVFIFLVYCLLSQQVREQYGKWSKGIRKLKTESEMHTLSSSAKADTSKPSTVRSRIAPEHFTNRPT

SEQ ID NO: 685 - DNA, 1339 bp, Homo sapiens
  source
  (1)..(1339)
  CDS (201)..(1139)
gagagagaaagaaagaaagagagagaaagagaaagagagagagggagagagagaaagaaagaaagaaagaaagaaagaaaaagaaaggaaggaaggaaggaagaaagaaagaaagaaggaaggaaggaaggaaaaaaggtctataacttataactggtttggttttgataatattgacaagatcaagactcatcaacaacatgaaagcaggaaacttctcagacactccagaattctttctcttgggattgtcaggggatccggagctgcagcccatcctcttcatgctgttcctgtccatgtacctggccacaatgctggggaacctgctcatcatcctggccgtcaactctgactcccacctccacacccccatgtacttcctcctctctatcctgtccttggtcgacatctgtttcacctccaccacgatgcccaagatgctggtgaacatccaggcacaggctcaatccatcaattacacaggctgcctcacccaaatctgctttgtcctggtttttgttggattggaaaatggaattctggtcatgatggcctatgatcgatttgtggccatctgtcacccactgaggtacaatgtcatcatgaaccccaaactctgtgggctgctgcttctgctgtccttcatcgttagtgtcctggatgctctgctgcacacgttgatggtgctacagctgaccttctgcatagacctggaaattccccactttttctgtgaactagctcatattctcaagctcgcctgttctgatgtcctcatcaataacatcctggtgtatttggtgaccagcctgttaggtgttgttcctctctctgggatcattttctcttacacacgaattgtctcctctgtcatgaaaattccatcagctggtggaaagtataaagctttttccatctgcgggtcacatttaatcgttgtttccttgttttatggaacagggtttggggtgtaccttagttctggggctacccactcctccaggaagggtgcaatagcatcagtgatgtataccgtggtcacccccatgctgaacccactcatttacagcctgagaaacaaggacatgttgaaggctttgaggaaactaatatctaggataccatctttccattgatgtctcagcttcttgggcttacactgctgggatatgtcagggagaaagaagtaatgagaagtcttgaaagcctgactaatgtctttggggttttctgtttttgtttttgtttttgtttgtttgtttgttttttgagatggagtctcgctctgttgaccagactggagtgtagtgacgcaatcttggctcactgcaacctc

SEQ ID NO: 686 - protein, 312 aa, Homo sapiens
MKAGNFSDTPEFFLLGLSGDPELQPILFMLFLSMYLATMLGNLLIILAVNSDSHLHTPMYFLLSILSLVDICFTSTTMPKMLVNIQAQAQSINYTGCLTQICFVLVFVGLENGILVMMAYDRFVAICHPLRYNVIMNPKLCGLLLLLSFIVSVLDALLHTLMVLQLTFCIDLEIPHFFCELAHILKLACSDVLINNILVYLVTSLLGVVPLSGIIFSYTRIVSSVMKIPSAGGKYKAFSICGSHLIVVSLFYGTGFGVYLSSGATHSSRKGAIASVMYTVVTPMLNPLIYSLRNKDMLKALRKLISRIPSFH

SEQ ID NO: 687 - DNA, 1076 bp, Homo sapiens
  source
  (1)..(1076)
  CDS (201)..(804)
  CDS (851)..(876)
  modified_base (1)..(85): a, t, c, g, unknown or other
  modified_base (120)..(120): a, t, c, g, unknown or other
  modified_base (123)..(123): a, t, c, g, unknown or other
  modified_base (785)..(785): a, t, c, g, unknown or other
  modified_base (848)..(848): a, t, c, g, unknown or other
  modified_base (882)..(982): a, t, c, g, unknown or other
  modified_base (994)..(994): a, t, c, g, unknown or other
  modified_base (1018)..(1018): a, t, c, g, unknown or other
  modified_base (1021)..(1021): a, t, c, g, unknown or other
nnnnnnnnnnnnnnnnnnnnnnnnnnnnnnnnnnnnnnnnnnnnnnnnnnnnnnnnnnnnnnnnnnnnnnnnnnnnnnnnnnnnngccactttcttgcagaccccgcagtctttctctanagnatcccccctcttaactggcattgtgggcaatggattggtcatcctggtcatgggttaccaggaagaaactgagaagcatgacggacaagtacaggctgcacctgtcagtggccgacctcctctttgtcatcacgcttcccttctgggcagttgatgccgtggcaaactggtactttgggaacttcctatgcaaggcagtccatgtcatctacacagtcaacctctacagcagtgtcctcatcctggccttcatcagtctggaccgctacctggccatcgtccacgccaccaacagtcagaggccaaggaagctgttggctgaaaaggtggtctatgttggcgtctggatccctgccctcctgctgactattcccgacttcatctttgccaacgtcagtgaggcagatgacagatatatctgtgaccgcttctaccccaatgacttgtgggtggttgtgttccagtttcagcacatcatggttggccttatcctgcctggtattgtcatcctgtcctgctattgcattatcatctccaagctgtcacactccaagggccaccagaagcgcaaggccctcaagaccacagtcatcctcatcctggctatcttcgcctgttggctgccttactacattgggatcagcatcgactccttcatcctnctggaaatcatcagcgagggtgtgagcttgagacactgtgcacaagtggatttccatcaccgnagccctagctttcttcactgttgtctgaacccannnnnnnnnnnnnnnnnnnnnnnnnnnnnnnnnnnnnnnnnnnnnnnnnnnnnnnnnnnnnnnnnnnnnnnnnnnnnnnnnnnnnnnnnnnnnnnnnnnnngccacttcttgncatgaccgcaggttttatctctanagnatccccccgtagtggtaatgtggactgccgtaaagctcagcttcagagtccatct

SEQ ID NO: 688 - protein, 209 aa, Homo sapiens [sequence omitted]

SEQ ID NO: 689 - DNA, 1030 bp, Homo sapiens
  source
  (1)..(1030)
  CDS (201)..(830)
  modified_base (30)..(129): a, t, c, g, unknown or other
  modified_base (164)..(164): a, t, c, g, unknown or other
  modified_base (167)..(167): a, t, c, g, unknown or other
  modified_base (801)..(801): a, t, c, g, unknown or other
  modified_base (835)..(835): a, t, c, g, unknown or other
  modified_base (888)..(888): a, t, c, g, unknown or other
  modified_base (895)..(895): a, t, c, g, unknown or other
  modified_base (919)..(919): a, t, c, g, unknown or other
  modified_base (952)..(1030): a, t, c, g, unknown or other
caaacctcattcttttatgagaaataaatnnnnnnnnnnnnnnnnnnnnnnnnnnnnnnnnnnnnnnnnnnnnnnnnnnnnnnnnnnnnnnnnnnnnnnnnnnnnnnnnnnnnnnnnnnnnnnnnnnnngcactgggttgcagacccgcacgtctagctgtagnagnataccccctctgatagccccctccaccaggaatatgaagagaatctgggtgacggcgtgggtgggtacaaggaaaaagtccaagttccaggatactcataacaacgctcattattacgtcttctttgaagaacaagaggatgagatcattggttttggccaggagctcaaaaacccccaggaagagactctacaagcttttgacagccattgtggctacaccatatgtggggacagtgaagacatggtgtgtacccccaagtccgatgagttcaacccgtgtgaagacataatgggctacaagttcctgagaattgtggtgtggttcgttagtctgctggctctcctgggcaatgtctttgtcctgcttattctcctcaccagccactacaaactgaacgtcccccgctttctcatgtgcaacctggcctttgcggatttctgcatggggatgtacctgctcctcatcgcctctgtagacctctacactcactctgagtactacaaccatgccatcgactggcagacaggccctgtgtgcaacacgggctgtttcttcactgtctttgcaagcgagttatcggtgtatacgctgacggtcatcaccctggagcgctggtatgccatcaccttcnccatgcgcctggacgggaagatcccctcaagacncaatgtccatcatgggtgggagctggggttgctggcttcttctcgcctgcttnctttggnggggatagtagctttgcaaagtantatctgcctggcatggaacggaaccctttgctnnnnnnnnnnnnnnnnnnnnnnnnnnnnnnnnnnnnnnnnnnnnnnnnnnnnnnnnnnnnnnnnnnnnnnnnnnnnnnn

SEQ ID NO: 690 - protein, 210 aa, Homo sapiens
  MOD_RES (201)..(201): Variable amino acid
MKRIWVTAWVGTRKKSKFQDTHNNAHYYVFFEEQEDEIIGFGQELKNPQEETLQAFDSHCGYTICGDSEDMVCTPKSDEFNPCEDIMGYKFLRIVVWFVSLLALLGNVFVLLILLTSHYKLNVPRFLMCNLAFADFCMGMYLLLIASVDLYTHSEYYNHAIDWQTGPVCNTGCFFTVFASELSVYTLTVITLERWYAITFXMRLDGKIPS

SEQ ID NO: 691 - DNA, 2596 bp, Homo sapiens
  source
  (1)..(2596)
  CDS (201)..(218)
  CDS (1732)..(2153)
  CDS (2186)..(2396)
  modified_base (6)..(6): a, t, c, g, unknown or other
  modified_base (163)..(163): a, t, c, g, unknown or other
  modified_base (800)..(800): a, t, c, g, unknown or other
  modified_base (1578)..(1578): a, t, c, g, unknown or other
  modified_base (1628)..(1628): a, t, c, g, unknown or other
  modified_base (1722)..(1722): a, t, c, g, unknown or other
  modified_base (1729)..(1729): a, t, c, g, unknown or other
  modified_base (2370)..(2370): a, t, c, g, unknown or other
  modified_base (2402)..(2402): a, t, c, g, unknown or other
  modified_base (2440)..(2440): a, t, c, g, unknown or other
attctnctagagtcgaaacgtgcgggtttgcaagtcaaaggcacatctaaagtatagcttttttaatgtttccaggtaaattgttttataacaagttgtgataagtcatgtataaccaacaataatatttttcataaaatacttgtcaaagtaagtttcacanagacaaaatagagtagagctaagctaattcattggttatggacagtaaggtgcaagtgagtggtacaagagtgcagactcacagtttaaattattctcttaccattagacgcaggcatatagggtctgcacatgttacaatcaaaaccaatgtctgctacattttccacttcttcctcagtatttaagttctgacgaactgcatgcatccatctaaaaagaccatatttgtacatttttttaaaaaaatggaatatactgagaactgctaccttttaaaacctgtaacactgagtcatcaaacttaaaagccctaagcctcacatgctcctcctaccttgcccttttctcctaactatccctattaacagaaaaactttcatagagctaaggaggaaataaaaaggaatgagaacaactattagagaggaagcaaagcacattacataaggaagctaattattttatcatcatatattaaatatttcaaagacagcaaggaagctagttagggcaaacacaaaggtattcagaaaacggcaaatggcagtgctagcatatatgggctccaggcaatgcatctaacttgaagtagacatatatcatggaaagcgatgtgaaggtaatggggggatctntagagtcaacgtgggggcatgcaagctaagcaagactattttctagtaatgaatcattttaaagaataccctttttatcccacctgctaactgttaagagaatgttttataatcactctggtcatggcctgtaagtttcttttctaaacttcttttcaggatacatatttactaacttgctttcaaatgaatatggtcatgtctatgcagcaagtttcttttctttcttcttttcttcttctcttttttctttttcttttctttcttttttaaggcaagatttcgctctgtagcccaggttgaagtgcagttgtagaaacatgactcactgtagcctcaacctctctggctcaagtgatctgcccacttcagcctcccagccaagtagctgggactgcaggtgtgcaccaccctgctccactaagttatttagttttttgtagacatggattctcagtgtgttgcccaggctagtcttgaactcctgggctcaagccatcttcctgccttgacctcccaaagtgataagattacaggcttgagacattatgcccaacctctttttctttttctttctttctttcttttttttttttttttttttgagacagtcttgctcttgttgcccaggctggagtgcagtggcatgatcttggctcaccgcaacctccacttcccgggttcatgcgattctcctgcctcagcctcccgagtagctgggattacaggcatgcaccaccacacccagctgattttgtttttttagtagagggggatnctctagagtcgagcggcgggcatgcaagttaggccttgtccagcctcatntccttcattccggtccagctcaactggcacagggaccagccggtctcttgaggtgggctgaacctgcccaaacaacctggccaactggacgccntgggagnaggccgtttgggagcccgacgtgaggccagagaactgtgactccagcctgaatcgaacctacgccatctcttcctcgctcatcagcttctacatccccatggccatcatgatcgtgacctacacgcgcatctaccgcatcgcccaggtgcagatccgcaggatttcctccctggagagggccgcagagcacgtgcagagctgccggagcagcgcaggctgcgcgcccgacaccagcctgcggttttccatcaagaaggagaccgaggttctcaagaccctgtcggtgatcatgggggtcttcgtgtgttgctggctgcccttcttcatccttaactgcatggtccctttctgcagtggacaccccaaaggccctccggccggcttcccctgcgtcagtgagaccacattcgacgtcttcatctggttctgctgggccaactcctcactcaacccagtcactatgccttcaacgccgacttccggaaggtgtttgcccagctgctggggtgcagccacgtctgctcccgcacgccggtggagacgatgaacatcagcaatgagctcatctcctacaaccaagacacggtcttccacaaggaaatcgcagctgcctacatccacatgagccgcggggatcctntagagtcaccgggaggcagcaagtaagcaaanaaacctgtcttttccagtcaatgaagtattttaacttnttagttaaactttttcaaaataatttttttcttttcagaatgcatcacattacttaactcacttcaaggattggcccagccatcaaccagtgtcatgggggacaaagccgtgtcattttaaggtattaaacagacaatgaaatctgccacaatttt

SEQ ID NO: 692 - protein, 216 aa, Homo sapiens
  MOD_RES (209)..(209): Variable amino acid
MDSKVQAVWEPDVRPENCDSSLNRTYAISSSLISFYIPMAIMIVTYTRIYRIAQVQIRRISSLERAAEHVQSCRSSAGCAPDTSLRFSIKKETEVLKTLSVIMGVFVCCWLPFFILNCMVPFCSGHPKGPPAGFPCVSETTFDVFICHYAFNADFRKVFAQLLGCSHVCSRTPVETMNISNELISYNQDTVFHKEIAAAYIHMSRGDPXESPGGSK

SEQ ID NO: 693 - DNA, 1339 bp, Homo sapiens
  source
  (1)..(1339)
  CDS (201)..(1139)
ttcttccttgtctaatttataaattaaaatttataatacatattgatggatataaaaaatagtgtatatagggttcagtgtcaactgcaatttcaggcattcactggaggccttggaatgcaacccctgcagataatggggaactactgtacttgacttacccttgtgtctcccttcaggaaggatcgtatgaatgccccatggaaaattacaatcaaacgtcaactgatttcatcttattggggctgttcccaccatcaaaaattggccttttcctcttcattctctttgttctcattttcctaatggctctaattggaaacctatccatgattcttctcatcttcttggacacccatctccacacacccatgtatttcctgcttagtcagctctccctcattgacctaaattacatctctacgattgttcctaagatggcttctgattttctgtatggaaacaagtctatctccttcattgggtgtgggattcagagtttcttcttcatgacttttgcaggtgcagaagcgctgctcctgacatcaatggcctatgatcgttatgtggccatttgctttcctctccactatcccatccgtatgagcaaaagaatgtatgtgctgatgataacaggatcttggatgataggctccatcaactcttgtgctcacacagtatatgcattccgtatcccatattgcaagtccagagccatcaatcattttttctgtgatgttccagctatgttgacattagcctgtacagacacctgggtctatgagtacacagtgtttttgagcagcaccatctttcttgtgtttcccttcactggcattgcgtgttcctatggctgggttctccttgctgtctaccgcatgcactctgcagaagggaggaaaaaggcctattcgacctgcagcacccacctcactgtagtaactttctactatgcaccctttgcttatacctatctatgtccaagatccctgcgatctctgacagaggacaaggttctggctgttttctacaccatcctcaccccaatgctcaaccccatcatctacagcctgagaaacaaggaggtgatgggggccctgacacgagtgattcagaatatcttctcggtgaaaatgtagacatacgttctgtgttagagtcaaagcgctaggttcatatcaactcagcagtgtacagcagtgaagaaaaacattattacatgcccagtatgtcaaacagagattaatccagaatgtttgtcttttaatttagtcttgacattatagttgcatattctaagacatctattttgtttctgtttgtgtttctttttatcaaa

SEQ ID NO: 694 - protein, 312 aa, Homo sapiens
MENYNQTSTDFILLGLFPPSKIGLFLFILFVLIFLMALIGNLSMILLIFLDTHLHTPMYFLLSQLSLIDLNYISTIVPKMASDFLYGNKSISFIGCGIQSFFFMTFAGAEALLLTSMAYDRYVAICFPLHYPIRMSKRMYVLMITGSWMIGSINSCAHTVYAFRIPYCKSRAINHFFCDVPAMLTLACTDTWVYEYTVFLSSTIFLVFPFTGIACSYGWVLLAVYRMHSAEGRKKAYSTCSTHLTVVTFYYAPFAYTYLCPRSLRSLTEDKVLAVFYTILTPMLNPIIYSLRNKEVMGALTRVIQNIFSVKM

SEQ ID NO: 695 - DNA, 1330 bp, Homo sapiens
  source
  (1)..(1330)
  CDS (201)..(1130)
ttgctctccatcacatttccagaattccagtatgctaacaatcattatattagttaaataaattaataaataaatctaattaattaaactctttacaatacaataaatataaaaacaccacatataggatttacagtattaaaatatgacttagacttaactcttttctctacttccacatttagatggccagaaaagatatggctcacatcaattgcacccaggcgacagagtttattcttgtgggcctcacagaccatcaggagttgaagatgcccctctttgtgctattcttatccatctacctcttcacagtggtaggcaacttgggtttgatcctactcattagagcggatacaagtctcaacacaccaatgtacttctttcttagcaacctagcttttgtggatttctgttactcttctgtcattacacccaaaatgcttgggaatttcttgtacaaacaaaatgttatatcctttgatgcatgtgctactcaactgggctgctttctcaccttcatgatatcagaatccttgctactggcttccatggcctatgaccgatatgtggccatttgtaaccctctattgtatatggttgtaatgactccaggaatctgcattcaacttgtagcagttccttatagctatagcttcctaatggcactatttcacaccatcctcaccttccgcctctcctattgccactccaacattgtcaaccatttctattgtgatgacatgcctctcctcaggctaacttgctcagacactcgcttcaaacagctctggatctttgcctgtgctggtatcatgttcatttcctcccttctgattgtctttgtctcctacatgttcatcatttctgccatcctgaggatgcattcagctgagggaagacagaaggctttctcgacgtgtggctctcacatgctggcagtcaccatattctatgggaccctcatttttatgtacttacagcctagctctagccatgccctggacacagacaagatggcctctgtcttctacacagtgatcattcccatgttgaatcccttaatctatagcctccagaataaggaggtgaaagaagctctgaagaaaatcattatcaataaaaactagagttttgtgtttataaaattaagaaagtaacttgagtaaggaaaaatggacttctttcatggtatgatttttttcccagtataagttatcaggatccttgtttctcaatatgtgatgtatacatatattttcgctgtgtaatacaattttctagagaatttctcttagaacgttaggtataaaagtaactataagaattt

SEQ ID NO: 696 - protein, 309 aa, Homo sapiens
MAHINCTQATEFILVGLTDHQELKMPLFVLFLSIYLFTVVGNLGLILLIRADTSLNTPMYFFLSNLAFVDFCYSSVITPKMLGNFLYKQNVISFDACATQLGCFLTFMISESLLLASMAYDRYVAICNPLLYMVVMTPGICIQLVAVPYSYSFLMALFHTILTFRLSYCHSNIVNHFYCDDMPLLRLTCSDTRFKQLWIFACAGIMFISSLLIVFVSYMFIISAILRMHSAEGRQKAFSTCGSHMLAVTIFYGTLIFMYLQPSSSHALDTDKMASVFYTVIIPMLNPLIYSLQNKEVKEALKKIIINKN

SEQ ID NO: 697 - DNA, 1336 bp, Homo sapiens
  source
  (1)..(1336)
  CDS (201)..(1136)
aatattatcatatagaataccagttactagaaaataaagattactacatgctaaattgggataaattatgattcagttaattgaaccggagttaaatgatcatatataaacaagggatcactttcctacaaaaggagaataacaatacaattcacctaaataccatgttttttctctcccctgcagaaactcatcaaagaatggcagcagaaaaccattcttttgtgactaagtttattctggttgggctaacagagaagtcagagctacagctgcccctcttcctcgtcttcctgggaatctatgtagtcacagtgctggggaacctgggcatgatcacactgattgggctcagttctcacctgcacacacctatgtactgtttcctcagcagtctgtccttcattgacttctgccattccactgtcattacccctaagatgctggtgaactttgtgacagagaagaacatcatctcctaccctgaatgcatgactcagctctacttcttcctcgtttttgctattgcagagtgtcacatgttggctgcaatggcatatgacggctacgtggccatctgtagccccttgctgtacagcatcatcatatccaataaggcttgcttttctctgattttagtggtgtatgtaataggcctgatttgtgcgtcagctcatataggctgtatgtttagggttcaattctgcaaatttgatgtgatcaaccattatttctgtgatcttatttctatcttgaagctctcctgttctagtacttacattaatgagttactgattttaatctttagtggaattaacatccttgtccccagcctgaccatcctcagctcttacatcttcatcattgccagcatcctccgcattcgctacactgagggcaggtccaaagccttcagcacttgcagctcccacatctcggctgtttctgttttctttgggtctgcagcattcatgtacctgcagccatcatctgtcagctccatggaccaggggaaagtgtcctctgtgttttatactattgttgtgcccatgctgaaccccctgatctacagcctgaggaataaagatgtccacgttgccctgaagaaaacgctagggaaaagaacattcttatgaacagaagtacaatgaaaaagattgcattagatctaagtttttggctatgatattgtatgaaatgatgtctttcactttagtgcatctgtcaacattctttctaatttggggggattttactgacgttatgtcttatgcacatggtctatttcatgccatttccctctcattttttctctcataaggattacgaagacatg

SEQ ID NO: 698 - protein, 311 aa, Homo sapiens
MAAENHSFVTKFILVGLTEKSELQLPLFLVFLGIYVVTVLGNLGMITLIGLSSHLHTPMYCFLSSLSFIDFCHSTVITPKMLVNFVTEKNIISYPECMTQLYFFLVFAIAECHMLAAMAYDGYVAICSPLLYSIIISNKACFSLILVVYVIGLICASAHIGCMFRVQFCKFDVINHYFCDLISILKLSCSSTYINELLILIFSGINILVPSLTILSSYIFIIASILRIRYTEGRSKAFSTCSSHISAVSVFFGSAAFMYLQPSSVSSMDQGKVSSVFYTIVVPMLNPLIYSLRNKDVHVALKKTLGKRTFL

SEQ ID NO: 699 - DNA, 1363 bp, Homo sapiens
  source
  (1)..(1363)
  CDS (201)..(1163)
cattaaaaagttgagctatagagaagtgaatgccaggtcaggaaaagctgtgcctactgggagtcagggctttgaatcacgacctgggataacatatccagtacatatgtccagaaactgtgcagtcaaacagttattcagaccataaaagcctcttctttctctatttttccatttgcaccatcacaccaggggaaattatggagatgagaaatactaccccagattttattctcctaggactctttaaccacaccagagcccaccaagtcctcttcatgatgcttctggccaccgttttgacctccctgtttagcaatgccctcatgattctcctgattcactgggaccaccggctccacaggcccatgtacttcctcctgagccaactttccctcatggacatgatgctggtttccaccactgtgcccaaaatggcggctgactacttgaccggaaataaggccatctcccgcgctggctgtggtgtgcagatcttcttcctccccacactgggtggtggagagtgcttcctcttagcagccatggcctatgaccgctatgcggctgtctgccacccactccgatatcccactctcatgagctggcagctgtgcctgaggatgaccatgtcgtcctggctcctgggtgcagctgacggcctcctgcaggctgttgctaccctgagcttcccatattgcggtgcacacgagatcgatcacttcttctgcgaggcccccgtgttggtgcgtttggcttgtgctgacacttcagtcttcgaaaacgccatgtacatctgctgtgtgttaatgctcctggtccccttttccctcatcctgtcctcctatggtctcatcctcgctgctgttctgctcatgcgctctacagaagcccgcaagaaggcctttgccacctgctcttcacatgtggctgtggtgggactcttttatggagctggcatttttacctatatgagacccaaatcccacaggtccactaaccacgataaggttgtgtcagccttctatactatgttcacccctttactaaatcccctcatctacagtgtgaggaacagtgaggtcaaggaagccctgaaacggtggctggggacgtgtgtaaacctaaaacaccagcaaaatgaggcccacaggtcaagatgatctagtgtcagatgagtctaagttcctgaatttattaacattttaacactatgtaattctctccctttagtaattcatgaagagaaaattaagtttgtgtattgatataataagatatttttaagaatgaagtgagccaattgtattgacagataccatttttgagcatttatgtacttttcttcaagtgaagtaatacc

SEQ ID NO: 700 - protein, 320 aa, Homo sapiens
MEMRNTTPDFILLGLFNHTRAHQVLFMMLLATVLTSLFSNALMILLIHWDHRLHRPMYFLLSQLSLMDMMLVSTTVPKMAADYLTGNKAISRAGCGVQIFFLPTLGGGECFLLAAMAYDRYAAVCHPLRYPTLMSWQLCLRMTMSSWLLGAADGLLQAVATLSFPYCGAHEIDHFFCEAPVLVRLACADTSVFENAMYICCVLMLLVPFSLILSSYGLILAAVLLMRSTEARKKAFATCSSHVAVVGLFYGAGIFTYMRPKSHRSTNHDKVVSAFYTMFTPLLNPLIYSVRNSEVKEALKRWLGTCVNLKHQQNEAHRSR

SEQ ID NO: 701 - DNA, 1363 bp, Homo sapiens
  source
  (1)..(1363)
  CDS (201)..(1163)
cattaaaaagttgagctacagagaagtgaatgccaggtcaggaaaagccatgctcactgggagttagggctttgaatcactacctgggataacatacccagtacgtatgtccggaaactgtgcagtcaaacagttattcagaccataaaagcctcttccttctctatttttccatttgcaccatcacaccaggggaaattatggagatgagaaatactaccccagattttattctcctaggactctttaaccacaccagagcccaccaagtcctcttcatgatggttctgagtatcgttttgacctccctgtttggcaattccctcatgattctcctgattcactgggaccaccggctccacacgcccatgtacttcctcctgagccaactttccctcatggacatgatgctggtttccaccactgtgcccaaaatggcggctgactacttgaccggaagtaaggccatctcccgcgctggctgtggtgtgcagatcttcttcctccccacactgggtggtggagagtgcttcctcttagcagccatggcctatgaccgctatgcggctgtctgccacccactccgatatcccactctcatgagctggcagctgtgcctgaggatgaccatgtcgtgttggctcctgggtgcagctgacgggctcctgcaggctgttgttaccctgagcttcccatattgtggtgcacacgagatcgatcacttcttctgcgagacccccgtgctggtgcgtttggcttgtgctgacacttcagtcttcgaaaacgccatgtacatctgctgtgtgttaatgctcctggtccccttttccctcatcctgtcctcctatggtctcatcctcgctgctgttctgcacatgcgctctacagaagcccgcaagaaggcctttgccacctgctcttcacatgtggctgtggtgggactcttttatggagctgccatttttacctatatgagacccaaatcccataggtccactaaccatgacaaggttgtgtcagccttctatactatgttcacccctttactaaaccccctcatctacagtgtgaagaacagtgaggtgaagggagccctgaaacggtggctggggacgtgtgtaaacataaaacaccagcaaaatgaggcccacaggtcaagatgatctaatgtcaaatgagtctaagttcctgaatttattaatattttaacacattgttattctctccctttagcaattcatgcagagaaaattaagtttttgcattgatataataggatatttttaagaattaagtgagctaattgtattgagagataccatttttagcatttatgtacttttcttcaagtgaagtagtatct

SEQ ID NO: 702 - protein, 320 aa, Homo sapiens
MEMRNTTPDFILLGLFNHTRAHQVLFMMVLSIVLTSLFGNSLMILLIHWDHRLHTPMYFLLSQLSLMDMMLVSTTVPKMAADYLTGSKAISRAGCGVQIFFLPTLGGGECFLLAAMAYDRYAAVCHPLRYPTLMSWQLCLRMTMSCWLLGAADGLLQAVVTLSFPYCGAHEIDHFFCETPVLVRLACADTSVFENAMYICCVLMLLVPFSLILSSYGLILAAVLHMRSTEARKKAFATCSSHVAVVGLFYGAAIFTYMRPKSHRSTNHDKVVSAFYTMFTPLLNPLIYSVKNSEVKGALKRWLGTCVNIKHQQNEAHRSR

SEQ ID NO: 703 - DNA, 1342 bp, Homo sapiens
  source
  (1)..(1342)
  CDS (201)..(1142)
ttggaagaaatgaacaaaattcctcattctatcaatataagagtgtactgcctatattacccgataaaacttgctaaaataatttttatgtaatttatatattatatactatatgtatatagtgtacacatatatatctaccttaaatctcccttgttctgatttaattcttctttaggtcacttgatattcttggcttgatgaaaaaagaacaagattctaatgtgacagaatttgttcttctgggcctatcatcttcttgggagctgcagctatttctcttcttactatttttgtttttttacattgctattgtcctgggaaacctcttgatagtggtaacagtgcaagcccatgctcacctgctccaatctcctatgtattattttttaggtcatctctctttcattgacctatgcctgagctgtgttactgtgccaaagatgttaggggatttcctacagcagggcaagagcatctctttttcaggatgcctggcccagatctacttcctccactttctaggagccagtgagatgtttttgctgacagtcatggcctatgacaggtatgttgccatctgtaaccctttgcgctaccttacagtcatgaacccccagctatgcctttggttggttcttgcctgctggtgtgggggttttatccactctatcatgcaggtcatactagtcatccagctgcctttctgtgggcccaatgaactggacaacttctactgtgatgtcccacaagtcatcaagctggcctgcatggacacctatgtggtagaggtgctggtgatagccaacagtggtctgctgtctcttgtctgcttcttggtcttactattctcttatgctatcatcctgatcaccctgagaacacacttctgccagggccagaacaaggtcttctctacctgtgcttctcacctgacagtggtcagcctgatcttcgtgccatgcgtattcatctatttgaggcctttctgcagcttctctgtggataagatattctccttgttttacacagtgattacacctatgttgaaccccctcatctacacactcagaaatactgatatgaagacagctatgaagaagctgaggataaaaccatgtggcattccattgccttgttaaggaatgagcagaagaggtgatttgaaaaacacactctttcttggaagactcttaactcatcttgtacatgggtaaaaaccactttgatgacgttggtataaaagaggagatagcataaagattataatggatcactcttgattacaatttaaaagcataggtggcactctagaaagccacctatgccttttgaccataat

SEQ ID NO: 704 - protein, 313 aa, Homo sapiens
MKKEQDSNVTEFVLLGLSSSWELQLFLFLLFLFFYIAIVLGNLLIVVTVQAHAHLLQSPMYYFLGHLSFIDLCLSCVTVPKMLGDFLQQGKSISFSGCLAQIYFLHFLGASEMFLLTVMAYDRYVAICNPLRYLTVMNPQLCLWLVLACWCGGFIHSIMQVILVIQLPFCGPNELDNFYCDVPQVIKLACMDTYVVEVLVIANSGLLSLVCFLVLLFSYAIILITLRTHFCQGQNKVFSTCASHLTVVSLIFVPCVFIYLRPFCSFSVDKIFSLFYTVITPMLNPLIYTLRNTDMKTAMKKLRIKPCGIPLPC

SEQ ID NO: 705 - DNA, 20345 bp, Homo sapiens
  source
  (1)..(20345)
  CDS (201)..(228)
  CDS (474)..(524)
  CDS (726)..(842)
  CDS (2948)..(3103)
  CDS (8366)..(8497)
  CDS (9101)..(9247)
  CDS (9682)..(9828)
  CDS (9913)..(9959)
  CDS (10086)..(10163)
  CDS (13410)..(13587)
  CDS (13677)..(13784)
  CDS (14621)..(14886)
  CDS (16407)..(16586)
  CDS (17772)..(17963)
  CDS (18355)..(18581)
  CDS (18724)..(18790)
  CDS (18893)..(18984)
  CDS (19085)..(19253)
  CDS (19932)..(20033)
  CDS (20116)..(20145)
gaagcaggagaatcacttgaacccaggaggtagagattgcagtgagccaagatcacagcattgcacttcagcctgggcgacagagcaagactctgtctcaaaaagaaaaaaaaatttagtgcacacctgtggtcccagctacttgggaggctgaggcaggaggatctcttgagcctaggaattggaggctgcagtgagatatgattgcaccactgcactccagcctgggtgaccaagcaggagcctgtgtcaaaaaaaaaacaaaaacaaaaaaacccgcccctatgggaacagggtgacagactctttggctttgagcatctgagtgggacatgacatctgctcactctgaacgaccgtcaggatctgagcctgagaggggtcagcatcctcctcccacaaagtgcatcacccttacgcctcctttcccaccctgggatcccctctgaccccctttcctttctctgttgcagcattctgtgtctggctgactctgccgggagctgaaacccaggactccaggggtgagtctgctgggaagcagaaagcacagtccacagccagagcctggggagggtcctggacccccgcccagcccccttcagcccagggaaagagagggctcgcgcacgagaaactcagcgccctgccccatctcccccagtgccccctttttgtgtattcccttacccctcaccttctgaccgtgctccctgctcttgcaggctgtgcccggtggtgccctcagaactcctcgtgtgtcaatgccaccgcctgtcgctgcaatccagggttcagctctttttctgagatcatcaccaccccgacggagacttgtgacggtacagaggcttgagggcagcgcaggggacatccgcgattatgaggcattgcccagccagtgggggacagaggttgttgtgaggggccacagccttaccttccagactatcatcatggccagagaaaagaaaaagagggcaggcgtggtggctcacgcctgtaatcccagcactttgggaggctgaggcgggcagatcgtttgaggccaggagtactcagaagactgaggggagaggattatttgagcccaagagtttgaggctgcagtgagctatgattgcaccactgcactctagcctgggcaacagaatgagatcgtgtctcagggagagggagaggaaggggaagagggagagggggagaggaaggggaagagggagaggggtagggggagggagaaggggaggggaagggggaaagggagggggatggggagggagagggggaggggaagggggaaggggaggggaaggggaggggaagggggaaggggagggggatgggggagggaggggggaaggggaggggaaggggagggggatgaggagggagacggggaaggggagggggaggcagagggagaggaaaggaggcaggaaggaaggaagggaggaagggagggagagagataggcccggcatggtgggtcatgcctgtaatcccagcacttcaggaggccgaggtggacagatcacttgaggttgggaattcgagactagcctggccaacatggtgaaacctcctctctatactaaaaacacaaaaaattagccgggggtggtggtggtcacctgtaatcccagctactcgggaggctgaggcaggagaatcgcttaaacctgggaggtgaatgttgcagtgagccgagattgcgccactgcactctggcctgggcgaccagagcaagactttgtctcaaaaaaaaaaaagagagagacagagaaggagagaaagagaaagaaaagtaggcccggcatggtggcttacgcctgtaatcccagcagtttgggaggccaaggcgggcggatcacctgaggttgggagttcgagaccagcctgaccaacatggagaaacctcatctctactaaaaatacaaaattaaccgggtgtggtggcccatgagcacatgcttgtaatcccagctactccgggggctgaggcaggagaatcgcttgaacccgggaggcggaagttgcagtgagccaagaccgtgccattgcactccagcctgggcaacaagagtgaaactctgtctcaaaaaaaaagagaagaaaagaacaagagagagagggagggagggagggaaagaagagggagggagggaaggagggaggaaggaaggaaggaaggaaataagggaagaatatgaagggggagaagtaagaagtgaataggcatggcttcctggagagagagaagctgggtgctcaggaatctggagtctgtgcctcagtttacccttaagactggggagggggtacattctggctatgaggtttttttttccttttttttttttttgagacagagtctcactctgtcacccaggctggagtgcagtgacccgatctcggctcactgcaacctccacctcctaggttcaagcgatcctcctgactcagcctcctaagtagctgtgattacaggcatgcaccaccatgcccagataatttttgtatttttagtagagacggggttttgccatcttggccaggctggtctcgaactcctgacctcaggggatccacctgcctcagcctcccaaaatgctgggattacaggcgtgagccactgcacccggccgccatggggtttaaatttctacaaagagactggggatggggatgtggagcttcctgtccatccctcacctcagcactgttcactgtgtccaaatctaagatgccagccagagaactaagatcaagtgtggtcttcaggaatggcttgctccagctgcagcatagcctgtgcagtgcaacttaagattttttccaaaagatactaagcagcaggccccatgttggggagtcaggatgggggtctctgccctgacagaactcacatctttgggaggtgactccctgtcctgttgtgttccagacatcaacgagtgtgcaacaccgtcgaaagtgtcatgcggaaaattctcggactgctggaacacagaggggagctacgactgcgtgtgcagcccgggatatgagcctgtttctggggcaaaaacattcaagaatgagagcgagaacacctgtcaaggtaagaaccaccccacgtcctctgactttccatccatgaggtttggggtcaccagagccattctggcagcatccagagagcagggccttggttgtagggtcagtgcctggcgtctgagatgggacaggtgcacatgtacctaccccaccaccccagagaggcagagtgatgtgaggattaagggctgactctgggaccagctgcctgggccaaatcctgataaccaagtgtatgacgttggccaggatacttattcagaaaccgctgtccacatgtgagatgtgataacgttatcatgcttgtaattccagtgctttgggaggctgaggcgggaggatctcttgaggccaggagttcaagaccagcccatagcaacatagcaagaccccacccctataaaaggggaggcgaaggcaggtagattgtttgagcccaggggttcgagaccagcatgagcaagcgggtgaaaccccatctctacaaaaaataccaaaaaaaaaaaaattaattagccaggcatagaggcctgcgcctgtagtcccagctactcaggaggctgaggtgggatgattgcttcaggctgggaggtcaaggctgcagtgagccatgatcaagcccctgcactccagcctgagtgacagagcaagatcctgtctctaaaaaagaaaaaatcaaaccaaagctttcttggaggcaggattttaaaaaattaaaaacattaaatgaaaaaagaactggccgggcgcagtggctcacacctgtaatcccaacactttgggaggccgaggtgggtggatcacaacgtcaggagtttgagaccagcctgaccaacatgatgaaacccccgtctctactaaaaatacaaaaattagccagacatggtggcacgcgcctgtaatcccagctaccagctactccagaggctgaggcaggagaatcgcttgaactcaggaggcagaggttgcagtgagccaagatcgcgccactgcactccagcctgggtgacagagtgagactctgtctgaaaaaaaaaaaaaaaaaaagataggttgggtgccatggctcatgcctgtaatcccaacactttgggaggccaaggtgggaggatcacttcacttgagtctgggagttcaagaccagcctgggtaacatttcaagaccccatctctacaaaaacaaaaatatagacaaggggaagaaagagtccttatcttttatttgttttgtttgtttgtttttgagacagagtctcactctgtcacccaggctggagggcagtagtgtgatctcggctcactgcaacctccgcctcctgggttcaagtgattctcatgcctcagcctcccaagtagctgggattacaggcgtgagccaccatgcccaggctgagtccttatcttttaaagataaaaacaaaagtagctttgacttttgttaaatatagaccttggacaggttactttcaccttgttaaaaggttaaagttactttcaccttgctaaaaggggagtaatggcatttacctacaaaagtatttaacaggctgggcacagtggctcacacttgtaatgctagtactctgggaggccgaggcaggtggatcatctgaggtcaggagttcaagaccagcctggccaacatggcgaaaccctgtgtctactaaaaatacaaaaattagctgggtgtggtggtgcatgcctgtaatcccagctactcaagaggctaaagcacgagaatcgcttgaacctgaaaggcagaggttgcagtgatccgagatgacagcactgcactccagcttaggtgacagagcgagactccatttcaaaaaaaaaaaaaaaatggctaggcgcgatggctcatgcctgtaatcccagcactttgggaggccgaggcgggtggatcacgaggtcaggagatcaagaccatcctggctaacacagtgaaaccccgtctctactaaaaacacaagaaattagccaggcatggtggccggcatctgtagtcccagctactctggaggctgagtcaggagaatggcgtgaacccgggaggcggaggttgcagtgagccgatattgcgccactacactccagcctgggcaacagagcgagactccatctaaaaaaaaaaaaaaaaatcacttaaaagctcctggcttgcagaatgcactctatcagcaatggctaatggggattttattgtaattctgatctgatgcgcccccaggatgggtatccgtagggtgcgagatcagagagcagctgcaaggctctacccctgcgcagaggccacagcctttgctatggtcttgcttgaggccacagctcaggccgggagaaactgggactccaggctttgcctattttccagggaagctggttgggcaggggaggggcttccaggattcacaggggcagatgggagccagcagtgggcagctgggagctgcgactcattcaaagagagggagttagtgcagggtaccgagatcaggaagaggagtggtgcagaggtgggaggtgatgagactcaagactacagagagaagaaagggccggcagcccagatcccagccccacccctcctgccctgcattcaggcagagcacagagggataaagagggaggtgggttgggggacaaggcagagatgcatatacctgggacgtacacctgcgtggagcccagaaggaggcttctgtccgccacactgctagtccccagggcccccttgcaagtggacatcatgttaccccacatgcatgtgacttggccagaggagacagagtcttcatgtgaactggaaaaagatccccctctcccggtggatacatttgacaaacaaaaagtgggctggttttcagcccctgctcatctcattggcccaatacctgtgcagtgagcaacctgcacagctgtacttggtgatcatggtttcctcccagggtgctctggctaggggtgccgcccacccactgctatgaaccccctgcatgggatggtggttgtggttatgaaggaggtgtgttgctgtgttagaaacaggcctgggctgagagaaggggactcagtcaggcagctgggcagagacatggacagcagggctgaggtgataagagggacctccacggacatcaaagcaggtgatggagccaacagcctgctggtttggagcaggacctatgaccagaggtgagacgctcagaggggcctgggcccctccctttaacccaaggcactccaggcttcgctattgcacctgaggacacgtgcacccagtgtcacagcccatggggcctgtgacatccaggccagagacctcgggcggctccctccactcctcacccccctgtctccaggcatctcagggccatcctaaacccctgatcacccgtctttgtcccaaccctgagactcgggacactccacaggaggccactttggaagctcggaacatccccctgcccatctggcatcttatttgcataaaacaaaagggggctggcactcaggatatttcatgggctcatgacatggcgtgtggtggcgcattccagtacagtatccatcctctccgccatcgccggggactgccaggatgagacttgctgccaccggggctcccatgagctcagccacacctggaacccctctgacacccacacctaccataatgaaccccaaaaccctgtccagaaactcaggaggagggaatctcaaggacaggacaactgtctccagccagcagccttgcttggagaagatgcctcccgaccacctttctggccgtttagccctcatccatttccccatccaaggctccaccctaacccaccctggtaattcctgggcctgaacgcaccgtcaatgaccaaagcttgggaggatgctgtggccaggtgtgggcagcgtgatgtggaccccacaaatggattcagagggctgggtgccgtgactcatgcctggaatcccagcactttgggaggccaaggtggaaggatcacttgaggtcgggaattcgagagcagcctgaccaacatggtgcaaccctgtctgtactaaaaatacaaaaattagccgggcgcagtggcacgcacctgtaatcccagctactcaggaggctgaggcaggggaatcgcttgaacccgggaggcagaggtcgcagtgagctgagatcacatcattgcactccagcctgggcaacagagagagacgctgtctccaaaaaaaaaaaaaaaaaacaaaaacgcactcagagggttggatgaaggaggcggctccagcctggactagccggcaagagacagcatcactggggaccatcgtcccaggcccgatcctctcctgtagtcagtcctggtctggaccactcaaggacagagatggaagcttgaaccccattcagcagggcccacaggtctctgtccctggtggaatgacaagggatgagaggacagatacatctgccacccctcacccatcggcacctgtgccctctctagccacaggcccccgctcacggccagttctgcttagatatggattctcaccaaatcctgctatttccatatccatagatcctttcctggggatcagaaaaaagcatctttgtagactcggggctgcctggctggacatcagcccccactgttcaccccagcctggtgcccactgtccgggcagccctagcctgtcccacatcatcccgcactctccccacccctgctattgccctgcatcgcgggggcactggcttagggaggggtcttggtccatgcccatgaagctgggctctcagagctagtgtggatgggagagcagcatcctgctagggccaccaggatgctgagaatttggccagcgagcggccgttctgtgggagtcaggccgagggccaccgttgggaaccaagacgtgtcctgcccaggcgcacggcatgtcccctgcatttggttctcaggaaggccccaccctggcctttgcccggaatccttaggctgggacacagatggctgggacaccccagcttggagctgcccaggaaggcagaggagaaggggaggacttggctgcttccagccacatctggacaacagaaggactgagccaccaccctcaccataggatgcctctgtgtggattggaaaagggaggagacagtggtgccttccagatgcttccgtgccaggaaacatggcggaccctcagccctgaaagctgctcacagctacgggcatccttcaccctctccttcctcttgcagatgtggacgaatgtcagcagaacccaaggctctgtaaaagctacggcacctgcgtcaacacccttggcagctatacctgccagtgcctgcctggcttcaagttcatacctgaggatccgaaggtctgcacaggtagaggccccaggaagacgccgtgaggctggacgggagctggggatggagctgaggcacgtcctccaaagcagccgaggaggagggggaagatccgcaggttcccacaaggtcaaggacctgctaagcccctgcctaaggattcacctcccaggaaggtcctgccacacggcagggaggcggcagggccttcagggctggagtgcccttgtgggcccccagacctcaccccttcctcatctgtcacgtgcgagtggaagaaggtgtcacttccagttctaagaaggggaatctccactatgaccagggagggagcagatgagagtttttagtttttagtcatggaaatctagctcccatgactcagtttcccttttggtttcacctcctataaactggggaccatggtccctgctgtgcccatctggtaggaagaccatcataagatgctttgaaggtgaagttgaaggtcaccaagtggcggcatgtgcaataatggtcttcagtctgaggcaatgaaaagataggggagtgggtgcagtgagtggagggcaggcccaggctggtcagggacagggtttgaccctctggctttgtcctcagatgtgaatgaatgcacctccggacaaaacccgtgccacagctccacccactgcctcaacaacgtgggcagctatcagtgccgctgccgcccgggctggcaaccgattccggggtcccccaatggcccaaacaataccgtctgtgaaggtcgagagctcagatcccacgtttctagcgacccacaaacatctgatcacatgttcaacggcgcccacacaaaccaagcagaatgagcgctggaggcacctggctgtgccaggcgttcgttcattcttctgaggctagatgagaaaagagcaagggtcctccggaaggagctggggtactgagggggaaggctcagggggaccccaggcaacagctgatgactcactgggaggaaggcgtttcaccatattcataacctgctcatctgcacggggcccacctgctgtgcccaggcctctccacgcttccataacccagcgtccaccactccaaggggggcactaatgccgggaggaatgagctgggggcacagacaggagacaggaccctctccaggctgggacaggacctgacccccttcttcctgtcctcagatgtggacgagtgcagctccgggcagcatcagtgtgacagctccaccgtctgcttcaacaccgtgggttcatacagctgccgctgccgcccaggctggaagcccagacacggaatcccgaataaccaaaaggacactgtctgtgaaggtatgacctggccctagaagctccccacccccagcacacacactgacaagcggcctaatgagccgcttgtcttgttccctacagatatgactttctccacctggaccccgccccctggagtccacagccaggtgagtggcccccacagggacgaggcggcgggaactccatccacacagcactgcatccgtctccttgttctaaacttcccacccgccgtccaggctctctgacccccacatctcctctctctgcagacgctttcccgattcttcgacaaagtccaggacctgggcagagactccaagacaagctcagccgaggtcaccatccaggtaagggcaggatgctgggggaccccaggacagtgtagaatcagctagcggaggcttccatgtggccagagagagtgcccaacccaagcaggggcctctagtcagagacacacatgcgcataacatacacacaccacatacagtatgtgcacaaacatacacacccggacacgtgaagacacacgcatgcacacacacacaccaggtataatggcaacagagtgcagcacttaagaacctggagttgaggccgggcacggtggctcacgcctgtaatcccagcactttggaaggccgaggtgggcagatcacgcggtcaggagatcgagaccattctggctaacatggtgaaacccccgtctctactaacaatacaaaaaaaaaaattagctgggtgtggtggcgggtgcctgtagtcccagctactcagcaggctgaggcaggacaatgacgtgaacctgggaggtggagcttgcagtgagccgaggtcgtgcagctgcactgcagcctgggcgacagagccagactctgtctcaaaaaaaaaaaaaaaaaaaaaaagagcctggagttgggccacagaagttcaaatccccccattgccacttcttgctctgtgatctaaggcaagtgacttgccctctctgggcctcggttttctcatctgttttgggggttgtggtgtgtttttttttgtttgtttgcgttttttttttttatttggaaacaaggtctggctctgttgcccattctggagggctgtgacatgatcatggctcgctgcagcctcaatctcccaggctcaagtgaccctcccacctgagcctcccaagtagctgggaccaaaggcatataccaccatgcctggcttatttatttatttaatatatttatagatgggggtcttgctatgttgcccaggctggtcttgaactcctgggcttaagtgatcctcctgcctcggcctcccaacatgctgggatcacaggcgtgagccactgtgtctggccagtttcctcatgggcaacacaggcatgaaagtaatgcctccttcatatagtcagtgtgaagggtaaatcaactaatagaagtaagactcagaacagtgcctgacacatgataagccttatataaaagctttcctggccaagcacggtggctcacgcctgtaatcccagcactttgggaggctgaggcaggtggatcaccagagatcaagagtttgagaccagcctggccaacatggcgaaaccccatctctactaaaaatacaaaaaattagccgggcgtagtggcgggcgcctgtagtcccagctacttgggaggctgaggcaggagaatggcgtgaacccgggaagcggagcttgcagtgagccgagatcccgccactgcactccagcctgggcgacagagcgagactccgtctcaaaaaaaaaaaaaaaaaaaaaaaaaaaaaaattagctggcgtggtggtgcacgcctgtaatctcagctactcaggaggctgaggcaggagattcacttgaacccggaggcagaggttgcagtgagccaagattgcaccactgtactccagccagggcaacaagagtaagattttgtcttaaaaaaaaaaaaaacagttttcccatatgtttttagcacagtagaaaaatgatgtgagccacttaacatcattttaacttttccagtagctagattatttagttagttagttttagagatacggtcttgttttgtcacccaggctggagtgcagtggcacaatcacagctcactccattctcaacctcctgggctcaagcaatcctccctcctcagcctcccaagtattaagagctgagactacaggtgtgagccactgtgcctaattttttcattttttttttttcttttttgtgagacggagtctcgctctgtcgcccaggccggagtgcagtggcacgatctcggctcactgcaagctccgcctcccgggttcatgccattctcctgcctcagcctcccaagtagctgggactacaggcgcccaccaccacgcccagctaattttttgcattttttagtagagatgggatttcaccatgttagccaggatggtctcgatctcctgacctcgtgatccacccaccttggcctcccaaagtgctgggattacaggtgtgagccaccgcgcccagccattttttcattttttgcagagatgggggccttgctatgttgcccaagctggtcttgaatcctgggttcaagtgatcctcccacctcagcctccaaacgcactggaagtacaggcgtgcaccaccgtgcctgttgtctaataactacactttataaagtaaaaataaagttaaattaaagttaagattgcaggccgggcatggtggctcaagtctgtaatcccagcactttgggaggctgaggcaggcagatcgcctgaggtcaggagttcaagaccagcctggccaacatggtgaaaacccgtctctaaaataacaaaaaaaattagccgggcatggtggcgggcacctgtagtcctagctactagggaggctgaggcgggagaatcacttgaacccagaagtcggaggttgcagtgagccaagatcgcgccactgcactccagcctgggagacagagtgagacttagtctcagataaataaataaataaagttaagattgcatttaacctaatagatccaacgtattaaccactttaacatggaatgattttttgctttttttgttttgatctgagatcgtgccattgcactccagcctgggtgacaagagtgaaactccatctcaaaacaaaacaaaaaaaaaattacaaaaattagccgggtgtggtggcacgcttctgtagtcccagctactcagaaagctgaggtgggaggatcgcttgagtctgggaggtggaggttgcagtgagctgattatgccactgcactcaagcctgggcaacagactgagaccctgtctcaaaaaaagaaagaaaaaagaacaggaaatcaaaacagagcctggcaggcagcccgtgcccaaccagtgttaagcgctgtgattcatacgtgcatgcaggcaaatactcaatccgtcgcttgttttctggttactgcatcatctcagtgattcccttgtgcctgtgggtctccagtgtgtcccctggtagggggtgacatccaggtccttcaggcaacccctgtggtctgatgctccagcgattctgtcacccgccaccccctagaatgtcatcaaattggtggatgaactgatggaagctcctggagacgtagaggccctggcgccacctgtccggcacctcatagccacccagctgctctcaaaccttgaagatatcatgaggatcctggccaagagcctgcctaaaggccccttcacctacatttccccttcgaacacaggtgaggccttggcctggcctgccctgccccaaccctgggccccacctggtacctggggtccctaatcacaactgcccctctcccctcagagctgaccctgatgatccaggagcggggggacaagaacgtcactatgggtcagagcagcgcacgcatgaagctgaattgggctgtggcagctggagccgaggatccaggtagcagcggtggtctggagggggagcccgtgggagagagatggaggtgctgggatggggccagggtgaggttcagaatagaacaactgactgggcgcggtggctcacgcctgcaatcccagcattttgggaggcccaggtgggtagatcgcttgagctcagaagttcaagaccagcctgggcaacatggtgaaacccggtctctacaaaaaatacaaaaattagccaggtgtggtggcacgtgcctgtagtcccagttactcaggaggctgaagcgagaggatcaattgagcccgggaggtcaaggctgctgtgagctatgatcacgccaaagcactccagcctggacgacatagtgagaccctgtcttaaaaaaaaaaaaaagtccaggcacagtggctcatgcctgtagtcctagcaccctagcactttggcaggctgaggtagatggatcacccgaggtcaggagttcaaaactagcctggccaagatggtgaaaccccatctctactaaaaatacaaaaattagctgggagtggtggcaggtgcctataatcccagctacttgggaggctgagacagaagaattgcttgaacctggggagtggaggttgcagtgagctgagatcacgccactgcactccagcctgggcgaaagagcgaaactccgtctcaaaaaaaaaaaaacaaggaacaactagaaactgactcatcgggaggggctcctggcgtcatcgtggtggactggctgagcctgagctgggtcatcttgggagggaggatagagcatgggaggaggacaacgggagtaggcagcgagtgtgtctgttccccaggccccgccgtggcgggcatcctctccatccagaacatgacgacattgctggccaatgcctccttgaacctgcattccaagaagcaagccgaactggaggagatatatgaaagcagcatccgtggtgtccaactcagacgcctctctgccgtcaactccatctttctgagccacaacaacaccaaggaactcaactcccccatccttttcgccttctcccaccttgagtcctccgatggggaggcgggaagagaccctcctgccaaggtctctgctcactctgctcacttcctcaaagataacccagggccttcgcacatgctgggcctctctctgggatgctctttcccgacgtgactcagtcttttatgtttctggccttctgatttgggccttccccaacctcattacttatttatttccttactttatttatttaatttaattaattaatttatttattttaagacagagtctcactctgtcgtccaggctggagtgcagtggcacgttctcggctcactgcaatctctgcctcccaggttcaagtgattctcctgcctcagcctcccaagtagatgggattacaggcatgcgccaccacacctcgctgattttgtatttttagtagagacggggtttctccatgttggtcaggttggtctcaaactcccgacctcaggtgatctgcccgccttggcctctcaaagtactgcgattacaggcgtgagccaccactcccagactttcttttcttatttatttatatttttagacaggagggtctcactctgtggcccaggctggagtgcagtggcgcgattatagctcactgcaacctcgaactcctgaactcaaccattcctccagcctcagagttttgagtagctgaggctacaggcatgcaccaccactcccagctaatttttttatttttgatagagacggggacctcactatttttcccaggatggtctagaattcctgggctccagtgatcctcccacctcagcctcctgagtagctgggactataagcgtgcactactatgcccagttaattaaaaacaaaaaaattaatggagatggaggtctcgctatgttgccacagctggtctcaaactcctggcctcaagcgatcctcccaccttggcctcccaaagtcctggaattacttacaggcaagagccatcatcatccctggccaccttctaatgcactatctacattacttattcgttaggtttatgtcataatctgcctctcccactttttttttttttttttttttttttttttgagatggagtttcactcttgtcatccaggctggagtgcagtggctcattctcggctcagtgcaacctccacctcccaggttcaagcgattctcctgcccaggactcccaagtagctgggatttacaggtgcttgccaccaggcccagctaatttttgtattttttagtggagacggggtttcgccatgttggccaggctggtctcaaactcctgacctcaggtgatccgcctgcctcagcctcccaaagtgctgggattacaggcatgagccactatgcctggccacctctcccactcttatgtcaacctcacaagggtaggtacttgtgtgtgccctgttcactgctgtgtctccaaacctgttacattcagtaggcgctcggtcaatactcatctagtaaaaagcagccctcttagactcagcccaagcccaggacctaagagtgagctccaggccaacctttctgaccacccccatctgcccacaggacgtgatgcctgggccacggcaggagctgctctgtgccttctggaagagtgacagcgacaggggagggcactgggccaccgagggctgccaggtgctgggcagcaagaacggcagcaccacctgccaatgcagccacctgagcagctttgcgatccttatggctcattatgacgtggaggtaagtagctggaggcatcctcaagtgcccacaggtaatgaggtccagctgcaaccagacaggcagctagttctccatggagccctactggttgctcagatatatctgcatggttgcacagcccaggtgtccccacgtcacacccttcgcagcctcttcctttggcctcttctctacaacccagcaactatacactgggtgcagccactagctccgctcctctgcctgtccatcccgtaccagttgtgagatgtcaactaaaagctccccatggagagcattccaagggggcaccacttgcccgtttttttttttttttgagacggagtctctgtcgcccaggttggagtatggtggcacaatctcagctagtgaggttcaagggattctcctgccttagcctcccgagtagccgagattacaggcgtgcaccaccatgcctgagtaatttttggtatttttagtagagacagggtttcaccatgttgcccaggctagtctcaaactcctgacctcaggtgatccacccacctcggcctcccgaagtgctgggcttacaggtgtcagccaccgcacccggcctctttttttttttcttttggacagagtcttgctctatcgcttaggctggagtgcagtagtgtgatcttggctcactgcaacccccgcctccggattcaagcgattctcctgcctcagcctcccaagtagctgggattacaggtgcatgccaccatgcaccgctaatttttgtatttttagtagaggcggggtttcactatgttgggcaggctggtctcgaactcctgacctcaggtgatctgccccccctcagcctctcaaagtgctaggattagaggcatgagccaccacacccagcctggagcaccactttctgtacgtgacttcagtaggatccatcgttaagctgggccttgtcgaaaactgcaattaaccaggcagagaaggggggcgcctgtggtccaggccaaaggcccagcaagcacaaaaatgtgaaatccctagactccccttccagctggtaagtgtggccagatctaggagggacaagggaggaggtcagagaggtgggcccgtcaaagtgtgggggggaaaagggaccacaaagagggcaggaaggcctcatgccctgaaggaaccctgagcacccggtgccactcctaggactggaagctgaccctgatcaccagggtgggactggcgctgtcactcttctgcctgctgctgtgcatcctcactttcctgctggtgcggcccatccagggctcgcgcaccaccatacacctgcacctctgcatctgcctcttcgtgggctccaccatcttcctggccggcatcgagaacgaaggcggccaggtgaggtcccgccccgctccctcctgagctctggggtcagggaggcctgggaggggttagccccgcccactcccggggctcagtcgggtaggcgggccctggaggcatgaggccccgcccctgtccgggatctggccccgcccaccggggggtcgggttgtctctttaaagggcgctggctttggagctgcctggccacaccccgagtgcccgctcgcttctgagcgttgttgggggtgggccctggggggaaacctggcccccgctccagacccgcccaccctccggctgtggtcccgcccactctcgggacctggcaggcgactggctctggcgccgcatgcccctccccgcgctgacgtcgctccgcccctccgtccccgccccgcaggtggggctgcgctgccgcctggtggccgggctgctgcactactgtttcctggccgccttctgctggatgagcctcgaaggcctggagctctactttcttgtggtgcgcgtgttccaaggccagggcctgagtacgcgctggctctgcctgatcggctatggcgtgcccctgctcatcgtgggcgtctcggctgccatctacagcaagggctacggccgccccagatagtgagtgcagcgagatggggcaggaggaaggcggggtgctgggcctggggctcacaggcagtgccacacacaatgtccggccgccctccgttccgctcctggcttcctggggcactgatgggacccctcccttccctcctagctgctggttggactttgagcagggcttcctctggagcttcttgggacctgtgaccttcatcattttggtaagtacccactctccctccaccgaagcccgagcgccacaggcccaggcccggctggaccatcgctctcgccctctaacccacaatctgctccctgcccagtgcaatgctgtcattttcgtgactaccgtctggaagctcactcagaagttttctgaaatcaatccagacatgaagaaattaaagaaggcgaggtgagaggagaggctggaaggacttggaggcggggccggggtgaggggcatgaagctggaggtgaggtgggggcccacgctgcaaccccgctcctcgcagggcgctgaccatcacggccatcgcgcagctcttcctgttgggctgcacctgggtctttggcctgttcatcttcgacgatcggagcttggtgctgacctatgtgtttaccatcctcaactgcctgcagggcgccttcctctacctgctgcactgcctgctcaacaagaaggtgggggcctgggcacagtggcgcacgcctgtcatcctcccacctatttgggaggctgaggtgggaggattgcttgagcccagaagttggagaccagcctgggcaacataaccagatgctgtctttacaaaaaaattcaaagatagccagggtgaggcgcctgtaatcccaacagtttgggaggccgaggtgggcagatcacctgaggtcagtaattcaagaccagcctggccaacatggtgaaaccctgtctctactaaaaatacaaaaattagccaggcatggtggcacacgcctgtagtcccagctacttgggaggctgaggcaggagaatcatttgaaccaggagtgcagtgggccaagatggcaccattgcactccagcctgggtgacagtgagacttgtctccaaaaaaaaaaaaaaaagccgggtgtgctgaatacccatctcagcttctcaggaggctggggcaagaggatcacttgggcccaggagttcaaggttgcagtaagctatgatggtgccactacactccagcctgggtgacagggggacccgatctcaaaaaaaagacaaacacaaaaacaccaagaaggtggggctgagggcagagcatggggaggagcgtgcatggtcccagggcctgctcctgccctgacttggtgtctgggccggcaggttcgggaagaataccggaagtgggcctgcctagttgctggggggagcaagtactcagaattcacctccaccacgtctggcactggccacaatcagacccgggtaaggggctgcgcctggggcgggtgtgggcaggaaggcaccagggctagcggggctcaggcctctgggctctcctctccaggccctcagggcatcagagtccggcatatgaaggcgcatggttctggacggcccagcagctcctgtggccacagcagctttgtacacgaagaccatccatcctcccttcgtccaccactctactccctccaccctccctccctgatcccgtgtgccaccaggagggagtggcagctatagtctggcaccaaagtccaggacacccagtggggtggagtcggagccactggt

SEQ ID NO: 706 - protein, 837 aa, Homo sapiens [sequence omitted]

SEQ ID NO: 707 - DNA, 28315 bp, Homo sapiens
  source
  (1)..(28315)
  CDS (201)..(242)
  CDS (360)..(447)
  CDS (9814)..(9933)
  CDS (14706)..(14791)
  CDS (22566)..(22672)
  CDS (22912)..(22998)
  CDS (23445)..(23565)
  CDS (23768)..(23921)
  CDS (24231)..(24291)
  CDS (26489)..(26561)
  CDS (26803)..(26888)
  CDS (27065)..(27200)
  CDS (27358)..(27399)
  CDS (27975)..(28115)
ggacaccgttggaccatgttcaggattccatggggatggaggtggcttcctctggccgcactcagcccctaggggtaaaattcgcctcttccctaggagcctgggctcctgatcctgtcagcttccctgccaggcccctccaagagcagggcaactccagaccctccaggcagagaggacccagaaggaggagagaggagatgaggggcgggtgtctgggaagcgactggatgtgtgacagggtgggaggggaggcaggcaggtgcagtgtcacccctgcagttttcctgggtgatggagcaacatgctcatggctcatggcacctgcctaatgtgtccttcgcctcctgtgcctgcaggcccttctccttctggggctgaaccccgtctctgcctccctccaggaccagcactgcgagagcctgtccctggccagcaacatctcaggtgagtcccctcaaccccctcctgcaagattcctggtcaccacaatgccccctaccccaggtatcccagagcctgcacacagaaccatgccctaaggcaggatttgcagagtcatttcctctccagggctccaagcaattcttcacatctccaccgagcaccgtgttgagaaggatcctgaggttgggtgtaaggttggtggggaagagctgcagttggttagtagcacctgccgtgggcacaggagtttgcagcaaggattctgagtagttatcttccctgctttagggtgggcacaggggagggcatcccagcccttgctgctgagttgtgactcggggaggcatcaagggacggaggaaaggctgccacagtctgtggctaaaaatgcccagagtgtaatactccacggtgctaacccgtgccaggcactgatcaaggactggagctgtattaacccaatttgcacaatgtccctctgaagtaggtgctgttgcccccattttacacataagaaaactgaggcacagagaactagtaagcgccagagccctgagtggagcacgggcagcccagcttctggttgtggtctccagcgccgtgctctgtatctctccaatagaaaagacagcatagctgcaaatattattaatatctgtgtcactttaccatttacagagtgcttttgcataatcatctcgtttcatcctcacaagagtgtaaagccgaacgtttgtacagttgaggaaactgaggcatgggagagttacataacccccatggcaccatgcagccagtacatggcagtgactgggacccaaatctaggtgtttgggctgcctagggcatgtcttttaaaactttgggtgtggtcctgggcatggctgctgctgggcaaaaatgtagagggtccctgcacctgagtgtctttggaaggcttgtggaccttctatttaagtcttcaagcctctccttgattcacaccaactctttcatgaagcacctactacacagcaggccccacgcagggcactgggggaaacaagggggctcacaggctagtctgggcatcgaatccacaaatgcatgtgcgatgaggcagagtggaagacgcatgcttgcaaagaaacagacgcaagtgtctgcaggcgggcaggaggccttcatttctgaaggtggctctgtgggaacaggaggcctccacatctcatggtagctgcttcctggccagctgttccttcactagggagagcctgggggcagaggaacaagccctggacttggagaaggcacactgggtccctgtgctggctcacagaaggtgcctggtcatgtcccggctaggggtgggtactggtagccacagggatgagcataccctcaacccctcttgaacctcaccttgcccaagtgtagagggataggggggctgttacctgccccaaggatctcttatgagattcaatgtactaagttttatggcaatatttcacaaactgtaaactgtagagtgtcatgccagtactaggtttggtttggtttggtttggtttggtttggtttggttttagagatgggatctcactctatcacctaggctgaagtgcagtggcacaatcatagtttagtgcagcctcgatcttctgatctcaaggaatcctcctctctcagcctcctgagaagctaggactacgtgcacaccaccatacctggcctaatttttaaaattgttttgtaaagacagggtctcagttgcccaggctggagtgcagtggcacaatcatagctcactgcagcccagatctgggctcaggtgatcctcctgtctcagcctcagcaggcttttaaaaggcttactgtatagctggaatgaagggaaggtacttgccagtaattgctcataatgatggagggagcagggaggctaagcaggggtggtgcaaatccagggaggcttcctgaaggaggaattttcaaggtgaatattaagagacactgttagtgtgaactggcagaagagagccagtgctgtgagctacagcaggaggtgagcaaggaccagtaggtgggtttggcggaaggaccaggaagaagtgaggagggaggagtgggaaactgagaaggtgctaggagcccagagcatctggctgcaaagttgattaagctgtgcttggggaatggggaagtaagttcttgagcatgagtctggagttctaggagagagagatggggagggaggagagctgctcagaggctgggcctgagaggaaaggccctatccccagctcccccatgctctggggccaggttaggctctatcaacttgttcgttatgctcaggaggagagacatccctgagcccacagaggtgtcacctgtccttggagccagcaggccatgatgaatagtgttcattccctagtgatttgtactctgtgcccgtgcccccagcccagcccagcctgcctggctgcatggcacgcgatccatcaccctccacgatggcctctgataatgggccatttgtcttctgactcgtagacctacccagaccgacgggcactggtagagacagatggtgagggtggggcggaggggcgagacagatggatgggcgtctggccggggcggctggcaccgagccagggcctttggggggccttttacgtgcctcatgccaggaactgggagagagtgggtccccagggctgaggcctatcatgtggcagaccacagacttggcgactcataaaatcatggcatgagtatgacaatgccaggaggtaatagaatcatttactaatgacatcacagacaaatagaatctgagttgacaattacctgggttcatcagttctcatctctggtcttaaggtagtgaatgataattaataatagctaggccaggcacggtggctcacgcctgtaatcccagcgctttgggaggccgaggcggtcggatcacttgaggtcaggtgttcgagaccagcctggccaacatggtgaaaccccgtctctactaaaaataaaaataaaaaattagccgggcttggtggtgggcgcctataatcccagctactcaggaggctgaggcatgagaatcgcttgagcctcagaggccgaggttgcagtgagcccagatcacgccactgcactccaatctgggcgacagagcgagactctgtctcaaataataataataataataatagctaatgtttatttagtgtccactgtgtgttggacgccattccaagtgctttaatctcattcaatcattacaatactgtagtcaggaatatttttatccacatgttacagtagaggaacctaaggctcagagaagttaaacgagttgcccaaacacactaagcagttactaagcagtggctgcaagatatgaaccatgtgggcctgacttcagattttgccaccagcactgcgttatgcggccactcagagccagggtgcccagggcccggtgtagtcagccgtctaggggtgcagggccacccctgcagttttccgtacccacactaggtttgcacacggccccatattctcctccatgcctcccgtatgcctggcactgtactagctgctgggaaggcaaaagtgaagagcccacagacccgcaggacaggagggccatccacttgtcctgatggatcacacaccctacagaggcagctttcttctctgcccagccaaacagaaggcagctcagccatgaggtggccgagcaaagaccaggtttctgccaccctctccatgccaggggacccaggcagaggccctgcccattcatcccacagcacattcctctgactgggcaagaacgtgtgtttcacaggctgcccttgggccacctggctgctccccctctggacagcctgggctgagtccccctcctgggtttaagccaaatagggggaagggcttcccagcctcagggctgctgccaagtgcccacctccagaagccgctgatgggagacccgacgtaactgggacagagccaggttccagcttcctctgaagttatctaccatgggcggatctgccaagcacacgtggaccctgagcctgatgggaggcaaactgtgtaacctacctgggggaagaagccagtgcctgattgtgcacagcactaaataggccaccttcaaagggctcttacctgttcactaaagcagccctcccaggaccctgaccccgcagggtttcttccctggcaggtgggagccctccacacctctcctctgctctccctttgcagggatttgaggcagtctgaccagaatgcgggccccacgcatttgttctgtgcatgtatggggaaggaggaagatataggaccggtttttgcattactttagtccacttgactccagcagctcaccctcaacctaaaggcctgtggtgacgtgcgctggtgagtgggttggttctactcccacatccccaaccaggaaagaccctgaaggcgtctacctgccccgtgaatgagggagtgagccacagagtgataggaacgttgacacctcagacacaccaagcacacacctgctccgggggtccttgtacttgcagttgcctctgctgagaacactttccccgcaggttttctccctcacttcctttaggtatctgcttaaatggtagtactttagaagccaccacactaaaagagcaccttggtcagcctttatctctttgcactgcttagtttttctccatagtatttctcactggttaacagaaatgtgtgtgtgtgtttgctgcctctccactagaatgtaagcaccatgaggacagggcatttatttgattcattattatatcccaagccccttgaacatttcttaggtagtcagtaaataacagctgtctcttggtatccatggggcactggttccagaactccccatggatatcaaaatgcagggatgcccaagtcactgatataaaatggagtagtatttgcatataacctatgcacatcctcctgtatactttaaatcatctctagattatttctaatacctactacaatgtaaatgttatataaatataaatagctgttatactgtactgtttagggaataatttcaagaaaaaagtctgtacgtgttcagtacacttttccccaaaacctatggatatggagaaacaattgtacttgttaaataaagagcaaagtcactattccttaatttaccaggagaggcactgtgggacagggagctgtcaggaggcgttggcacctaacagcacctctgcctttgtgcagctggttggtaaattggcttggctatttgcaaggttggattactctggtccaaattcctcctcatcccaggactatgacggctgactaggaaaatacctccacctgccaggagagcagaagaggtcaggcttttgtggcactggaactggagggaggggacattggcccaagaatcagaaggtccttgaggtccttatagccatcaagctgagtgacacagaaactgacttcctgccttctccccttcccagctaggggatggacaccctctctgtccccagcacctgtgaaatgatctttctctctgcctccttctcctgacttcccgcctgcctctctctatttcttccttagtgtcttcttctccatcttttttcctctgtctccccacctctctcctggcccacttggcctcccacctccctccctctccgcctgttttctcctcctcattgtagtcgggtggcttaagtgagtggcatgaattaagtcgtgcaaagcgcctttcacagtgcctggtttatattatagtagtgtccaacaaatgatccccctcaagtcctatacacaatttcccttctgaggccttgtccctacagggtcccagggaccccccactctcctcctccctggactcggtgtccgcaggacgcaggatggcgatctgaaatccttgtggggatttcagacacagagacactaaggcccagagagggcaggaccccgaggccttatgggaaggcaccgagcccacaaggcagtcccaggccgggaagtccagtggacagtgccaactggccaggagcgtggcgcctgaggccctgtcctgctgcctcctccctgcccttgtcctctaggtcccctcccttctaactccactccgcggctgaggcccttgtgcctttggccacgcccccccaacccccccaccccaagcccctgacccagcaggagtgctgacctttcactcggggatgggggaactttgtctcctcgccccttttcatttggcttctcctccccgttcttgcagcctctctctccctttcttcccgtctcacacagactttcaattccttccaggattttctgggctcttaatgtaaaggttgccactgatgctgtgtcaccagcgccccctctgtgcatccttaggagctgcgggggccaggagggagggggaggcgcggcgctgctggggaactggagtcgcagctctgcgatcgaggggcagctgcccagatcagggccagctgtgcagctgtgggcagcaccctgagctggcatcaaaagatgagcattgaaaatccactcccgtctcagtatctttggttactgattgtcttggaataagccatttggccactttggcctcagttttcttatctgtaaaacaagagagaattagcacccatggtggcatagtaggtggctgggaaccataccacagaggagaggcaaatggcttctgacctgcccaccccttgaaggtctccacgtccctggccagctgtggacggggtcaggcctttggttagagcccttagagctcccagcagtggccggtgcaggtcctctaggccagaaggcctatcctcagtggctggcctctgcctcggctctggcctcgtcctcgctgtggctggtgcccagtcctttcctgccctccgtgccttgcgaaagcaaggcgcaagaagactggccggggaagggaagaaggaagggcaggggccacactgatggagagggtgtgttccgtgtgttcattccagacgctgccacatggaacattacatttgagcctagctccctagatactgtggatgaatgagtgaggagtgaatgagcaagctactgaggaaggtacaatggtgccatcaaatgagatggcatatgtcatgtgtgcctggcacacagtcagccctcaacaaacgctgctcccttcctgctgcccccttaactgtccctcaccccctgtgactgactcacaatgtggcgtaatggaaagagcactagatttagagtccaaaatacctgcctatgagtcttggttctttcacccattgacccatgaccttggaaaagtcacctaacttccctgggcctcaatttcttcatctgtagaaaggaaataatcacattgccagatgtgtgaagatcaaacgaaatagatgaagagctttgaaacagcagggcatggcctctatacgatcctcccctccccgcggccacatgcccccagctctccccccaagtccctgtccccgggctcaacactgtcagcaggatccaggacaggttaaaatcccagcctggtacgccgttgcctcggatggccctgcttcctcactccactgcttccactgccactccgtgataacattcacagagactccgctgtggcacagcacctgggcttggcccactccagccgcctggcccgcagtcacctcgtgtccattaagccccaatccagatttctttctctttcaattaagccacttggcctgaaggcctctgccccttgagtcctgatttgcacaaatgccctatgaatagctttgattagaaagaaaaaccagcatttggtacaagtgctgctcggcactgccctgagtccagcagagaaagggagccaatttaacccagtgctgtttcctgagagactggggacaagctaatttggggaggagatggcaggcagccccagccagggcttggcagctgctaaggcctcggcccaggcctgaagaggctgcccccacccgcgctggttcatggttcctggccctccgtggcttgtctgtccactcttgtgccaattctaggttattaacctggggacgctggggctcaaaaggactggtgtgccagcctcactcagagggaggcactaaaaggcagagaaagaaggggcagcctcaggggggtgccaggactgtgccagcccccaccctttggaggccatatccaccctcccctcctgaagtgtcactgggcctcaactctgccccaacatcctctctctctcgcgtgctctctctctctcctccaaaaagcaaatatttggaaggggactttgacatcttctttctagttcagatgtttatatctctttgagtcacagacccctttgagaatctaatgaaagccgtgggcccatttccccattaaaatgcatgtatacaccaatattttcattacattcagggtctctgtgaactgttgaagtttccagtgggctgagattaagaatttctgatctggttcaaccacttgattttattatagatgaagacaagacactaaggcccagagagggcaagtgacttgcctatgatctcacagcaaattagtggcacagcccattctgaagcagtgggcccagactcccagttcagtgtgtcctttccactcccccagatggtgtctccctccctttcctctccatagctcacttctccatcagtcctgtcctagggccctgcacagaacaaagtacacgtgacgtatggtcagtaagtgtggttaacaggccagccggaagaaggaacaggccagccggaaggagggccaacttcatttagctggttcttccctgcagggccagggtagatgtggtttgattgcagagacgtgaggggctaggtcaatgattggatgggtctgttccagggtgttcctgtgatgtctcagagctccaggctgtcaccatgcgagggaccaagagaaatgtccttaggctacagagcaggggaccagaagcatgcccaggcttcctctaaatgccaggaccttagcttttaacaccacctccagccatctctcttcctcctctgctctggaacccatgctggctccctagtaccatagcatcagattcagatttcttccccttgtgtcttctttgcataggatgagctcatttctgcactggtcattgttgtcatcctgtccctagctggtgtgagtgggaacgagtggggaggtgggcagaactctggaatgtcctctgcctgcctggggccttggccggaatatcttgctgtgccttaccagccgtctctgcccccaggactgcagtgcaacgcatccgtggacctcattggcacctgctggccccgcagccctgcggggcagctagtggttcggccctgccctgcctttttctatggtgtccgctacaataccacaagtaaggaagaagtggagggtggaccatctgctgggaggtgggacaggatggggagagcttggaggtgggggaaggaagaatgacgatgacaataacagtaatacctcttgtggggatcgcccctgttttccaaaggtcagcgctgtattctcctgggtgccctgtgctcattactcgtgattctcacaatacccttgcaagacactatcacgcctcctataactaaggcccctggggctcagggaggttagggaacttgccccattggcagctggtaaggggtgaagctggaatttgcatccacgtctgtctggcactttcttctgccattaaacttcaggttagtctgtttgagcctactgtaataccatgaagcagggcaggaatcatcagagccccagctgtgtggataagaaccttgagtcgagaggttctgaggcctaccccgggccctccagccaggaggcaggggacccagagtttcagatgcacaggcacaggctcaacttgcatcctggatttgtaggtggagtggggcaggacggggttgacccagggtccgtcggatacttgatcctcatgtaaacacctggctccccggaggcccgaaacccccagagccgggctttgcagctccctgctattccgcctgccactctcagaattaatttgctctcccctgtcaatgagtcaggtccctgcttatcaagagagcaacagctgtgggccaggagccctaacctacctgaggggaggctgggggcctgatccctgcaattggggcctcctgtgtgcacccttgggtccttgtggtcttgaactcagagtcccaagagggcacaggggtgaccccagacaccatgtagtttactccaagactcactgtgtgacctcccagcacattgttgcccctcatctggccctcagcccctcatctgaggatggagagggctggatggcttggcttctaagatgtcttccagctcaaaactcccagattccttctcctgcccctctttcctctaccagatggatttggggtgttaaggttgggggctacagcagaggagtaggaagacccagccagaaagtgactccccagggagtgacttgggaggccagggcagggcaggaggctggggcagccagatctagcagcctcgtgtgtctgtaccatgtcctggccatgggagggactcgggagagggagaagacacactgggaggggcttgggggccaaggggaggaagtgcagaaaggaagaagggcctcttggccaggtcagtccaaggggtgcacagttggccagcccccaatatagtcaggcccattttgtaataaggaaattgaggcacagagaggctaataacctatcggaggtcgcagagcctggaggcagggtcacagcccagggacgataactctcacgatgctgggggctgagtccttctggagcccctaggaaggaggcagcatctgcacatcagaggagcttccaggaggaggcaccagttcctgtcatgtccacttccagagtgatcctcgtgtctgggcctacctgcccccactccccagcgccaccgcccagcctcaggtttcagatctgagttggtcactccttcacttggaatccactcttgtgtggcctccgtgttcaggctgctgggtggggccggccaggctgtctgtggtcatggccctgtcaccttttgcagccagccctggccaccccccatgagttccctctgctcccgttgcaaagggttacttgacatgctccagataaacattttcagccctcagtgcctgggcacacacttcacttgctggccctgcctgaagtggcagtcaggagtcctaagttctcattccagctgcatctgcagctggttaagtagcccttggcacagaccttctgtgggcctcagtttctacacctgcagaatgggtgggaggattgagtgtggtgctctctaggctcccccgcgcttccctctgtgatcccaggaaaggagctggggtgatggcctctcgacatggggtcagtctgtgagggcagggctggaagacccctttccaggtgcctccagcgccagatgaggtggagcacgcccgtgcagtcagtcacaagtgggtacccagagctgcacctcatcattaagcactaattaatccatttactgatgagttgctgccaggacttctaggccttctccctaatgccctccctcctgctgcatctgatcttcaaagggatgggaagcatttccaaaaatatctattttcccgtgattctttgggaggactgctcagctcagcaattaaagacaaggaggtcgcatcctccctggcaacggctccctgcttgttgggcctgctttctttcggatcacctcctttctccccatcaaagcctgctccctctgggtgacccagcctctgatgggactcctgactctcccccacatgtcaaggggggcaagggtgttgagcaaaggggctcctcccacaatatccaccggtaccctttgatggggacaagggacacgctctgagtctcacgtaaggttatataaatacagctccaagacaataataataaaaataacagccaacatcacatcccaggtacagttccaagcaccttgtgcatgttaactaaaaatattcaactcttgatgtaggagctgctattcagatgctctcacttacagaggaggaagctgacaggtttcgggatttgcccaaggtcacacagctagtggaaggtagtgccaggatttgatgctaggctgtctgggtccaggggccacgctcttagcactactccatgctgcctcttaactcaagaaccaccccaccccatcccaccacccccgggccccttccagccggatctctgtcccaaagcccctatccctggaggtatttcagagcagcctctggtcccgggacttcccagccatggcagagacactgggttctcctggttcctcgtctcaccctcccctcagacctccatgaaaacccactgggtgagcctcagccctccggtaactcatccctcatttggcaattggagagaatcagcagcctcttcaccaactctgcccaagggcctgaggctccctgagactgcggtccactgacatggaagagctttaaaaatccatttagccggatctcccactggccagctgtagctgagcagctcctcagcagggggaccagggaggggaatggaggggagtagtgcgagagaggagaggccacatctacttttcagccctggaggccaggacgggctccctatcatcaccttcttgtcctgatgctgccagcagaggcagctcccaggctggatggtcccttggggatcagccagtccagcccctccttttataaatgagaaggggtccccagaggtcagtcatgcagcacggcagcagctcagctggtcccagggccccagcctctagatcctcacagggttctgccccatggggctccagactcaaggactgggactccagcagctttcccagccctgttccagccccaagggccactgggagccacaggaaggcctacagtgagggaggctccaggtgagatactcagggcttcatttctctgccaggcagttctgcctgaagtcagagccagaattaactcaaggaagcatgtttagagctactgatgccagagccgggtacagggtggggtggggcaacctctgccagcagagaagatgagatggaatttagaactcatgctgtcccttcccagctaggttttaggaccctggagctcaagcctggtaggcatgaaggagggtaaggggaacacgttgggcagctctgcccatcccagggccctaaagccaggcatcaattcagctcacagggcccctccccatctccttagaaggtgacaggttctgggccacagtccaggccggtggctgcacaaacctccatatgtccctgggccactctcctgccttcctccttgagtgacatgggccaggctaggagcagctgtgacagacctgagtgatgacatctccccacacacgcctgtcacctgtcattttctgtccaagagacctccatcatggatgttccccccacccacagaccacgaccttccaacacaggcccgctatggggaagtgccaccatgggaccttccccaagatctgccccatgaactctgagcccccatgtgcagcacagccagtgaggacctcccacggcagcctctgtgagatggctctaccacaagaagccctgtcatgccacctgccacgcgagctgtcaccgcatacccttccaccgtgtcatgcccagcctcgtgaaaattgactcatgaggtctcaccatttttttgctgtcttgcaagacccctgaaaaggaggtttctcagaagagcacctacctgtcatctgccaccacataatgacttgcaaaggaacagcccagggagctggtcaagcctgtccacgggccagtcctgtgggcatgatcatgccagcttgagtgggcagagccgggggagccaccaacccctgctggaggccaatgggcagaaagaggcaggaagatgggggtggtaaggaagcccctctccccagcttcactacacaacccccagccagcaggtgcctgtactggccatctacagatccatctacgcatccatctgggccaggatggtcaggcaggggccggggctgccccgccatcactgcctctctcttccttttccagacaatggctaccgggagtgcctggccaatggcagctgggccgcccgcgtgaattactccgagtgccaggagatcctcaatgaggaggtgaggctgagccgaacaaggctgcccatatggaggggagtccagggtccccagcagagttttgtgcctgctacttggagtcagggagccagaggctaatgtcaaggccctgctctagtgaagctgactggggagctggagctgtcaacttggaaaaggcccatgagcaggcgccctcgagggcaggctggaccaatggggcactgggcaggctctgatggtgatgagatgggtccttgttccttccttccttctccctgtgctcatcgggcagccgcttgcactgggcatgggactgtcctgggggtgcaaagggagaccagactcggtcacaggagtcccacccttttccacaacacatgcctgagagatacatccagttccagccacagggctgtatgggaaccagggacgggatggaggtagcaatgcagtttgaaaaagcccttggaaagccttttaaaatgttaaatgtttttgagcagatattgcttacacagaactcagaaggtacaaatgggaatacaatgtcccctcccaccccgtccccagccactggattccctcccagaggcaaccattttgccaatttcacaagtgtccttccagagacattctccgcatacacgagtaattttgtatacgtattcttttttgtttttacctgaatgttgcatgttatacacactgtctacaccttgcttttttcatataatcatctatcttagagatggttccatatcagtacataaagagcatcttcattctttttgcatttgcataatatcacaaaatgtaccataacttatttaaaccagtctttattctcagtctttagttattacaaatgctgctgcaatgaataatctttgaagggtgatatttggcagaggcacaaatatatctatcctggagctgctactgccctcggtctctcccaccctgtctcctttcccacccgacgctttctcccttggtgctgaggaagacgggggtcaaagggcagaaggggggacaccccaggctgtccgagggccagggattctgattgtggaagagagagactgacctaagcagtcccaagaatcccgtcgcctaaagatcagagctggaagggaccgtggagactctccttcccatcttgaggttcccagacttgcctggttataagaatcgtccagaggcagatctcctgaggtcaggagttcaagaccagcctgtccaacatggtgaaaccccatctctactaaaaatacaaaattagccgggtgtggcgggattacacctgtaatcccagctacacgggaggctgaggcaggagaatcgcttgaaaccaggaggcggaggttgcagtgagccgagattgtgccattgcactccagcctgggcaaaaagagcgaaattccattaaaaaaaaaagtggggccaagtgcggtggctcacgcctgtaatcccagcactttgggaggacgaggcaggcagatcacgaggtcaggagatcgagaccatcctggccaacatggtgaaacctcatctctgctaaaaatacaaaaattagccgagcatggtggcgcatccctgtaatcgcagctactcaggaggctgaggcaggagaatcacttgaaccagggaggcggaggttgcagtgagcccagatcgcgccacagcactccagcctggcgacagagcaagactctgtctcaaaaaaaaaaaaaaaaatggaatctcccagagcacttgtccaaatacaggtcccagggccacacccaacacctaagaaatcacactgtccaaggaggacctgggaatctgtgtctttcatgagtgccccaggggagccttctgatggggcaaaagtgagaaactctaatctagtgcgacccgttcacactacagatggggagactggggcccagaaaaggggaatgattcacacaaggtcacgtggctctgggacattccctttttttttttttttttttttttgagacagagtcttcctctgtcgccaggctggagtgctgtggcgcgatgtcggctcattgcaacctccacctccctggttcaagtgattctcctgcctcagcctcctgagtagctgcgattacaggaatgcaccaccatgctgggctaatttttgtatttttggcagttaagtcagagcccggaacccagggctttggagcccaggctccggagcacaggctctgcagcccaggctctgctttgcccactgccaggtatctggcgtgaaacaaagttaacggggaaagaatcactttccttcacctgtagctcccaccccggcctggcaagctttggttagccccacccctggcttcctggcctcaagtcactgagctaatgcggggctctgctgtctccttccggaagctgcagctaggtcaatgcctagcttaaaagactcacgagttcttccacggtgctgctctggcagggcgaggggctgcctggcatctcagatcccacaggccagacctttgggtggcactcaaggctggggtgggttggtcaggctccctgatgatctgatctgagcagggaaagccctcagcttgctaagcccccacacagagagcccacctgggaagtcctgggattgggaggagggctcctcctggactgggggaaggaggtggggttccaggttaggagacttagttgggccagaggagatggccttggccttggctggtggggtgggagtgggcaagaccgttcagggatgtgaggagcccgtagcctggcacacagtagaggaggtgggaggaaaggaaacagggctggtgctcagaggagcgggtcagtgctgtcagtgactcaggaccacacgccattgcagagagggatggtgtccaggaggcacagctaagccatgaggtcaggctgcaggccgcactgtctgtcccagcttcacgccctgcactcaaccctcctgagggtcagcgcggggtcttcgtggttcacctgtctctcctgctctattgcaagccccttcttttcagttggctgatggggacactcggcagcccccattttccccagcacccttcaaaggcctaagggcagtaggttagccaccctcagcctgccctgcaacacccaaccctgccaggacaggggtctctacctctgtccaccagcagggttaggacaaggaagaggatcgggagcccggtctcatcagccccctctttgcattgcagtgggaatagcacggaccttagggtttgggtttcaacgggaacctgctgcatgaccttgaggaggcaacttaacctcaccaagttcccaaaaatggtggccaggaattcagatctctgccttctggggatggaagggtggtgttggcctgtcttggcctatgggagacgttccattcacctgccgccccctgtctctcatctcccctgtgaggtcaggggaggttgtagtgtacacctgggggagtgacccgccccaccccccagcccatccgtgcctggctctgccatctctttcctctgcagcccctgctggcctggtgcctagcactctgggtaatcgattagtttaattagtgaaaatgccattcccttctgccagcccccagcctcgccagacccctcccagaactgcagaggaaagtatccaattaattgagtggtaggtttctcagctctgggcctgggctaagccctaattaagctccagcgccctggggtatcgcagataatggattcgcagaagtctgcctgtgaaatgggacttgcgagggcacctcaaggccaggcaccccaggagatctgcccgcagccagcaccaccaggggacaggcccccaactgttgcatgcatggctggccgggggatggcactgagcccccagcaccacccctacacctgctgcctgtatcagcaccctctcctccccccaccacctcccgctactactgttcactcccttccccaccgtccagccttcccccacccacccaacacttgcacacactctatcccctttccccacgttctgctgcgcacaggagcctgggcctcaggcacagcctgggagagcacaccgtggtgggacatgaaacggattctgggggtctggtttgtggaccaaggttcactgctcaccgtgtggggagaggtgagtggtggttggaccagggcttctgaactgcagaggtgctttttcctaaaaccaagctccgattccatgggcctggcgtagggcatacattccactttcctcaagatctctgcgtgctcctctgcgtgctgttgctgggccaggggccaccctttgaggatcgaggggctggagtgagtgcccactgcagggtaagaggagtagctctggaagcctcggtggagaggacgtgccagaatggagtgggcaccagtggggagcttggaagggaggtctcattgccaccaacccagagaggcatcaggacggatctggcactgcagcgcctgggacgaggtggtgtcctgcagagagtccagtcagagtcagccgggcacaaattgcttattcaattcagatcactgagggtacagcggagtggcctctgccaagtaccacgctgtgccaccctccttagggcggggtgcctgctggtcttaggtctccagactggatggagatggagtgctggtcagggcccgaggggtagctgtgcccatttgtccttcggacatcccagctgctttgctgttatcgtggccatcggtcggggtgtcactggctgtccctgggggtgctgctgactctcctctccaggtatcactggccacctctcagggtgttcctgggtgcctcttaaggccttgctgtctctctaaataatgctggccagaactctggttgttattggaaatgtcacagtgtcactggcttctgtctgggtgtcgcaggatgtatttgtctcagggtatcagcagccatccctcaggctgtctctccagctgtcttctcaggttgcatgatgctgatgtggccgatgagagacagggcttgaacccggcccaggcccgactgctcagggaggcacactgagactttgtcccccgggaatggtttggcctgattctccctcaggctcttggaggaaagccctcttgggcgctattgtcccagcaggaggtcccccgaggctcctgggcccaaagtggcgtgagaccaccccagagagtgcctctgctttcaattcctgcttgtcccccaagaaatgtcgcagggggccggacacggtggctcacgcctgtaatcccagcactttgggaggccgagacaggtggattgcctgagctcaggagttcgagaccagcctgggcaacatggcaaaaccccatctctaccaaaaaatacaaaatattagctgggcatggtggtgcatgcctgtgatcccagctactcgggaggctgaggcaggagaatcacttgaacccaggaagcagaggctgcagtgagctgagatcctgccactgcaccactccagactgggcgacagagtgagactccatccctcccccacccaaaaaaagaaatgtccctgggaaacagggaaaagagggagcttaaagccaggcagacccaggttccagataccggctgcgtggcgtggccaattattcagtctcttctacggaaagaactgggatgagaggagcagtctccaagggcagctgtgggaaagaaaagcagtagtgtctgcagagctcctggcacagtgctcagcatacagcaggtgcttaacagataactcctccccactccaaccccaagggcccggtacggcctgactcgggagtgaggcaggggccctggaaggcagcactgaagggtctccctgcacactgcgctcctcccgcccagcctgggcctgtgaacaaggccggggtgttgtgccatgctcggctccacacatgttgtcattacccaggggcttctcagcatggatttgtggaaaatttaataaaaggatattaaataccagctccagacagcctgtgatgtgtgcatatcttccagagcctccggattggggcatctgccgccaggcgctcagagaccctccccacttgcacgggtgataggtaccctctcctcactcccctctctgtctctgtctctcctgccttcatttacacctccctggatcccagtcctttggaggctggagttgctaatgtaattacctgccatgttccagaaagcctctgcctggaaaccagctccaagaacagagcttctgtagcagcctctggagaggttccccaatgagggtgctccttcagaagggccttggtggccgggcggaactgggcatagggtcttggcttctcctgggatgcctggtggatagggctggacttgatctctggtttcaagtgggttctgtaattccaacaggaaggcctatggagtagctccttggtggccagtagctccttggtggctctgagaagatgatgagggccgttgtgagctcagtgcttctcagcacttgcatgtcacccacctttgtgcctcatgatcattcagccccaccctagagcctagaaacggggaggaagggaggtgctgccagggacccctcccttctcaaagtcacctgcttttcaacacccgtctttccttccttcactcacacactgctttggagtttgactgcgtgtcaagctcttggtttctaggccctgcttcttgggacctataaaagtgtggatgggggctgtgctcttgggcaggagtctgcagagagctgggcatggggactgaccagtcccctattatgggctggggacctgtttgcagccttcgtatcttgccaatctacatgtgcaggcaagaggtggttttggagttgcgcgacctccagcgcgtcagcataacctctgtgctgttttcctacaaaataaagcccagatgcctttccggctccccccacggggttgccctgatggtttaagacgataacagatatgaaaatcctctgtaaacaggaaggcttcaccactcttggaactcaagattgctgtaaagaggagggcagtgacctccatcagtatattaaattcattaagaaataaacccggggaatgtgttacagtcctgggagaggatcctgctcactctgcacagatccccttgggccagggatggggaaggccccggaaagtgagttatggagcctaaggagacttttctgtggtttctgctgattctgtggatgccagagcccagcagctgcccggcccctccttgctcacaggagcaggcggcattgcagcaggagggatttaggggtggctgagaaggtggtgactcagttcagaaatgggtggagaagagaaatcccgggagtttggtgtctctgcagctgagaggtccacctggtgttctgactgggtggcagcatgggtagatgcgagtgtgagggcgcacctgtgagccggccacatgtgcttgtgcatgcaggggcggggggtccatgtggagtggggaatcccacgtgatgtggagattcagttcgacacaacacggagcagtgaacacagcatgggattcagggacaagcagagcctcaaactggacggcgttgctctgcagcgaggcctgaccctcagcagatgctcaggaagggggagtggcccttgagatcatgacccgctccatcccagccacccctaggcgatgtcctcacagagcagctcccatccagcagaaggctcacctctgcccctctctcctgctccagaaaaaaagcaaggtgcactaccatgtcgcagtcatcatcaactacctgggccactgtatctccctggtggccctcctggtggcctttgtcctctttctgcggctcaggtgagaagaccccagcactgcctcctcctgtccccaggacctagagcagaagcagggtggagaagtgagaggagcagctctaggttggggtgggggttgctgggagagggtggcaggggctggcttatctgagagtctcaggtctctgggaacctctggcagagccgctctgccctctccccagtagctgctggaatggtggggagggacaaaacttgtcttatgtcacccatacccaggccaggctgcacccattggggtgaccaggcagatggagccctggaggtgggggctccatggagtggtgccccatttcaggttcgaaggtacctgggccccagcactaccgccaaggatgcaggtggcagagccggggatggggatggttgggatcaggagccgagcatcagggctggaggctgggagcagggctgacccctgtgactgtccatcctggaatggcagggagtagaaggcacccccaggggaagcgggcatcgccaggaatccagctgccctggtccatggagcacaggctccatggagtgccaggctctgcctggggcttatgtctgggtgggctgcaggcaggaagggctccatggggcattaggagagcctggctgtcacctccctgtgtgacttggccagtcagccccaccctgtgcctcagtttcctcatctacacatctgggctggggtgatggaggtggcctacccctcatcctctctctcctatcgctcccatcatccacccgccctgctgcaccaggagcatccggtgcctgcgaaacatcatccactggaacctcatctccgccttcatcctgcgcaacgccacctggttcgtggtccagctaaccatgagccccgaggtccaccagagcaacgtggtacgtcctggcaggggagcggggagcaggtcaggccaaacccaggtcagaggaggggcccgcctgccctgcagaggaggagcccacagaacaggagtgggatcccagggtatgccctgtcctgccctggggaggcccaggcccagggtttggtgcctcccctgccccccatcatcatctctggttgggggtggggtggcagggctggtgcaggttggtgacagccgcctacaactacttccatgtgaccaacttcttctggatgttcggcgagggctgctacctgcacacagccatcgtgctcacctactccactgaccggctgcgcaaatggatgttcatctgcattggctggggtgagctgggcagccacctccgcagcctgggcagtggcggccgccgggctgccctctcctccagactcaggccagcgggctggggggcctgagggatggaggtcgggttggggcggtaaggtgtgcacgatagccctctgctcctcttgggggtgggcggcagtagaagcaccttgaaggaggtgtgtgagtttgagatccaccctgagtaaccccagaccccctggagcctgggctgcactggggttctccaggcccacatcctccagcccccgctgagggctctgtgacagcccatctctcccccaggtgtgcccttccccatcattgtggcctgggccattgggaagctgtactacgacaatgagaagtaagtcatctcctttcccttcctgaccccaaggtttaggctcccagcccagcttggtgacactccccacgggcattggccatgctggctttttcccctcaggaccatggtttctgcatctataaagggagagatctgggggctggactcattcagagggtccctgcctgtgctctgcctgggtggggctggacaagcaggacccagcctcctttatctgccttgagcttacacaggaagcagcctggagccagactgcccaggttcaaatagctgtgtgaccttggacagattactgcagtgtgcctcagtttcctcatctgtaaaatggacatgctactgcctcaaagggctgttgtggggtgatatgagtccatctatattaagcatttacaatagctcctggcacatagagtaaatgctatataaatgtgttctattaatattaagacatcttaataaaagagtccatgaatttaatagaagtggacctagatgatctcagaggcttcttccagctctgaagttctttggttccttatgaaatggactcagatgtttccaatcgtgcctggaaacttgatttctgctgcagtggagctcaactttggctcacattagaatcacctggaatgcttggaaaagtaccaatgcccaggcttcaccctcagagaatcaggcgcaattggtctggggtgtggcctggcacccagaagtcttgaaaactgcccaggtgattctaatgtgcagctcagattgagaaccactgagagagagcggggcagaaaaggtggacatggatggcaggggagccccaggaccttctttgccaaacaagtgttcccgggaacctatctgactgacggacctggcgtccaagtggcctccaccacagtgacaagccctctcctcccccatggaggggagggggcctgcacggcttcattgggctgaaagaggagcctggaagattatcttgcgtgtttatgtggttgactccctcctgactccctcctgactcaggctggctgaggccttgggaagccgaggcaggcggatcacttgaggtcaggagtttgagaccagcctggctaacatggtgaaatcccgtatctactaaaaaaaaaacaaaaaaacaaaaattagctgggtgtggtggtgcgcacctgtagtccagctactcgggaaggctgaggcaggagaatctcttgaacccaggaggcagaggttgcagtgagccaagatcgtgccactgcactccagcctgggcaacagagtgagactccatgagtctcaaaaaacaaagcaaaacaaaaactgtttgggctaaaggagaaagtgagtctgagcggctctgaagctccacctggtggtgagaattcaacactgcaacagagaggatctgggtgtgagaaaccagaaacgaacttgcagaccagaggcccgaggactggacccggccctcagaagctgtgtgtggccagcatggtgttttctgaaaactcgattttgtagccaacctttaaaaaatccaaaggtttcatttacaaatctcaatttctggcttatgagatctagccactgggggtcttcatacccacgaggacataagggcttccagtttgtctggtccccacccactccccaggcctccctggagcttgctggagggacactcgggaaaatgcaaagcaattacctcctgcagcaggtagaacctgtgcaagtattcctctcaaggttgttcaggctgtgactggacagattcaggctgagattgcgaactgctgggtgcccactgggtgacaggtgtggtgccactcccaccagcagccccccagagggcatgctgggcctcagccactgccaggggactgtgaggaggagccgaggatgcagcctcgtgttgggcccatgcccgttcccagccactcagtctttcccactgtctacctcctgccccggtgcttgcttccaactttgcatctcatcacagaggatgctgtccgttctgcagatgggacaattgaggcatggcagtgggatcaagtgacttgaccttctgccagggttggaattgggacatctacctcttggcctccagccccagtcctgtcctggccaagcactgtccctccccatgccatcaaggtggacgcagatgacccttcctcccctttcctctgtggccttctaggtgctggtttggcaaaaggcctggggtgtacaccgactacatctaccagggccccatgatcctggtcctgctggtaagaacctgggtaggggcaggagacagggcccagtggggaggggcaatcagtgccaaccgtggacagaaaggacccctctacctagaggtgggggccacccaaagagggggcatgggtcagagatgtgcaggtgctcatgaggaggagggagaacagcaggggcactgaggccagagctgagaagcctgggtcccaagcctcttgcacactccggcccgctggtgtgctcaaattgcagatcaatttcatcttccttttcaacatcgtccgcatcctcatgaccaagctccgggcatccaccacgtctgagaccattcagtacaggtaaccgggtaccaccttcctcaggcctccccctgatgaaacccctgctccccatgcctctcacgtgccagagacctgccactccctcccccgacctggccctctttgccgagccagcgggcagcccgtcctggggtgggctgtgactccgagcctccccacccgccccaccccaggaaggctgtgaaagccactctggtgctgctgcccctcctgggcatcacctacatgctgttcttcgtcaatcccggggaggatgaggtctcccgggtcgtcttcatctacttcaactccttcctggaatccttccaggtacagccctggagggacacatcagcacctccttgggtggggattctgccaagcagaggcctggagggcaggaggccagggagaagcaaggggcagcccagaggctgggtgggcaacacctgcagccgacctttgacgcctcctctctcctccccagggcttctttgtgtctgtgttctactgtttcctcaatagtgaggtgaggacccgggggccctgcagcggggttcagggctgtgaggcctgttgggactggcgattgtctagagccttctcctcccctcccagggctgcctctctccctccctgctcctaggtccctaggggtatgctgctgggagccccagggtggcccctcccacctgtccactcccacagtgacagccccctcctttgctctcagaggccgctggcaccaggctggaagccagagctccagtatctttgatgagcctgtgaaaaccaggaagggctgagccctgggcaggggatacatgtggtttgagggcagggagccttcatggcaaagggcatatggtgccttcgtgtgggttagaaaagggtgccccttccccaggacatttgagaaacctgttccgacaaatatgcaaagcagtcgtgttaaggctgtgagtgtcatcccctactgaggacttccatgtactcagctgacctgcacagccgcttacctgcacagctgctcgtggcggcccaggggagggagggggtcctgagccacaggctcagatgtcgtgctcctccctgtgcccacaggtccgttctgccatccggaagaggtggcaccggtggcaggacaagcactcgatccgtgcccgagtggcccgtgccatgtccatccccacctccccaacccgtgtcagctttcacagcatcaagcagtccacagcagtctgagctggcaggtcatggagcagcccccaaagagctgtggctggggggatgacggccaggctccctgaccaccctgcctgtggaggtgacctgttaggtctcatgcccactcccccaggagcagctggcactgacagcctgggggggccgctctccccctgcagccgtgcaggactctagctcatgagtggaaagtcacctac

SEQ ID NO: 708 - protein, 447 aa, Homo sapiens
MRGGCLGSDWMCDRALLLLGLNPVSASLQDQHCESLSLASNISGLQCNASVDLIGTCWPRSPAGQLVVRPCPAFFYGVRYNTTNNGYRECLANGSWAARVNYSECQEILNEEKKSKVHYHVAVIINYLGHCISLVALLVAFVLFLRLRPGCTHWGDQADGALEVGAPWSGAPFQVRRSIRCLRNIIHWNLISAFILRNATWFVVQLTMSPEVHQSNVGWCRLVTAAYNYFHVTNFFWMFGEGCYLHTAIVLTYSTDRLRKWMFICIGWGVPFPIIVAWAIGKLYYDNEKCWFGKRPGVYTDYIYQGPMILVLLINFIFLFNIVRILMTKLRASTTSETIQYRKAVKATLVLLPLLGITYMLFFVNPGEDEVSRVVFIYFNSFLESFQGFFVSVFYCFLNSEVRSAIRKRWHRWQDKHSIRARVARAMSIPTSPTRVSFHSIKQSTAV

SEQ ID NO: 709 - DNA, 25685 bp, Homo sapiens
  source
  (1)..(25685)
  CDS (201)..(613)
  CDS (24969)..(25485)
  modified_base (17349)..(17448): a, t, c, g, unknown or other
  modified_base (24759)..(24858): a, t, c, g, unknown or other
  modified_base (24871)..(24872): a, t, c, g, unknown or other
  modified_base (24880)..(24881): a, t, c, g, unknown or other
  modified_base (24884)..(24885): a, t, c, g, unknown or other
  modified_base (24901)..(24901): a, t, c, g, unknown or other
  modified_base (24903)..(24903): a, t, c, g, unknown or other
  modified_base (24919)..(24919): a, t, c, g, unknown or other
tcttaggcatatattttttatgatctttccatgttaaaaatctcccaccattttatttgtttaagcagtgtggaagatgtccagtggattgaatttaatttaggaggatattactcctaccacactgtgttcactttttgtctcatttaaaactattgtatattttttctcaacaatcagatcacagatttccctgccaaatggacaatctcacaaaagtgacagaattcctgctgatggagttttctggtatctgggagctgcaggtgctgcacgccgggctgtttctgctgatttatctggcagtgctggtggggaacctgctcatcattgcagtcatcactctcgatcagcatcttcacacacccatgtacttcttcctgaagaacctctccgttttggatctgtgctacatctcagtcactgtgcctaaatccatccgtaactccctgactcgcagaagctccatctcttatcttggctgtgtggctcaagtctattttttctctgcctttgcatctgctgagctggccttccttactgtcatgtcttatgaccgctatgttgccatttgccaccccctccaatacagagccgtgatgacatcaggagggtgctatcagatggcagtcaccacctggctaagctgcttttcctacgcagccgtccacactggcaacatgtttcgggagcacgtttgcagatccagtgtgatccaccagttcttccgtgacatccctcatgtgttggccctggtttcctgtgaggttttctttgtagagtttttgaccctggccctgagctcatgcttggttctgggatgctttattctcatgatgatctcctatttccaaatcttctcaacggtgctcagaatcccttcaggacagagtcgagcaaaagccttctccacctgctccccccagctcattgtcatcatgctctttcttaccacagggctctttgctgccttaggaccaattgcaaaagctctgtccattcaggatttagtgattgctctgacatacacagttttgcctcccttcctcaatcccatcatatatagtcttaggaataaggagattaaaacagccatgtggagactctttgtgaagatatattttctgcaaaagtagaacatcctggtctttactatagaagatctgcaacaaaaccccaaaaaagcataaatactttatgacaaaaaaagatgaaaaaattgttgatgaaatgatgaaaaatcctgaaaaaaaaaacctgttgaatgggagaaagacaatatttgcactactatatgtagatagaaatgcaaatgtttcttcaaaaactaaaagtataaaagtataaaagtaccttcataaaatatttcaaggttgtgtaactgcagcttgttgtggtgatttattccttcccattccacacatgttcgaactgctttaattacctcatcttgaacctgtagccttgcactcctgttagtatgaattttttggaagaggacacacacatacacacacacacacacacacacacacacgcacacagttttagtacctgatttagccagtcaacaaaaaagaacataaaacaagcagaagggttattagaacaggaacgtatgttttagattttgccaaatattttaaggatatttctctttcacttagttatttttagaaatctgtcaggaaattaacacaatttccatcaatgcatctactgagattgtcactgagtgcctcagtttctgcatttgtgttagtattcaatgtgttgatagaaacggatctctttcctgggttttagtgcctcagtttctacacctgtgttaatattcaatgtgttaatacatacagagctctttcctgggtctgagttcttggtcactgctggtgattatcatcatcgccattgtcattattttgtcagaacacctgagcgtgagtcccttggcacatgggctgtctgccattctcaggtgactgggctcgtgaaatgtacactggctattcctgattttcacttgatgggatgggaagaggattcgtggaaacactgatattcttagttggttcaggataagagtcttgatgtgtgaactgtcattagcccatcgcagttgtgtgtgaggctgacctctccattaggcactggactttacatcccaaatctcacttttactttccagagagattgcaaacaattgggaaaatacaataaaacataaaattctgtaaatataattcttcgatatgctgccaaataaaaatttgtaaaattattttttctcatttttaactatgcttttgtagttatcaatgtaatagatgtttattgctttaaatgtctttcttaaaaactgtcctgctttaattttataaaacaaggaaaaaagttactcaaagtgctacaacacaggagaaagaattctttgcttagacctatctatttgcaactattttatataaaattttacttgaatgcttaatatgtgttttttcctgttcttgaaagtacatttaaaacattaaatattgtttataattctaaatgaatgtaaatgttttattgcataataaaacctttgttattaagctatcactgtttttctctcataagatgaacatctgaaactataagataatttgccatggattaatatttttacttaaatacagtcctagataagcaagtactttcaccctcagtcttatgaccctgatgtcagagaagccaatggcccaggatggggaaaatgtgctagctttcttcagcttctagacctgaaatttatggaggtggactcaggaccagctatacctgataaggctcaaatgacacctgtcccaccagagcaggtgtgagtgttcctgagtgactactcagggttcttgaggtcaaggactattttaagggaattttagggagcaagttgactcatcacttaatgaaagaggcaacagggcttctaagaaagacaagcacattataaatggtttttaatcccttttaatattaagtagtataataaagcacatagtataatatagcatatagctatattacatatattagtactaaacatactaatatatattacaatatatattatattagtactaaacatcaagcgacagaacatcaccatcacggaagccctcttgccactcctcccaatcagcacacactccccaccaaaaatattaacattattctaattttttaatgcttacgttgaactttaagtattcagaaaagctgcaaaatttgtacagagtttttatgtagtgctcacccagcttctcctaattttatacagagtttcacttatgtacttgtgtcattcatatttttcttgatccagagcccctggcattcaacatttccattaagtaaatttctagggttgtaccatttggggcaggagtagctgctcacctacatgaagtagttacaaggatcaggatctaacagctttttatacaaattttagacaagcctcctatttgaactgtttagaggtacttgattacttcaacttcaagcttttggagggattcttctagtataattctgcaagcttctgagctgcttctatgaccacattaatattcagcttttttagatctaagaagtccaattctaattatttttttttcagcctccaaaaatttcttgctgttatcttctttcccaaactgttggcctttgtgtatttatgctttaaatataatagttccttcagacaatggtaaaaactcttgtctaaaaaaagaaatctgaaaatttcttgtgttctctgcctttatttttgaatgatactttagctggatttagaattaaggctttgtaggtaacctgaaattatttcatagcacatacaacaactataattaatgaaatatgcgtgtaatttaaaaatagaattaaaacttcataaatttcttaacattttcctttgagacttcctgtttgtcctgtggattatttagaaacatattgtttaatttccaagtagttacagatttttccagttgttttcgtgtaattgacttccaatttgattcagtgttgccagagaaaacattgcacatgatttagaatcttttaaatttgttaaggtttatttaatgatctgtgaaatggtctatcttgctgactattcatgagtctttgaaataaaagtatattctgatgttgaatggaatgtcctcaaagacattaaatctgttatcacaacatcccctgtggacaccctcatgactacattagataccttagcttatttatatgttcctgccttattgtcctttttgtcattatgtagtagctctataaaatatttggaataaaatattgaatgcaaactttatctttcatgtatctatactgttatcccctaaagtagcagggtattatcttgtatcctttggtgatattaataggaatgcatgaaatggagatcattgcataaacaagacctgactgctcccagtatgcactctaatcagtgagaccctgagcacagtatttttgagtgactgaagaagtattaggttggtgaaaaagtaattgcaatttttgccattgcttttaatggcaaaaaccacaataatcaataattatcaaccaggaagtatcattgaaaaatagtaattcatccaagtgacaatattgtgaaatctgcgattgttttaaaaccctgttttatggcagggagaaaagatgatgtagcagtcttcgatgaataatatcaatcagggacattgaatgtggggaacattgcccttgaatattaattttctgtcttccaagaattgtagaatagttcagaggaagtcaaaaacacaagagacattggatacaaaaatgctactaagtgaaagaaaactgagatgtaaatttattttttactttttttattttttttatttttattttttttattgatcattcttgggtgtttctcgcagagggggatttggcagggtcataggacaatagtggaaggaaggtcagcagataaacaagtgaacaaaggtctctggttttcctaggcagaggaccctgcggccttccgcagtgtttgtgtccctgattacttgagattagggattggtgatgactcttaacgagcatgctgccttcaagcatctgtttaacaaagcacatcttgcactgcccttaatccatttaaccctgagtggacacagcacatgtttcagagagcacagggttggggggtaaggtcacagatcaacaggatcccaaggcagaagaatttatcttagtacagaacaaaatgaaaagtctcccatgtctacttctttctacacagacacggcaaccatccgatttctcaatcttttccccacctttcccgcctttctattccacaaaaccgccattgtcatcccggcccgttctcaatgagctgttgggtacacctcccggacggggcggctggccgggcagaggggctcctcacttcccagtaggggcggccgggcagaggcgcccctcacctcccggacggggcggctggccgggcggggggctgacccccccacctccctcccggacggggcggctgccaggcagaggggctcctcacttctcagacgatgggcggccaggcagagacgctcctcacttcccagacggggtggcggccgggcagagacgctcctcacctcccagacggggcggtggggcagaggagctccccatatctcagacgatgggcggccaggcagagacgctcctcacttcccagacggggtggcggccgggcagaggctgcaatctcggcactttgggaggccaaggcaggcggctgggaggtggaggttgtagcgagccgagatcacaccactgcactccagcctgggcaccattgagcactgagtgaacgagactccgtctgcaatcccggcacctccgggaggccgaggctggcggatcactcgcggttaggagctggagaccagcccggccaacacagcgaaaccccgtctccaccaaaaaaatacgaaaaccagtcaggcgtggcggtgcgcccctgcaatcgcaggcactcggcaggctgaggcaggagaatcaggcagggaggttgcagtgagccgagatcgcagcagtacagtccagcttcggctcggcatcagagggagaccgtggaaagagagggagagggagagggagagggagagggagagggagaggggagaggggagaggggagagggagagcgtaaattttaaatgttatatttttgaaagtgactgaagaatggaaaatttggggagcactatgggagatggcttctactcaacagcagtgtgataggtatgtattctgtgtctggggagcactatgggagactgcttctactcaacagtactgtcataggtatgtattctgtgtctagggagcactatgggagactgcttctattcagcagtgtgataggtatgtattctgtgtctggggagcactatgggagactgcttctactcagcagtgtcataggtatgtattctgtgtttggggagaactatgggagactgcttctactcagcagtgtcatagatatgaattctgtgtctggggagcactacgagagactgcttctactcaacagtactgtcataggtatgtattctgcgtctagggagcactatgggagactgcttctactcagcagtgtcataggtatgtattctgtgtctggggagcactacgggagactgcttttactcagcaatgtcataggtatatattctgtgtctggggagtactacgggagactgcttttactcagcaatgtcataggtatatattctgtgtctggggagcactatgggagactgcttctactcagcagtgtcataggtatgtattctgtgtctggggagcactatgggagactgcttctactcagcagtgtcataggtatgtattctgtgtctggggagcactacgggagactacttttactcagcaatgtcataggtatatattctgtgtctggggagcactacgggagactgcttctactcagcagtgtcataggtatgtattctgtgtctggggagcactatgggagactgcttttactcagcaatgtcataggtatatattctgtgtctggggagcactatgcgagactgcttctactcagcagtgtcataggtatgtattctgtgtctggggagcactatgggagactgcttctactcagcagtgtcataggtatgtattctgtgtttggggagcactatgcgagactgcttctactcagcagtgtgataggtatgtattctgtgtctgaggagcactatgggagaatgcttctactcaacagcactgtcataggtatgtattctgtgtctagggagcactatgggagactgcttctactcagcagtgtcataggtatgtattctgtgtctggggagaactatgggagactgcttttactcagcaatgtcataggtatatattctgtgtctggggagcactatgggagactgcttctactcagcagtgtcataggtatgtattctgtgtttggggagcactatgggagactgcttctactcagcagtgtcataggtatgtgttctgtgtttggggagcactacgggagactgcttttactcagcaatgtcataggtatatattctgtgtctggggagcactatgggagactacttctactcagcagtgtcataggtatgcattctgtgactgccatgctctaggcattgtgctataatgtggggagatactgtgaactagagagatgatatccctcctcctatagagctcacaggcctgtggaagagagagacgccaagagcaaagaaaggacaaataaatgggttctactatttcatatgaccagttttatacataaaaggtcagggtattgtaattaaggacagcagtgaaggatgcaggaaccagatgaggatcatttcactcagggataactaaaagaggagagagttttctgctgaggaagtgtgtcagctccaagaaatccagcatggccaggaaaaagcgagggtcatgtgcactggatgtggtcaggtacgtcagctgaactcagtttctctttcatgtttctgtgaccatgaccatgaacttatcgcattgttaagtctgcaagtcacgctgaattaactacacaatgcccgttctgtctccttaaactgtatcacttctttcattacctcagtttccacagcattctagtatatctacttacctcaacttggctcagaaggcaatagggcctgagactgtggcatttggacaagaatgttcaagatgtccacccagcttttgtttttgaaatgatattatgtgttcagtttttcctcatgtaaaaaataataaattcaggtcaatgccattatgtggttttgattacattgattatatttgtggaatatctttttttgctctgtaaatgcagtttatgagcaccataggtaatttaacatatatatgaagcaaaaagaagaaataaagttatctgcaataccatcatcaaatatatttcctataaaaatttattttcaatatatatttttaatatataatatggataatatatagtatcttttttatattctatatatactatagaagtatatatactatatatcatatagaatataccatagattctatatatactatagaatcatgccatatatagctctatatctgcataaataaaattgtgtacagaggctcatgtctttagttactttaagaaatattacatttttggatataatttaaagtttcataacattttgcctttgaaacagaatttataaaacatttttctcttattttaaatgtaggcttattaaaatttttgcttatctaaaacaacactgaaatgaatatctatgtaaagaattcctcgattctctttgtgataggtctttaaataaaaaagtgttcatttctaatttatatatccaagttgcttcctctcaacaatctatcatgacagagggcagaacctggtgacatctttttactttattcacaacagtactgatgatcatttattttttttctttctgtaattcagcagtaagagtgagatcttgttgtagatattctggatatagtttacatttttatcattaatgtcttgtatttgtgttatctgcaaattcttttttagtaaagtgtgcaattaaaaaatatgtctacattattctgatattaataatatctaagtgatggctatatgttactaatctttatcttttgctttgtcatagatccaaaaaaattttccaagtaaaataataatctactctttaattcccaaatatatatatatatatattttttctcttttcaaatcctaatttattttccatagtatttactttgttttttcaactttcattttagattcagggggtacatgtgcaggtttcttacctgggtatagcgtgtgatgctgaggtttgagttatgggtgatcccattacccaagaactgagcatagcacccagtagttagctttctaacctttatctcccccgactcgttccccatctagcagtccctggtttcaattgttgacatctttatatccatgaatacatggtattttgtttgttgtctttgtttatacattagacaaatctttacccatatattttctagttgttttagagtttcattttctacagctgtaatcaattttattttttatatgtaaaaacagtatataacatttattcctaacgtgttattaaaatttcagaatatttaagtaattttttctcaatcactgaatcacagtggcaactttgctgcttgtgttttcaaagagttgtgctaaaaccatggcagggaactacaccttcctttccattgccatgtaatgtccaaaatgaaccaatctgttgatgagaaaacacctctccctctcttgtccaactcttatattttcatcagtttatgacactagaaagcttcagtaatttcattaagtactactatttaataaatatattaatacatagattttagtttgaaatagaccatagttccactaaggctgcctagccctgtttctagttaacacacataaaatgcgcatatgtagaataattaaatagtagggtttatgttaaaacaatatttaaataaatattccactacctctttatgtttcctaatatgaggaattttaaaaattcacttttatgaaaacccataacattctcttagttcattttctataaagaaaatacatttattccttacaattatgtaggctgagaagtccaagggcaagggtccacatgcagcgagggccctcctgccagcacggactccctgcagagcctcaggcagaccagtggggaccctcctgccagcacggactccctgcagagcatcagggggaccagtggggaccctcctgcctgcggggactccctgcagagcctcaggcagatgagtggggaccctcctgccagcagggactccctgcagagcatcagggggaccagtggggaccctcctgcctgcggggactccctgcagagcctcaggcggatgagtggggaccctcctgccagcagggactccctgaagagcctcagcaggaccagtggggaccctcctgccagcacggactccctgcagagcatcagggggaccagtggggaccctcctgcctgcagggactccctgcagagcctcaggtggatgagtggggaccctcctgccagcagggactccctgcagagcatcagggggaccagtggggaccctcctgcctgcggggactccctgcagagcctcaggtggatgagtggggaccctcctgccagcagggactccctgcagagcctaagccggaccagtggggaccctcctgccagcgtggactccctgcagagcctcaggcagaccagtggggaccctcctgccagcggggactccctgcagagcctcaggcagaccagtggggaccctcctgccagcacggactccctgcacagcctcaggcggaccagtggggaccctcctgccagcgcagactccctgcagaacctaaggtggaccagtggggacccttctgccagcggggactccctgcagagcctcaggtggaccagtggggacacttctgccagtgtggattccctgcagagcatgaggtggcacaggacattacatgatgagggagctgagcagtctgatgtgctagccaagatctctcttcttcttataaagttaatctcacttctatgataatccattaatccatgaattaattaattcatttatgagagcagaggcctcacaaccaaatcacctcttaaaggccccacatctgaatactgctacataaaaaattaatttttttagagtgtcattttggttttaatccacaaattatttttcaaaatttctgtgggtatatgttaggtgtatatatttgtggaatacatgagatgttttgatacaggcatgcagtgtgaaataagcccatcatggaggatgcggcatttatcttcttaagcatttatcctttgcattacaaacaatccaattacataggttcagaagtacttgtgtaggtgtcatataggtaaattgcatgtcacaagggattggtgtacagattatttcatcttccaagtaataagcatagtaccctataggtagtttttctatttgtgtatttttaatattaaatcccaatctctagaaacactaatacaaataattctttttaagttatcgacaacttagtcacatacaaaattgtttcacaatgagcaggtctatacaaacctatccaaagttggaggaagctgagatgctgaagatagaggctgataaatacagtttcttaggcagaaacaattaatagggacttatgaacagaagccatgtgtgtgtctcaggcagcagtgagatgagatggcaaattcctgtgccattaaccccaaaacccaggacttatatgccatagggaaggaatgattcagaaggcatgtgtaggacaattgaagtatgataacataaaagttgtttgacctaagggcaggatttataataagtacctgttcttacacgaggagcaataaataaactggaaatcttaaaggccttcccccctggagttaatcagaagccaatagggcagatcaccattcaagatggagttacttgagcctcccatctaagaaagagtagctttagtctccaaaaacttttctttcataaattctctttataaaccttatcatatcttacacagactatttatgacatacttggactttctgttttgtccaaaatttccctcttaaataatgagttgttttattttagaactacatttactatacaagtctctttctcatacaaaattatactttttacccatttttaaaaataaatacatctttggatttgtataatagcctttgaatttgacaaagattattttccttttaataagaacatatttttatgtctttattataatttcttttccataaaaatatttactttggtactctctaaatacagaattatatattaactagaatttttattcttagaaccttaaatttttgtgaaaacctaggaagtagtaaatcttgaattgtctgtcatatatcagtattttatagatgagaaccattttatattattttagaaatatgtttttctgttttttaaattagaaatgatccagacacttaatgagtattatttactttaactttaagattttaaattatatgacaagttcatttataagcatttatgccattaaagctacctaatttattttttaaaacagttttcctaggttacttacaaaaactgacatattagacaaagctagtcatcattaaagttatttttcagctaaccattcttataggctgtgaatatttcaggtgtttacctacataagaaccaaatgttaaatatatgtttatttgatttttttttggccaaccactaaggttttacctattttcaataaatcaacagtattaaatgtcttatttataaaaaattacacaatgatcattaagggatgggttttaaagttttataaccttcatgacaaagtttggtaccttataatacaaacaccgctaaatataaaactatttcaccaataaatccagacaaaaatgtatgctgacaattctgaaggcatttcaaattttattttactaataattataaagccagcttatttattgaagatttacttgtcatgtgaacttgaagagcatttggactttatgagtaatcctttatttttaagcccatttgataccttgcagttacaacatataagaaaatacatgtacatgtaacataaacacaactcaacatagatacacagatacaaagatcccataggttttatttcagaactctagtcacaagacagcaatacagattcaccagcttgcaaaagatggtttaatttaaacaatgggttttatctcaaaaccagtagaaaagcaacagtacatttaaaacagaaaaataaaatagagaaattgagaatttaggagatgctatatttaattctatagttgcaggtcaactttgagctctgaatttacccatcagtttaaaaatgtgccagaacagactataatacataaccagccagagtactagaaaaccaagcatgctctcaaaccttcacatttacacaaacatttgcaagtagagtgccataaaacccccaggggtgccccaaaggaggtcatctccttgtcttttctcaatctttgagaatttgctttgcaagtttttttttttgtttgtttgttttttagtggaggagccagactgtagcgtgggtttcagtgcagtggggctcagaagttgtctctcattcacttatacaaacatcaggtttttcaagcaaatgcacagatgaaccaattgagactaatttttggagaaaaaagcaatggagaaaactctagaatgaacctgtgaatccaaaattagaatctgaaacaagttcccaggaaaagaccagctcagaataaaccaaagtactattaactacataagggatctgtggctcaggagtacttacttaccagttccacctatggagaacctcaaagtcaggaggctttcaataagcctgcagcaggagaatatggtctggagacctggagacagggaacttaaggccaatttatgctaacttcctaaaagagaaaacaccaaggtctgggagcaggacctggacaacttgtagtcaagactttccactggtaacaagcccaaattggtaccttatttccaagttcacatgactccttttggggagaagagtccttagtcttctctgaggtcctgcattgggcaccaaataatgttgatgaagaaaagtgaaactctaaaatatttgaagaggtttattctgagccaaatggcccaggacacagccccagatggtcctgagaatatgtgcccaatgtggttgggttatagcttggtttgatacattttagggagacaaaagttacaatcaaagagataaatcaatacatgagggatatacattggttccagaaagtttagacatcttaaagtcaaggtttacaagtcaaaaatagattcaaagattttctgattggcaactgtttgagttaagctttgtctaaagacttaaaatgtcagtagaaaggaatgcttaagattacatagttgtggaagccaaggtttttgttatagaaagaaatgctcgagttaagataacggggtcctggaagccaacgttcttgttatgtagatgaagtttccatgtagcaggctttagaaagaatagttgacaaatgtctctcttgcaccttagaagatgtcagactctcatttactctctcctggatctggaaaaggcttagcggcattaatcaagtttctctacagatgcaaaatttcccccacaaaagatacctttgcaggaccatttcaaaatttgtcaaataagtatgttccagggtaaagtatttttatttacttcatggtttgctatctgtcatgtggtgctatatgagagtcaggttgaaatttagtatcttattaccacctagaatctgttttgtcagtctcatgatctctgttttaatgttaatgctggtcagtcatttagcattcaatggtaatgctagagacctcaagtgtttagtttaactctttcaaccaactgccagtcaagaattttttaatcaacctatgaaagcttctaagtagcaggcttcagagaggatagatggtaaaaggtgtcagactcttagttaaatgttttctggatcctcacgaggacttagaaagggaagcaaattctatacagaattcagatttcccccagaagaattggctttgcagggccattccaaaacatgtcaaagaaatacattttggggtaaaatattttatttccttcagggcctgttacctgtcatgtgattctacaccagagtcaggttggaatctgctattgttgctacagtctgttttgtcagtcttataatcactgtgttaatgtcaatactggtcagttttgcctaaactccaaagggatggcatacaaggagtcatgtctgacctcccttcccgcatggcctgaactagtttttcagatttctttgagatctccctgggcaagagagtttccaatcagtcaatgacagggcttgggatttattattattattattattattttctgaggttgcaacacaaagcccaagtaggaggtctaattttggatagaggcagaaacactgtctcatggaatgcaagagtaaatacaataaaatgagagagatggaaaatagagtacactcaactatgttgcttattttcagtcttctgatgcctaatccctcattgttttgtagtcacatggttatttcttggttcttttataacatttttcacaactggattgctatgattgtgcagacactgtctactagagtcaaattttgttttgaaatagttcattattttatttaactgcataaactagtttagtctatgatgagttaatagacagatgtgaaaaattttaaactcctctgtcagggttcagaacatgatccttccaaatatggcttcttgatgaaatctaaaagtaaaatcctaagccgcccaatcaactgaatggatcccccttcttggccagtggagctgagagcaatctgaaaaagtaaatttcaggccatgagggaagggggattgggcacaccttgttgcactccctccattgtggaattaacattaaaatagagatcacaggactgacaaaacaataagataccaaattccaacctgactcccatatagcatcacatgacagatagtagacactgaaagaaataaaaatattttaccacaaaatatatttatatgacagatttcgaaatggccctgcaaagctatcttttgtgggggaaattttgcatctgccattagtgcagctaggccttttccagatctaggaaagataaactgtgaggctcacaccttttaaggtccaaaaagagacatttaccatctattctttctgaagccagctacatggaggcttcatatatgtaacaagaatcttagcttccacaaactcccttaccttaactcaaacatttttttctactgacttcaagtctttagtttaactctttcaaccaattgccaatcagaaaaatctttgcatccacgtatgacttataagccttccacttcatgtcctgctttttcaggctggaacaatgtatattttacatgtattgatttatgactttgcctgcaagttctttccctaagttttagggagacagaagttaccctgggcacactttctcaggatcttctgaggcttttccctggccatcgtcactcatattggctcagaataaacctctttaaatattttacagtgttcagctttttcatcagatgcaaacttgacatactaaataagctgaagaaaactgagaaaaccgaagaggtagaaaggtcactttctgattttttctgcccttctcccctgagagctgtccacaaaagaattctcagacctacctgttctgagagaaggtaataagccccttattccagaggggccctgaccaatgcccagagggaaaaaaatgtcacatggggaggccactaagaatctgaacaaacctcactaagtcctcctcctaagtttatttccattatatcatatttttaaatgttctaatcatacttttaaggctcgcatgcctcatgaaactnnnnnnnnnnnnnnnnnnnnnnnnnnnnnnnnnnnnnnnnnnnnnnnnnnnnnnnnnnnnnnnnnnnnnnnnnnnnnnnnnnnnnnnnnnnnnnnnnnnnggaaagttatttgaagtaaaagcatctggcagcatctaataaaaacatagttgcatgcaaacaaaacacaagaaaaggaaaacacagtcacctacacaggctaaaattcacactgaccacaggtgtcttcctgataaattccaaataaaagtgaaaaaatgtctaaactgaagatatacaatgttgcagtaaaaagagagagctctggagccagaatttccttgggtttgaccctttctccaccaccaaattgtgtggccacggatactgaaattacttttgtatccatttcccccatttgctctgtaataatagaaagggcccaagtttcaaagtttacatcattcacacacatcagtttcttagactagtatctagaatgtgctatctgttcagtaaaacttattatcgatatcattagatacattttagttgagagtaatgtgtggctcaaacaggaagacattctgagataaattaggggggataaacagtaagatacagctgaatatttttgtagatgaaacaaaattaagaaaagggaagaaactgtaatattactaacagtaaacgttgaattcaggttaaatatatatatatttaaaaataatgtaaatatgattgccttattgcatagaactcaaaagattcttatcaacaaagacatatatatgtagaaatagatagatacatatatatctatgacatctaatctgtagacacagacatacctatctctgtctatacagaaaacagggtctgaaaatggaatgctaatactatacatgcaaaacaaattctatttaaatagaatgtaaaattaagaagtaccagaaagcagctttcattcatttatgtatttatacattcaagtatttattgtgatccagtattcactagacatttttctaggagcagaagataccattaacaatattccctctttcttggaacatacagggcaaagggctgattataaataaaaacatatacaattatgaagaatctaacattttttctaagtaaatgagccagaaaaaaaaatacattttttttttctggagcctatgactccaacacagaggcaactataagaataagaacaattttgaaaaagattaaccaaatcagttactggtattaaaatgagttaaaagaatgtttgtatgtgtgtacatgtgtgtttgggtgtctattaaaatggtttaaaataatgaaagaaaaaaaggcataacagcacaggaaattaacgcgaagcatatgatgaaatgagatagaaacaactaggttaatcatggctacaacatcattcagagtaaacatccgctttcaaagtgtagatttactcttcaaagaaaacaaaacaaaatgtacaaaatggaaaagaaaactaaaaaaatgcaaaaaggaatgacatagtatatataaactacaatatgaggtgatattataaatggaacaaagagaacaattctgtaatttggattttaaatggaaatgcattatgtgcttaatatattcagttagcttccataggacaatctctttttttttttttactaaaatatattagaattctaaaatcataataataggttcacatctaaatcagagaatttgaaatactttaacgtatgcctaaaacactacttagaccaaaggaagttcaaactttcattaaattaaatatattatgtatggaagcctataggatatagctaaagatgtatccagacaaaattttataacctctaataatgtaattcttatagaaaaaatatgtgatgttaataaagattcaacccaatacattagaaaaatatctgcaaaatacatttaaataagagaaagaccatataaaagacttaaatagatattaatggattttaaaataagcagactgaatatttaaagttgattctttaaaactgaaacaaaatagacctatttctggccatgctaatgatatttgagggcagaaaggatgacacaaaacatcattaaaagtaagaaaaatgatccaactacagatatgagaagagtgataaaatatttatagtatgagaagttattttaacattatattaatatagtttgaaattttaatgaagaagacgattttaaagtatagttttgtatgagtgcatgcatacacataatatgcatatatagttataagtagatataatgcatacacacaaatatagtcaaaattcttaatatgcatatataattataagtagatataatacatacacacatacagttaaaattcttaatattcatatataattataagtagatataatgcatacacacacatataggtggggggagggacagcattaggagatatacccaatgtaaatgacgagttaacgggtgcagcacaccaacatggcacatgtataaatatgtaataaacctgcacgttgtgcacatgtaccctagaacttaaagtatgataaaaataaatcaaaaaaaagaaaataccaaagaagatctctaaatttggaacaatttaaaagttttaatggaattctgctttcccaaaattcctagttcagaaaacatcccataaaaatcttctaaggacagaaaatttaaaaatctttgtacacaaaaaaatggaattaattaatcatttattttataaatatatatagccttcaaaagacagaaaactctcataattataaaccaagttcacatatataaatatttcccaaatgaatattaattattgaactcagaagtatattaataacaacacatcttcaaacctgttcatataaactccctcttttcccattctatcccccttcaaagattcttggttgtttgtgagctaaagatcaagttttgattgtggtttgtatgtccctaagtgacctggatactcagctctctactctgcagcactctgtcaattcctggcacctctctcccagaaaatagcctgactcaggagctctctctgcctggagcacaattctctcttcatctggttactgtagacccaggtctcaggtcacttatacttcttgcaggaatcccctatggttttaataacaatgtcaaatgccccagcatatatgaacaagtagttactcataatatcaacaacatatcaacaaaaatatttctttttctttttcttttcctttttgagacaggaacttgctctgttcctcgggctggagcacagtggcacgatcactgctcattgtagcctcaaccttttgggctcaagcaattgtcctacctcagcctcctgcgtagctgggactataggcacagaccaccatatccagcttatgtttttgtattttttgtagaaacagggtcttgccatgttgtccaggctggtcttgaacttctggcctgaagaaatcttcctgtcttggtctcccaaagtattgggattacagacatgagctaccgcacccagacacaaaaaaaatttctatataataacaataaaaatggtaaaataactggtaatatgctaaacttttggagaacatttataaaactaaataattcagtattaatttaaaaagcaatagaaaattattctagaggaatttgtcaaaatgattataaatttgatctgaaaggacaaacacatatgaattgtctggggaaaaacaatgctaaaaattgactttgacctctgtaggaccagtgtgaaatgtaaaggatgagtaactgaatagaaaaaacaaggctcaacaactaaacggaagagtatctggaaataaacactgctgtctcccgccaaaatacaaaaaaacccacatatgcgcaaatgtttcacacaagtaagatgagaattcggataactgggaaaggtagagtttatatatatgaagaaaacaaaattgcaacttagaggtaaagagtaagactttaaaacgcacactccagatcaagtggctcaaaaacttaagtacaagaaataaatacatttctttatgaaaacttttttatgatgtttgagtctctttaatgaaaaggtatgttgtttgtattctgaaaaaatgctaaagtaatgacaataaattaggatttttattgtgaagaagcggggaacatcacacactgctagtgtaagtacaaattgaaaccatttttttctgtaagcgtctggcatttagcaaacttaaaaaatccatcttttagccattttcatcagtttattctgaggaaataaatagtatgaagtgggaataatatatgaagacattaaataaattattgccattgattgtgaaaataaactagaaacaatcttaatgatcaacattaatgggttgactaaatcaaacattgctcaatttacattatactcattgataatggtgtagcttagttgtcttttcatgtaaagatatacataatatatttttaagtaggaaacatagcactgcctgtttacaaacatatatgtgcatagataaattataatcacgtgtagtcagcctggaaagttttgggttgggataggaaaaaaatgcgcccaaaggcagaaatgaagctcaaggtagagcaatcaggagattttgctgaactgaatggagattgaagaatcaggaatacactttaccagagcatccgtgaatctgattatttattttactcatcacatactatgaactttgtatttcatgcctttccaaataagatggaccacactcggatggttaccagagtttaatgaagacatcttgagtctttctgtgacgcgctctgacaggggcgagccccatgctgcccttgccctcatgacacctcttcaacttgtttctacaactctctttgttgtttttatttgctgcatgcttctgcctcctcaaatataatatgagctctttgagggtagagtcatcctctaaatagtccttatatcaacagccattagcacagccttgtatgtattaggtggtctatacatcaattgattactcctagaacactttatcttttcccatttcaaactcatactaataatttgagagcacaaatgacagaagatttgctttgatatcttctatgatattgcattgtgacaagtggctaactttgaagaccacttaaatgcaaataaaactgatctttggaaaagaaagcaagctaatgacgcagtccagaaggcaataggaatatgtaggccacttggtcccttctaacctcacaggaagtgttatgcccgtgctttcaacatagccagactgacaacatctgaccaaccaaccatcacacgatagcaagaatgttcctgtctttcagatactgtctcttagtgtgtccaaaatgggtcacaaaaagcaatcaataaaataagttcacaaaagagtgactgaatctatcaaaatgctatcagggtagttgaccatttttaaacattttttcaagaaagtgatgtttgttttaaataagtgagtggcacttatgaataagagctcaacatttatatactcatagacataaagatggcaacaacagaaaatagagactgctagaaggaagatagaggggcaaggatcaaaaactaactattgggtatatgctaggtgcctgtatgatgggatcatttacaccccaaacctcaccgtcacaaaatattaccagctaacaaacctgcacatgtaccacctgaatctaaaataaaagttgaaaaaaatttaaaaattaaaaaaattaaatacatacatgagtgggtattttatagatgaaacaacagaaaatgtacagccttcctcaagtgtttccatggttattgatgcccaactggtgactccatttaattgtaaaagttccacttttccctgaaaaatgtatttttaagtgtgctaaatgaagagtttgacagtattcaggaacagttcaacagtaacctatgtttttagttttgacaactaagtttttgtctagtctttcctttgttagttcagttaaaagtatttacctctgtactcctggattatgcttaattcatttccttcaatcaaatcttcttaaagtaaacatgccaattactcatacctccaccaaaattcctaccttccaatcccattcgatttaattattttgatcatcttacctaattccctgtaacttagaagatatcacatttgtgggaactgaacatgcacaaaatatctgaattatcttaaatgagtgaacttccctatttgtttttctcctactcacacacattatctaagagagccaaatggctttcttactgtgagtatggagatataagttgatgatagtggatcacttacaggtataatatatccagagagaggaatattaggtaaagacaaaattgtttacaaacaacttcacaagaggtgagaccttagaaacaagagataaaagggaaccttcttgatcttctttttttctgtcttcatattagtatctttccttgaaaagatgagaggagatccaggttaaaaggcaaaagcttcaaaaaaaaaaagagagtgccagttagaggtatttgaagatgaccacttaactgaaggcatggatgtcatacttcagcactgtgcacacagctccaggaaccaaagagggaagagtttaagtaatctagtatgtgacatcataaacatcctgagatttctcatggagaaaactccttctaataatccagaaggaatatcaactaaactggttctgatgggtactgaaaactgtactcaaaacatgtaagtggcaagcagagaatgtgttccacaacaaatgcctgggctgcctcctctgcagtttgtttgtttgttttgtttttaattaacagcttgagaacagctgtttaatgcatgtttcatcacaaaactctgttgtttgtttccctagagggcaaatgagtaatattggaaaaatacccaaggaagagaagagaagttttttatgtggtcatttaatttctcactttaacaatagtcatgatctaatcttttcatttttctcttgcattaagcagcttcccaataaacatcactcatttactaaatgtcactaagaaaaacttttaattgccaattcagtaaaggtaccaaacaatcttttaagaaaatatatcaggcaggctcttgatgaacaggttagtgtaaaaatccaacttatggaaactattgctacaaaacccttttgaacacatgataagagatgaagttgatgaaaatcactttatactcgatgggtggctctcattctcctgagctcaggcgacctgcctgcctcggcccccgaaactgctggcattataggcgtgagccactgtgaccggcctgnnnnnnnnnnnnnnnnnnnnnnnnnnnnnnnnnnnnnnnnnnnnnnnnnnnnnnnnnnnnnnnnnnnnnnnnnnnnnnnnnnnnnnnnnnnnnnnnnnnnggggcttagaganngggtgaannccnnctcctcggaggtgcgngnctaaaataccctatgnaccgctacgtggccatctgcaacccactgcgctatcctgtcctcatcagctggcgggtctgctggatgatcctggccagctcttggttcggtggggctttggacagttttctcctcacccccattaccatgagtctcccgttctgtgcctctcaccaaatcaatcactttttctgtgaggcacccaccatgctgaggctggcctgtggggacaaaaccacctatgaaacagtgatgtatgtgtgctgcgttgcaatgctgctgatccccttctcggtggtgactgcatcctacaccaggattctcatcacagtgcatcagatgacatcggctgaagggaggaagaaggcctttgccacctgctcttcacacatgatggtggtgacattgttctatggggctgccttgtatacgtatacgcttccccaatcttaccacaccccaatcaaagataaggtcttctctgccttttataccatcctcacacccttattaaaccctctcatctacagtctgaggaacagggatgtgatgggtgccttgaagagagttgtggcaagatgttaggggacatgtggtgtgatgaggaaagaattctgatggtctaaaacctccacatcctgttcaggcatatatggggtcgtatcatggataccacggatgatgctgacaggaactttcaataccagctgtgctaaatggtgtatcaacagtacccccatcaaaaatgggaagttgctgtaacagtcacacacaaataatgccag

SEQ ID NO: 710 - protein, 309 aa, Homo sapiens
MDNLTKVTEFLLMEFSGIWELQVLHAGLFLLIYLAVLVGNLLIIAVITLDQHLHTPMYFFLKNLSVLDLCYISVTVPKSIRNSLTRRSSISYLGCVAQVYFFSAFASAELAFLTVMSYDRYVAICHPLQYRAVMTSGGWRVCWMILASSWFGGALDSFLLTPITMSLPFCASHQINHFFCEAPTMLRLACGDKTTYETVMYVCCVAMLLIPFSVVTASYTRILITVHQMTSAEGRKKAFATCSSHMMVVTLFYGAALYTYTLPQSYHTPIKDKVFSAFYTILTPLLNPLIYSLRNRDVMGALKRVVARC

SEQ ID NO: 711 - DNA, 1337 bp, Homo sapiens
  source
  (1)..(1337)
  CDS (201)..(419)
  CDS (484)..(1137)
tctagtcccacacctgctaccaacagactatgatatggggccaaccatttctgcttttggggcttcagttcctctagtgtaaagtgaggaacattgattagataatgtctcaagttccttttaagtgctcagattttacgaatagaggaagaagcttgaagtaatttatattctatgtttatcgcttgttcctaggaatcatggatcacgtcagtcataactggactcagagttttatccttgctggtttcaccaccactgggaccctacaacctcttgccttcttggggaccctatgcatctatctcctcacacttgcagggaacattctcatcattgtcctggtacagttagattctggactgttcacgcccatgtacttatttatcagtgtcctctcctttgtagaggtgtggtatgtcagcaccacagtgcccatgctgctgcacaccttgctccaagggtgttcacccgtctcatcagctgtatgctttattcagctatgtctttcattccttagggatgactgagtgctacctgctgggtgtcatggcactggatagctaccttatcatctgccacccactccactaccacgcactcatgagcagacaggtacagttacgactagctggggccagttgggtggctggcttctcagctgcacttgtgccagccaccctcactgccactctgcccttctgcttgaaagaggtggcccattacttttgtgacttggcaccactaatgcggttggcatgtgtggacacaagctggcatgctagggcccatggcacagtgattggtgtggccactggttgcaactttgtgctcattttgggactctatggaggtatcctgaatgctgtgctgaagctaccctcagctgccagtagtgccaaggccttctctacctgttcctcccacgtaactgtggtggcactattctatgcttctgccttcacagtatatgtgggctcacctgggagtcgacctgagagcacagacaagcttgttgccttggtttatgcccttattacccctttcctcaatcctatcatctatagccttcgcaacaaggaggtgaagaaggctttaaggagagtcatggctgggcgcggtggctcacgcctgtaatcccagcactctgggaggccgaggcgggtggatcacgaggtcaggagatcgagaccacggtgaaaccccatctctactaaaaatacaaaaaaaattagccaggctcggtggcgggtgcctgtagtcccagctactcgggaggctgaggcaggagaatggcgtgaacccgggaggcggagcttgcagtgagtcgagatcgc

SEQ ID NO: 712 - protein, 290 aa, Homo sapiens
MDHVSHNWTQSFILAGFTTTGTLQPLAFLGTLCIYLLTLAGNILIIVLVQLDSGLFTPMYLFISVLSFVEVWYLYALFSYVFHSLGMTECYLLGVMALDSYLIICHPLHYHALMSRQVQLRLAGASWVAGFSAALVPATLTATLPFCLKEVAHYFCDLAPLMRLACVDTSWHARAHGTVIGVATGCNFVLILGLYGGILNAVLKLPSAASSAKAFSTCSSHVTVVALFYASAFTVYVGSPGSRPESTDKLVALVYALITPFLNPIIYSLRNKEVKKALRRVMAGRGGSRL

SEQ ID NO: 713 - DNA, 2084 bp, Homo sapiens
  source
  (1)..(2084)
  CDS (201)..(897)
  CDS (1796)..(1884)
aaagtttgatgaacgcttgcctgattttagcaacatcatgtcttggaaaaacaagagggaggagaaaagatgagttcagaattcaaaatctgagaacgcatgctgatgatcaattttctgtgaatctacttattttcagggatttcttttggtgctgactcctcttctctccctaattgtctcctgatgatgtatgctccatggagcgggtcaatgagactgtggtgagagaggtcatcttcctcggcttctcatccctggccaggctgcagcagctgctctttgttatcttcctgctcctctacctgttcactctgggcaccaatgcaatcatcatttccaccattgtcctggacagggcccttcatatccccatgtacttcttccttgccatcctctcttgctctgagatttgctacaccttcatcattgtacccaagatgctggttgacctgctgtcccagaagaagaccatttctttcctgggctgtgccatccaaatgttttccttcctcttccttggctgctctcactcctttctgctggcagtcatgggttatgatcgttacatagccatctgtaacccactgcgctactcagtgctaatgggacatggggtgtgtatgggactagtggctgctgcctgtgcctgtggcttcactgttgcacagatcatcacatccttggtatttcacctgcctttttattcctccaatcaactacatcacttcttctgtgacattgctcctgtcctcaagctggcatctcaccataaccactttagtcagattgtcatcttcatgctctgtacattggtcctggctatccccttattgttgatcttggtgtcctatgttcacatcctctctgccatacttcagtttccttccacactgggtaggtgcaaagctttttctacctgtgtatctcacctcattattgtcactgtccactatggctgtgcctcctttatctacttaaggcctcagtccaactactcctcaagccaggatgctctaatatcagtatcctacactattataactccattgttcaacccaatgatttatagcttgagaaataaagagttcaaatcagctctttgtaaaattgtgagaagaacaatttccctgttgtaaaattaatcttgattctggccaggtgcagtttctcacgactgtaatcccagcattttggaaggctgagacaggtggatcacctgaggtcaggacttcaagaccagcctggccaacatagtgaaatcctatctctaccaaaaaatatacaaattaaccggatgctgtggtgggctcctgtaatctcagctactcaggagcctgagacaggagaatcacttgaacccaggaggcagaaggttgcagtgagattgtgtcactgcactccagcctgggcgacagagtaagactctgtctcaaaaaaaaaaaaaaaaaaaaatcttgattctgctctttccaaaccgtaaaccacaagttatacaggaaaaaattcccagaacacaaatgatcaagcaattgagcattatgttcaggaacatagatcatttcccgtcatctccaaatataaaatttagaaaaacacaactgcttgccacactcacatgaattattgcctattgaaggttttttttcaattgattaaaaaataacagatggctattatggggaagcatatgtatgttcagaattttaggctgtagtaaatactgtcacccaatctcagccaggctgaaaactaaccctgcaaaatgtggcacaaccctaactctctgttctagggactcaggaagcttctatctctaggatttttctagatgttttctggacctcagtcttccaaaatcatcagatcacaattgttaaatgagatacttgttaagcgtcattacaatgtttgatgcataagatatatccaaataatgttcaagttagaaaattatgaaaagttatccatttccatgcttctagtgtattaatgaaatacgatcatttctaattttgtatgcagaggcatacatctaaatttggtcagcataccctgaagatattcacaggggaatggattaa

SEQ ID NO: 714 - protein, 261 aa, Homo sapiens
MERVNETVVREVIFLGFSSLARLQQLLFVIFLLLYLFTLGTNAIIISTIVLDRALHIPMYFFLAILSCSEICYTFIIVPKMLVDLLSQKKTISFLGCAIQMFSFLFLGCSHSFLLAVMGYDRYIAICNPLRYSVLMGHGVCMGLVAAACACGFTVAQIITSLVFHLPFYSSNQLHHFFCDIAPVLKLASHHNHFSQIVIFMLCTLVLAIPLLLILVSYVHILSAILQFPSTLGTQEASISRIFLDVFWTSVFQNHQITIVK

SEQ ID NO: 715 - DNA, 1084 bp, Homo sapiens
  source
  (1)..(1084)
  CDS (201)..(884)
tccttcgtttgacccagtttcgagatatttagctcctggtctttgtgctagttttaatattctacttcttcatcctccctggaaattttctcattattttcaccataaggtcagaccctgggctcacagcccccctctatttatttctgggcaacttggccttcctggatgcatcctactccttcattgtggctcccaggatgttggtggacttcctctctgagaagaaggtaatctcctacagaggctgcatcactcagctctttttcttgcacttccttggaggaggggagggattactccttgttgtgatggcctttgactgctacatcaccatctgcctgcctctgcagtattcaactgtcatgaactctagagcctgctatgcaatgatgttggctctgtggcttgggggttttgtccactccattatccaggtggtcctcatcatccgcttgcctttttgtggcccaaaccagctggacaacttcttctgtgatgtccgacaggtcatcaagctggcttgcaccgacatgtttgtggtggagcttctgatggtcttcaatagtggcctgatgacactcatgtgctttctgggacttctggcctcctatgcagtcattctttgtcgcatacgagcgtcttcttctgaggcaaaaaacaaggccatgtccacatgcaccacccatatcattgttatattcttcatgtttggacctggcatcttcatctacacgtgccccttcagggctttcccagccgacaaggtggtttctctcttccacacagtgattcttcctttgttgaatcctgtcatttatacccttcataaccaggaagtgaaagcttccatgaaaaaggtgtttaataaacacatagcctgaaaaagggcaaaaaaaaaaaaaagaataaaaatagactgtagaattttatctgaaattgatttgtttatttccaagtactgcaatcattgaatacctcccatttgtcaggactattctaggaactgaagaaagaaagtattgaggcagataaggtctatctgctctccaagagatacaacctagtaaaaatagaccgccgt

SEQ ID NO: 716 - protein, 227 aa, Homo sapiens
MLVDFLSEKKVISYRGCITQLFFLHFLGGGEGLLLVVMAFDCYITICLPLQYSTVMNSRACYAMMLALWLGGFVHSIIQVVLIIRLPFCGPNQLDNFFCDVRQVIKLACTDMFVVELLMVFNSGLMTLMCFLGLLASYAVILCRIRASSSEAKNKAMSTCTTHIIVIFFMFGPGIFIYTCPFRAFPADKVVSLFHTVILPLLNPVIYTLHNQEVKASMKKVFNKHIA

SEQ ID NO: 717 - DNA, 1337 bp, Homo sapiens
  source
  (1)..(1337)
  CDS (201)..(735)
  CDS (923)..(1137)
aaaaattaaaaaattaaatattgatctcagtgccttttttatcattagcaaaattaatagccctgctcttgctgattccagagcctgttctaagaataaaacaaaatgatgaatatgaaagttatttgataactctacatcaaaaattcaaattttcctgtctcatgttcttttctaaactctgcagatgacatgaacacatggagacaacaaatcactctgccgtgactgaattctttctggtggggctttcccaatatccagagctccagctttttctgttcctgctctgcctcatcatgtacatgataatcctcctgggaaatagcttcctcattatcatcaccatcttggattctcgcctccatacccccatgtatttctttcttggaaacctctcattcttgggcatctgttacacatcatcatccattcctccaatgcttattatatttgtatctgagagaaaatccatctccttcattggctgtgctctgcagatggttgtgtcccttggcttgggctccattgagtgtatcctcctggctgtgatggcctatgaccgctatgtggccatctgcaacccactgaggtactccatcatcatgaacagagtgctgtatgtgcaaatggctgcatggtcctggatcataggctgtctgacctccctattgcgaacagttctgacaatgatgttgcctttctgtgggaataatatcattgatcatcttacctgtgagatcctggctcttcttaaagtcatatgctcagatatctccataaatgtgtttataatgacagtgtcaagtattgttttattggtgattcctcttaatttttatctcctatgtgtttattctctcttccatcttgagaattaattctgctgagggaagaaagaaagccttttttacctgttcagcgcacttgactgtggtcatcttattctatggttcagttcttttcatgcacatgaagcccaaatcaaagttcacaacagcatctgatgaaatcattggattgtcttatgaagtgatcaccccaatgaaccccatcatctacagcctgaggaataaggagataaaagaagctgtgaagaaaatcctcagcagacacgtgcatctatggaaaatatgaaaggccttgaggcatgtgacgttctcaacaagggatcagatcaggtgttttgtattcacagataaagtcacagaatctggtatcaagagagtgtgtatgtttgtaaagacaactttgggattcccattcttctcatcacagaatgctcatgtacaccttctgaataatgtcttgtgtgcagagtttcaagctgtaggtat

SEQ ID NO: 718 - protein, 249 aa, Homo sapiens [sequence omitted]

SEQ ID NO: 719 - DNA, 1192 bp, Homo sapiens
  source
  (1)..(1192)
  CDS (201)..(992)
tggatatgcacaaatacagatgtgtagtccaattccagagctggcagaggtcctgtcacctgtgtcacaggaatacgagtgtcctcctgcatctctcagagcatacgctgttgaactgaagaatttggagcacaatagagacatgtcactcaatcttataatttctcttatgttctcaggtgacagtgaacaactaagccatgggaagatgggtgaaccagtcctacacagatggcttcttcctcttgggcatcttttcccacagccagactgaccttgtcctcttctctgcagttatggtggtcttcacagtggccctctgtgggaatgtcctcctcatcttcctcatctacctggacgctggacttcacacccccatgtacttcttcctcagccagctctccctcatggacctcatgttggtctgtaacattgtgccaaagatggcagccaacttcctgtctggcaggaagtccatctcctttgtgggctgtggcatacaaattggcttttttgtctctcttgtgggatctgaggggctcttgctgggactcatggcttatgaccgctacgtggccgttagccacccacttcactatcccatcctcatgaatcagagggtctgtctccagattactgggagctcctgggcctttgggataatagatggagtgattcagatggtggcagccatgggcttaccttactgtggctcaaggagcgtggatcactttttctgtgaggtacaagctttattgaagctggcctgtgcagacacttccctttttgacaccctcctctttgcttgctgtgtcttcatgcttctccttcccttctccatcatcatggcctcctatgcttgcatctctaggggctgtgctccgaatacgctctgctcaggcctggaaaaaagccctggccacctgctcctcccacctaacagctgtcaccctcttctatggggcagccatgttcatgtacctgaggcctaggcgctaccgggcccctagccatgacaaggtggcctctatcttctacacagtccttactcccatgctgaaccccctcatttacagcttgaggaatggggaggtgatgggggcactgaggaaggggctggaccgctgcaggattggcagccagcactgaaccccagagtctggtgcctgctgtgccccttcttgcctgtgtc

SEQ ID NO: 720 - protein, 263 aa, Homo sapiens [sequence omitted]

SEQ ID NO: 721 - DNA, 1078 bp, Homo sapiens
  source
  (1)..(1078)
  CDS (201)..(878)
cagtttctacttctgttgcgatgagaagccatattaactcttttttttttctctagatttcagaagggaaaagcactcagaagtaaatgttggggaattactctagcgccactgaattttttctcttaggcttccctggctcccaagaagtatgccgtatcctatttgcgaccttcttcctcttgtatgcagtgacagtgatgggaaacgtggtcatcatcatcactgtctgtgttgataaatgtctgcagtcccccatttattttttcctgggccacctctgtgtcctggagatcctgatcacatccaccgctgtcccttttatgctctgggggttgctgcttccaagcacccagatcatgtctttgacagcctgtgctgcacagctatatttatacctttctttgggtaccttggagttggcattaatgggagtgatggctgtggaccgttatgtggctgtgtgtaaccctttgaggtacaacatcattatgaacagcagcaccttcatttgggtgataattgtgtcatgggttttggggtttctttctgaaatctggccagtttatgccacttttcagcttactttctgcaaatcaagtgtgttagatcatttttattgtgaccgaggacaattgctcaaggtatcctgtgaggacactcttttcagagagtttattctttttctaatggctgttttcattatcattggttctttgatccctacgattgtctcctacacctacatcatctccaccaacctcaagattccgtcagcctctggctggaggaaatccttttccacctgtgcctcccacttcacctatgttgtgattggctatggcagctgcttgtttctctacgtgaaacccaagtaaacgcaggcagccgagtataacagggtagtgtcactgctggttttagtggtgaccccttttctgaacccttttatcttcaccctgaggaatgacaaattcatacaggcctttggagatggcatgaaacactgctataaactccttaaaaattaagtctgtcctgagtacagttcaaatcctcatcatggatttgagtaatc

SEQ ID NO: 722 - protein, 225 aa, Homo sapiens
MGNVVIIITVCVDKCLQSPIYFFLGHLCVLEILITSTAVPFMLWGLLLPSTQIMSLTACAAQLYLYLSLGTLELALMGVMAVDRYVAVCNPLRYNIIMNSSTFIWVIIVSWVLGFLSEIWPVYATFQLTFCKSSVLDHFYCDRGQLLKVSCEDTLFREFILFLMAVFIIIGSLIPTIVSYTYIISTNLKIPSASGWRKSFSTCASHFTYVVIGYGSCLFLYVKPK

SEQ ID NO: 723 - DNA, 1172 bp, Homo sapiens
  source
  (1)..(1172)
  CDS (201)..(474)
  CDS (551)..(972)
  modified_base (104)..(104): a, t, c, g, unknown or other
ctctgtaggcacgtgggcaagcatcctatggaaccacagttcaccacccagggatcggtgtttgtcctgttagggtagtcacagacccaagagctccagaaaantcctgttcattctgttcctgttagtctatgttaccaccattgtgggaaacctccttatcatggtcacagtgacttttgactgccggctccacacccatgtattttctgctccgaaatctagctctcatagacgtctgctattccacagtcacctctccaaagatgctggtggacttcctccatgagaccaagacgatctcctaccagggctgcatggcccagatcttcttcttccaccttttgggaggtgggactgtcttttttctctcagtcatggcctatgaccgctacatagccatctcccagcccctccggtatgtcaccatcatgaacactcaattgtgtgtgggcctggtagtagccgcctggcgtggggggctttgtccactccattgtccaactggctctcacacttccactgacattctgtggccccaatatcctagataacttctactgtgatgttccccaagtactgagacttgcctgcactgatacctccctcctggagttcctcatgatctccaacagtgggctgctagttatcatctggttcctcctcagtctgatctcttatactgtcatcctggtgatgctgaggtcccactcgggaaaggcaaggaggaaggcagcttccacttgcaccacccacatcatcgtggtgtccatgatcttcattccatgtatctatatctatacctggcccgtcaccccattcatcatggacaaggctgtgtccatcagctacacagtcatgacccccatgctcaaccccatgatctacaccctgagaaaccaggacatgaaagcagccatgaggagattaggcaagtgcctagtaatttgcagggagttaaactttaagtaagttgactttaaatgacaaattgctctggatttttattttcccacatgaaaaatggaggaaagtctttataaagcataacaaatcagattacacttatatttcttgaggacctagtgctgtgtcaagtactgtgttaagcacttccacgctttttttcttttttttttttttgagacaagagtttcgctcttgttgtccac

SEQ ID NO: 724 - protein, 231 aa, Homo sapiens [sequence omitted]

SEQ ID NO: 725 - DNA, 1327 bp, Homo sapiens
  source
  (1)..(1327)
  CDS (201)..(1127)
  modified_base (451)..(550): a, t, c, g, unknown or other
caggttgcagctcacatgttgtgataatattatgttgattttttgtttttaatatgtgaggaacagaataactgtatactatttattcatagtgacattgcaatattgattttagtacatattattatcttcataatcacaatttcctccccattttcttagttctcataattttagccacagcccagttggctggaccaatggatggagagaatcactcagtggtatctgagtttttgtttctgggactcactcattcatgggagatccagctcctcctcctagtgttttcctctgtgctctatgtggcaagcattactggaaacatcctcattgtgttttctgtgaccactgaccctcacttacactcccccatgtactttctactggccagtctctccttcattgacttaggagcctgctctgtcacttctcccaagatgatttatgnnnnnnnnnnnnnnnnnnnnnnnnnnnnnnnnnnnnnnnnnnnnnnnnnnnnnnnnnnnnnnnnnnnnnnnnnnnnnnnnnnnnnnnnnnnnnnnnnnnnacagttatgtgcgcctattaagccccgccactatctgaccattatgagcccaagaatgtgcctttcatttctggctgttgcctggacccttggtgtcagtcactccctgttccaactggcatttcttgttaatttacccttctgtggccctaatgtgttggacagcttctactgtgaccttcctcggcttctcagactagcctgtaccgacacctacagattgcagttcatggtcactgttaacagtgggtttatctgtgtgggtactttcttcatacttctaatctcctacatcttcatcctgtttactgtttggaaacattcctcaggtggttcatccaaggccctttccactctttcagctcacagcacagcggtccttttgttctttggtccacccatgtttgtgtatacatggccacaccctaattcacagatggacaagtttctggctatttttgatgcagttctcactccttttctgaatccagttgtctatacattcaggaataaggagatgaaggcagcaataaagagagtatgcaaacagctagtgatttacaagaagatctcataaatgatacaataagcccttctcgttaaacatgatatggctttatgtttctttctttgatattttagattcaggaactatgagacattatgtattgatttgaatgttattagacctgtaacataattcttatctgatgaatatatgatgaatatattccttgttcaaaatgagtcataaattcaacacatctctacatctat

SEQ ID NO: 726 - protein, 308 aa, Homo sapiens
  MOD_RES (84)..(117): Variable amino acid
MDGENHSVVSEFLFLGLTHSWEIQLLLLVFSSVLYVASITGNILIVFSVTTDPHLHSPMYFLLASLSFIDLGACSVTSPKMIYXXXXXXXXXXXXXXXXXXXXXXXXXXXXXXXXXXQLCAPIKPRHYLTIMSPRMCLSFLAVAWTLGVSHSLFQLAFLVNLPFCGPNVLDSFYCDLPRLLRLACTDTYRLQFMVTVNSGFICVGTFFILLISYIFILFTVWKHSSGGSSKALSTLSAHSTAVLLFFGPPMFVYTWPHPNSQMDKFLAIFDAVLTPFLNPVVYTFRNKEMKAAIKRVCKQLVIYKKIS

SEQ ID NO: 727 - DNA, 1075 bp, Homo sapiens
  source
  (1)..(1075)
  CDS (201)..(875)
gactgactctaaaataggcatttccttattatctgatttttttttacatggatctctctcttgcctttcataagaaggcaggttgttccttgttaaaaacatagccaaagcactcatcagcaaaaagcttgagaacttgacattggtgtttagactttggtgtcttgggtaccttttcaaggttggatgttttcacagccatgaggaatttctcggtggtgtccgaattcatcctgctgggcatccctcacacggagggtctggagactattctgttggtcctgtttttgtccttctacatcttcacccttatggggaacctgctcatcttgctggctattgtctcctctgctcggcttcacacgcccatgtacttcttcctgtgcaagctgtctgtttttgacctatttttcccttctgtgagttcccctaagatgctgtgctatctttcagggaacagccgagccatctcctatgcaggctgtgcatcccagctcttcttctaccatttcctgggctgcactgagtgtttcctgtacacggtgatggcctacgaccgctttgttgccatttgtcaccctctacgctacaccataatcatgagccacagagcatgtatcatcctagccatggggacctcattctttggctgcattcaggccacctttctgaccactctcaccttccaattgccttactgtgtccccaatgaggtggactattatttctgtgatatcccagtcatgctgaagctggcttgtgcagatacctcagccctggagatggtggggttcatcagtgtgggcctcatgcccctcagctgtttccttctcatcctcacctcctacagtggcatcgtcttctccatcttgtagatctgctctgccgagggccgacgccgtgccttctccacctgcagcgcccacctcaccgccatcctgcttttttacatgccagtggtcctcatttacctgaggcctacccacagcctgtggttggatgcaactgttcaaattctgaataacctggtcacccccatgctgaaccccttaatctacagtctcaggaataagga

SEQ ID NO: 728 - protein, 224 aa, Homo sapiens
MRNFSVVSEFILLGIPHTEGLETILLVLFLSFYIFTLMGNLLILLAIVSSARLHTPMYFFLCKLSVFDLFFPSVSSPKMLCYLSGNSRAISYAGCASQLFFYHFLGCTECFLYTVMAYDRFVAICHPLRYTIIMSHRACIILAMGTSFFGCIQATFLTTLTFQLPYCVPNEVDYYFCDIPVMLKLACADTSALEMVGFISVGLMPLSCFLLILTSYSGIVFSIL

SEQ ID NO: 729 - DNA, 1363 bp, Homo sapiens
  source
  (1)..(1363)
  CDS (201)..(1163)
agctagaattgcgaccttaattatccatccaaacccccctaaccaaaagttataaacctgtgatcctcccagccctgcactactcctacacgtatgccatggatgggtttgtgccactgtgagacccccaaaatctctccccttatcttccctgtcaggagtcatgcccccatgagccctcaagttgtgcccaccacagaatggcagaaactctacaactcaattccaccttcctacacccaaacttcttcatactgactggctttccagggctaggaagtgcccagacttggctgacactggtctttgggcccatttatctgctggccctgctgggcaatggagcactgccggcagtggtgtggatagactccacactgcaccagcccatgtttctactgttggccatcctggcagccacagacctgggcttagccacatctatagccccagggttgctggctgtgctgtggcttgggccccgatctgtgccatatgctgtgtgcctggtccagatgttctttgtacatgcactgactgccatggaatcaggtgtgcttttggccatggcctgtgatcgtgctgcggcaatagggcgtccactgcactaccctgtcctggtcaccaaagcctgtgtgggttatgcagccttggccctggcactgaaagctgtggctattgttgtacctttcccactgctggtggcaaagtttgagcacttccaagccaagaccataggccatacctattgtgcacacatggcagtggtagaactggtggtgggtaacacacaggccaccaacttatatggtctggcactttcactggccatctcaggtatggatattctgggtatcactggctcctatggactcattgcccatgctgtgctgcagctacctacccgggaggcccatgccaaggcctttggtacatgtagttctcacatctgtgtcattctggccttctacatacctggtctcttctcctacctcacacaccgctttggtcatcacactgtcccaaagcctgtgcacatccttctctccaacatctacttgctgctgccacctgccctcaaccccctcatctatggggcccgcaccaagcagatcagagaccgactcctggaaaccttcacattcagaaaaagcccgttgtaatgtccagtggtaacaatggagcctaagagtggaggtgaggggacaatcggaggggagtctgggggtgtggatcatgttattttcatcccactgcatatgactgttatcatcatttaacaggtacttgctgtggagtccctatgtgcaacactggcatctgtagactttgacttaaacatgtattctgcttgggaggaggc

SEQ ID NO: 730 - protein, 320 aa, Homo sapiens
MAETLQLNSTFLHPNFFILTGFPGLGSAQTWLTLVFGPIYLLALLGNGALPAVVWIDSTLHQPMFLLLAILAATDLGLATSIAPGLLAVLWLGPRSVPYAVCLVQMFFVHALTAMESGVLLAMACDRAAAIGRPLHYPVLVTKACVGYAALALALKAVAIVVPFPLLVAKFEHFQAKTIGHTYCAHMAVVELVVGNTQATNLYGLALSLAISGMDILGITGSYGLIAHAVLQLPTREAHAKAFGTCSSHICVILAFYIPGLFSYLTHRFGHHTVPKPVHILLSNIYLLLPPALNPLIYGARTKQIRDRLLETFTFRKSPL

SEQ ID NO: 731 - DNA, 1372 bp, Homo sapiens
  source
  (1)..(1372)
  CDS (201)..(1172)
ggaagcactatgggccagaagccattcctataccaagtgaacattctctgggagtacttgctgctggagagtccagcaatttagaaatccatgctgtcttttatgatatttatacatattcgggagtgctttctgtttctatcactttcagtagactcatcagcttctaagtcattatagagaggaccataaagtgcatcatgagtcacaccaatgttaccatcttccatcctgcagtttttgtccttcctggcatccctgggttggaggcttatcacatttggctgtcaatacctctttgcctcatttacatcactgcagtcctgggaaacagcatcctgatagtggttattgtcatggaacgtaaccttcatgtgcccatgtatttcttcctctcaatgctggccgtcatggacatcctgctgtctaccaccactgtgcccaaggccctagccatcttttggcttcaagcacataacattgcttttgatgcctgtgtcacccaaggcttctttgtccatatgatgtttgtgggggagtcagctatcctgttagccatggcctttgatcgctttgtggccatttgtgccccactgagatatacaacagtgctaacatggcctgttgtggggaggattgctctggccgtcatcacccgaagcttctgcatcatcttcccagtcatattcttgctgaagcggctgcccttctgcctaaccaacattgttcctcactcctactgtgagcatattggagtggctcgtttagcctgtgctgacatcactgttaacatttggtatggcttctcagtgcccattgtcatggtcatcttggatgttatcctcatcgctgtgtcttactcactgatcctccgagcagtgtttcgtttgccctcccaggatgctcggcacaaggccctcagcacttgtggctcccacctctgtgtcatccttatgttttatgttccatccttctttaccttattgacccatcattttgggcgtaatattcctcaacatgtccatatcttgctggccaatctttatgtggcagtgccaccaatgctgaaccccattgtctatggtgtgaagactaagcagatacgtgagggtgtagcccaccggttctttgacatcaagacttggtgctgtacctcccctctgggctcatgaatcttcatgtccagctccttcaaggaagctagatgtgaaatacagagatttcctggactgagaaggcttttcttcctcttctttctatttcatcttccgcccccaacttttctttcttttctcataattcttcctccttctcttgtttgttttctctaacctctttacatattcctccctacaacccagaaataataact

SEQ ID NO: 732 - protein, 323 aa, Homo sapiens
MSHTNVTIFHPAVFVLPGIPGLEAYHIWLSIPLCLIYITAVLGNSILIVVIVMERNLHVPMYFFLSMLAVMDILLSTTTVPKALAIFWLQAHNIAFDACVTQGFFVHMMFVGESAILLAMAFDRFVAICAPLRYTTVLTWPVVGRIALAVITRSFCIIFPVIFLLKRLPFCLTNIVPHSYCEHIGVARLACADITVNIWYGFSVPIVMVILDVILIAVSYSLILRAVFRLPSQDARHKALSTCGSHLCVILMFYVPSFFTLLTHHFGRNIPQHVHILLANLYVAVPPMLNPIVYGVKTKQIREGVAHRFFDIKTWCCTSPLGS

SEQ ID NO: 733 - DNA, 1213 bp, Homo sapiens
  source
  (1)..(1213)
  CDS (201)..(1013)
atgccaatgagaatggggaggtatgtatggcttctagatattgctgagatgtgatcagaaacctttgtttatatttgtatctgcaattataatgtgagaagtggaagaataacattatatactctcagtcaaggcattagtgattgattccatgttcaacttttagtggaacttacaactggctctgctgactaactctcatgttctttagtcttcatagagagactccaaaagaaggcatgtttggtgctaatctcaccaccttccatcccactctattcattctccttggcatcccaggactggagcaataccacatctggctttccattcctttctaccttatgtacatcactgcagtcttgggaaatggagccctcatcctagttgtcctcagtgaacacaccctccatgtcttcctatccatgctggctggcactgatatcctgctatccaccaccactgtgcctaaggccttggcgatcttctgggtccacgctggggagatagcctttgatgcctgcattactcagatgtttttcattcatgttgcctttgtggctgagtcaggaatcctgctggccatggcatttgacagttatgtagccatttgtactcccttgagatacactaccatcttaacttctatggtaaatggaaaaatgaccctgacaatctggggacaaagcattgggacaatttttcctgtcatattcctgctgaagaggctgccatactgtcagaccaatatcatcccccactcatactgtgagcacattggggtggcccaattggcctgtgctgacataactgtcaatatctggtatggcttttcagtgccaatggcatcggttttggtagatgttgcattcattggtttttcctacactttgatcctccaggctgtgtttagacttccttcccaggagtcccagcacaaagctcttaacacctgtggttctacattggagttgttctcctcttcttcatcccatcattttttactttcctgacccaccgctttggcaagaatatcccccatcatgtccacatacttctggcaaatctctacttgcttgttcccccatgcttaaccccattatctacggagagaagaccaagcaaatcagggacagtatggctcatatgttatctgtggtggggaagtcttgagacatcatggtctcttcacagttttctcttaccagtagga

SEQ ID NO: 734 - protein, 270 aa, Homo sapiens
MFFSLHRETPKEGMFGANLTTFHPTLFILLGIPGLEQYHIWLSIPFYLMYITAVLGNGALILVVLSEHTLHVFLSMLAGTDILLSTTTVPKALAIFWVHAGEIAFDACITQMFFIHVAFVAESGILLAMAFDSYVAICTPLRYTTILTSMVNGKMTLTIWGQSIGTIFPVIFLLKRLPYCQTNIIPHSYCEHIGVAQLACADITVNIWYGFSVPMASVLVDVAFIGFSYTLILQAVFRLPSQESQHKALNTCGSTLELFSSSSSHHFLLS

SEQ ID NO: 735 - DNA, 1267 bp, Homo sapiens
  source
  (1)..(1267)
  CDS (201)..(1067)
attttggcctgtctgttcttatctgaactgtttccaagtgtctcaagagtgtagagaatgcattatgttaaaaatgactgaggattgtgggtgagccttatttttgtacagaaattttgaccctcagctgagctaaccacagtcttattctgtttccacttaatccacaggcagatgctgagaacaaaacatctcatgatatggatattggcctgagtatagccaatagctcagggtttcaactgtctgagttcattctgatagggttcccaggcattcatgagtggcagcactggctctccctgcccttagctcttggtgccaatctcctcatcataatcaccattcaacatgagaccatgctacatgaacccatgtaccatttgctgggcatattagcagtggtggacattggcctggccaccaccatcatgcccaagatcctggccatcttctggtttgatgccaaggccatcagcctccctgagtgttttgctcagatctatgccatccactctttcatgtgcatggagtcaggcatcttcctctgcatggcagtggatagatatatggccatttgttatccccttcagtacacttccatagttactgaagcttttgtcatcaaagccacactgtcagtagtgctcaggaatggcctgttgaccatcccagtgccagtattggctgcccagcgacactactgctccaggaatgagattgatcagtgcctctgctctaacttgggggtcacaagtctggcctgtgatgacaccactattaacaggttttaccagctggccttggtctgggttgtggttgggagtgacatgggtctggtctttgcttcctattctttgattattcactcagtgctgaagctgaactctgctaaagcaacatctaaggccctgaatacctgcagctctcaccttatcctcattctctttttctacacagctattattgtagtatctgtcaccacctggcaggaagaagggctccccgcatccctgttctcctcaatgtgctgcatattgtcatcccctcagcccttaaccccatagtatatgcccttaggacctaggagctgagagcgggcttccagaagctgcttggtttgggcgagtatgtgtccaggaagtgagctaactttaaatagcagaatattatatgcaatgctgaagaaagagcacagtctttggagtccaacacaccttggttaaaattccatctctcccaattgctaggaagattgattcacatt

SEQ ID NO: 736 - protein, 288 aa, Homo sapiens
MDIGLSIANSSGFQLSEFILIGFPGIHEWQHWLSLPLALGANLLIIITIQHETMLHEPMYHLLGILAVVDIGLATTIMPKILAIFWFDAKAISLPECFAQIYAIHSFMCMESGIFLCMAVDRYMAICYPLQYTSIVTEAFVIKATLSVVLRNGLLTIPVPVLAAQRHYCSRNEIDQCLCSNLGVTSLACDDTTINRFYQLALVWVVVGSDMGLVFASYSLIIHSVLKLNSAKATSKALNTCSSHLILILFFYTAIIVVSVTTWQEEGLPASLFSSMCCILSSPQPLTP

SEQ ID NO: 737 - DNA, 1360 bp, Homo sapiens
  source
  (1)..(1360)
  CDS (201)..(1160)
tttgtattctccgcagagatgagattttgccatgttagccaggtcagtctcgagctcctgacctcaaattatctccctgtctcagcctcccaaagtgctgggattacaggcatgaaccacgatgctcagccccttagctgaacttttaaacagagatttcttctatttcagacagacactgagactgaggcacccattccatggatacctccaccagtgttacctatgactccagcctccagatttcccagttcatcctgatgggattaccaggcattcatgagtggcagcactggctctccctgcccctgactctgctctacctcttagctcttggtgccaacctcctcatcataatcaccattcaacatgagaccgtgctacatgaacccatgtaccatttgctgggcatattagcagtggtggacattggcctggccaccaccatcatgcccaagatcctggccatcttctggtttgatgccaaggccattagcctccccatgtgttttgctcagatctatgccatccactgcttcttctgcatagagtcaggcatctttctctgcatggcagtagacagatacatagccatctgtcgccctcttcagtacccctccatagtcactaaagcttttgtcttcaaagccacagggttcatcatgctcaggaatggcctgttgaccatcccagtgcctatactggctgcccagagacactactgttccaggaatgaaatcgagcactgcctctgctctaacttgggggttatcagcctggcttgtgatgacatcactgtgaacaaattttaccaactgatgctagcatgggtcttggttgggagtgatatggctctggtattttcttcctatgctgtaatccttcactctgtgctgaggctgaactcagcagaagcaatgtccaaggctctgagcacttgtagctcccacctcatcctcatcctcttccacacaggtatcattgtgctgtctgtcacacaccttgcagagaaaaagattccccttattcctgtgttccttaatgtgctgcacaatgtcatcccccctgcactcaaccccctggcctgtgcactcaggatgcacaaactcagactgggctttcagagactgcttggactgggtcaggacgtgtccaagtaactccagctttaggaatccagtaagatgttaggaaatgacagaggttttagttctcaatagatcagggttataatctgcacttaccacactccctaggaaaaaaatggccaataaaatcatgaaaactgtcagcctcactaatcaaaatatgtatattaaaattacaagaaaatttcctattacctggaaaataagtaaga

SEQ ID NO: 738 - protein, 319 aa, Homo sapiens
MDTSTSVTYDSSLQISQFILMGLPGIHEWQHWLSLPLTLLYLLALGANLLIIITIQHETVLHEPMYHLLGILAVVDIGLATTIMPKILAIFWFDAKAISLPMCFAQIYAIHCFFCIESGIFLCMAVDRYIAICRPLQYPSIVTKAFVFKATGFIMLRNGLLTIPVPILAAQRHYCSRNEIEHCLCSNLGVISLACDDITVNKFYQLMLAWVLVGSDMALVFSSYAVILHSVLRLNSAEAMSKALSTCSSHLILILFHTGIIVLSVTHLAEKKIPLIPVFLNVLHNVIPPALNPLACALRMHKLRLGFQRLLGLGQDVSK

SEQ ID NO: 739 - DNA, 1333 bp, Homo sapiens
  source
  (1)..(1333)
  CDS (201)..(1133)
cctatgaagtggtcattaaaatttggaagaaagtgttgaagtggcttattaagaaaccgccaccagaatgtatccaataagaaatatttaattttgcataaaatattccataacatcacatagcacagcataaattaattccttttttttttgcaggtagaccatttcacacttgccccttcacctcactcacgaaaaccatgcaactgaataataatgtgactgagttcattctgcttggattgacacaggatcctttttggaagaaaatagtgtttgttatttttttgcgtctctacttgggaacactgttgggtaatttgctaatcattattagtgtcaaggccagccaggcacttaagaacccaatgttcttcttccttttctacttatctttatctgatacttgcctctctacttccatagcccctagaatgattgtggatgcccttttgaagaagacaactatctccttcagcgagtgcatgatccaagtcttttcatcccatgtctttggctgcctggagatcttcatcctcatcctcacggctgttgaccgctatgtggacatctgtaagcccctgcactacatgaccatcataagccagtgggtctgtggtgttttgatggctgtggcctgggtgggatcctgtgtgcattctttagttcagatttttcttgccctgagtttgccattctgtggccccaatgtgatcaatcactgtttctgtgacttgcagcccttgttgaaacaagcctgttcagaaacctatgtggttaacctactcctggtttccaatagtggggccatttgtgcagtgagttatgtcatgctaatattctcctatgtcatcttcttgcattctctgagaaaccacagtgctgaagtgataaagaaagcactttccacatgtgtctcccacatcattgtggtcatcttgttctttggaccttgcatatttatgtacacatgccctgcaaccgtattccccatggataagatgatagctgtattttatacagttggaacatcttttctcaaccctgtgatttacacgctgaagaatacagaagtgaaaagtgccatgaggaagctttggagcaagaaattgatcacagatgacaaaagataaatgaaggtttcaaatccttctttatagtttggagtgacctagaagaaatcaatgagaatattatatttttattgttgatttaatgtaatcctgccttggtacatgaggattagttcctttgggaaaagagacagtgtaaacaaataacaatggttaatgttgagtcagttttatgtggcagaaaagacagcatgcaatac

SEQ ID NO: 740 - protein, 310 aa, Homo sapiens
MQLNNNVTEFILLGLTQDPFWKKIVFVIFLRLYLGTLLGNLLIIISVKASQALKNPMFFFLFYLSLSDTCLSTSIAPRMIVDALLKKTTISFSECMIQVFSSHVFGCLEIFILILTAVDRYVDICKPLHYMTIISQWVCGVLMAVAWVGSCVHSLVQIFLALSLPFCGPNVINHCFCDLQPLLKQACSETYVVNLLLVSNSGAICAVSYVMLIFSYVIFLHSLRNHSAEVIKKALSTCVSHIIVVILFFGPCIFMYTCPATVFPMDKMIAVFYTVGTSFLNPVIYTLKNTEVKSAMRKLWSKKLITDDKR

SEQ ID NO: 741 - DNA, 1336 bp, Homo sapiens
  source
  (1)..(1336)
  CDS (201)..(1136)
gtgatcttatcttgaggtaagatgatcaaaatagatgcatttcaatttcttcaagtatgcatgccaatcagcattttttcctcttttgatctactgtgattttccgttggttctgcgttagaaataaaataaatacagtcctttttatgttttctttttttcaggtaatttaattgtctcctaagaacttgacccattccatggaaaaaataaacaacgtaactgaattcattttctggggtctttctcagagcccagagattgagaaagtttgttttgtggtgttttctttcttctacataatcattcttctgggaaatctcctcatcatgctgacagtttgcctgagcaacctgtttaagtcacccatgtatttctttctcagcttcttgtcttttgtggacatttgttactcttcagtcacagctcccaagatgattgttgacctgttagcaaaggacaaaaccatctcctatgtggggtgcatgttgcaactgcttggagtacatttctttggttgcactgagatcttcatccttactgtaatggcctatgatcgttatgtggctatctgtaaacccctacattatatgaccatcatgaaccgggagacatgcaataaaatgttattagggacgtgggtaggtgggttcttacactccattatccaagtggctctggtagtccaactacccttttgtggacccaatgagatagatcactacttttgtgatgttcaccctgtgttgaaacttgcctgcacagaaacatacattgttggtgttgttgtgacagccaacagtggtaccattgctctggggagttttgttatcttgctaatctcctacagcatcatcctagtttccctgagaaagcagtcagcagaaggcaggcgcaaagccctctccacctgtggctcccacattgccatggtcgttatctttttcggcccctgtacttttatgtacatgcgccctgatacgaccttttcagaggataagatggtggctgtattttacaccattatcactcccatgttaaatcctctgatttatacactgagaaatgcagaagtaaagaatgcaatgaagaaactgtggggcagaaatgttttcttggaggctaaagggaaatagttggacttaataatttaagctagatgaccttaaaatttctcagccttggttaactcatctgtgcaatcaagacaataacaacctcatgggatttggagtggaaaaatgagacaataacacattcaaaagagtaaggtattatttttcattattatagcatttttatactatttcataattagataacttcctgaaatatc

SEQ ID NO: 742 - protein, 311 aa, Homo sapiens
MEKINNVTEFIFWGLSQSPEIEKVCFVVFSFFYIIILLGNLLIMLTVCLSNLFKSPMYFFLSFLSFVDICYSSVTAPKMIVDLLAKDKTISYVGCMLQLLGVHFFGCTEIFILTVMAYDRYVAICKPLHYMTIMNRETCNKMLLGTWVGGFLHSIIQVALVVQLPFCGPNEIDHYFCDVHPVLKLACTETYIVGVVVTANSGTIALGSFVILLISYSIILVSLRKQSAEGRRKALSTCGSHIAMVVIFFGPCTFMYMRPDTTFSEDKMVAVFYTIITPMLNPLIYTLRNAEVKNAMKKLWGRNVFLEAKGK

SEQ ID NO: 743 - DNA, 1162 bp, Homo sapiens
  source
  (1)..(1162)
  CDS (201)..(962)
gtggcttttatgcattctttctgcactggttcatggaaaataggaatattgtcactgtctttattctcctgggactttctcaaaacaagaacattgaagttttttggtttgtattatttgtattttgctacattgctatttggatggaaaacttcatcataatgatttctatcatgtacatttagctaattgaccaacccatgtatttcttccttaattacctcgcactctcagatctttgctacatatccactgtggcccccaagctaatgattgacctactaacagaaaggaagatcgtttcctataataactgcatgatacagctatttatcactcacttccttggagacattgagatcttcatactcaaagcaatggcctatgaccactacatagccatctgcaagcacctgcactacaccatcatcacgaccaagcaaagctgtaacaccatcatcatagcttgttgtactgggggatttatacactctgccagtcagtttcttcttaccatcttcttaccgttctgtggtcttaatgagatagatcagtacttctgctatgtgtatcctctgctgaagttggctcgcattgatatatacagaattggtttcttggtaattgttaattcaggcctgatttctttgttggcttttgtgattttgatggtgtcttattatttgatattatccaccatcagggtttactctgctgagagtcataccaaagctctttcaacctgtagctctcacataatagttgtggtcctattctttgtgcctgccctcttcatttacatcagaccagccataacttttccagaagataaagtgtttgttctcttctgtgccatcattgctcccatgttcagtcttcttatctacatgctgagaaaggtggagatgaagaacgctgtaaggaaaatgtggtgtcatcaattgcttctggcaaggaagtaacttgtatgaaaggcattttagaatttcattttaatgcctaaatatcagccttagaattaatatggagtaatacaaaagcatatatggtgcatgcaagagccagctacagataaaagctcagtatctccagcacttgctcagacctcttctgcttgggcaatttttattattttattttaatgcttattcttcctttattc

SEQ ID NO: 744 - protein, 253 aa, Homo sapiens
MYFFLNYLALSDLCYISTVAPKLMIDLLTERKIVSYNNCMIQLFITHFLGDIEIFILKAMAYDHYIAICKHLHYTIITTKQSCNTIIIACCTGGFIHSASQFLLTIFLPFCGLNEIDQYFCYVYPLLKLARIDIYRIGFLVIVNSGLISLLAFVILMVSYYLILSTIRVYSAESHTKALSTCSSHIIVVVLFFVPALFIYIRPAITFPEDKVFVLFCAIIAPMFSLLIYMLRKVEMKNAVRKMWCHQLLLARK

SEQ ID NO: 745 - DNA, 1354 bp, Homo sapiens
  source
  (1)..(1354)
  CDS (201)..(1154)
ttatgttagattatgtgagattgcatttagaatatgattagaatttgcataaggaatggatttagagtttgagttagagaacagtacatcaggatagagtcaggtgttaggtattgggatgcttatggatctgacagtggcttatctttgcattccagcctctacctgcctggtgctggtcacagttcagcttcttcatgatggtggatcccaatggcaatgaatccagtgctacatacttcatcctaataggcctccctggtttagaagaggctcagttctggttggccttcccattgtgctccctctaccttattgctgtgctaggtaacttgacaatcatctacattgtgcggactgagcacagcctgcatgagcccatgtatatatttctttgcatgctttcaggcattgacatcctcatctccacctcatccatgcccaaaatgctggccatcttctggttcaattccactaccatccagtttgatgcttgtctgctacagatgtttgccatccactccttatctggcatggaatccacagtgctgctggccatggcttttgaccgctatgtggccatctgtcacccactgcgccatgccacagtacttacgttgcctcgtgtcaccaaaattggtgtggctgctgtggtgcggggggctgcactgatggcaccccttcctgtcttcatcaagcagctgcccttctgccgctccaatatcctttcccattcctactgcctacaccaagatgtcatgaagctggcctgtgatgatatccgggtcaatgtcgtctatggccttatcgtcatcatctccgccattggcctggactcacttctcatctccttctcatatctgcttattcttaagactgtgttgggcttgacacgtgaagcccaggccaaggcatttggcacttgcgtctctcatgtgtgtgctgtgttcatattctatgtacctttcattggattgtccatggtgcatcgctttagcaagcggcgtgactctccgctgcccgtcatcttggccaatatctatctgctggttcctcctgtgctcaacccaattgtctatggagtgaagacaaaggagattcgacagcgcatccttcgacttttccatgtggccacacacgcttcagagccctaggtgtcagtgatcaaacttcttttccattcagagtcctctgattcagattttaatgttaacattttggaagacagtattcagaaaaaaaatttccttaataaaaatacaactcagatccttcaaatatgaaactggttggggaatctccattttttcaatattattttcttctttgttttcttgctacatataattattaa

SEQ ID NO: 746 - protein, 317 aa, Homo sapiens
MVDPNGNESSATYFILIGLPGLEEAQFWLAFPLCSLYLIAVLGNLTIIYIVRTEHSLHEPMYIFLCMLSGIDILISTSSMPKMLAIFWFNSTTIQFDACLLQMFAIHSLSGMESTVLLAMAFDRYVAICHPLRHATVLTLPRVTKIGVAAVVRGAALMAPLPVFIKQLPFCRSNILSHSYCLHQDVMKLACDDIRVNVVYGLIVIISAIGLDSLLISFSYLLILKTVLGLTREAQAKAFGTCVSHVCAVFIFYVPFIGLSMVHRFSKRRDSPLPVILANIYLLVPPVLNPIVYGVKTKEIRQRILRLFHVATHASEP

SEQ ID NO: 747 - DNA, 1807 bp, Homo sapiens
  source
  (1)..(1807)
  CDS (201)..(209)
  CDS (678)..(1607)
aagcctggtgggaggtctgtgttctaaccatctcttccaaatatgatgccgggtatcatattgtaagggtttctttaatggttagatgctgaagccatttatttgtcacttcctatgtgttactttgtattataatgatctctttcttcatattttctggcttcccaaattgtctgtaagcttctctgctttccacacttatgaccaatgtaatattgctgttccacagccccagtgtatttttctctggtgccaaccatagaggaaaaataatgcactacctctttagcacaatttaaacatgccataaagaatgaaatatgattggcaaactcagggtaaagtgtttattcttagtttggttatctatggctagaacgatcagaggagtggtcacatgatataaacatagctgccagcaaagggccctagagaagaaagattgtacactaaggcaaattcaaaaacaaaccaaagtgcccactacagcagttgaaatctgacattttttaatcaatttaaatgagccattcatagtttcatattatataaatactcatcagttttctgtacaataaaattattttaattcgatcaatacacaaatgaatgtagcttttttttgtttaagctctcatctcgttctgtacttttaattcatcacgtcaactttgcagaatatcacctccacttccatcattttcctgctcactggtgttcctgggctggaagccttccacacctggatctccattcccttctgcttcctctctgtaactgctctcttgggaaacagcctgatcctcttcgctaccatcactcagcccagcctccacgaaccaatgtactatttcctctccatgctgtccgccactgacctcggcctgtccatatccactctggtcaccatgctgagtatattctggttcaatgtgagggaaatcagctttaatgcctgcttgtcccacatgttctttattaaattcttcactgtcatggaatcctcagtgctgttggccatggcttttgatcgttttgtggccgtctctaatccccttaggtatgccatgattttaactgactccagaatagctcaaattggagtggcaagtgtcatcagggggctcctaatgctgacaccaatggtagcacttcttataagactttcctactgccacagccaagtactccaccactcctactgctaccaccctgatgtgatgaagctctcatgcacagacaccagaatcaacagtgcagttgggctgactgccatgttctctactgttggtgtagacttacttctcatcctcctttcttatgttttgatcattaggactgtccttagcgttgcttccccagaagagaggaaggaaaccttcagtacatgtgtctcccacattgtggcttttgctatatattacattccattgatcagtctgtccattgttcacagatttgggaaacaagccccagcctatgtacatactatgattgctaacacctacctgctgatctcccctttgatgaaccctgtcatctacagtgtgaaaaccaaacagatacgtagagctgtgataaaaattctccattccaaagaaacataaaattgtagaattctagcactagatggacccctcaagatggtatacttcaggtcatgtttccaattaaaaacaaaaaacaaccaaagaactggtgcccattgaagctaagcacataatcatttaaagttaaagctggaatgtatctagaacatcagctagtttgactactttattttccagatgaggaggtgaagacatgg

SEQ ID NO: 748 - protein, 312 aa, Homo sapiens [sequence omitted]

SEQ ID NO: 749 - DNA, 1348 bp, Homo sapiens
  source
  (1)..(1348)
  CDS (201)..(1148)
taaggaggatgaaaagtagcacagtattagaagtcatttttctgatcctgccataccaccaagctgagaatatccctaggttttcccagcaccacaaagaggaactaatcttataggactgcaccattctcttacatcatctatacattaataggcaagaagtctcacctgtgatgctgggtccagcttacaaccacacaatggaaacccctgcctccttcctccttgtgggtatcccaggactgcaatcttcacatctttggctggctatctcactgagtgccatgtacatcacagccctgttaggaaacaccctcatcgtgactgcaatctggatggattccactcggcatgagcccatgtattgctttctgtgtgttctggctgctgtggacattgttatggcctcctccgtggtacccaagatggtgagcatcttctgctcgggagacagctccatcagctttagtgcttgtttcactcagatgttttttgtccacttagccacagctgtggagacggggctgctgctgaccatggcttttgaccgctatgtagccatctgcaagcctctacactacaagagaattctcacgcctcaagtgatgctgggaatgagtatggccgtcaccatcagagctgtcacattcatgactccactgagttggatgatgaatcatctacctttctgtggctccaatgtggttgtccactcctactgtaagcacatagctttggccaggttagcatgtgctgaccccgtgcccagcagtctctacagtctgattggttcctctcttatggtgggctctgatgtggccttcattgctgcctcctatatcttaattctcagggcagtatttgatctctcctcaaagactgctcagttgaaagcattaagcacatgtggctcccatgtgggggttatggctttgtactatctacctgggatggcatccatctatgcggcctggttggggcaggatatagtgcccttgcacacccaagtgctgctagctgacctgtacgtgatcatcccagccactttaaatcccatcatctatggcatgaggaccaaacaattgctggagggaatatggagttatctgatgcacttcctctttgaccactccaacctgggttcatgaacacaatatctgttcagatccagagcattctagccaacttcaaagatgcctcagagatctgtggagctggattggtttacctggtactataaggaaatctgagatgaagctataaaggatatctttgtgtaacttttaaatttctaccaataatatgaatgaaatgtttctaattttctgacatttttaatgggttaata

SEQ ID NO: 750 - protein, 315 aa, Homo sapiens
METPASFLLVGIPGLQSSHLWLAISLSAMYITALLGNTLIVTAIWMDSTRHEPMYCFLCVLAAVDIVMASSVVPKMVSIFCSGDSSISFSACFTQMFFVHLATAVETGLLLTMAFDRYVAICKPLHYKRILTPQVMLGMSMAVTIRAVTFMTPLSWMMNHLPFCGSNVVVHSYCKHIALARLACADPVPSSLYSLIGSSLMVGSDVAFIAASYILILRAVFDLSSKTAQLKALSTCGSHVGVMALYYLPGMASIYAAWLGQDIVPLHTQVLLADLYVIIPATLNPIIYGMRTKQLLEGIWSYLMHFLFDHSNLGS

SEQ ID NO: 751 - DNA, 1348 bp, Homo sapiens
  source
  (1)..(1348)
  CDS (201)..(1148)
ataaaagtggtacaggataattttgtcagatgccacatttttgatcctgagattaccaccaagctgagaatatccttaggttttcccagcaccacatgtgtcaacaaatcttacgggattgcattcttctcatacatcatttgtgcattaacaggaaaaaagtctcacttgtgatgctgggtccagcttataaccacacaatggaaacccctgcctccttcctccttgtgggtatcccaggactgcaatcttcacatctttggctggctatctcactgagtgccatgtacatcatagccctgttaggaaacaccatcatcgtgactgcaatctggatggattccactcggcatgagcccatgtattgctttctgtgtgttctggctgctgtggacattgttatggcctcctcggtggtacccaagatggtgagcatcttctgctcaggagacagctcaatcagctttagtgcttgtttcactcagatgttttttgtccacttagccacagctgtggagacggggctgctgctgaccatggcttttgaccgctatgtagccatctgcaagcctctacactacaagagaattctcacgcctcaagtgatgctgggaatgagtatggccatcaccatcagagctatcatagccataactccactgagttggatggtgagtcatctacctttctgtggctccaatgtggttgtccactcctactgtgagcacatagctttggccaggttagcatgtgctgaccccgtgcccagcagtctctacagtctgattggttcctctcttatggtgggctctgatgtggccttcattgctgcctcctatatcttaattctcaaggcagtatttggtctctcctcaaagactgctcagttgaaagcattaagcacatgtggctcccatgtgggggttatggctttgtactatctacctgggatggcatccatctatgcggcctggttggggcaggatgtagtgcccttgcacacccaagtcctgctagctgacctgtacgtgatcatcccagccaccttaaatcccatcatctatggcatgaggaccaaacaactgcgggagagaatatggagttatctgatgcatgtcctctttgaccattccaacctgggttcatgaacacaatatctgttcagatccagccaatttcaaagatgccttagagatctgcagagcttagtttacctggtgctacaggaattcattctaagatgaaggtgtaaaggatatccttgcataacttttcaattactagcaggaatgtgaatgaaatgtttctgattttctgagggctttctcagtggattcaatcaacttgt

SEQ ID NO: 752 - protein, 315 aa, Homo sapiens
METPASFLLVGIPGLQSSHLWLAISLSAMYIIALLGNTIIVTAIWMDSTRHEPMYCFLCVLAAVDIVMASSVVPKMVSIFCSGDSSISFSACFTQMFFVHLATAVETGLLLTMAFDRYVAICKPLHYKRILTPQVMLGMSMAITIRAIIAITPLSWMVSHLPFCGSNVVVHSYCEHIALARLACADPVPSSLYSLIGSSLMVGSDVAFIAASYILILKAVFGLSSKTAQLKALSTCGSHVGVMALYYLPGMASIYAAWLGQDVVPLHTQVLLADLYVIIPATLNPIIYGMRTKQLRERIWSYLMHVLFDHSNLGS

SEQ ID NO: 753 - DNA, 1354 bp, Homo sapiens
  source
  (1)..(1354)
  CDS (201)..(1154)
gtactttctaagattttgcgaacattttagtataatgtgacactgacgttctagaatttcttctaaagatgacttatctaacatctagtcagtgaccctattattataggaacttagagtaaaatattgtcttttatttccaggaaaaacatcctgctgcgtttagtggtacaagtgagaaggttcacatataaatagccatgctcacttttcataatgtctgctcagtacccagctccttctggctcactggcatcccagggctggagtccctacacgtctggctctccatcccctttggctccatgtacctggtggctgtggtggggaatgtgaccatcctggctgtggtaaagatagaacgcagcctgcaccagcccatgtactttttcttgtgcatgttggctgccattgacctggttctgtctacttccactatacccaaacttctgggaatcttctggttcggtgcttgtgacattggcctggacgcctgcttgggccaaatgttccttatccactgctttgccactgttgagtcaggcatcttccttgccatggcttttgatcgctacgtggccatctgcaacccactacgtcatagcatggtgctcacttatacagtggtgggtcgtttggggcttgtttctctcctccggggtgttctctacattggacctctgcctctgatgatccgcctgcggctgcccctttataaaacccatgttatctcccactcctactgtgagcacatggctgtagttgccttgacatgtggcgacagcagggtcaataatgtctatgggctgagcatcggctttctggtgttgatcctggactcagtggctattgctgcatcctatgtgatgattttcagggccgtgatggggttagccactcctgaggctaggcttaaaaccctggggacatgcgcttctcacctctgtgccatcctgatcttttatgttcccattgctgtttcttccctgattcaccgatttggtcagtgtgtgcctcctccagtccacactctgctggccaacttctatctcctcattcctccaatcctcaatcccattgtctatgctgttcgcaccaagcagatccgagagagccttctccaaataccaaggatagaaatgaagattagatgattactattttcttctctctcaaataagctcatggagaaggtgtttaaatatggtaggctgcttcccattaggaactttacaagcagtttgaagtattaggcactgtgctctccaacttttgtagttccaaaggaattctaagaaagtatacaactctaagtcctaaaaggtggaaaatacaaaacttacaactaaaggat

SEQ ID NO: 754 - protein, 317 aa, Homo sapiens
MLTFHNVCSVPSSFWLTGIPGLESLHVWLSIPFGSMYLVAVVGNVTILAVVKIERSLHQPMYFFLCMLAAIDLVLSTSTIPKLLGIFWFGACDIGLDACLGQMFLIHCFATVESGIFLAMAFDRYVAICNPLRHSMVLTYTVVGRLGLVSLLRGVLYIGPLPLMIRLRLPLYKTHVISHSYCEHMAVVALTCGDSRVNNVYGLSIGFLVLILDSVAIAASYVMIFRAVMGLATPEARLKTLGTCASHLCAILIFYVPIAVSSLIHRFGQCVPPPVHTLLANFYLLIPPILNPIVYAVRTKQIRESLLQIPRIEMKIR

SEQ ID NO: 755 - DNA, 1345 bp, Homo sapiens
  source
  (1)..(1345)
  CDS (201)..(1145)
gagggtagaaaatatggattatacttctccatgtctatgaaggctgctaggttattttgtttaaagtctagcaatggaaacaagaggtaatctttgcaggtgggatagcacaggttgaactctaatcatatatactgtagaaggtatatatagaaggtgaagaagccctgtaaaaattgacaaggagatttccaggagccatgcttccctctaatatcacctcaacacatccagctgtctttttgttggtaggaattcctggtttggaacacctgcatgcctggatctccatccccttctgctttgcttatactctggccctgctaggcaactgtacccttctcttcattatccgggctgatgcagccctccatgaacccatgtacctctttctggccatgttggcaaccattgacttggttctttcttctacaacgctgcccaaaatgcttgccatattctggttcagggatcaggagatcaacttctttgcctgtctggtccagatgttcttccttcactccttctccatcatggagtcagcagtgctgctggccatggcctttgaccgctatgtggccatctgcaagccattgcactacacgacggtcctgactgggtccctcatcaccaagattggcatggctgctgtggcctgggctgtgacactaatgactccactccccttcctgctcagacgcttccactactgccgaggcccagtgattgcccattgctactgtgaacacatggctgtggtaaggctggcgtgtggggacactagcttcaacaatatctatggcattgctgtggccatgtttattgtggtgttggacctgctctttgttatcctgtcttatgtcttcatccttcaggcagttctccagcttgcctctcaggaggcccgctacaaggcatttgggacatgtgtgtctcacataggtgccatcctgtccacctacactccagtagtcatctcttcagtcatgcaccgtgtagcccgccatgctgcccctcgtgtccacatactccttgctattttctatctccttttcccacccatggtcaatcctatcatatatggagtcaagaccaagcagattcgtgagtatgtgctcagtctattccagagaaagaacatgtagatggatagttctctttttttatcccacttgccaagtaatgagaatgctggattggggttgaggggaaaaatctaaataggaaaattgcagagtatctttgacaattctctagtatgataaggaaaatgaggtttcattcctcacagatctacgagtcaggtcaaaccaggagtgcacctatagtctggtctgatagtaga

SEQ ID NO: 756 - protein, 314 aa, Homo sapiens
MLPSNITSTHPAVFLLVGIPGLEHLHAWISIPFCFAYTLALLGNCTLLFIIRADAALHEPMYLFLAMLATIDLVLSSTTLPKMLAIFWFRDQEINFFACLVQMFFLHSFSIMESAVLLAMAFDRYVAICKPLHYTTVLTGSLITKIGMAAVAWAVTLMTPLPFLLRRFHYCRGPVIAHCYCEHMAVVRLACGDTSFNNIYGIAVAMFIVVLDLLFVILSYVFILQAVLQLASQEARYKAFGTCVSHIGAILSTYTPVVISSVMHRVARHAAPRVHILLAIFYLLFPPMVNPIIYGVKTKQIREYVLSLFQRKNM

SEQ ID NO: 757 - DNA, 1345 bp, Homo sapiens
  source
  (1)..(1345)
  CDS (201)..(1145)
ggcaaggatcatgcataatatttcatgatacatatgattattttctcatttcttttcatgtctaaaaatgggtctaagaactaatcttctcacaagaatgatcagagtttgaatgtgagcattgtaattctgctgatattgaatattctctggaagggccctgtggaagcagataaggaggaagagaattcccaggagccatgtcagcctccaatatcaccttaacacatccaactgccttcttgttggtggggattccaggcctggaacacctgcacatctggatctccatccctttctgcttagcatatacactggccctgcttggaaactgcactctccttctcatcatccaggctgatgcagccctccatgaacccatgtacctctttctggccatgttggcagccatcgacctggtcctttcctcctcagcactgcccaaaatgcttgccatattctggttcagggatcgggagataaacttctttgcctgtctggcccagatgttcttccttcactccttctccatcatggagtcagcagtgctgctggccatggcctttgaccgctatgtggctatctgcaagccactgcactacaccaaggtcctgactgggtccctcatcaccaagattggcatggctgctgtggcccgggctgtgacactaatgactccactccccttcctgctgagatgtttccactactgccgaggcccagtgatcgctcactgctactgtgaacacatggctgtggtgaggctggcgtgtggggacactagcttcaacaatatctatggcatcgctgtggccatgtttattgtggtgttggacctgctccttgttatcctgtcttatatctttattcttcaggcagttctactgcttgcctctcaggaggcccactacaaggcatttgggacatgtgtctctcatataggtgccatcttagccttctacacaactgtggtcatctcttcagtcatgcaccgtgtagcccgccatgctgcccctcatgtccacatcctccttgccaatttctatctgctcttcccacccatggtcaatcccataatctatggtgtcaagaccaagcaaatccgtgagagcatcttgggagtattcccaagaaaggatatgtagagggtgaggtggagaaagaatgggttggcttgtctgctggagttggagacaggctatggtagaatgtgcacggctgccaggatcttcatgtttagttttttcttggaaaaaaaaaaaatgatgtcctgaaactcagagccaccagtctgttcaggactcatgggtctgtgtcctctggtagcctgtggattgaatgtgct

SEQ ID NO: 758 - protein, 314 aa, Homo sapiens
MSASNITLTHPTAFLLVGIPGLEHLHIWISIPFCLAYTLALLGNCTLLLIIQADAALHEPMYLFLAMLAAIDLVLSSSALPKMLAIFWFRDREINFFACLAQMFFLHSFSIMESAVLLAMAFDRYVAICKPLHYTKVLTGSLITKIGMAAVARAVTLMTPLPFLLRCFHYCRGPVIAHCYCEHMAVVRLACGDTSFNNIYGIAVAMFIVVLDLLLVILSYIFILQAVLLLASQEAHYKAFGTCVSHIGAILAFYTTVVISSVMHRVARHAAPHVHILLANFYLLFPPMVNPIIYGVKTKQIRESILGVFPRKDM

SEQ ID NO: 759 - DNA, 1346 bp, Homo sapiens
  source
  (1)..(1346)
  CDS (201)..(871)
  CDS (945)..(1146)
cacatagttcatgaatagaatggcaaagaattttagaccacatcccctgacttcttcaacaggacccttttcactgctccatccagtgaaaaataatctgttccctccttccctactccaaccccattcagcttcttgggaagagagaagaggtaactgccaaatcctacataccaatgctcaggtgaccttccctgggcatgacaacccacaactccactggtagcagccactcactcttcattctgctgagcattcctggcttagaagaccagcacacatggatgtctctccccttctttatttcctaccttgttgctttccttgggaacagcctcatcatcttcatcatcatcactgaatgcagcctccacgaacccatgtaccttttcctctgcatgctggctgtggctgaccttatcctgtctactaccactgtgcccaaggccctagccatattttggttctatgctggagcaatatcccttggtggctgtgttacccaaatcttctttatccatgctaccttcatcgaggaatcaggaattctgttggcgatggcacttgaccgctatgtggccatctgtgatccactgcactataccacagtgctcagtcgtgcaaaaatcacaaagattggcttggctgtggtcctgagaagcttctgtgtgatcatgccagatgtgtttctggtaaagcggctgcctttctgccatagcaatctgctgccacatacctactgtgagcacatggctgttgccaagtttgcttgtgctgatattcatgtcaatgtttggtatggcttgtctgtccttctctatactgtagtgctagatgccttgcttatcttagtgtcctatagcttcatcctgtatacaggcttccacctcccctccccaaggagctcggcaaaaggctctgggcacatgtggctcccacctcagagtcatttccatgttctacttgcctggtatttttaccataattacccagcggtttgggcaccatgttcctctccatacacacattctgctggctaatgtctgcgtgttggctcctcccatgctgaaccccatcatttatgggatcaacaccaggcagattcaagagtgtgtgctcagtcttttgtcctcacagaggaaatgatgctagatttgactaatctgatagtatgtttatcactatagggctttgcttttttttttttttttttttttttttttttttttttttgcctactttgcagagacctacgaattaagattccactgactatggataaagtgactgatcatgactttgaaaatcagattgtcatgtgaccttgaaaagtatagtgtttaggg

SEQ ID NO: 760 - protein, 290 aa, Homo sapiens
MTTHNSTGSSHSLFILLSIPGLEDQHTWMSLPFFISYLVAFLGNSLIIFIIITECSLHEPMYLFLCMLAVADLILSTTTVPKALAIFWFYAGAISLGGCVTQIFFIHATFIEESGILLAMALDRYVAICDPLHYTTVLSRAKITKIGLAVVLRSFCVIMPDVFLVKRLPFCHSNLLPHTYCEHMAVAKFACADIHVNVWYGLSVLLYTVVLDALLILVSYSFILVISMFYLPGIFTIITQRFGHHVPLHTHILLANVCVLAPPMLNPIIYGINTRQIQECVLSLLSSQRK

SEQ ID NO: 761 - DNA, 1366 bp, Homo sapiens
  source
  (1)..(1366)
  CDS (201)..(1166)
ctcatccatcaaaagtctccttcctagacccagtagaaaaggctaatagatcagcccccacccagttctcccctatgccatctgcagatgcttccttactggctgatcttgggacatttaggtgagtgagaattcagccttgtcactttccaggaatctcattctatattccaggtttctgagtccaagattgtaaagctatgacaattcttcttaatagcagcctccaaagagccactttcttcctgacgggcttccaaggtctagaaggtctccatggctggatctctattcccttctgcttcatctacctgacagttatcttggggaacctcaccattctccacgtcatttgtactgatgccactctccatggacccatgtactatttcttgggcatgctagctgtcacagacttaggcctttgcctttccacactgcccactgtgctgggcattttctggtttgataccagagagattggcatccctgcctgtttcactcagctcttcttcatccacaccttgtcttcaatggagtcatcagttctgttatccatgtccattgaccgctacgtggccgtctgcaacccactgcatgactccaccgtcctgacacctgcatgtattgtcaagatggggctaagctcagtgcttagaagtgctctcctcatcctccccttgccattcctcctgaagcgcttccaatactgccactcccatgtgctggctcatgcttattgtcttcacctggagatcatgaagctggcctgctctagcatcattgtcaatcacatctatgggctctttgttgtggcctgcaccgtgggtgtggactccctgctcatctttctctcatacgccctcatccttcgcaccgtgctcagcattgcctcccaccaggagcgactccgagccctcaacacctgtgtctctcatatctgtgctgtactgctcttctacatccccatgattggcttgtctcttgtgcatcgctttggtgaacatctgccccgcgttgtacacctcttcatgtcctatgtgtatctgctggtaccaccccttatgaaccccatcatctacagcatcaagaccaagcaaattcgccagcgcatcattaagaagtttcagtttataaagtcacttaggtgtttttggaaggattaagttagagtaaagagaggaagttttggacataaagcccacaggtttctgtttgttttcagctgtgctgtggcaaaataataaaccgttgactgtcaacaaaaaggcaattggctgtgcaacataaggcagtgtgaccaggagaaagttacttacctctctgttctccagtttcctcaactgcagaatgagcaaggaaataa

SEQ ID NO: 762 - protein, 321 aa, Homo sapiens
MTILLNSSLQRATFFLTGFQGLEGLHGWISIPFCFIYLTVILGNLTILHVICTDATLHGPMYYFLGMLAVTDLGLCLSTLPTVLGIFWFDTREIGIPACFTQLFFIHTLSSMESSVLLSMSIDRYVAVCNPLHDSTVLTPACIVKMGLSSVLRSALLILPLPFLLKRFQYCHSHVLAHAYCLHLEIMKLACSSIIVNHIYGLFVVACTVGVDSLLIFLSYALILRTVLSIASHQERLRALNTCVSHICAVLLFYIPMIGLSLVHRFGEHLPRVVHLFMSYVYLLVPPLMNPIIYSIKTKQIRQRIIKKFQFIKSLRCFWKD

SEQ ID NO: 763 - DNA, 1345 bp, Homo sapiens
  source
  (1)..(1345)
  CDS (201)..(1145)
atgagacaaatttcctcaaaaagatactgagaggaagtcaaggaccagaaagaaataaccactagaaagagctgcacagttctaggtatatttgattctattttttttctttaatttccaccaggtgcaatcaccagtactgcctcaatttacttcaggattttggagggcacccaccttcccccttgtctcctcacacaatgaccctgggatccctgggaaacagcagcagcagcgtttctgctaccttcctgctgagtggcatccctgggctggagcgcatgcacatctggatctccatcccactgtgcttcatgtatctggtttccatcccgggcaactgcacaattctttttatcattaaaacagagcgctcacttcatgaacctatgtatctcttcctgtccatgctggctctgattgacctgggtctctccctttgcactctccctacagtcctgggcatcttttgggttggagcacgagaaattagccatgatgcctgctttgctcagctctttttcattcactgcttctccttcctcgagtcctctgtgctactgtctatggcctttgaccgctttgtggctatctgccaccccttgcactatgtttccattctcaccaacacagtcattggcaggattggcctggtctctctgggtcgtagtgtagcactcatttttccattaccttttatgctcaaaagattcccctattgtggctccccagttctctcacattcttattgtctccaccaagaagtgatgaaattggcctgtgccgacatgaaggccaacagcatctacggcatgtttgtcatcgtctctacagtgggtatagactcactgctcatcctcttctcttatgctctgatcctgcgcaccgtgctgtccatcgcctccagggctgagagattcaaggcccttaacacctgtgtttcccacatctgtgctgtgctgctcttctacactcccatgattggcctctctgtcatccatcgctttggaaagcaggcaccccacctggtccaggtggtcatgggtttcatgtatcttctctttcctcctgtgatgaatcccattgtctacagtgtgaagaccaaacagatccgggatcgagtgacgcatgccttttgttactaactgtgtctagtgttagagccactgtctcctgaaacgtgcccttgtttgcctatcctttataatttctaacatgcataaaataaaggagacatttacttactcaacaaacatgtacagggatgagttacagtccttacagaaccctcactctgttgtggccagggcaggggggggtaaaatgtaatatgatgtggtaaatt

SEQ ID NO: 764 - protein, 314 aa, Homo sapiens
MTLGSLGNSSSSVSATFLLSGIPGLERMHIWISIPLCFMYLVSIPGNCTILFIIKTERSLHEPMYLFLSMLALIDLGLSLCTLPTVLGIFWVGAREISHDACFAQLFFIHCFSFLESSVLLSMAFDRFVAICHPLHYVSILTNTVIGRIGLVSLGRSVALIFPLPFMLKRFPYCGSPVLSHSYCLHQEVMKLACADMKANSIYGMFVIVSTVGIDSLLILFSYALILRTVLSIASRAERFKALNTCVSHICAVLLFYTPMIGLSVIHRFGKQAPHLVQVVMGFMYLLFPPVMNPIVYSVKTKQIRDRVTHAFCY

SEQ ID NO: 765 - DNA, 1339 bp, Homo sapiens
  source
  (1)..(1339)
  CDS (201)..(1139)
accatgctggagaatatgaacttgtttaaggacttctggtaaattttgaagagtgcagttgattagcagccaaatatgcctttgagtatagtatacgaatgaaccccttatcctcacaaaactgagttttaaccaaaagcatgactgcttttcatttatatggtttcagatccggctaacgagctcatatctccctcattatgtctgttctcaataactccgaagtcaagcttttccttctgattgggatcccaggactggaacatgcccacatttggttctccatccccatttgcctcatgtacctgcttgccatcatgggcaactgcaccattctctttattataaagacagagccctcgcttcatgagcccatgtattatttccttgccatgttggctgtctctgacatgggcctgtccctctcctcccttcctaccatgttgagggtcttcttgttcaatgccatgggaatttcacctaatgcctgctttgctcaagaattcttcattcatggattcactgtcatggaatcctcagtacttctaattatgtctttggaccgctttcttgccattcacaatcccttaagatacagttctatcctcactagcaacagggttgctaaaatgggacttattttagccattaggagcattctcttagtgattccatttcccttcaccttaaggagattaaaatattgtcaaaagaatcttctttctcactcatactgtcttcatcaggataccatgaagctggcctgctctgacaacaagaccaatgtcatctatggcttcttcattgctctctgtactatgctggacttggcactgattgttttgtcttatgtgctgatcttgaagactatactcagcattgcatctttggcagagaggcttaaggccctaaatacctgtgtctcccacatctgtgctgtgctcaccttctatgtgcccatcatcaccctggctgccatgcatcactttgccaagcacaaaagccctcttgttgtgatccttattgcagatatgttcttgttggtgccgccccttatgaaccccattgtgtactgtgtaaagactcgacaaatctgggagaagatcttggggaagttgcttaatgtatgtgggagataagaacttgaacaattaggtaataaattatcaaccagtaggcatttactgtcatttgctatgtgcttaatgccatagaagtcactaatgaaggactggatgatggaagtgaaaagctatgtagtgcagaatttataataaagttgagaatataactgaacaggatagaaaaaaaagtcaagagatatataagatatagaggt

SEQ ID NO: 766 - protein, 312 aa, Homo sapiens
MSVLNNSEVKLFLLIGIPGLEHAHIWFSIPICLMYLLAIMGNCTILFIIKTEPSLHEPMYYFLAMLAVSDMGLSLSSLPTMLRVFLFNAMGISPNACFAQEFFIHGFTVMESSVLLIMSLDRFLAIHNPLRYSSILTSNRVAKMGLILAIRSILLVIPFPFTLRRLKYCQKNLLSHSYCLHQDTMKLACSDNKTNVIYGFFIALCTMLDLALIVLSYVLILKTILSIASLAERLKALNTCVSHICAVLTFYVPIITLAAMHHFAKHKSPLVVILIADMFLLVPPLMNPIVYCVKTRQIWEKILGKLLNVCGR

SEQ ID NO: 767 - DNA, 1384 bp, Homo sapiens
  source
  (1)..(1384)
  CDS (201)..(1184)
gaatttgaatctgtattgaactattttagcctagatatactatttaaccttcctgggtccatttcctttctttaaaacagaagaaaaataactaccttaaatttaaaattgtatataaaatgactaataaaatgtatgctatatatataaagaatcttaattatttttctttcctcatagttcagtgtcttcaaccaaccatggcaatattcaataacaccacttcgtcttcctcaaacttcctcctcactgcattccctgggctggaatgtgctcatgtctggatctccattccagtctgctgtctctacaccattgccctcttgggaaacagtatgatctttcttgtcatcattactaagcggagactccacaaacccatgtattatttcctctccatgctggcagctgttgatctatgtctgaccattacgacccttcccactgtgcttggtgttctctggtttcatgcccgggagatcagctttaaagcttgcttcattcaaatgttctttgtgcatgctttctccttgctggagtcctcggtgctggtagccatggcctttgaccgcttcgtggctatctgtaacccactgaactatgctactatcctcacagacaggatggtcctggtgatagggctggtcatctgcattagaccagcagttttcttacttccccttcttgtagccataaacactgtgtcttttcatgggggtcacgagctttcccatccattttgctaccacccagaagtgatcaaatacacatattccaaaccttggatcagcagtttttggggactgtttcttcagctctacctgaatggcactgacgtattgtttattcttttctcctatgtcctgatcctccgtactgttctgggcattgtggcccgaaagaagcaacaaaaagctctcagcacttgtgtctgtcacatctgtgcagtcactattttctatgtgccactgatcagcctctctttggcacaccgcctcttccactccaccccaagggtgctctgtagcactttggccaatatttatctgctcttaccacctgtgctgaaccctatcatttacagcttgaagaccaagacaatccgccaggctatgttccagctgctccaatccaagggttcatggggttttaatgtgaggggtcttaggggaagatgggattgaaggtaggaaattgtcaggacacgaattatgctttggaaagaaagggacttggggcagtcttatccacaggtgttttggttgctgagtcaattccaattgaattttaggagtgggaagaagacagtaattttcccctgagcttatcaaagagttttatttttaatttttaataccataatttaaaccaaattaattgagca

SEQ ID NO: 768 - protein, 327 aa, Homo sapiens
MAIFNNTTSSSSNFLLTAFPGLECAHVWISIPVCCLYTIALLGNSMIFLVIITKRRLHKPMYYFLSMLAAVDLCLTITTLPTVLGVLWFHAREISFKACFIQMFFVHAFSLLESSVLVAMAFDRFVAICNPLNYATILTDRMVLVIGLVICIRPAVFLLPLLVAINTVSFHGGHELSHPFCYHPEVIKYTYSKPWISSFWGLFLQLYLNGTDVLFILFSYVLILRTVLGIVARKKQQKALSTCVCHICAVTIFYVPLISLSLAHRLFHSTPRVLCSTLANIYLLLPPVLNPIIYSLKTKTIRQAMFQLLQSKGSWGFNVRGLRGRWD

SEQ ID NO: 769 - DNA, 1309 bp, Homo sapiens
  source
  (1)..(1309)
  CDS (201)..(1109)
gtaatcacatgtgactgtgtaggaaggaaaaagacacagtgttacaaatatcatctaaatgttttttaactttattctttcctctgctattctactatgcattcataaagccattgttctgtccatatgagaatatatattcaatttaggagctgtgagccaagtggaggagtccagccccacccgatggtgagaacaacatgacgaacttgaatgcatcacaggccaaccaccgtaacttcattctgacaggtatcccaggaacgccagacaagaacccatggttggcctttcccctgggatttctctacacactcacactcctgggaaatggtaccatcctagctgtcatcaaggtggagccaagtctccatgagcccacgtattacttcctttctatcttggctctcactgacgttagtctctccatgtccaccttgccctccatgctcagcatctactggtttaatgcccctcagattgtttttgatgcatgcatcatgcagatgttcttcatccatgtatttggaatagtagaatcaggagtcctagtgtccatggcctttgacagatttgtggccatccgaaacccattacactatgtttccatcctcactcacgatgttattcgaaagactggaatagctgtcctcacccgggcagtctgtgtggtattccctgtgcccttccttataaagtgcctacccttctgccattccaatgtcttgtctcattcatactgtcttcaccaaaacatgatgcggctagcttgtgccagcacccgcatcaacagcctctacggcctcatcgtcgtcatcttcacactggggctcgatgttctcctcactctactgtcttatgtactcaccctgaagactgtgctgggcattgtctccagaggtgaaaggctgaaaaccctcagcacatgcctctctcacatgtctaccgtgctcctcttctatgttccttttatgggtgctgcctccatgatccacagattttgggagcatttatcaccagtagtgcacatggtcatggctgatatatacctactgctcccgcctgtgctaaaccccattgtctacagtgtgaagaccaagcaaatttgaagaatgatctttcaagtgttccagaggcaaaaaaaatagggtctagtagaatggaatcatgtgtaagaagcagagtaagtatccactggaagaattaattatttaattttccacagttatggtgcatcaaattttgcacatctggggaaatgcaggagtgggtaaggcttgtgggtgaagatacataacaggtcattatt

SEQ ID NO: 770 - protein, 302 aa, Homo sapiens
MTNLNASQANHRNFILTGIPGTPDKNPWLAFPLGFLYTLTLLGNGTILAVIKVEPSLHEPTYYFLSILALTDVSLSMSTLPSMLSIYWFNAPQIVFDACIMQMFFIHVFGIVESGVLVSMAFDRFVAIRNPLHYVSILTHDVIRKTGIAVLTRAVCVVFPVPFLIKCLPFCHSNVLSHSYCLHQNMMRLACASTRINSLYGLIVVIFTLGLDVLLTLLSYVLTLKTVLGIVSRGERLKTLSTCLSHMSTVLLFYVPFMGAASMIHRFWEHLSPVVHMVMADIYLLLPPVLNPIVYSVKTKQI

SEQ ID NO: 771 - DNA, 1372 bp, Homo sapiens
  source
  (1)..(1372)
  CDS (201)..(1172)
gaatgaatgctgcatatactattaggatgggtgcgtgcacagggaggaaatgtgtatatgtgtacgtgtatgtgagtgcatgagtcagggaagggaagatgcaggctattttggaacgtttcatgcaaatttggcacgcgattaagtaaacctttctaatcatttttcaggttccagagttcaacgtggaatcctgaactatgtcaacattaccaactcagatagcccccaatagcagcacttcaatggcccccaccttcttgctggtgggcatgccaggcctatcaggtgcaccctcctggtggacattgcccctcattgctgtctaccttctctctgcactgggaaatggcaccatcctctggatcattgccctgcagcccgccctgcaccgcccaatgcacttcttcctcttcttgcttagtgtgtctgatattggattggtcactgccctgatgcccacactgctgggcatcgcccttgctggtgctcacactgtccctgcctcagcctgccttctacagatggtttttatccatgtcttttctgtcatggagtcctctgtcttgctcgccatgtccattgatcgggcactggccatctgccgacctctccactacccagcgctcctcaccaatggtgtaattagcaaaatcagcctggccatttcttttcgatgcctgggtctccatctgcccctgccattcctgctggcctacatgccctactgcctcccacaggtcctaacccattcttattgcttgcatccagatgtggctcgtttggcctgcccagaagcttggggtgcagcctacagcctatttgtggttctttcagccatgggtttggaccccctgcttattttcttctcctatggcctgattggcaaggtgttgcaaggtgtggagtccagagaggatcgctggaaggctggtcaaacctgtgctgcccacctctctgcagtgctcctcttctatatccctatgatcctcctggcactgattaaccatcctgagctgccaatcactcagcatacccatactcttctatcctatgtccatttccttcttcctccattgataaaccctattctctatagtgtcaagatgaaggagattagaaagagaatactcaacaggttgcagcccaggaaggtgggtggtgctcagtgagtaggatgtccctccgtgtttggtggtacagggctcctgatactaaagtttctgtgagaactcagctcaccaagcatgaaatgatcattcacgtacacataagtgcatatatgtgcatgtagcttcctgtccctggaagtatgcctgtgtatattgatgcaaacttacaagccccaaagaatgaacatgatccacccact

SEQ ID NO: 772 - protein, 323 aa, Homo sapiens
MSTLPTQIAPNSSTSMAPTFLLVGMPGLSGAPSWWTLPLIAVYLLSALGNGTILWIIALQPALHRPMHFFLFLLSVSDIGLVTALMPTLLGIALAGAHTVPASACLLQMVFIHVFSVMESSVLLAMSIDRALAICRPLHYPALLTNGVISKISLAISFRCLGLHLPLPFLLAYMPYCLPQVLTHSYCLHPDVARLACPEAWGAAYSLFVVLSAMGLDPLLIFFSYGLIGKVLQGVESREDRWKAGQTCAAHLSAVLLFYIPMILLALINHPELPITQHTHTLLSYVHFLLPPLINPILYSVKMKEIRKRILNRLQPRKVGGAQ

SEQ ID NO: 773 - DNA, 1342 bp, Homo sapiens
  source
  (1)..(1342)
  CDS (201)..(1142)
agtattacccatctctcttcattatgatagccacataaatgctttgttctctcaaaagaaagctgaaagaagccacaaattttaacactgctttttttctactaaatttacagatatgcctattttaccaacacaagcaagcggatcacctgaggtcaggtgtatctgtatttttcatagcagagccctatgaatgaatcatgtccattatcaacacatcatatgttgaaatcaccaccttcttcttggttgggatgccagggctagaatatgcacacatctggatctctatccccatctgcagcatgtatcttattgctattctaggaaatggcaccattctttttatcatcaagacagagccctccttgcatgggcccatgtactattttctttccatgttggctatgtcagacttgggtttgtctttatcatctctgcccactgtgttaagcatcttcctgttcaatgcccctgaaacttcttctagtgcctgctttgcccaggaattcttcattcatggattctcagtactggagtcctcagtcctcctgatcatgtcatttgatagattcctagccatccacaatcctctgagatacacctcaatcctgacaactgtcagagttgcccaaatagggatagtattctcctttaagagcatgctcctggttcttcccttccctttcactttaagaagcttgagatattgcaagaaaaaccaattatcccattcctactgtctccaccaggatgtcatgaagttggcctgttctgacaacagaattgatgttatctatggcttttttggagcactctgccttatggtagactttattctcattgctgtgtcttacaccctgatcctcaagactgtaccgggaattgcatccaaaaaggaggagcttaaggctctcaatacttgtgtttcacacatctgtgcagtgatcatcttctacctgcccatcatcaacctggccgttgtccaccgctttgccgggcatgtctctcccctcattaatgttctcatggcaaatgttctcctacttgtacctccgctgatgaaaccaattgtttattgtgtaaaaactaaacagattagagtgagagttgtagcaaaattgtgtcaatggaagatttaacagtcatatgtgacagaaaacctggaaatgtctggtaagatatttaaggtaaatttgagaaacctaatatttgacaccaagaattatcaacacatatttttatcgttatcacagacttattttattcactctagatactgagaatgggaataaaactgtaaccaggaagtacgttgccttatgtccccatttcagttaag

SEQ ID NO: 774 - protein, 313 aa, Homo sapiens
MSIINTSYVEITTFFLVGMPGLEYAHIWISIPICSMYLIAILGNGTILFIIKTEPSLHGPMYYFLSMLAMSDLGLSLSSLPTVLSIFLFNAPETSSSACFAQEFFIHGFSVLESSVLLIMSFDRFLAIHNPLRYTSILTTVRVAQIGIVFSFKSMLLVLPFPFTLRSLRYCKKNQLSHSYCLHQDVMKLACSDNRIDVIYGFFGALCLMVDFILIAVSYTLILKTVPGIASKKEELKALNTCVSHICAVIIFYLPIINLAVVHRFAGHVSPLINVLMANVLLLVPPLMKPIVYCVKTKQIRVRVVAKLCQWKI

SEQ ID NO: 775 - DNA, 1342 bp, Homo sapiens
  source
  (1)..(1342)
  CDS (201)..(1142)
atacgacagattatagtccaaagcagcaaccaaccatctctcttcatgatgatagccacataaatgctttgttctctcaaaagaaagctgaaagaagccacaaattttaacactgctttttttctactaaatttacagatattcctattttaccaacacaagcatctgtatttttcatagcagagccctatgaatgaatcatgtccattatcaacacatcatatgttgaaatcaccaccttcttcttggttgggatgccagggctagaatatgcacacatctggatctctatccccatctgcagcatgtatcttattgctattctaggaaatggcaccattctttttatcatcaagacagagccctccttgcatgagcccatgtactattttctttccatgttggctatgtcagacttgggtttgtctttatcatctctgcccactgtgttaagcatcttcctgttcaatgctcctgaaatttcatccaatgcctgctttgcccaggaattcttcattcatggattctcagtactggagtcctcagtcctcctgatcatgtcatttgatagattcctagccatccacaaccctctgagatacacctcaatcctgacaactgtcagagttgcccaaatagggatagtattctcctttaagagcatgctcctggttcttcccttccctttcactttaagaaacttgagatattgcaagaaaaaccaattatcccattcctactgtctccaccaggatgtcatgaagttggcctgttctgacaacagaattgatgttatctatggcttttttggagcactctgccttatggtagactttattctcattgctgtgtcttacaccctgatcctcaagactgtactgggaattgcatccaaaaaggagcagcttaaggctctcaatacttgtgtttcacacatctgtgcagtgatcatcttctacctgcccatcatcaacctggccgttgtccaccgctttgcccggcatgtctctcccctcattaatgttctcatggcaaatgttctcctacttgtacctccactgacgaacccaattgtttattgtgtaaaaactaaacagattagagtgagagttgtagcaaaattgtgtcaacggaagatttaacagtcatatgtgacagaaaacctggaaatgtctggtaagatatttaaggtaaatttgagaaacctaatatttgacaccaagaattatcaacacatatttttgttgttgtcatagagttattttattcactctggatactgcgaatgagaatagaactataaacaggaagtacgttgccttatgtccccatttcagttaag

SEQ ID NO: 776 - protein, 313 aa, Homo sapiens
MSIINTSYVEITTFFLVGMPGLEYAHIWISIPICSMYLIAILGNGTILFIIKTEPSLHEPMYYFLSMLAMSDLGLSLSSLPTVLSIFLFNAPEISSNACFAQEFFIHGFSVLESSVLLIMSFDRFLAIHNPLRYTSILTTVRVAQIGIVFSFKSMLLVLPFPFTLRNLRYCKKNQLSHSYCLHQDVMKLACSDNRIDVIYGFFGALCLMVDFILIAVSYTLILKTVLGIASKKEQLKALNTCVSHICAVIIFYLPIINLAVVHRFARHVSPLINVLMANVLLLVPPLTNPIVYCVKTKQIRVRVVAKLCQRKI

SEQ ID NO: 777 - DNA, 1285 bp, Homo sapiens
  source
  (1)..(1285)
  CDS (201)..(1085)
ggattatgagtatgagaagtgcttcaggagccaaatgactgatcaatgagggctattgtatttttctccccttaggctggctccacagatttgggagagaacattcccaacaatctctcaggcacagatagatttggaatttagttcccctgctcagtatgggtgctcaatgaagtcaggtactaactaaccagctcaccatgccacacctcagcaacaccacatctgagttcccaatcttcctcctaacaggcttccctgggctggaggccttccacatctggatctcaattcccttcttccttctgagcacagttgctctcttagggaacagcatgatcctattggttgttattctggagccaaacctccatgaacccatgtactgttttctcttcatgctgtctgccgctgacctggggctgaccctctccacaatgcccacgaccctcagtgtcctctggttcagtgcacgtgaaatcatcctcaatgcatgtatcatccagctctttttcctccacagctctggctttatggaatcctcagtactgatggccatggcttttgaccgctttgttgccatttgcagacccctcagatatgctaccatcctgacagactccagaattctaaagattggtgtagcaatagtcctaagaacattgatcagcctctctccatccctctttctcattaagagactgtcattttgcaaagtcaatgtcctttcccattcttactgcttccaccctgatgcgcttaaagttgcatgttctgattcaaggatgaacagctatggaggcttagctgttctcattctggtcaccggggttggtacaccatgtgttgcgctttcctacatcctgataatccactctgtactaaacatcatctcttcagagggacggaggaaggccttcgacacttgtggatctcacattggggcagttgcagtcttctacattccctgggttgttctttcagttgtccacagatttttccacaaggcttcaccaatatgtccacccactattgtccaacatctatttccttggcccctctcggctgaaccccatcatatatagtgtgaagactaaacaaatccgcagggctatcctcaaactctttcaaacaaaatcaaaagaaatgtaatgggggcttttcttcctgctggggtctacctgattcaatcatattctgttgcatttctctcccatgccaacccgtatttcttctctaataacaaaaagaagaacagtaatgtttactgagcacccactatctt

SEQ ID NO: 778 - protein, 294 aa, Homo sapiens [sequence omitted]

SEQ ID NO: 779 - DNA, 1393 bp, Homo sapiens
  source
  (1)..(1393)
  CDS (201)..(1193)
ctcaataaatgtgaaacactgacagacttggagagaaatgtgtagctctgggaagctaaaaagaaaattcaagttctttgaaaattagaaataataactcagtgaatcttgaagtgccagagagatgttacaagtgataaactatgtattatgtgttatgttaaatgactgaaacatccctgtcttctcagtgcttccctatgtcggtcctcaataataccattgctgagcctctgatcttcctcctgatgggcattccaggcctgaaagccacccagtactggatctccatccctttttgtctcctatatgttgttgccgtctctggaaatagcatgatcctgtttgtggtcctctgtgaacggagcctccataagcctatgtactatttcctctctatgctttcagccacagacctgagcttgtccctgtgtacactttctactacccttggtgtcttctggtttgaagcccgagaaatcaacctaaatgcctgcattgcccagatgttctttctacacggatttactttcatggagtctggggttctactggccatggcctttgatcgttttgtggccatctgttacccactgagatacactaccatccttaccaatgcccgaattgccaagattgggatgagcatgttgataagaaatgttgccgtcatgttgccagtcatgctctttgtcaagaggttgtccttctgcagttctatggtcctttcacattcttactgctaccatgttgatctcatccaactctcctgcacagacaataggatcaacagcatccttggtctgtttgcgcttttgtccactacagggtttgactgcccttgcatcctgctctcctatatcctgatcattcgatctgtcctcagcattgcttcctcagaagagaggcggaaagccttcaacacctgcacatcccacatcagtgctgtttccatcttctacctccctctcatcagtttgtctcttgtccatcgctatggccattcagcacctccatttgtccacatcatcatggccaatgtctttctgctaatccctcctgtgctcaaccctattatttacagtgtaaagattaagcagattcaaaaggccattatcaaggtcttaattcagaagcactccaaatctaatcatcagctatttctgattagagataaagccatttatgaataagtgctttgctacaatggagtaattgtcccaaagtgcccacacatgcctccaacagtccaaactaagcaatttataggttatgtgacatttatttagtcaatttctttgtcaataaattcatgtcattgccaactaaattatgattttgttttcaatatgaagtgaagaaacatatataaacaactaattatatttgtaag

SEQ ID NO: 780 - protein, 330 aa, Homo sapiens
MSVLNNTIAEPLIFLLMGIPGLKATQYWISIPFCLLYVVAVSGNSMILFVVLCERSLHKPMYYFLSMLSATDLSLSLCTLSTTLGVFWFEAREINLNACIAQMFFLHGFTFMESGVLLAMAFDRFVAICYPLRYTTILTNARIAKIGMSMLIRNVAVMLPVMLFVKRLSFCSSMVLSHSYCYHVDLIQLSCTDNRINSILGLFALLSTTGFDCPCILLSYILIIRSVLSIASSEERRKAFNTCTSHISAVSIFYLPLISLSLVHRYGHSAPPFVHIIMANVFLLIPPVLNPIIYSVKIKQIQKAIIKVLIQKHSKSNHQLFLIRDKAIYE

SEQ ID NO: 781 - DNA, 1348 bp, Homo sapiens
  source
  (1)..(1348)
  CDS (201)..(1148)
gaatttgtgctccttaatattgggaaatgttttttacatagggccgacaagagataccagcttccttcctctgtgaggttagacgaaagatgtatttttgtcctcattccattatttgtactcaaaagagataactttgagggatcaggaaggaaaacacgaaccattcctcactacttgctgaattactcaaagtcactatgggagactggaataacagtgatgctgtggagcccatatttatcctgaggggttttcctggactggagtatgttcattcttggctctccatcctcttctgtcttgcatatttggtagcatttatgggtaatgttaccatcctgtctgtcatttggatagaatcctctctccatcagcccatgtattactttatttccatcttagcagtgaatgacctggggatgtccctgtctacacttcccaccatgcttgctgtgttatggttggatgctccagagatccaggcaagtgcttgctatgctcagctgttcttcatccacacattcacattcctggagtcctcagtgttgctggccatggcctttgaccgttttgttgctatctgccatccactgcactaccccaccatcctcaccaacagtgtaattggcaaaattggtttggcctgtttgctacgaagcttgggagttgtacttcccacacctttgctactgagacactatcactactgccatggcaatgccctctctcacgccttctgtttgcaccaggatgttctaagattatcctgtacagatgccaggaccaacagtatttatgggctttgtgtagtcattgccacactaggtgtggattcaatcttcatacttctttcttatgttctgattcttaatactgtgctggatattgcatctcgtgaagagcagctaaaggcactcaacacatgtgtatcccatatctgtgtggtgcttatcttctttgtgccagttattggggtgtcaatggtccatcgctttgggaagcatctgtctcccatagtccacatcctcatggcagacatctaccttcttcttcccccagtccttaaccctattgtctatagtgtcagaacaaagcagattcgtctaggaattctccacaagtttgtcctaaggaggaggttttaagtaacctctgtcctccaacttttccactgaaaatctcatggaagctgttttagtatatgaaaagtaaaatatctgggtgttgctcatctggttaaaatcctaattctttcacttcttatacatgtaatttcagttaatctttaaccaatatgaaactcaggatttttttggacaaattgtgacaactatggccttacgtt

SEQ ID NO: 782 - protein, 315 aa, Homo sapiens
MGDWNNSDAVEPIFILRGFPGLEYVHSWLSILFCLAYLVAFMGNVTILSVIWIESSLHQPMYYFISILAVNDLGMSLSTLPTMLAVLWLDAPEIQASACYAQLFFIHTFTFLESSVLLAMAFDRFVAICHPLHYPTILTNSVIGKIGLACLLRSLGVVLPTPLLLRHYHYCHGNALSHAFCLHQDVLRLSCTDARTNSIYGLCVVIATLGVDSIFILLSYVLILNTVLDIASREEQLKALNTCVSHICVVLIFFVPVIGVSMVHRFGKHLSPIVHILMADIYLLLPPVLNPIVYSVRTKQIRLGILHKFVLRRRF

SEQ ID NO: 783 - DNA, 1336 bp, Homo sapiens
  source
  (1)..(1336)
  CDS (201)..(1136)
tgtaaacataagaattaagttatttgagactgatctattcaaatgactgtagattacaaaacacagtaacaggaccctccaaataaccttttctttttgctctgcatatactgaatgaaacacaaacttcttattcaatcttctctccccagctgctgcttctacatgtggcaagttctcctacactgtgatttggaaaaatgttttatcacaacaagagcatatttcacccagtcacatttttcctcattggaatcccaggtctggaagacttccacatgtggatctccgggcctttctgctctgtttaccttgtggctttgctgggcaatgccaccattctgctagtcatcaaggtagaacagactctccgggagcccatgttctacttcctggccattctttccactattgatttggccctttctgcaacctctgtgcctcgcatgctgggtatcttctggtttgatgctcacgagattaactatggagcttgtgtggcccagatgtttctgatccatgccttcactggcatggaggctgaggtcttactggctatggcttttgaccgttatgtggccatctgtgctccactacattacgcaaccatcttgacatccctagtgttggtgggcattagcatgtgcattgtaattcgtcccgttttacttacacttcccatggtctatcttatctaccgcctacccttttgtcaggctcacataatagcccattcctactgtgagcacatgggcattgcaaaattgtcctgtggaaacattcgtatcaatggtatctatgggctttttgtagtttctttctttgttctgaacctggtgctcattggcatctcgtatgtttacattctccgtgctgtcttccgcctcccatcacatgatgctcagctaaaagccctaagcacgtgtggcgctcatgttggagtcatctgtgttttctatatcccttcagtcttctctttccttactcatcgatttggacaccaaataccaggttacattcacattcttgttgccaatctctatttgattatcccaccctctctcaaccccatcatttatggggtgaggaccaaacagattcgagagcgagtgctctatgtttttactaaaaaataagactcttaccatgttattttactaagggctttgatccttctataaagaccgatatgttcttgccttaaggaatatctcctgatccttaacttattgctgtcaacttgcaatacaagttggtttgttcctggatgctgactaataatggattttaaaactgtcagaaacatcattgtagttcaagttcaaagactgaccaa

SEQ ID NO: 784 - protein, 311 aa, Homo sapiens
MFYHNKSIFHPVTFFLIGIPGLEDFHMWISGPFCSVYLVALLGNATILLVIKVEQTLREPMFYFLAILSTIDLALSATSVPRMLGIFWFDAHEINYGACVAQMFLIHAFTGMEAEVLLAMAFDRYVAICAPLHYATILTSLVLVGISMCIVIRPVLLTLPMVYLIYRLPFCQAHIIAHSYCEHMGIAKLSCGNIRINGIYGLFVVSFFVLNLVLIGISYVYILRAVFRLPSHDAQLKALSTCGAHVGVICVFYIPSVFSFLTHRFGHQIPGYIHILVANLYLIIPPSLNPIIYGVRTKQIRERVLYVFTKK

SEQ ID NO: 785 - DNA, 1327 bp, Homo sapiens
  source
  (1)..(1327)
  CDS (201)..(1127)
atttaaatctttggccacatgttaccattaaattgtacgtactttcaagcctctatgatgcagaaatatagcagatattagtttcactgatttctttgttttctgtgtgcactaagcaaggataaggcccactcagtgaatgagagacatttagtttataatatatcttagcataaaaagttcccagaagaacggcctcaatgaataccactctatttcatccttactctttccttcttctgggaattcctgggctggaaagtatgcatctctgggttggttttcctttctttgctgtgttcctgacagctgtccttgggaatatcaccatcctttttgtgattcagactgacagtagtctccatcatcccatgttctacttcctggccattctgtcatctattgacccgggcctgtctacatccaccatccctaaaatgcttggcaccttctggtttaccctgagagaaatctcctttgaaggatgccttacccagatgttcttcatccacctgtgcactggcatggaatcagctgtgcttgtggccatggcctatgattgctatgtggccatctgtgaccctctttgctacacgttggtgctgacaaacaaggtggtgtcagttatggcactggccatctttctgagacccttagtctttgtcataccctttgttctatttatcctaaggcttccattttgtggacaccaaattattcctcatacttatggtgagcacatgggcattgcccgcctgtcttgtgccagcatcagggttaacatcatctatggcttatgtgccatctctatcctggtctttgacatcatagcaattgtcatttcctatgtacagatcctttgtgctgtatttctactctcttcacatgatgcacgactcaaggcattcagcacctgtggctctcatgtgtgtgtcatgttgactttctatatgcctgcatttttctcattcatgacccataggtttggtcggaatatacctcactttatccacattcttctggctaatttctatgtagtcattccacctgctctcaactctgtaatttatggtgtcagaaccaaacagattagagcacaagtgctgaaaatgtttttcaataaataaaacatagctcatttataaatatcagattgattatcaatattataaataatcatatttacaatgaaagtggcatgaattttctatgttcaaaataataacagaacatttggaaagtatttaggaccatcttaggggaggactgaaaatggcaatcgtttggcaggtgctacccagaaatggaaaggtaagcccatgtcaaa

SEQ ID NO: 786 - protein, 308 aa, Homo sapiens
MNTTLFHPYSFLLLGIPGLESMHLWVGFPFFAVFLTAVLGNITILFVIQTDSSLHHPMFYFLAILSSIDPGLSTSTIPKMLGTFWFTLREISFEGCLTQMFFIHLCTGMESAVLVAMAYDCYVAICDPLCYTLVLTNKVVSVMALAIFLRPLVFVIPFVLFILRLPFCGHQIIPHTYGEHMGIARLSCASIRVNIIYGLCAISILVFDIIAIVISYVQILCAVFLLSSHDARLKAFSTCGSHVCVMLTFYMPAFFSFMTHRFGRNIPHFIHILLANFYVVIPPALNSVIYGVRTKQIRAQVLKMFFNK

SEQ ID NO: 787 - DNA, 1108 bp, Homo sapiens
  source
  (1)..(1108)
  CDS (201)..(908)
gtgggagcagtctgcagaattgggctaaggaaaggatatcatatatcacaatgttcttaaatcttgctttagttaccctcaacaactctgaacatttatttgtgtagaatttggattaaatggggcaaagagatattatttctaatgtttctttttctccctgagtgaagatcctgaatctgaagacacattcatcagtcatgtcccaggtcactaacaccacacaagaaggcatctacttcatcctcacggacatccctggatttgaggcctcccacatctggatctccatccccgtctgctgtctctacaccatctccatcatgggcaataccaccatcctcactgtcattcgcacagagccatctgtccaccagcgcatgtatctgtttctctccatgctggccctgacagacctgggtctcaccctcaccaccctacccacagtcatgcagcttctctggttcaatgttcgtagaatcagctctgaggcctgttttgctcagttcttcttccttcatggattctcctttatggagtcttctgtcctcctggctatgtccgttgactgctatgtggccatctgctgtcccctccattatgcctccatcctcaccaatgaagtcattggtagaattgggttagccatcatttgccgctgtattctggcggttcttccctcccttttcttactcaagcgactgcctttctgccactcccaccttctctctcactcctattgcctccaccaggatatgatccgcctggtctgtgctgacatcaggctcaacagctggtatggatttgctcttgccttgctcattattatcatggatcctctgctcattgtgatctcctatacacttattctgaaaaatatcttgggcacagccacctgggctgagtgactccgtgccctcaataactgcctgtcccacattctagctgtcctggtcctctacattcccatggttggtgtatctatgactcatcgctttgccaagcatgcctctccactggtccatgttatcatggccaatatctacctgctggcacccccggtgatgaaccccatcatttacagtgtaaagaacaagcagatccaatg

SEQ ID NO: 788 - protein, 235 aa, Homo sapiens
MSQVTNTTQEGIYFILTDIPGFEASHIWISIPVCCLYTISIMGNTTILTVIRTEPSVHQRMYLFLSMLALTDLGLTLTTLPTVMQLLWFNVRRISSEACFAQFFFLHGFSFMESSVLLAMSVDCYVAICCPLHYASILTNEVIGRIGLAIICRCILAVLPSLFLLKRLPFCHSHLLSHSYCLHQDMIRLVCADIRLNSWYGFALALLIIIMDPLLIVISYTLILKNILGTATWAE

SEQ ID NO: 789 - DNA, 1363 bp, Homo sapiens
  source
  (1)..(1363)
  CDS (201)..(1163)
tggaacaatcttggtttttgcatgttgctaccattattactaattttaacctttgttcatttcagacaggttctattttggatgacaaattatatggtcactttatcttcaggaggcaataattataattagttgaaagtttgagagttactcaagtttctctatccttaatcaccctctgtctttaggggctgagatttatgccatctgcctctgccatgatcattttcaacctgagcagttacaatccaggacccttcattctggtagggatcccaggcctggagcaattccatgtgtggattggaattcccttctgtatcatctacattgtagctgttgtgggaaactgcatccttctctacctcattgtggtggagcatagtcttcatgaacccatgttcttctttctctccatgctggccatgactgacctcatcttgtccacagctggtgtgcctaaagcactcagtatcttttggctaggggctcgcgaaatcacattcccaggatgccttacacaaatgttcttccttcactataactttgtcctggattcagccattctgatggccatggcatttgatcactatgtagctatctgttctcccttgagatataccaccatcttgactcccaagaccatcatcaagagtgctatgggcatctcctttcgaagcttctgcatcatcctgccagatgtattcttgctgacatgcctgcctttctgcaggacacgcatcataccccacacatactgtgagcatataggtgttgcccagctcgcctgtgctgatatctccatcaacttctggtatggcttttgtgttcccatcatgacggtcatctcagatgtgattctcattgctgtttcctacgcacacatcctctgtgctgtctttggccttccctcccaagatgcctgccagaaagccctcggcacttgtggttctcatgtctgtgtcatcctcatgttttatacacctgcctttttctccatcctcgcccatcgctttggacacaatgtctctcgcaccttccacatcatgtttgccaatctctacattgttatcccacctgcactcaaccccatggtttacggagtgaagaccaagcagatcagagataaggttatacttttgttttctaagggtacaggatgatgttttactaggataagtttatagtgtacagaaatgtagaaagagtgaaatggcaaatgctctttaaagcaagaactacctgaaactgctttcatgtgccaagaatgtggcatgatctgtatgacaatgatggtcatatgtataaaaaaaatccttgatgacctctttgcttgtgaaatagggggctgtacagaatatga

SEQ ID NO: 790 - protein, 320 aa, Homo sapiens
MPSASAMIIFNLSSYNPGPFILVGIPGLEQFHVWIGIPFCIIYIVAVVGNCILLYLIVVEHSLHEPMFFFLSMLAMTDLILSTAGVPKALSIFWLGAREITFPGCLTQMFFLHYNFVLDSAILMAMAFDHYVAICSPLRYTTILTPKTIIKSAMGISFRSFCIILPDVFLLTCLPFCRTRIIPHTYCEHIGVAQLACADISINFWYGFCVPIMTVISDVILIAVSYAHILCAVFGLPSQDACQKALGTCGSHVCVILMFYTPAFFSILAHRFGHNVSRTFHIMFANLYIVIPPALNPMVYGVKTKQIRDKVILLFSKGTG

SEQ ID NO: 791 - DNA, 1150 bp, Homo sapiens
  source
  (1)..(1150)
  CDS (201)..(752)
  CDS (789)..(950)
tgcattctagtgtgcttgggaggacaataaaataaacatccctgtgctgttgtatgacatagcttgaaacaaaagagaataaagaggatgattcaatggagatgaaaaactgtaccagggtaaaagaatttattttccttggcctaacccagaatggggacacaagattggtcctatttcttttcctactcttggtgtacatgacgactctgctgggaaacctcctcatcatggtcactgtcacctgtgaatcttgccttcacatgcccatgtattttttgctccataatttatctattgccgatatctgcttctactccatcacagagcccaaggttctggtggaccttctgtctgagagaaagaccatctccttcaatggttgcttcactcagatgtttctcttccaccttattggaggggtggatgcattttctctatcagtgatggcattggatcaatatgtggccatttccaagtccctgcactatgcgaccatcatgagtagagaccgttgcattgggctcacagtggctgcctggttggggggctttgtccactccattgtgcagattaccctgttgctcccactccctttctgtggaccaaatgttcttgacactttctactgtgatgttccccaggttctcaaactcgcccatacagacattttcatacttgagctgttgatgatttccaacaatggactgctcaccacactgtggtttttcctgctcctggtgtcctacatggtcatattatcattactcaagtctcaggcaggatagggcaggaggaaagtcatctccacctgcacctcccacatcactgtggtgaccctgcattttgtgccctgcatctatgtctatgcccggcctttcactgccctccccacggataaggccatctctgtcaccttcactgtcatctcccctctgctcaacccttgatctacactctgagaaaccatgagatgaagtcaaccatgaagagactgaagactctgaccttctgataggaaatagaccagtgcttccctccttctcaccacttttgaaaatgcttgcccagcaaatactttctactcactaattgatttctaattattttttagtctactaataagaagcacatgactttcaaacattct

SEQ ID NO: 792 - protein, 237 aa, Homo sapiens
MTTLLGNLLIMVTVTCESCLHMPMYFLLHNLSIADICFYSITEPKVLVDLLSERKTISFNGCFTQMFLFHLIGGVDAFSLSVMALDQYVAISKSLHYATIMSRDRCIGLTVAAWLGGFVHSIVQITLLLPLPFCGPNVLDTFYCDVPQVLKLAHTDIFILELLMISNNGLLTTLWFFLLLVSYMGRRKVISTCTSHITVVTLHFVPCIYVYARPFTALPTDKAISVTFTVISPLLNP

SEQ ID NO: 793 - DNA, 1336 bp, Homo sapiens
  source
  (1)..(1336)
  CDS (201)..(1136)
ttttttaaaattgtaatttatataagtgtatgcatgattgtataataagatgtcattttacatgcattggcaataaacttgaaattgtaatatctcacaagttttcagacctaatacttgaatctgttaagagagagtaaacactttctgaaataacattattttttccaagatattcaggaaagagaaaacatgattcaatggagttgggaaatgtcaccagagtaaaagaatttatatttctgggacttactcaatcccaagaccagagtttggtcttgtttctttttttatgtcttgtgtacatgacgactctgctgggaaacctcctcatcatggtcaccgtgacctgtgagtctcgccttcacacccccatgtacttcctgctccgcaatctagccatccttgacatctgcttctcctccacaactgctcctaaagtcttgctggaccttctgtcaaagaaaaagaccatatcctatacaagctgcatgacacagatatttctcttccacctccttggtggggcagacattttttctctctctgtgatggcgtttgactgctacatggccatctccaagcccctgcactatgtgaccatcatgagtagagggcaatgcactgccctcatctctgcctcttggatggggggctttgtccactccatcgtgcagatctccctgttgctgcctctccctttctgtggacccaatgttcttgacactttctactgcgatgtcccccaggtcctcaaactcacttgcactgacacttttgctcttgagttcttgatgatttccaacaatggcctggtcactaccctgtggtttatcttcctgcttgtgtcctacacagtcatcctaatgacgctgaggtctcaggcaggagggggcaggaggaaagccatctccacttgcacctcccacatcactgtggtgaccctgcattttgtgccctgcatctatgtctatgcccggcccttcactgccctccccacagaaaaggccatctctgtcaccttcactgtcatctcccctctgctgaaccctttgatctacactctgaggaaccaggaaatgaagtcagccatgagaagactgaagagaagactcgtgccttctgaaagggaatagaaaacaaatccaggccaggcgcggtggctcacagctgtaaccccagcactttgggaggccaaggcgggtggatcatgaggtcaagagatcgagaccatcctggccaacatggtgaaaccctgtctctactaaaaatacaaaaattagctgggcatgatggtgcgcacctgtagtcccagctaccaggaggctgaggcagg

SEQ ID NO: 794 - protein, 311 aa, Homo sapiens
MELGNVTRVKEFIFLGLTQSQDQSLVLFLFLCLVYMTTLLGNLLIMVTVTCESRLHTPMYFLLRNLAILDICFSSTTAPKVLLDLLSKKKTISYTSCMTQIFLFHLLGGADIFSLSVMAFDCYMAISKPLHYVTIMSRGQCTALISASWMGGFVHSIVQISLLLPLPFCGPNVLDTFYCDVPQVLKLTCTDTFALEFLMISNNGLVTTLWFIFLLVSYTVILMTLRSQAGGGRRKAISTCTSHITVVTLHFVPCIYVYARPFTALPTEKAISVTFTVISPLLNPLIYTLRNQEMKSAMRRLKRRLVPSERE

SEQ ID NO: 795 - DNA, 1366 bp, Homo sapiens
  source
  (1)..(1366)
  CDS (201)..(1166)
aataaacctctgcatcaagtcaagtaacactgagataaatatgaagaaaacaagcacatccatttaatctatataatttctaaagagatgaagaaaggcttagaaaaatactacaattttatttctgtggtggttccaacctgtgataactgagaacaatacaaatagagatttgaaattcatgttgaatcatgaatcatatgtctgcatctctcaaaatctccaatagctccaaattccaggtctctgagttcatcctgctgggattcccgggcattcacagctggcaacactggctatctctgcccctggcactactgtatctctcagcacttgctgcaaacaccctcatcctcatcatcatctggcagaacccttctttacagcagcccatgtatattttccttggcatcctctgtatggtagacatgggtctggccactactatcatccctaagatcctggccatcttctggtttgatgccaaggttattagcctccctgagtgctttgctcagatttatgccattcacttctttgtgggcatggagtctggtatcctactctgcatggcttttgatagatatgtggctatttgtcaccctcttcgctatccatcaattgtcaccagttccttaatcttaaaagctaccctgttcatggtgctgagaaatggcttatttgtcactccagtgcctgtgcttgcagcacagcgtgattattgctccaagaatgaaattgaacactgcctgtgctctaaccttggggtcacaagcctggcttgtgatgacaggaggccaaacagcatttgccagttggttctggcatggcttggaatggggagtgatctaagtcttattatactgtcatatattttgattctgtactctgtacttagactgaactcagctgaagctgcagccaaggccctgagcacttgtagttcacatctcaccctcatccttttcttttacactattgttgtagtgatttcagtgactcatctgacagagatgaaggctactttgattccagttctacttaatgtgttgcacaacatcatccccccttccctcaaccctacagtttatgcacttcagaccaaagaacttagggcagccttccaaaaggtgctgtttgcccttacaaaagaaataagatcttagagaccttctccatgatgtacatgaacctcagcttctcctaaactggatagtaaaatttcaaagaggataaatgagtaagtgaatacctttggaattccctttttatatttgtatgtaaataattgtgaaagcttcagaaaagatacaaaaaatcacagtagcctaaaatattgacaaaagctaaatatttaaatatattt

SEQ ID NO: 796 - protein, 321 aa, Homo sapiens
MSASLKISNSSKFQVSEFILLGFPGIHSWQHWLSLPLALLYLSALAANTLILIIIWQNPSLQQPMYIFLGILCMVDMGLATTIIPKILAIFWFDAKVISLPECFAQIYAIHFFVGMESGILLCMAFDRYVAICHPLRYPSIVTSSLILKATLFMVLRNGLFVTPVPVLAAQRDYCSKNEIEHCLCSNLGVTSLACDDRRPNSICQLVLAWLGMGSDLSLIILSYILILYSVLRLNSAEAAAKALSTCSSHLTLILFFYTIVVVISVTHLTEMKATLIPVLLNVLHNIIPPSLNPTVYALQTKELRAAFQKVLFALTKEIRS

SEQ ID NO: 797 - DNA, 1390 bp, Homo sapiens
  source
  (1)..(1390)
  CDS (201)..(1190)
tagaaatctttagacatattaacccatataattctcttctctatagggaatagatatgattattattgctattttatggatgatgaagctttctaaacatgatatagccagtaagtgttactattctctcattcctatctctgttctatcttgttcctccagataatgtgatactatgtggaggtttctgaccacagagaatgtccagcactcttggccacaacatggaatctcctaatcacactgatgttgacccttctgtcttcttcctcctgggcatcccaggtctggaacaatttcatttgtggctctcactccctgtgtgtggcttaggcacagccacaattgtgggcaatataactattctggttgttgttgccactgaaccagtcttgcacaagcctgtgtacctttttctgtgcatgctctcaaccatcgacttggctgcctctgtctccacagttcccaagctactggctatcttctggtgtggagccggacatatatctgcctctgcctgcctggcacagatgttcttcattcatgccttctgcatgatggagtccactgtgctactggccatggcctttgatcgctacgtggccatctgccacccactccgctatgccacaatcctcactgacaccatcattgcccacataggggtggcagctgtagtgcgaggctccctgctcatgctcccatgtcccttccttattgggcgtttgaacttctgccaaagccatgtgatcctacacacgtactgtgagcacatggctgtggtgaagctggcctgtggagacaccaggcctaaccgtgtgtatgggctgacagctgcactgttggtcattggggttgacttgttttgcattggtctctcctatgccctaagtgcacaagctgtccttcgcctctcatcccatgaagctcggtccaaggccctagggacctgtggttcccatgtctgtgtcatcctcatctcttatacaccagccctcttctccttttttacacaccgctttggccatcacgttccagtccatattcacattcttttggccaatgtttatctgcttttgccacctgctcttaatcctgtggtatatggagttaagaccaaacagatccgtaaaagagttgtcagggtgtttcaaagtgggcagggaatgggcatcaaggcatctgagtgactctggagtatagagggacttaatccaaaataaaaaaaaaaccttttcaagataatcctcagtatgtgagaccagaaagagcttttaagagggggataatgtcttctgcagaactttctagaccatttccaagaatgataaaccacagagaagggcattctttctttcctttcagagaagtgtaaacatggggagattct

SEQ ID NO: 798 - protein, 329 aa, Homo sapiens [sequence omitted]

SEQ ID NO: 799 - DNA, 1366 bp, Homo sapiens
  source
  (1)..(1366)
  CDS (201)..(1166)
aaaactaaacagacagacaaaattatttcttggcactcagaaatttggttgttggaccattaaaatgcattatggaatttttaaaagttgggggagagggagacagtaaaaataacctatattttctcttgtttttttttttttaactctaggaaagcccagacaaattttgagctatttcataacctaccagacttatcatgctaacactgaataaaacagacctaataccagcttcatttattctgaatggagtcccaggactggaagacacacaactctggatttccttcccattctgctctatgtatgttgtggctatggtagggaattgtggactcctctacctcattcactatgaggatgccctgcacaaacccatgtactacttcttggccatgctttcctttactgaccttgttatgtgctctagtacaatccctaaagccctctgcatcttctggtttcatctcaaggacattggatttgatgaatgccttgtccagatgttcttcatccacaccttcacagggatggagtctggggtgcttatgcttatggccctggatcgctatgtggccatctgctaccccttacgctattcaactatcctcaccaatcctgtaattgcaaaggttgggactgccaccttcctgagaggggtattactcattattccctttactttcctcaccaagcgcctgccctactgcagaggcaatatacttccccatacctactgtgaccacatgtctgtagccaaattgtcctgtggtaatgtcaaggtcaatgccatctatggtctgatggttgccctcctgattgggggctttgacatactgtgtatcaccatctcctataccatgattctccgggcagtggtcagcctctcctcagcagatgctcggcagaaggcctttaatacctgcactgcccacatttgtgccattgttttctcctatactccagctttcttctccttcttttcccaccgctttggggaacacataatccccccttcttgccacatcattgtagccaatatttatctgctcctaccacccactatgaaccctattgtctatggggtgaaaaccaaacagatacgagactgtgtcataaggatcctttcaggttctaaggataccaaatcctacagcatgtgaatgaacacttgccaggagtgagaagagaaggaaagaattacttctatttgcctcttatgcaggagttcataaaatctttctggaagtactgtattgatcacaaaatggagtttgttgactggtgcattctcaataagtaccttgggaatctcaacatcactggaaggcccaccaacatttctataaattttttaccttct

SEQ ID NO: 800 - protein, 321 aa, Homo sapiens
MLTLNKTDLIPASFILNGVPGLEDTQLWISFPFCSMYVVAMVGNCGLLYLIHYEDALHKPMYYFLAMLSFTDLVMCSSTIPKALCIFWFHLKDIGFDECLVQMFFIHTFTGMESGVLMLMALDRYVAICYPLRYSTILTNPVIAKVGTATFLRGVLLIIPFTFLTKRLPYCRGNILPHTYCDHMSVAKLSCGNVKVNAIYGLMVALLIGGFDILCITISYTMILRAVVSLSSADARQKAFNTCTAHICAIVFSYTPAFFSFFSHRFGEHIIPPSCHIIVANIYLLLPPTMNPIVYGVKTKQIRDCVIRILSGSKDTKSYSM

SEQ ID NO: 801 - DNA, 1437 bp, Homo sapiens
  source
  (1)..(1437)
  CDS (201)..(207)
  CDS (276)..(1237)
aaacaaggtcctgattttataatgtcgtataccttagatatgagaaaatggaaaaaatatgacctaccttatagagtattacagatgattaactgagttatcacagagaatgtacctaatatcacataggataatacatgtccaatagatgtaagtgacaacatgagattaacgaggctgagtcacacctcaatatcatgatgctaggtaattattttctcaatacttccatagagattattagaaatactaatatcaaatatttttccccttagtggtgctccaggagctcagagattccaacagctctaagttccaggtctctgagtttatcctgatgggattccctggcattcacagttggcagcactggctctccctgcccctggctctgctctacctcttagctctcagtgccaacatccttatcctgatcatcatcaacaaagaggcagcactgcaccagcctatgtactatttcctgggcatcttggctatggcagacataggcctggctaccaccatcatgcctaagattttggccatcttatggttcaatgctaagaccatcagtctcctggagtgctttgctcagatgtatgccatacattgctttgtggccatggaatcaagtacctttgtctgcatggctattgatagatatgtagccatttgtcgaccgctacgatatccatcaatcatcactgaatcttttgttttcaaagcaaatgggttcatggcactgagaaacagcctgtgtctcatctcagtgcctctgttggctgcccagaggcattactgctcccagaatcaaattgagcactgtctttgttctaaccttggagtcactagcctatcttgtgatgatcgaagaatcaatagcattaaccaggtccttttggcttggacactcatgggaagtgacctgggtttgattattttatcatatgctctaatactttactctgtcctgaagctgaactctccagaagctgcatccaaggccttaagtacctgcacctcccacctcatcttaatccttttcttctacacagtcatcattgtgatttccattactcgtagtacaggaatgagagttccccttattccagttctacttaatgtgctacacaatgtcattccccctgccctgaaccccatggtatatgcactcaagaacaaggaactcaggcaaggcttatacaaggtacttagactgggagtgaagggcacctgatatggaaaagatatttcattttttgaaaattttcttcacatgtttttatatcatattctccaactgctgcaaatggcagaacaacaaagaaatagcataatgaattggtggcaacaactgacactttagaacaaaggagatagaagtaatatttgaaatatttgggagtcaagcaaaaatcttcatcacaaagggtaaca

SEQ ID NO: 802 - protein, 322 aa, Homo sapiens [sequence omitted]

SEQ ID NO: 803 - DNA, 1375 bp, Homo sapiens
  source
  (1)..(1375)
  CDS (201)..(1175)
tttatgaaacttttaaaatgttatctggaatacagtattattcaatacattgtatattttcatagtcacttatgtataattgttggtgccattataaacttaattttattctaaatttgaatttgtatttgcaaggaaaatttgaatgaaatttgtttcataattccttctcttcaggatgaaacttctggaaaaatagaatgcctctatttaattcattatgctggtttccaacaattcatgtgactcctccatcttttattcttaatggaatacctggtctggaaagagtacatgtatggatctccctcccactctgcacaatgtacatcatcttccttgtggggaatcttggtcttgtgtacctcatttattatgaggagtccttacatcatccgatgtattttttttttggccatgctctctccctcattgacctccttacctgcaccaccactctacccaatgcactctgcatcttctggttcagtctcaaagaaattaacttcaatgcttgcttggcccagatgttctttgttcatgggttcacaggtgtggagtctggggtgctcatgctcatggctctagaccgctatatagccatttgctaccctttgcgttatgctaccacactcaccaaccctatcattgccaaggctgagcttgccaccttcctgaggggtgtattgctgatgattcctttcccattcttggttaagcgtttgcctttctgccaaagcaatattatctcccatacgtactgcgaccacatgtctgtagtaaagctatcttgtgccagcatcaaggtcaatgtaatctatggtctaatggttgctctcctgattggagtgtttgacatttgttgtatatctttgtcttacactttgatcctcaaggcagcgatcagcctctcttcatcagatgctcggcagaaggctttcagcacctgcactgcccatatatctgccatcatcatcacctatgttccagcattcttcactttctttgcccaccgttttgggggacacacaattcccccttctcttcacatcattgtggctaatctttatcttcttcttcccccaactctaaaccctattgtttatggagtaaagacaaaacagatacgcaagagtgtcataaagttcttccagggtgataagggtgcaggttgattcaaggcaacttaattcagatggaagaaagataaatgaaaaataacaaagaataaacttacgtgtgatattttacatttattgatgtgtagtatcatacattttctctctcagtctatgttttctgaaactgttttggggaaatttatagcccattctggatgtatatctcagtgcctttcccttaatttttgtctatt

SEQ ID NO: 804 - protein, 324 aa, Homo sapiens
MPLFNSLCWFPTIHVTPPSFILNGIPGLERVHVWISLPLCTMYIIFLVGNLGLVYLIYYEESLHHPMYFFFGHALSLIDLLTCTTTLPNALCIFWFSLKEINFNACLAQMFFVHGFTGVESGVLMLMALDRYIAICYPLRYATTLTNPIIAKAELATFLRGVLLMIPFPFLVKRLPFCQSNIISHTYCDHMSVVKLSCASIKVNVIYGLMVALLIGVFDICCISLSYTLILKAAISLSSSDARQKAFSTCTAHISAIIITYVPAFFTFFAHRFGGHTIPPSLHIIVANLYLLLPPTLNPIVYGVKTKQIRKSVIKFFQGDKGAG

SEQ ID NO: 805 - DNA, 1342 bp, Homo sapiens
  source
  (1)..(1342)
  CDS (201)..(1142)
ttattgattctgtttcatgctcatatgaccctagcagagtaagaggtattttactctttttcagaaaggaaccaagaagagtacaatgctattttttattttaccaggaatcaggataaagtgagaagtggagcaagaatcactaatggaaagtcaataattgtcactgatacacacaacagctttttgtgacagaaagaatgcctatagctaacgacacccagttccatacttcttcattcctactgctgggtatcccagggctagaagatgtgcacatctggattggattcccttttttctctgtgtatcttattgcactcctgggaaatgctgctatcttctttgtgatccaaactgagcagagtctccatgagcccatgtactactgcctggccatgttggattccattgacctgagcttgtctacggccaccattcccaaaatgctgggcatcttctggttcaatatcaaggaaatatcttttggaggctacctttctcagatgttcttcatccatttcttcactgtcatggagagcatcgtattggtggccatggcctttgaccgctacattgccatttgcaaacctctttggtacaccatgatcctcaccagcaaaatcatcagcctcattgcaggcattgctgtcctgaggagcttgtacatggtcattccactggtgtttctcctcttaaggttgcccttctgtggacatcgtatcatccctcatacttactgtgagcacatgggcattgcccgtctggcctgtgccagcatcaaagtcaacattatgtttggtcttggcagtatttctctcttgttattggatgtgctccttattattctctcccatatcaggatcctctatgctgtcttctgcctgccctcctgggaagctcgactcaaagctctcaacacctgtggctctcacattggtgttatcttagccttttctacaccagcatttttctctttctttacacactgctttggccatgatattccccaatatatccacattttcttggctaatctatatgtggttgttcctcccaccctcaatcctgtaatctatggggtcagaaccaaacatattagggagacagtgctgaggattttcttcaagacagatcactaaccagttggagtttggagggtctctcttagcattcatgatgaagcagccactagggaggagagaagagacaccaaggaatttgggtacagagaaagtgagataccctgaataaaatttaaaataattatgagtgtattggtagataaatattatttcacagtcaccttcagtgaaatgtcccaaccacaaaatatatccat

SEQ ID NO: 806 - protein, 313 aa, Homo sapiens
MPIANDTQFHTSSFLLLGIPGLEDVHIWIGFPFFSVYLIALLGNAAIFFVIQTEQSLHEPMYYCLAMLDSIDLSLSTATIPKMLGIFWFNIKEISFGGYLSQMFFIHFFTVMESIVLVAMAFDRYIAICKPLWYTMILTSKIISLIAGIAVLRSLYMVIPLVFLLLRLPFCGHRIIPHTYCEHMGIARLACASIKVNIMFGLGSISLLLLDVLLIILSHIRILYAVFCLPSWEARLKALNTCGSHIGVILAFSTPAFFSFFTHCFGHDIPQYIHIFLANLYVVVPPTLNPVIYGVRTKHIRETVLRIFFKTDH

SEQ ID NO: 807 - DNA, 1366 bp, Homo sapiens
  source
  (1)..(1366)
  CDS (201)..(1166)
actgtagttcaaagtctttcttgctatagttggaagaaagaatttctggttatcaatgtaaggtgaatgtacatggcacttgaggttcactttgtccaaaccagtacctcttatctcgtctctaactctccctctccctctcctaggcagaaagcaatggctgctaaagagtataaaatgctctcctcctgtcagccatcatgtctggggacaacagctccagcctgaccccaggattctttatcttgaatggcgttcctgggctggaagccacacacatctggatctccctgccattctgctttatgtacatcattgctgtcgtggggaactgtgggctcatctgcctcatcagccatgaggaggccctgcaccggcccatgtactacttcctggccctgctctccttcactgatgtcaccttgtgcaccaccatggtacctaatatgctgtgcatattctggttcaacctcaaggagattgactttaacgcctgcctggcccagatgttttttgtccatatgctgacagggatggagtctggggtgctcatgctcatggccctggaccgctatgtggccatctgctaccccttacgctatgccaccatccttaccaaccctgtcatcgccaaggctggtcttgccaccttcttgaggaatgtgatgctcatcatcccattcactctcctcaccaagcgcctgccctattgccgggggaacttcatcccccacacctactgtgaccatatgtctgtggccaaggtatcctgtggcaatttcaaggtcaatgctatttatggtctgatggttgctctcctgattggtgtgtttgatatctgctgtatctctgtatcttacactatgattttgcaggctgttatgagcctgtcatcagcagatgctcgtcacaaagccttcagcacctgcacatctcacatgtgttccattgtgatcacctatgttgctgcttttttcacttttttcactcatcgttttgtaggacacaatatcccaaaccacatacacatcatcgtggccaacctttatctgctactgcctcctaccatgaacccaattgtttatggagtcaagaccaagcagattcaggaaggtgtaattaaatttttacttggagacaaggttagttttacctatgacaaatgaaacatagaatagacatattgtttcaggtggtgagaaaataatggagacaaaatttcataaaagatgtgaataaaatggtattaaaatcatgacatgtaatttacccatgtaacaaacttgcacgtgtacctaaaataaaaatagaaataaaaaatcaaaataaagacataaatttgtaagtcaccataatatgtcaattt

SEQ ID NO: 808 - protein, 321 aa, Homo sapiens
MSGDNSSSLTPGFFILNGVPGLEATHIWISLPFCFMYIIAVVGNCGLICLISHEEALHRPMYYFLALLSFTDVTLCTTMVPNMLCIFWFNLKEIDFNACLAQMFFVHMLTGMESGVLMLMALDRYVAICYPLRYATILTNPVIAKAGLATFLRNVMLIIPFTLLTKRLPYCRGNFIPHTYCDHMSVAKVSCGNFKVNAIYGLMVALLIGVFDICCISVSYTMILQAVMSLSSADARHKAFSTCTSHMCSIVITYVAAFFTFFTHRFVGHNIPNHIHIIVANLYLLLPPTMNPIVYGVKTKQIQEGVIKFLLGDKVSFTYDK

SEQ ID NO: 809 - DNA, 1714 bp, Homo sapiens
  source
  (1)..(1714)
  CDS (201)..(1103)
  CDS (1470)..(1514)
  modified_base (1567)..(1666): a, t, c, g, unknown or other
gcaaatatttaaaagtgagagtgtctttttaactatatttcatattccctctctaggtctcttatgctatattatggagttaaagaatggattttctgtttccccaagaaatagacaccatgctgtgagagaagttatggtttctcactggaagcaagaaaactcatgcaagaaatgtgtctgtagggaatggcaccaatatgcttcataccaacaatacacagtttcacccttccaccttcctcgtagtgggggtcccagggctggaagatgtgcatgtatggattggcttccccttctttgcggtgtatctaacagcccttctagggaacatcattatcctgtttgtgatacagactgaacagagcctccaccaacccatgttttacttcctagccatgttggccggcactgatctgggcttgtctacagcaaccatccccaagatgctgggaattttctggtttaatcttggagagattgcatttggtgcctgcatcacacagatgtataccattcatatatgcactggcctggagtctgtggtactgacagtcacgggcatagatcgctatattgccatctgcaaccccctgagatatagcatgatccttaccaacaaggtaatagccattctgggcatagtcatcattgtcaggactttggtatttgtgactccattcacatttctcaccctgagattgcctttctgtggtgtccggattatccctcatacctattgtgaacacatgggcttggcaaagttagcttgtgccagtattaatgttatatatggattgattgccttctcagtgggatacattgacatttctgtgattggattttcctatgtccagatcctccgagctgtcttccatctcccagcctgggatgcccggcttaaggcactcagcacatgtggctctcacgtctgtgttatgttggctttctacctgccagccctcttttccttcatgacacaccgctttggccacaacatccctcattacatccacattcttctggccaatctgtatgtggtttttccccctgctcttaactctgttatctatggggtcaaaacaaaacagatacgagagcaggtacttaggatactcaaccctaaaagcttttggcattttgaccccaagaggatcttccacaacaattcagttagacaataatgagatcataacaaaataaacactggaaacattttttttactacttctcttgcattcccacatgagccaatagcattatatcccctacaacatctcatgatttcagtacggtctgttggaagttatagctcaaagattccaaaacaatctctctgtttcacccattaaaagtgcaaaaagtactcacacttaagccccatgatactacaaaatgcctaaagagaaacaaaggctttggtggagggatctgccagtaattgtcttgaatagcctttccacatgaagagtctgtgtatttgcatatctgaagctgaagctcatgacgattaagatgatgtggtattcatcagagctaggcagatacagttgcaagagaaatgacnnnnnnnnnnnnnnnnnnnnnnnnnnnnnnnnnnnnnnnnnnnnnnnnnnnnnnnnnnnnnnnnnnnnnnnnnnnnnnnnnnnnnnnnnnnnnnnnnnnnagtgagggcgactctagaggatgcggaaattaataaatggaaatacat

SEQ ID NO: 810 - protein, 315 aa, Homo sapiens [sequence omitted]

SEQ ID NO: 811 - DNA, 1339 bp, Homo sapiens
  source
  (1)..(1339)
  CDS (201)..(1139)
acaataatctgtgttgagaggcttcctcgattatcctctggaaagaagtgagtcttgaatgtttgtaaattaaccacctataccattacctctagcacactgataagagtctttctgtttcttcaggaacttgacaagagaggaccttaaagaaagtgagatccttcatacttaggaattcagtgacacttgctgggagaatgccttctatcaatgacacccacttctatccccccttcttcctcctgctaggaataccaggactggacactttacatatctggatttctttcccattctgtattgtgtacctgattgccattgtggggaatatgaccattctctttgtgatcaaaactgaacatagtctacaccagcccatgttctacttcctggccatgttgtctatgattgatctgggtctgtccacatccactatccccaaaatgctaggaatcttctggttcaacctccaagagatcagctttgggggatgccttcttcagatgttctttattcacatgtttacaggcatggagactgttctgttggtggtcatggcttatgaccgctttgttgccatctgcaaccctctccagtacaccatgatcctcaccaataaaaccatcagtatcctagcttctgtggttgttggaagaaatttagttcttgtaaccccatttgtgtttctcattctgcgtctgccattctgtgggcataacatcgtacctcacacatactgtgagcacaggggtctggccgggttggcctgtgcacccattaagatcaacataatctatgggctcatggtgatttcttatattattgtggatgtgatcttaattgcctcttcctatgtgcttatccttagagctgtttttcgccttccctctcaagatgtccgactaaaggccttcaatacctgtggttctcatgtctgtgttatgctgtgcttttacacaccagcatttttttcttttatgacacatcgttttggccaaaacattccccactatatccatattcttttggctaacctgtatgtggttgtcccacctgcccttaaccctgtcatttatggagtcaggaccaagcagatccgagagcaaattgtgaaaatatttgtacagaaagaataattctgtattaaagtttggataaatatatctatatacaacccaaattatcatcatctgagctccctttttaatcttctgtaacagttggtcatgcttgtcagattttttccttttgactggaagtgctttagtgttgacagataatgcaaacttaaaacctttgctgcctgtttcccctacttctctccaagtacctggac

SEQ ID NO: 812 - protein, 312 aa, Homo sapiens
MPSINDTHFYPPFFLLLGIPGLDTLHIWISFPFCIVYLIAIVGNMTILFVIKTEHSLHQPMFYFLAMLSMIDLGLSTSTIPKMLGIFWFNLQEISFGGCLLQMFFIHMFTGMETVLLVVMAYDRFVAICNPLQYTMILTNKTISILASVVVGRNLVLVTPFVFLILRLPFCGHNIVPHTYCEHRGLAGLACAPIKINIIYGLMVISYIIVDVILIASSYVLILRAVFRLPSQDVRLKAFNTCGSHVCVMLCFYTPAFFSFMTHRFGQNIPHYIHILLANLYVVVPPALNPVIYGVRTKQIREQIVKIFVQKE

SEQ ID NO: 813 - DNA, 1387 bp, Homo sapiens
  source
  (1)..(1387)
  CDS (201)..(452)
  CDS (572)..(593)
  CDS (742)..(1187)
  modified_base (702)..(702): a, t, c, g, unknown or other
aaagtgataggaataccccagtgacatgacactgaggaaaaacagatgaattcgcttggctctacataacctgctagaaaccacaagttgtacctatgacaaacaaattgtgctatctttgtgtatcaagaatccacagctagtttgtaatcataattttccagatcactgaaagaaagcagtaaaatatatgggaaaatatgacaacacaccgaaatgacaccctctccactgaagcttcagacttcctcttgaattgttttgtcagatcccccagctggcagcactggctgtccctgcccctcagcctccttttcctcttggccgtaggggccaacaccaccctcctgatgaccatctggctggaggcctctctgcaccagcccctgtactacctgctcagcctcctctccctgctggacatcgtgctctgcctcactgtcatccccaaggtcctgaccatcttctgctccctttaaccccaaggtcccggacttttttgtgtttggcctaagggccattagttttccggccggttttctccaaaagtacattaagaattgtttccaagccaggagttttggccattcaaggtcagggccataggatcgttaaggaacccttctgccacccccttgaaatatccctccattcatcacggatccctttggagtcaaggctgccaggtttattttgcccagnaatggtgttaatgactctgcccatcccccatcctttcagcacaactccgttattgtggaagaaatgtcattgagaactgcatctgtgccaatatgtctgtttccagactctcctgcgatgatgtcaccatcaatcacctttaccaatttgctggaggctggactctgctaggatctgacctcatccttatcttcctctcctacaccttcattctgcgagctgtgctgagactcaaggcagagggtgccgtggcaaaggccctaagcacatgtggctcccacttcatgctcatcctcttcttcagcaccatccttctggtttttgtcctcacacatgtggctaagaagaaagtctcccctgatgtgccagtcttgctcaatgttctccaccatgtcattcctgcagcccttaaccccatcatttacggggtgagaacccaagaaattaagcagggaatgcagaggttgttgaagaaagggtgctaacaaggaccactggatctctgaatatctaaaataagataatttattaatcacttaatgagtgagtgggctgaaattcatatctgtgacttataacctcaaactgggtacactagatattgtgtgtgcttttcaaaaacatcggttttaatttaagtctatcttccttttcacccttttctcagaaatattcttggccctct

SEQ ID NO: 814 - protein, 239 aa, Homo sapiens
MTTHRNDTLSTEASDFLLNCFVRSPSWQHWLSLPLSLLFLLAVGANTTLLMTIWLEASLHQPLYYLLSLLSLLDIVLCLTVIPKPGVLAIQAQLRYCGRNVIENCICANMSVSRLSCDDVTINHLYQFAGGWTLLGSDLILIFLSYTFILRAVLRLKAEGAVAKALSTCGSHFMLILFFSTILLVFVLTHVAKKKVSPDVPVLLNVLHHVIPAALNPIIYGVRTQEIKQGMQRLLKKGC

SEQ ID NO: 815 - DNA, 1363 bp, Homo sapiens
  source
  (1)..(1363)
  CDS (201)..(1163)
aggcacacacccagacagtgtatatatcacatattaaacataatagaacaaatatagtcattgatctacaaggaaaacaaaatagccattatgggaaagaagactgatggtcagtcactccttgaaattactcttttttttatttcctgctcacagaggcaatgctataactgctatacaatgaacttccaacagtcattatgtcatttctaaatggcaccagcctaactccagcttcattcatcctaaatggcatccctggtttggaagatgtgcatttgtggatctccttcccactgtgtaccatgtacagcattgctattacagggaacttcggccttatgtacctcatctactgtgatgaggccttacacagacctatgtatgtcttccttgcccttctttccttcacagatgtgctcatgtgcaccagcacccttcccaacactctcttcatattgtggtttaatctcaaggagattgattttaaagcctgcctcgcccagatgttctttgtgcacaccttcacagggatggagtctggggtgctcatgctcatggccctggaccactgtgtggccatctgcttccctctgcgttatgccaccatcctcactaattcagtcattgctaaagctgggttcctcacttttcttaggggtgtgatgcttgttatcccttccactttcctcaccaagcgccttccatactgcaagggcaacgtcataccccacacctactgtgaccacatgtctgtggccaagatatcttgtggtaatgtcagggttaacgccatctatggtttgatagttgccctgctgattgggggctttgatatcctgtgcattacaatctcctacactatgattcttcaagcagttgtgagtctatcatcagcagatgctcgacagaaggccttcagcacctgcactgcccacttctgtgccatagtcctcacctatgttccagccttctttaccttctttacacaccattttgggggacacaccattcctctacacatacatattattatggctaatctctacctactaatgcctcccacaatgaaccctattgtgtatggggtgaaaaccaggcaggtacgagaaagtgtcattaggttctttcttaagggaaaggacaattctcataacttttaaagtcttctgagatgttagaattttcttagccaggttgagatcaccaagtcaatagggagctctttaaatgacaccagaaatctggccacaggaatatttttatgatactcggattactctacatctttggaaagggtaccatcatgttcaaataggtaaataccctctcttatgttattccatgttctttaaagcctttt

SEQ ID NO: 816 - protein, 320 aa, Homo sapiens
MSFLNGTSLTPASFILNGIPGLEDVHLWISFPLCTMYSIAITGNFGLMYLIYCDEALHRPMYVFLALLSFTDVLMCTSTLPNTLFILWFNLKEIDFKACLAQMFFVHTFTGMESGVLMLMALDHCVAICFPLRYATILTNSVIAKAGFLTFLRGVMLVIPSTFLTKRLPYCKGNVIPHTYCDHMSVAKISCGNVRVNAIYGLIVALLIGGFDILCITISYTMILQAVVSLSSADARQKAFSTCTAHFCAIVLTYVPAFFTFFTHHFGGHTIPLHIHIIMANLYLLMPPTMNPIVYGVKTRQVRESVIRFFLKGKDNSHNF

SEQ ID NO: 817 - DNA, 1342 bp, Homo sapiens
  source
  (1)..(1342)
  CDS (201)..(1142)
  modified_base (190)..(190): a, t, c, g, unknown or other
ttgtggctggcatatgatacatacttggttaaatataagggaggatgatgacagtgattttaaaaactttattgggacagatacagggcctcagtggaaacccacactctactacgtctagaatgtactttttatgtttctgtacttctctactaggttttaaggtacactgggtctccagattgatcangaaactttacatggcatctcccaacaatgactccactgccccagtctctgaattcctcctcatctgcttccccaacttccagagctggcagcactggttgtctctgcccctcagccttctcttcctcctggccatgggagctaacaccaccctcctgatcaccatccagctggaggcctctctgcaccagcccctgtactacctgctcagcctcctctccctgctggacatcgtgctctgcctcaccgtcatccccaaggtcctggccatcttctggtttgacctcaggtcgatcagcttcccagcctgcttcctccagatgttcatcatgaacagttttttgaccatggagtcctgcacgttcatggtcatggcctatgaccgttatgtggccatctgccatccattgagatacccgtctatcatcactgaccagtttgtggctagggccgtggtctttgttatagcccggaatgcctttgtttctcttcctgttcccatgctttctgccaggctcagatactgtgcaggaaacataatcaagaactgcatctgcagtaacctgtctgtgtccaaactctcttgtgatgacatcactttcaatcagctctaccagtttgtggcaggctggactctgttgggctctgatcttatccttattgttatctcctattcttttatattgaaagttgtgcttaggatcaaggccgagggtgctgtggccaaggccttgagcacgtgtggttcccacttcatcctcatcctcttcttcagcacagtcctgctggttctggtcatcactaacctggccaggaagagaattcctccagatgtccccatcctgctcaacatcctgcaccacctcattcccccagctctgaaccccattgtttatggtgtgagaaccaaggagatcaagcagggaatccaaaacctgctgaagaggttgtaagaataaaaaggattagatccacctttagagttgttaattgttagtgaaaattgggaaatagggaattaattttatgttggaaaggaaatttcactttaaatcctgcctgagttcggattcttctgttctcaatatctcaggcaacaatgaacacatttatttgtgaatctttgttttctgttgcttgaaaggaaacctcc

SEQ ID NO: 818 - protein, 313 aa, Homo sapiens
MASPNNDSTAPVSEFLLICFPNFQSWQHWLSLPLSLLFLLAMGANTTLLITIQLEASLHQPLYYLLSLLSLLDIVLCLTVIPKVLAIFWFDLRSISFPACFLQMFIMNSFLTMESCTFMVMAYDRYVAICHPLRYPSIITDQFVARAVVFVIARNAFVSLPVPMLSARLRYCAGNIIKNCICSNLSVSKLSCDDITFNQLYQFVAGWTLLGSDLILIVISYSFILKVVLRIKAEGAVAKALSTCGSHFILILFFSTVLLVLVITNLARKRIPPDVPILLNILHHLIPPALNPIVYGVRTKEIKQGIQNLLKRL

SEQ ID NO: 819 - DNA, 1390 bp, Homo sapiens
  source
  (1)..(1390)
  CDS (201)..(1190)
  modified_base (1)..(26): a, t, c, g, unknown or other
nnnnnnnnnnnnnnnnnnnnnnnnnnttaattcagacatgtggatgtctcacttgtaaaagaattatctccaccaaaggagattttcttccctgtagctaactttattcccttcgtttgcagttgaagtcactttattcttctcaggatgatggttgccccatttggacaatgtgataatgtagcaggaatgcagaaatcatgactttggtttcttttttctctttcctctccaagccattgataatgctccttagcaattcaagctggaggctatcccagccttcttttctcctggtagggattccaggtttagaggaaagccagcactggattgcactgcccctgggcatcctttacctccttgctttagtgggcaatgttaccattctcttcatcatctggatggacccatccttgcaccaatctatgtacctcttcctgtccatgctagctgccatcgacctggttctggcctcctccactgcacccaaagcccttgcagtgctcctggttcatgcccacgagattgggtacatcgtctgcctgatccagatgttcttcatccatgcattctcctccatggagtcaggggtacttgtggccatggctctggatcgctatgtagccatttgtcaccccttgcaccattccacaatcctgcatccaggggtcatagggcgcatcggaatggtggtgctggtgaggggattactactccttatccccttccccattttgttgggaacacttatcttctgccaagccaccatcataggccatgcctattgtgaacatatggctgttgtgaaacttgcctgctcagaaaccacagtcaatcgagcttatgggctgactatggccttgcttgtgattgggctggatgttctggccattggtgtttcctatgcccacatcctccaggcagtgctgaaggtaccagggagtgaggcccgacttaaggcgtttagcacatgtggctctcatatttgtgtcatcctggtcttctatgtccctggaattttctccttcctcactcaccgctttggtcatcatgtaccccatcatgtccatgttcttctggccacacggtatctcctcatgccacctgcgctcaatcctcttgtctatggagtgaagactcagcagatccgccagcgagtgctcagagtgtttacacaaaaggattgatctgaacatattctcattgtttccttcggaggcttcttctgcggaccacagccaggagcctgtgactggtgtagattacatgaatacagaccattttgcagtgagtattccttctagtcttactagtgccatgctaaagaacacccacagatacttggcttattgggatgtacctggatatctggatttgtgaatatttt

SEQ ID NO: 820 - protein, 329 aa, Homo sapiens
MTLVSFFSFLSKPLIMLLSNSSWRLSQPSFLLVGIPGLEESQHWIALPLGILYLLALVGNVTILFIIWMDPSLHQSMYLFLSMLAAIDLVLASSTAPKALAVLLVHAHEIGYIVCLIQMFFIHAFSSMESGVLVAMALDRYVAICHPLHHSTILHPGVIGRIGMVVLVRGLLLLIPFPILLGTLIFCQATIIGHAYCEHMAVVKLACSETTVNRAYGLTMALLVIGLDVLAIGVSYAHILQAVLKVPGSEARLKAFSTCGSHICVILVFYVPGIFSFLTHRFGHHVPHHVHVLLATRYLLMPPALNPLVYGVKTQQIRQRVLRVFTQKD

SEQ ID NO: 821 - DNA, 1360 bp, Homo sapiens
  source
  (1)..(1360)
  CDS (201)..(1160)
atctctaaaaaaactagacctattctaattcagacatgtggatgtctcacctgtaaaaaaatttatctccaccaaagattttctttcttgtatctaactttattccctttggttgcagttttagtcactttattcttctcatgaagatggtagacaatgtgatctggactatgtgataatgtaccagaaatgcagaaatcatgaatttggattcttttttctctttcctcctcaagtcattgataatggcacttagcaattccagctggaggctaccccagccttcttttttcctggtaggaattccgggtttagaggaaagccagcactggatcgcactgcccctgggcatcctttacctccttgctctagtgggcaatgttaccattctcttcatcatctggatggacccatccttgcaccaatctatgtacctcttcctgtccatgctagctgccatcgacctggttgtggcctcctccactgcacccaaagcccttgcagtgctcctggttcgtgcccaagagattggttacactgtctgcctgatccagatgttcttcacccatgcattctcctccatggagtcaggggtacttgtggccatggctctggatcgctatgtagccatttgtcaccccttgcaccattccacaatcctgcatccaggggtcatagggcacatcggaatggtggtgctggtgcggggattactactcctcatccccttcctcattctgttgcgaaaacttatcttctgccaagccaccatcataggccatgcctattgtgaacatatggctgttgtgaaacttgcctgctcagaaaccacagtcaatcgagcttatgggctgactgtggccttgcttgtggttgggctggatgtcctggccattggtgtttcctatgcccacattctccaggcagtgctgaaggtaccaggaaatgaggcccgacttaaggcctttagcacatgtggctctcatgtttgtgtcatcctggtcttctatatcccgggaatgttctccttcctcactcaccgctttggtcatcatgtaccccatcacgtccatgttcttctggccatactgtatcgccttgtgccacctgcactcaatcctcttgtctatagggtgaagacccagaagatccaccagtgagtgctcagggtgtttacactaaaggattgacctgaatatattctcactgtttccttcagaggcacctgccaggacatagccaggaactcatggctggtgcagattatatggatggggtaattttcacagcgagcagtccttctagtgtcacttatatcacagcaaagaatatccagaggcacctggcttcacagcttatt

SEQ ID NO: 822 - protein, 319 aa, Homo sapiens
MNLDSFFSFLLKSLIMALSNSSWRLPQPSFFLVGIPGLEESQHWIALPLGILYLLALVGNVTILFIIWMDPSLHQSMYLFLSMLAAIDLVVASSTAPKALAVLLVRAQEIGYTVCLIQMFFTHAFSSMESGVLVAMALDRYVAICHPLHHSTILHPGVIGHIGMVVLVRGLLLLIPFLILLRKLIFCQATIIGHAYCEHMAVVKLACSETTVNRAYGLTVALLVVGLDVLAIGVSYAHILQAVLKVPGNEARLKAFSTCGSHVCVILVFYIPGMFSFLTHRFGHHVPHHVHVLLAILYRLVPPALNPLVYRVKTQKIHQ

SEQ ID NO: 823 - DNA, 1357 bp, Homo sapiens
  source
  (1)..(1357)
  CDS (201)..(1157)
tcatagaccacaccattatttatcaagtctcacaattctacctttagaatattggctgaaatttgccttacttggcaaaagtgaactacctatcattggcttcctaaagagtaagtgaaagggatacttttcaaagcaatttgtaaaaataacctcttgtatctgcccataaacatagtcatcagaagcctactcagctcatgattcagcctatggcgtcacccagcaacagctccactgtcccagtctctgaattcctcctcacctgcttccccaacttccagagttggcagcactggctctccctgcccctcagccttctcttcctcctggccatgggagctaacaccaccctcctgatcaccatccagctggaggcctctctgcaccagcccctgtactacctgctcagcctcctctccctgctggacatcgtgctctgcctcaccgtcatccccaaggtcctggccatcttctggtatgatcttaggtcgatcagcttccctgcctgcttcctccagatgttcatcatgaacagtttcctccccatggagtcctgcacgtttatggtcatggcctatgaccgttatgtggccatctgccacccactgcggtacccatccatcatcactaatcaatttgtggccaaagctagtgtcttcattgtggtgcggaatgcgcttcttactgcacccattcctatcctcacttccctgctccattactgtggggaaaatgtcattgagaactgcatctgtgccaacttgtctgtgtccaggctctcctgtgataatttcacccttaacagaatctaccaatttgtggctggttggaccttgctgggctcagatttattcctcatcttcctctcttacaccttcattctaagagctgtgcttagattcaaagcagagggggcggcagtgaaggccctgagcacatgtggctcccacttcatcctcattcttttcttcagcaccatactgctggttgtggtgttgacaaacgtggccagaaagaaggtccccatggacatcctgatcctgctgaacgtccttcatcaccttattcctcctgcgttgaaccctattgtgtatggggttcggaccaaagagataaaacagggaattcagaagttactgcagagagggaggtgaatatgtaaagcatttctaatacctcctgttcttcctcttcagtgattttacctaggcagcgaagtagagaaatgtcagttagtgagtgtttattgcatgcactgaggctcccttcattactgaaccagattccttcctttactttccttgcctagttcaggtggaggtaggcaaggggaagaaactcgtatttattgagt

SEQ ID NO: 824 - protein, 318 aa, Homo sapiens
MIQPMASPSNSSTVPVSEFLLTCFPNFQSWQHWLSLPLSLLFLLAMGANTTLLITIQLEASLHQPLYYLLSLLSLLDIVLCLTVIPKVLAIFWYDLRSISFPACFLQMFIMNSFLPMESCTFMVMAYDRYVAICHPLRYPSIITNQFVAKASVFIVVRNALLTAPIPILTSLLHYCGENVIENCICANLSVSRLSCDNFTLNRIYQFVAGWTLLGSDLFLIFLSYTFILRAVLRFKAEGAAVKALSTCGSHFILILFFSTILLVVVLTNVARKKVPMDILILLNVLHHLIPPALNPIVYGVRTKEIKQGIQKLLQRGR

SEQ ID NO: 825 - DNA, 1327 bp, Homo sapiens
  source
  (1)..(1327)
  CDS (201)..(1127)
caacatcttttaaagtttgttttacaacactgaaaatgttccaatgaaagaaacatgatcatcttatgaagggggttcttgaaattttcagtagaaattggggcagttcctaagcctgcacttctgaattatataattttataggtatgcctgtctatggttagcacatagtgacttcttactgaaaaggacaacaaactatgagacagataaatcagacacaagtgacagaattcctccttctgggactctctgatgggccacacaccgagcagctgctatttatcgtattattgggtgtctacctggtcactgtgcttggaaatctgcttctaatctcccttgttcatgttgactcccaacttcacacacccatgtatttttttctctgcaacttgtctctggctgacctctgtttctctaccaacatagttcctcaggcactagtccacctgctttccagaaagaaggtcattgcattcacactttgcgcagctcgacttctctttttcctcatttttgggtgtacccagtgcgcccttcttgcagtgatgtcctatgatcgctatgttgcaatctgcaatcctctgcgttaccctaacatcatgacctggaaagtgtgtgtccagctggcaacaggatcatggaccagtggcattctggtgtctgtggtagacaccaccttcatactgaggctaccctaccgaggcagtaacagcattgctcatttcttttgtgaggcccctgcactattgatcttagcatccacagacacccatgcatcagagatggccatttttcttatgggggttgtgattctcctcatacctgtttttctgattctggtatcctatggccgtatcatagtaactgtggtcaagatgaagtcaactgtggggagtctcaaggcattttctacctgtggctcccacctcatggtggtcatacttttttatggatcagcaattatcacttacatgacacccaagtcttccaaacagcaggaaaaatcggtgtctgttttctatgcaatagtgactcccatgcttaatcccctcatctatagcctgagaaacaaggatgtgaaggcagctctgaggaaagtagccacaaggaatttcccatgaaggcttggaatctcacactgacagtgagctcagagaaccttttggcttcctacttcaaagacttgctgggaagacatggaatcaacccaggtggattggatttttaaaaatgtacattggcacacttggtttctcaagtcacctgcttggcccccttccaagttgtactttccttctttttcctcctttccttttccttc

SEQ ID NO: 826 - protein, 308 aa, Homo sapiens
MRQINQTQVTEFLLLGLSDGPHTEQLLFIVLLGVYLVTVLGNLLLISLVHVDSQLHTPMYFFLCNLSLADLCFSTNIVPQALVHLLSRKKVIAFTLCAARLLFFLIFGCTQCALLAVMSYDRYVAICNPLRYPNIMTWKVCVQLATGSWTSGILVSVVDTTFILRLPYRGSNSIAHFFCEAPALLILASTDTHASEMAIFLMGVVILLIPVFLILVSYGRIIVTVVKMKSTVGSLKAFSTCGSHLMVVILFYGSAIITYMTPKSSKQQEKSVSVFYAIVTPMLNPLIYSLRNKDVKAALRKVATRNFP

SEQ ID NO: 827 - DNA, 1330 bp, Homo sapiens
  source
  (1)..(1330)
  CDS (201)..(1130)
attacaactctgtagataatgcattaaagattgttaccaagcctatgctttagatctatagaattttaaagtacaaattgttgctataattacataatgcatatagtatttatatatttctaaatctctttttttgtttatcactctattgctttatttctcattgctacaggtcatcttaagtttctcagataatactgatggagaattgtacggaagtgacaaagttcattcttctaggactaaccagtgtcccagaactacagatccccctctttatcttgttcaccttcatctacctcctcactctgtgtgggaacctggggatgatgttgctgatcctgatggactcttgtctccacacccccatgtactttttcctcagtaacctgtctctggtggactttggatactcctcagctgtcactcccaaggtcatggctgggttccttagaggagacaaggtcatctcctacaatgcatgtgctgttcagatgttcttctttgtagccttggccacggtggaaaattacttgttggcctcaatggcctatgaccgctatgcagcagtgtgcaaacccctacactacaccaccaccatgacggccagtgtaggtgcctgtctggccctaggctcatatgtctgtggcttcctaaatgcctcattccacattgggggcatattcagtctctctttctgtaaatccaatctggtacatcactttttctgtgatgttccagcagtcatggctctgtcttgctctgataaacacactagtgaggtgattctggtttttatgtcaagctttaatatcttttttgttcttctagttatctttatctcctacttgttcatattcatcaccatcttgaagatgcattcagctaagggacaccaaaaagcattgtccacctgtgcctctcacttcactgcagtctccgtcttctatgggacagtaatcttcatctacttgcagcccagctccagccactccatggacacagacaaaatggcatctgtgttctatgctatgatcatccccatgctgaaccctgtggtctacagcctgaggaacagagaagtccagaatgcattcaagaaagtgttgagaaggcaaaaatttctataagtttggaattttaacattgttgtatacacaaaaatgttgtttccctcatctcagactttcctcatgcaatgagttacatttgaaaccccacaatacatttaagttcatgaggtgatattcttacctctttagaagtcaattttttaataaaaataaaatattatcagaaatgtaatacctgaatgaggaaggctaaatgg

SEQ ID NO: 828 - protein, 309 aa, Homo sapiens
MENCTEVTKFILLGLTSVPELQIPLFILFTFIYLLTLCGNLGMMLLILMDSCLHTPMYFFLSNLSLVDFGYSSAVTPKVMAGFLRGDKVISYNACAVQMFFFVALATVENYLLASMAYDRYAAVCKPLHYTTTMTASVGACLALGSYVCGFLNASFHIGGIFSLSFCKSNLVHHFFCDVPAVMALSCSDKHTSEVILVFMSSFNIFFVLLVIFISYLFIFITILKMHSAKGHQKALSTCASHFTAVSVFYGTVIFIYLQPSSSHSMDTDKMASVFYAMIIPMLNPVVYSLRNREVQNAFKKVLRRQKFL

SEQ ID NO: 829 - DNA, 1332 bp, Homo sapiens
  source
  (1)..(1332)
  CDS (201)..(762)
  CDS (843)..(1132)
aaggtatgtatgaagtttcaatagctgctttaaaaatgagttagcacgtggctcatagcaggtgttcaattcttaccagttcctctccctctttccctaacactgtctatcctggggatatttaaaaatctctgggcactgaccctaactctagggtacacacgtgtcttatttggtctctctgcagtgacatgcacaccatggtggagaaccacacccaagtcacctggttccgcctgctgggacttacagagcaggaggagctcagaggcatcctctttgtgctcttcctgctcatgcattcagtcactgttatgggcaacctgggaatgatcactctgatccatgcagacccacagctccacacccccatgtatttcttcctgagcgtcctatccttgatagactcctcgttttccacagtggacatccccaggctgctggagagcttcctcatctcaagccaatccatctcctttgcaggctgtatggtccagatggccctcatgatcctccatggtactgctgagtgtctgctcctggccatcatggcctatgaccgattcaccgccatctgccaccctctcctctatcacactattatatcccaatgtctgtgtgccctgctggtggtgacctgctatactgtttctgttgccaattcagctttgctgactgggtgcatctttaagctgccctactgtggccccaatgtcattaaccactatttctgtgacatcccccctgtgctccaacttgccggtgcagatactacgaggttgagaccattatcttctcattgtgtgccttgctcatcctctttaccatcaccattatcccagtctcctatgcctacatcctcgtgaccatttgcaggatgcgctccctgcaagcccagagcaaagctctctccacctgtgcctcccacctcaccatcatctgcctcttctatagcaccatcaccttcatgtatgctcagccaagctctcacaattccatggaacacaacaaggtcatgtctgtcttctacactgtggtcatccgcaggctgaaccctctgatctacagcctgaggaataaagatgtaaaatatgctttgaagaggagatgcctgtgcaagctgtcttcataatcaagtgtggaacattgagcatcctatcccaagctgtaacatggtagccacaatataaagtatggataatattaacccttagatagagcaaagtatgtgccagcactagtttaaacacttgacacattatcaacccatttaatcttcacaagtgtatgaaatgggcactattattatcccttaggaatctggggcacaga

SEQ ID NO: 830 - protein, 283 aa, Homo sapiens
MVENHTQVTWFRLLGLTEQEELRGILFVLFLLMHSVTVMGNLGMITLIHADPQLHTPMYFFLSVLSLIDSSFSTVDIPRLLESFLISSQSISFAGCMVQMALMILHGTAECLLLAIMAYDRFTAICHPLLYHTIISQCLCALLVVTCYTVSVANSALLTGCIFKLPYCGPNVINHYFCDIPPVLQLAVSYAYILVTICRMRSLQAQSKALSTCASHLTIICLFYSTITFMYAQPSSHNSMEHNKVMSVFYTVVIRRLNPLIYSLRNKDVKYALKRRCLCKLSS

SEQ ID NO: 831 - DNA, 1375 bp, Homo sapiens
  source
  (1)..(1375)
  CDS (201)..(1175)
tcaagatgtccaggaagttgtatataaggagaatcagagcagagagagactagggttcagaattaccaggatgacttagtcctgtttgttactgtcaccactccaatgccttttcctcattagtcctttctctcctctgagccacaactaaatgatgtttctacttttccctttctactttcctagaccctggattttgtatgcagaagccccagctcttggtccctatcatagccacttcaaatggaaatctggtccacgcagcatacttccttttggtgggtatccctggcctggggcctaccatacacttttggctggctttcccactgtgttttatgtatgccttggccaccctgggtaacctgaccattgtcctcatcattcgtgtggagaggcgactgcatgagcccatgtacctcttcctggccatgctttccactattgacctagtcctctcctctatcaccatgcccaagatggccagtcttttcctgatgggcatccaggagatcgagttcaacatttgcctggcccagatgttccttatccatgctctgtcagccgtggagtcagctgtcctgctggccatggcttttgaccgctttgtggccatttgccacccattgcgccatgcttctgtgctgacagggtgtactgtggccaagattggactatctgccctgaccagggggtttgtattcttcttcccactgcccttcatcctcaagtggttgtcctactgccaaacacatactgtcacacactccttctgtctgcaccaagatattatgaagctgtcctgtactgacaccagggtcaatgtggtttatggactcttcatcatcctctcagtcatgggtgtggactctctcttcattggcttctcatatatcctcatcctgtgggctgttttggagctgtcctctcggagggcagcactcaaggctttcaacacctgcatctcccacctctgtgctgttctggtcttctatgtacccctcattgggctctcggtggtgcataggctgggtggtcccacctccctcctccatgtggttatggctaatacctacttgctgctaccacctgtagtcaacccccttgtctatggagccaagaccaaagagatctgttcaagggtcctctgtatgttctcacaaggtggcaagtgagacaccttagtgtctcgcttctactactactacagaagatgggaatattaggatcctattgaatgccttggtgattaaagtatcaaacctattgtgctgtcttcttccagcaatttaagtagatcatgtattctgtctccaggaatgtgtcagtactgaacttatgaccctgtctggacatcctggagaatgactgcact

SEQ ID NO: 832 - protein, 324 aa, Homo sapiens
MQKPQLLVPIIATSNGNLVHAAYFLLVGIPGLGPTIHFWLAFPLCFMYALATLGNLTIVLIIRVERRLHEPMYLFLAMLSTIDLVLSSITMPKMASLFLMGIQEIEFNICLAQMFLIHALSAVESAVLLAMAFDRFVAICHPLRHASVLTGCTVAKIGLSALTRGFVFFFPLPFILKWLSYCQTHTVTHSFCLHQDIMKLSCTDTRVNVVYGLFIILSVMGVDSLFIGFSYILILWAVLELSSRRAALKAFNTCISHLCAVLVFYVPLIGLSVVHRLGGPTSLLHVVMANTYLLLPPVVNPLVYGAKTKEICSRVLCMFSQGGK

SEQ ID NO: 833 - DNA, 1300 bp, Homo sapiens
  source
  (1)..(1300)
  CDS (201)..(1100)
cccatcctggatgcttttcatgaagcctaatgcaaatacttcctgctgctgttcagccatagcataatgatgaatcccagttgcttcatctctcagggattcctaggactcagagcaaggcagtgaggtcttctctaaccaccttacttggccatgaaactcataaaccataccatcagaacccaacctcctttctgctcatgggaattccaggcccggaggcatcccacttttggattgcttttcccttctgctccatgtatgccctggcagtgctgggaaacatggtggtgctgctagtggtacattcagagcctgtattgcaccagcccatgtacctgttcctctgcatgctatccaccattgacctggtcctctgcacctccactgtgcccaagctccttgcacttttttgggcaaaggatgctgagatcaactttggggcctgtgctgcccagatgttctttatccatggcttctcagctgtagaatctggtatactgctagcaatggcctttgaccgctacttagccatttgctggcctctgcactatgggtcattgctctccccagagtctgtaggcaagctgggggctgcagccgtgcttcgtggtttgggactcatgaccccactcacctgcttactggcaagactgagctactgcagtcgagtggtggcccactcctactgtgaacacatggctgtggtaaagctggcttgtggaggaacacagccaaacaacatctatggcatcactgctgccacactggtggtgggcactgactccatctgtattgctgtctcctatgcactcatcctccgagctgtgttaggtctttcctccaaggaggcaagggctaagacctttggcacttgtggctcccacctgggtgtcatacttctcttctacacaccaggactcttctccttctacacacagcggtttggccagcacgtgccccggcacatccacatccttctagctgacctctacctggttgtgccacccatgctcaaccccatcatctatggcatgaagaccaaacagatctgggatggggccctccggcttctgaagtggggccctgctcagtcataaagtcttcaaccccaccctgaaacctttatcttctttgcccctcagccctcgggggactggtggctcccaacatgataggacacagaaactcatgctcaatggtacccgtacttcgataaggagcaacagcaaagtcagatggtggaagatctgtcaggtgtttacttatgttgtagatatggttacaaagctcagggagc

SEQ ID NO: 834 - protein, 299 aa, Homo sapiens
MGIPGPEASHFWIAFPFCSMYALAVLGNMVVLLVVHSEPVLHQPMYLFLCMLSTIDLVLCTSTVPKLLALFWAKDAEINFGACAAQMFFIHGFSAVESGILLAMAFDRYLAICWPLHYGSLLSPESVGKLGAAAVLRGLGLMTPLTCLLARLSYCSRVVAHSYCEHMAVVKLACGGTQPNNIYGITAATLVVGTDSICIAVSYALILRAVLGLSSKEARAKTFGTCGSHLGVILLFYTPGLFSFYTQRFGQHVPRHIHILLADLYLVVPPMLNPIIYGMKTKQIWDGALRLLKWGPAQS

SEQ ID NO: 835 - DNA, 3460 bp, Homo sapiens
  source
  (1)..(3460)
  CDS (201)..(958)
  CDS (3098)..(3260)
tgccctgagctggaaaggactgacgcagcctgacatggcaaggcttcctctgctacagaatctgtcctgggtctgccttgaagctttactgccaatgcctcatccccaggcatgccctgccactgataacccactggagcattctttttagttcttgtcagtcaaaagggaaacctgaatgctccatggaagtcagcaacatgaccacagtcactgtgtttattctcctaggactgtccaacaaccctcaggttcaggcactgctctttgttctgttcctggtgatttacctcttgactctactggggaacctgctgatggtgctggtgatcagtactgattcccacctctgcacccctatgtacttcttcctgagacaactctccttcctggatgctttctattcctcaattattgtgcctaaactgctagagaaccttctttctaagggggagacaatatccttccttgagtgtttcactcagatctccctggtcatattttctggagctactgaggcttgcctcctctcggtcatggcctatgaccggtttcaggccatgtgtcatccactgttgtatgtggtgattataaacaggagggtgtgtgctggcctggtgggggcatcctgggccataggaatggggactggcctaattaacaccctcctcctggctcagcagcacttctgcggccctaatgtcatccacagttttgcctgcgagcttcctccggtgctcttattgacctgttctgacccctgcgctagcatcgtctccattctcactaccatgtcagtcctgggccttggcacccttgtccttttgctgggttcctacagctgtatcatcatgacagccctgaggatcaactctgctacaggtcggagcaagatcttttccacctgctcttcccatttccttgtggtcaccatcttttatacttcaggagttctcaggtatgtcatactatacccctgaatataaatgcgggatattccttaccctaagtggtctccgttggcagaagagagcattacaaaatagcaggacattcaaaaggcctaggctctagtgctggctctaccatggactagctgtatgaattgtaaagaatctattttcagctgggtacagtggctcatgcctgtaaccccagcactttgggaggctgaggtgggtggatcacttgagcccaggagttggagaccagcctggtcaacatggcgaaaccccatctctactgaaaatataaaaatcagccaggtgtggtcacgtgcacctgtagtcctagctactcgggaggctgaggcaggagaattgcttcagcctcggaggcagaggttgcagtgagcggaaattgcactactgcactccagcctgggtgacagagtgagactaggtcaaaaaaaaaaaaaaaaacagaatctattttctttctgaggcttcaattgtccattctggaaaatgaatttagaccaagataaagatttttctacttcattaacctaagatttgggagttcgcaaaaagaaatcagagaagctttgttagatttttaatcagtgttagacaaaaaataaaacctttctttgaaacatatgccatctttatttcctactgggagatgtcgccaaagcttacatatgttgtagcaatttactagccatttactatacacaagctgctttacatcgccaagccaatttgagtatccatcacactacaagagaaatattatcaacccacttttaggtaaagaacctgagtttggggagtaatcaggtaatttctcagcagtcccagaacaagctagtaatggagccataagttggaccgagatccgtgcccttccttaccatgcttctcagacatcgacagctctgtctgcctagtcctccctcaccaggagacaaaacaatcgatgcctgtgctttctactagtaaattgaaggtagatttgcacaaattgttcaatatttttctcacctgcctgtgattcagagagaagtccaggatggaaatggatggtaagaatagcccagtacctgtagtccagtggctaggagagaaaaaaaaataagtaaaataaataaataaataaatagcccaggagagcttacctgagctgtgcaccaatctcttcatctccctttgtctcagtttcctcatctgccatgagggatgtgactacttacttcatagaaatgttagaaagaataagttagatgacaaaaaataacagtaaaatgactattttttttataaccaaacacattggaacccacaaggaacatccttgggatagtctattccaataatgatggtgccactgcaaataaataataatactagtgcttctttggaagatactccgagtggtacttagcaaaatgtacccaagattttaatcttattattttggaatcatattatgtgcttaacacatttttatctcccattttaccagttttggcttcttttccaaaccaaagaaaaatgcaactaaaagggcaaatgtttgttccactcaactttatacaaataacaggcaaggattctgagggtaattcccagggccatgaaggttgggaataatgacgatattttaaactaagtgtacagtttacatgaacagtcatcacaaggtgagaacattgcgtttctgtactgttgtgtataaagagaaaaattcctcatatgatcatcacagctattaaggaagaatgctttgaagagtatgaaatgctatggaaatgtatgatattattattcattctatttttttgttttactttttatctgtccccaatattaattctgttctaacctgcaacatttgatatgctgcagaactgcttgttcctcggggcagctcctataactttctgtgtgagctcacttatgtttggaagtgtttgaaggcagaaatgactgacttttcacagatcagccatttctagatgctgccaccagagaaagtcagctctgaagacctcctttgcagagtctttgcagggaggggatgaattattgctgccaacagtgagaattgtcaccattgtcataagttgcttttctgtacaattcccttcaaggtatatgattccagcatctggctcagccctagaacaagtgctctccgtgcagtacagtgtgataacccccctgctgaaccccctcatctacagtctgaagagccaggaggtaaaggtggctctgaggaggatgctggccaggaagtccaggcttcccttgtagcccagcgtccctgcctcagcaggaggaaaagttatggggaaaaaaggagggaggaagagctatcaccactcagctacctcaacattcatctccttccaaaacagagaccttagtttatcttcctccaatgccctgttcccagccaaaggcaatgaggaaactctcacagagcaggtagcacccatcagagggggtccagt

SEQ ID NO: 836 - protein, 306 aa, Homo sapiens
MTTVTVFILLGLSNNPQVQALLFVLFLVIYLLTLLGNLLMVLVISTDSHLCTPMYFFLRQLSFLDAFYSSIIVPKLLENLLSKGETISFLECFTQISLVIFSGATEACLLSVMAYDRFQAMCHPLLYVVIINRRVCAGLVGASWAIGMGTGLINTLLLAQQHFCGPNVIHSFACELPPVLLLTCSDPCASIVSILTTMSVLGLGTLVLLLGSYSCIIMTALRINSATGRSKIFSTCSSHFLVVTIFYTSGVLRYMIPASGSALEQVLSVQYSVITPLLNPLIYSLKSQEVKVALRRMLARKSRLPL

SEQ ID NO: 837 - DNA, 1342 bp, Homo sapiens
  source
  (1)..(1342)
  CDS (201)..(1142)
taagttcatcacatactttctctttcttggtttatcaaatataaaatgggcaaccaaatgtatcctcatgtaatctgttagtgacagaaaacgtatgacaattttgaaagcagtgatataactctagataaatgctatgtggactaattatagtttctttaattttcatagttatattatgaaaagagtaaattgaagaaatggaaactgcaaattacaccaaggtgacagaatttgttctcactggcctatcccagactcgggaggtccaactagtcctatttgttatatttctatccttctatttgttcatcctaccaggaaatatccttatcatttgcaccatcaggctagaccctcatctgacttctcctatgtatttcctgttggctaatctggccctccttgatatttggtactcttccattacagcccctaaaatgctcatagacttctttgtggagaggaagataatttcctttggtggatgcattgcacagctcttcttcttacactttgttggggcttcggagatgttcttgctcacagtgatggcctatgaccgctatgctgctatctgccgacccctccactatgctaccatcatgaatcgacgtctctgctgtatcctggtggctctctcctggatggggggcttcattcattctataatacaggtggctctcattgttcgacttcctttctgtgggcccaatgagttagacagttacttctgtgacatcacacaggttgtccggattgcctgtgccaacaccttcccagaggagttagtgatgatctgtagtagtggtctgatctctgtggtgtgtttcattgctctgttaatgtcctatgccttccttctggccttgctcaagaaacattcaggctcaggtgagaataccaacagggccatgtccacctgctattcccacattaccattgtggtgctaatgtttgggccatccatctacatttatgctcgcccatttgactcattttccctagataaagtggtgtctgtgtttcatactgtaatattccctttacttaatcccattatttacacattgagaaacaaggaagtaaaggcagccatgaggaaggtggtcaccaaatatattttgtgtgaagagaagtgaaagataaattatacattttatagtcctcctgaggatcattgtcctaaagcaggaagtatttgcagtaataatgctgcattcacttcctccgttcatttgtgttcttaaaattttactataatttttctctattaattcctctttatattgaaaaaatagaggcattaagatgaaaataaatttactcacacctaccctga

SEQ ID NO: 838 - protein, 313 aa, Homo sapiens
METANYTKVTEFVLTGLSQTREVQLVLFVIFLSFYLFILPGNILIICTIRLDPHLTSPMYFLLANLALLDIWYSSITAPKMLIDFFVERKIISFGGCIAQLFFLHFVGASEMFLLTVMAYDRYAAICRPLHYATIMNRRLCCILVALSWMGGFIHSIIQVALIVRLPFCGPNELDSYFCDITQVVRIACANTFPEELVMICSSGLISVVCFIALLMSYAFLLALLKKHSGSGENTNRAMSTCYSHITIVVLMFGPSIYIYARPFDSFSLDKVVSVFHTVIFPLLNPIIYTLRNKEVKAAMRKVVTKYILCEEK

SEQ ID NO: 839 - DNA, 1084 bp, Homo sapiens; identical to SEQ ID NO: 715
  source
  (1)..(1084)
  CDS (201)..(884)

SEQ ID NO: 840 - protein, 227 aa, Homo sapiens; identical to SEQ ID NO: 716

SEQ ID NO: 841 - DNA, 1060 bp, Homo sapiens
  source
  (1)..(1060)
  CDS (201)..(860)
ccatgtcttccagactaatgaatgtgttcagcatggaaactatcaattttgttagctgccttatcctcatgggctttccctcaagcccagaaatgcagctcctctacttcggtctcttctcagtagcctatactctcaccccgatgggaaatgcagccattgtctgtgctgtgtggtaggaccagcaccttcacactcccatgtacaccctcttgggaaatttctctctcctggaaatatgttatgttactgcaactaaactgctggccaacttcctctccacaagcaagtccatctcattcatgagttgttttgcacagttctacttcttctctttggggtatgatgagggcttcttcctttgcatcacggcctttgacaggtatcttgccatctgccgccctctacgttatccatgcatcatgactaaacaagtatgcactggcctcatcatttttgcatggtcatgtgtctttgtaatcttcctaactctggtgattctcatttcacagctatcctactgtggcccaaatattatcaaccattttatttgtgatcccgtcccattgaagatgctgtcctgttctgaagacatcatcatcacccagctcatttactccacattcaattctgtcttcataattggcacctttctctttatcctttgttcctatgctctggtgattctggctataatacggatgccttcagaggctggcaaacgaaaagctttctccacttgtgcctctcatttggcagttgtcaccttattttatggctctatcatggtgatgtatgttagtcctggatcagcacacccagtaaaaatgaaaaaatcattaccttgttcttttctgtgataacaccactctgtaatcctctaatatatagtctcaggaacaaagagatgaaagattatctgaggaaaatcttcaggactggaaaagatgttaataaaatataaataagagaattttcatttatcaaatgtaactttattatacatgaatatttgtctacaaatttattgttttatttaagaactgctataataatgagc

SEQ ID NO: 842 - protein, 219 aa, Homo sapiens
MYTLLGNFSLLEICYVTATKLLANFLSTSKSISFMSCFAQFYFFSLGYDEGFFLCITAFDRYLAICRPLRYPCIMTKQVCTGLIIFAWSCVFVIFLTLVILISQLSYCGPNIINHFICDPVPLKMLSCSEDIIITQLIYSTFNSVFIIGTFLFILCSYALVILAIIRMPSEAGKRKAFSTCASHLAVVTLFYGSIMVMYVSPGSAHPVKMKKSLPCSFL

SEQ ID NO: 843 - DNA, 1250 bp, Homo sapiens
  source
  (1)..(1250)
  CDS (201)..(555)
  CDS (842)..(1050)
tctctctctcttttttttttttttatagtcacctctaccacatggaaccagagaatgatacacgaatttcagaatttcgacttctgggattttcagaagaacccagactgcaacgatttctctttggtaaaaggcaaaagatttatacaatttgaagagaaaccagagcataacgatttctctttggagtgttcttatccatgtacctcatcattgtatttggaaacttgcttatcatcctggttatcattttatgctcccacctccacacctccatgtacttctttctctccaacctgtcctttgtagacatctgttttgcctccaccagggtcccaaagatgctggtgaatatccaggcacagagcaaagtcatcacctctgcaggctgcatcacccagatgtactttttcatacattttgtaggattggacagcttcctcctgactgtgatggcctatgaccggtttgtggccatctgtcaccccctgtactacacggtcatcatgaaccctcaactctgtggattgctggttctggtatcctggatcacaagtgtcttgcattccttattacatagcttaatggtgctgcagttgtccttatgcagagagttggaaatcccccactttttctgtgaacttaatcaggtcatccaccttgcctgttctgacacctttcttaatgacatggtgatgtatctggcagctgtgctgctgggtggggggatgtctcgctgggatcctttactcttactctaagatagtttcctccatatgtgcaatctcatcagctcaagggaagtataaggcattttccacctgtccgtctcacctctcagttgtctccttgttttactgtacaagcctaggagtgtaccttagctcggctgcatcccacaactcacactcaggtgcaatagcctcagtgaggtacactgtggtcacccccatgctgaaccccttcatctacagcctgaggaataaggacataaagagggctctgaagaattctttgggagggaaactagaaaagggccagttgtcctagggctgaagctatatccatgattgcaaggctcaaagcctcagagccagatattgctgttgtttaatcagatcatggaagtggaaactgctcttttttttttttttttttttttttgagacagagttttgctctgctgcccaggccagagtgcagtggcgccatctccgctcactgcaagctccacctcctgggttcatgct

SEQ ID NO: 844 - protein, 187 aa, Homo sapiens [sequence omitted]

SEQ ID NO: 845 - DNA, 1069 bp, Homo sapiens
  source
  (1)..(1069)
  CDS (201)..(869)
  modified_base (55)..(55): a, t, c, g, unknown or other
  modified_base (88)..(187): a, t, c, g, unknown or other
  modified_base (819)..(819): a, t, c, g, unknown or other
  modified_base (866)..(866): a, t, c, g, unknown or other
  modified_base (895)..(994): a, t, c, g, unknown or other
gagttaatgctaaaatgagtaacgactttgggggactaagggaagggtttctttnaacccaggatgcagtttattccaccagatgccnnnnnnnnnnnnnnnnnnnnnnnnnnnnnnnnnnnnnnnnnnnnnnnnnnnnnnnnnnnnnnnnnnnnnnnnnnnnnnnnnnnnnnnnnnnnnnnnnnnntgtgactccaaggatgctggagattttcctttcagagaagaaaagcatttcctatcctgcccgtcttgtgcagtgttacctttttatcaccttggtccacgttgagctctacatcctggctgtgatggcctttgaccggtacatggccatctgcaaccctctgctttatggcagcagaatgtccaagagcgtgtgctctttcctcatcacagtgctttatgtgtatggagcactcactggcctgatggagactatgtggacctacaacctagccttctgtggccccagtgaaattaatcacttctactgtgtggacccaccactgattaagctggcttgttctgacacctacaacaaggaggtgtcaatgtttgttgtggctggtttcaacttcacttatcctctccttatcatcctcatttcctatctctacatatttcctgccaccctaaggatctgctctacagaaggcaggcacaaagctttttctacctgtggctcccatctgacagccgttactattttctattcagctcttttcttcatgtatctcagacgtccatcagaagagtccatggagcaggggaaaatggtagctgtattttataccactgtcatccccatgttgaatncccatgatcctacagtactgaggaacaaagatggaagggggtttctntagcccaagaggcgttttgccccagattnnnnnnnnnnnnnnnnnnnnnnnnnnnnnnnnnnnnnnnnnnnnnnnnnnnnnnnnnnnnnnnnnnnnnnnnnnnnnnnnnnnnnnnnnnnnnnnnnnnntttcgagttttttccagcagtaacccactcctggcatcaatttactgtattagtctgttctcaccgctataaaga

SEQ ID NO: 846 - protein, 222 aa, Homo sapiens
  MOD_RES (207)..(207): Variable amino acid
MLEIFLSEKKSISYPARLVQCYLFITLVHVELYILAVMAFDRYMAICNPLLYGSRMSKSVCSFLITVLYVYGALTGLMETMWTYNLAFCGPSEINHFYCVDPPLIKLACSDTYNKEVSMFVVAGFNFTYPLLIILISYLYIFPATLRICSTEGRHKAFSTCGSHLTAVTIFYSALFFMYLRRPSEESMEQGKMVAVFYTTVIPMLNXHDPTVLRNKDGRGFL

SEQ ID NO: 847 - DNA, 1195 bp, Homo sapiens
  source
  (1)..(1195)
  CDS (201)..(995)
  modified_base (88)..(187): a, t, c, g, unknown or other
  modified_base (230)..(230): a, t, c, g, unknown or other
  modified_base (232)..(232): a, t, c, g, unknown or other
  modified_base (245)..(245): a, t, c, g, unknown or other
  modified_base (274)..(274): a, t, c, g, unknown or other
  modified_base (1045)..(1144): a, t, c, g, unknown or other
cctccttcgatggactgccctgtccagtgagagcaatagtttagacggggggctttagagtcgccagaaggcgtttagccaagatgtnnnnnnnnnnnnnnnnnnnnnnnnnnnnnnnnnnnnnnnnnnnnnnnnnnnnnnnnnnnnnnnnnnnnnnnnnnnnnnnnnnnnnnnnnnnnnnnnnnnngaagtaaccttcaatggccatgtattcttcctctcaatgctgncngtcatggacatcntgctgtctaccacactgtgcccaaggccntagcatcttttggcttcaagcacataacattgcttttgatgcctgtgtcacccaaggcttctttgtccatatgatgtttgtgggggagtcagctatcctgttagccatggcctttgatcgctttgtggccatttgtgccccactgagatatacaacagtgctaacatggcctgttgtggggaggattgctctggccgtcatcacccgaagcttctgcatcatcttcccagtcatattcttgctgaagcggctgcccttctgcctaaccaacattgttcctcactcctactgtgagcatattggagtggctcgtttagcctgtgctgacatcactgttaacatttggtatggcttctcagtgcccattgtcatggtcatcttggatgttatcctcatcgctgtgtcttactcactgatcctccgagcagtgtttcgtttgccctcccaggatgctcggcacaaggccctcagcacttgtggctcccacctctgtgtcatccttatgttttatgttccatccttctttaccttattgacccatcattttgggcgtaatattcctcaacatgtccatatcttgctggccaatctttatgtggcagtgccaccaatgctgaaccccattgtctatggtgtgaagactaagcagatacgtgagggtgtagcccaccggttctttgacatcaagacttggtgctgtacctcccctctgggctcatgaatcgggggtcttctagagtcgaccagataggggtgtcaagcccaagtatnnnnnnnnnnnnnnnnnnnnnnnnnnnnnnnnnnnnnnnnnnnnnnnnnnnnnnnnnnnnnnnnnnnnnnnnnnnnnnnnnnnnnnnnnnnnnnnnnnnnaaaatagccgggtgtggtggcacccacctgtaatcccagtacttgggaagg

SEQ ID NO: 848 - protein, 264 aa, Homo sapiens
  MOD_RES (10)..(11): Variable amino acid
  MOD_RES (25)..(25): Variable amino acid
MAMYSSSQCXXSWTSCCLPHCAQGXSIFWLQAHNIAFDACVTQGFFVHMMFVGESAILLAMAFDRFVAICAPLRYTTVLTWPVVGRIALAVITRSFCIIFPVIFLLKRLPFCLTNIVPHSYCEHIGVARLACADITVNIWYGFSVPIVMVILDVILIAVSYSLILRAVFRLPSQDARHKALSTCGSHLCVILMFYVPSFFTLLTHHFGRNIPQHVHILLANLYVAVPPMLNPIVYGVKTKQIREGVAHRFFDIKTWCCTSPLGS

SEQ ID NO: 849 - DNA, 1096 bp, Homo sapiens
  source
  (1)..(1096)
  CDS (201)..(896)
  modified_base (2)..(2): a, t, c, g, unknown or other
  modified_base (8)..(9): a, t, c, g, unknown or other
  modified_base (12)..(12): a, t, c, g, unknown or other
  modified_base (34)..(34): a, t, c, g, unknown or other
  modified_base (721)..(820): a, t, c, g, unknown or other
  modified_base (829)..(831): a, t, c, g, unknown or other
  modified_base (840)..(840): a, t, c, g, unknown or other
  modified_base (842)..(842): a, t, c, g, unknown or other
  modified_base (851)..(851): a, t, c, g, unknown or other
  modified_base (865)..(866): a, t, c, g, unknown or other
cngggggnnggnaaaaaaaccgacaatggtaagnacaaaatcaaagctgtgtggttgaattcatcctcttgggcttttctaactatcctgagctccaggggcagctctttgtggctttcctggttatttatctggtgaccctgataggaaatgccattattatagtcatcgtctccctagaccagagcctccacgttcccatgtacctgttcctcctgaacttatctgtggtggacctgagtttcagtgcagttattatgcctgaaatgctggtggtcctctctactgaaaaaactacaatttcttttgggggctgttttgcacagatgtatttcatccttctttttggtggggctgaatgttttcttctgggagcaatggcttatgaccgatttgctgcaatttgccatcctctcaactaccaaatgattatgaataaaggagtttttatgaaattaattatattttcatgggccttaggttttatgttaggtactgttcaaacatcatgggtatctagttttcccttttgtggccttaatgaaattaaccatatatcttgtgaaaccccagcagtgttagaacttgcatgtgcagacacgtttttgtttgaaatctatgcattcacaggcacctttttgattattttggttcctttcttgttgatactcttgtcttacattcgagttctgtttgccatcctgaagatgcatcaaccacnnnnnnnnnnnnnnnnnnnnnnnnnnnnnnnnnnnnnnnnnnnnnnnnnnnnnnnnnnnnnnnnnnnnnnnnnnnnnnnnnnnnnnnnnnnnnnnnnnnnggtcttttnnnagggactcngntacgttatntgcggatcgggggnnggaattaaacctttaaggccagtaatttgatacatttttgtgtaaaggatatgaccagacagctcacacacagacacacaaatgtgaaaagatgcttgatctcactgataaagcataaattaaaacgatgtcatttttaaaaatcagattcgcaaattttaaaagttgctaacactggaatggccagagtattatgaaacgtgacacaggcacagattgctggtagacat

SEQ ID NO: 850 - protein, 231 aa, Homo sapiens
  MOD_RES (174)..(207): Variable amino acid
  MOD_RES (210)..(211): Variable amino acid
  MOD_RES (214)..(214): Variable amino acid
  MOD_RES (217)..(217): Variable amino acid
  MOD_RES (222)..(222): Variable amino acid
MYLFLLNLSVVDLSFSAVIMPEMLVVLSTEKTTISFGGCFAQMYFILLFGGAECFLLGAMAYDRFAAICHPLNYQMIMNKGVFMKLIIFSWALGFMLGTVQTSWVSSFPFCGLNEINHISCETPAVLELACADTFLFEIYAFTGTFLIILVPFLLILLSYIRVLFAILKMHQPXXXXXXXXXXXXXXXXXXXXXXXXXXXXXXXXXXVFXXGLXYVXCGSGXGIKPLRPVI

SEQ ID NO: 851 - DNA, 1099 bp, Homo sapiens
  source
  (1)..(1099)
  CDS (201)..(899)
aggagagatttagaagatggcagaagtttgtttttgcttcatcagctacctacgaagcccaaaactcatatactgtatagccgagaaaaagtaaactacattctcttcctaattattcttttgaaaaatgacttcatgttcattatcttctcttcattcttaaaaaaggaacacattttataaaagagtcctgactgataatgtgtcccttgaccttgcaggtcactggcctaatgaatgtctctgagccaaattccagctttgcttttgtaaatgaatttatactccaaggtttctcttgtgagtggacaattcagatcttcctcttctcactctttactacaatatatgcactgactataacagggaatggagccattgcttttgccctgtggtgtgaccggcgacttcacactcccatgtacatgttcctgggagatttctcctttttagagatatggtatgtcttttctacagttcccaagatgttggtcaacttcctttcagagaaaacaaacatctcctttgctggatgttttctccagttttatttcttcttctctttgggtacatcagaatgcttgcttttgactgtgatggcctttgatcagtaccttgctatctgccgtcccttgcactatcctaatatcatgactgggcatctctgtgccaaactggtcatactgtgctgggtttgtggatttctgtggttcctgatccccattgttctcatctctcagatgcccttctgtggcccaaacattattgaccatgttgtgtgtgacccagggccactatttgcattggattgtgtttctgccccaagaatccaactgttttgctacactctaagctcattagttatttttggtaacttcctctttattattggatcctagactattgtcctgaaagctgtgttgggtacgccttcaagcactgggagacataaggccttctctacctgtgggtctcatttggctgtggtatcactgtgctatggctctcttatggtcatgtatgtgagcccaggactcggacattctacggggatgcagaaaattgtaactttgttctatgctatggtgaccccactctt

SEQ ID NO: 852 - protein, 232 aa, Homo sapiens [sequence omitted]

SEQ ID NO: 853 - DNA, 8400 bp, Homo sapiens
  source
  (1)..(8400)
  CDS (201)..(715)
  CDS (5183)..(5293)
  CDS (6024)..(6123)
  CDS (8087)..(8200)
  modified_base (2442)..(2541): a, t, c, g, unknown or other
  modified_base (8231)..(8330): a, t, c, g, unknown or other
agatgttccttgtgaattgcttgcatccagcattaagggctggtttttatcttttatttttccaatcctctttccttctcaaggtgtccaagacacagagagccacggaatctcacaggtgtctgagaattcctcctcctgggactctcagaggatccagaactgcagccgtcctcgctttgctgtccctgtccctgtccatgtatctggtcacggtgctgaggaacctgctcagcatcctggctgtccgctctgactcccccctccacacccccatatacttcttcctctccaacctgtgctgggctgacatcggtttcacctcggccacagttcccaagatgattgtggacatgcagtcgcatagcagagtcatctctcatgcaggctgcctgacgcagatgtctttcttggtcctttttgcatgtatagaaggcatgctcctgactgtgatggcctatgactgctttgtagccatctgtcaccctctgcactacccagtcatcgtgaatcctcacctctgtgtcttcttcgttttggtgtcctttttccttagcctgttggattcccagctgcacagttggattgtgttacaattcaccatcatcaagaatgtggaaatctctaatttagtctgtgacccctctcaacttctcaaatttgcctgttctgacagcatcatcaatagcatattcatatatttccatagtactatgtttggttttcttcccatttcagggatccttttgtcttactataaaatcatcccctccattctaaggatttcatcatcagatgggaagtataaagccttctccacctgtggctctcacctagcagttgtttgctgattttatggaacaggcattggcatgtacctgacttcagctgtgtcaccaccccccaggaatggtgtggtggcatcagtgatgtacgctgtggtcacccccatgttgaaccttttcatctacagcctgagaaacagggacatacaaagtgccctgtgggggctgcacagcagaacagtcgaatctcatgatctgttccatcctttttcttgtgtgggtgagaaagggcaatcacattaaatctctacatctgcaaatcctgccccttagtcacactatttttgtggcttgatggcttttattcctttccgcatttcctttgtgaatattgctctcttcgttatgcctttaactggaatgggtgaggattctgggatcctttgtttagcagaaacctcatgacaggatcctctctacctaggcggcctcttttagtttctgagcaataaccctgtcatccaggtggaatcacaaccatctttttatatacacaaagtcctcacttcgttttggaattccctgaaaactgactttatggaaacaatgtacaggaggtcctccaacaccattggttgttcaaagttgtggttatactcttgatgaaaaataagtggtttcactatacataattttgcttcaaggtgaagtttccaagagactttcaaaggtgttaagtgaggacgtactgtacatcaaattcatatcctcttccagagttcatgtggaatttctttataaactgcttctagagaatctatttaggcaggttatgtgtagagatccatgtcgccgttcctcagtcttggctttgagtcaaatcagctggggagcttacacatgatgaggcctgggtctcaatacccgagattctgatttccttgtacctgtgtgagtatgtggattttttttcttttaaagcaccagaggtggttccaatgacaaagtttttagaggcatcaagctccaatgagtaagaacagaaattaattgtaatatgatttcttcaaatattatcttcaaatgcattgtccatcaacaccatacaaatgtttattatgctgttttttcttaccatttcgcattttctatttctttcttccttttcctttttttttttttttgagtcagagtttcactcttgttgcccaggctggagttcaatggcacggtctcggctcactgcaacctctgcctcccatattcaagcaattctcctgtctcagccttccaagtagctgggattacaggcatgcgctaccatgcctggctaatttttttttttttttttttttgggattggaaagagagagacagggtttctccattttggggaggctggtcttgaactcccgacctcaggtgatccgcccgcttccgcctcccaaagggctgggattacaggcatgaacgaccgcgcccagacaccacttagcatttacattttacatttgttaaagttatagatttatacacacattgattgctgctttgttatacacttgcctatacataggatgggaaatagaaaagaataaaatgggcacagtatccctgaagtttcacattctgagacattttaaaaatatttgctctnnnnnnnnnnnnnnnnnnnnnnnnnnnnnnnnnnnnnnnnnnnnnnnnnnnnnnnnnnnnnnnnnnnnnnnnnnnnnnnnnnnnnnnnnnnnnnnnnnnnatacaccagctggtctcaaactcccgatctcaggtgatccacgcaccttggcttcccaaagtgctgtgattagagatgtgagtcactgttccctgcctgatctaatggttttataaaggggagctcccctgcacaactctcttgcctgctgccatgtaagatgtgactttgctcctcctccaccttctgccataatcatgaggcctccccagtcatgtggctctgtgagtccattaaacctctttttctttataaattacccagtctcaggtatgtctttattagcagagtgagaatggactaatacagtaacccttacatccccagaccccaaaatggagttgtcacaggatggcagtctgaaatccttgtgatgtccagctggcagaagggaatttggatgagtagggctagccaacttctggtattgctggtgggtcctgtcattgtgtgggtgactccttgcacccctggcccttcataggacgaaattctgggagggttcttgggaaaggggctagagaaggcaagaggacactaatcttcttccaggcagtaggagggcaagctggagaggccaagctcccaagtaaactgaggcacctccactggtccctttgtgaggcacgcttgacctgggttttatggaaagaaaatgccctcaccaaagggtgctaaacaaggccccaggctccgcacctcatcccaggtgcccccctctgccctgccctagactcacctaaagctgtactgcccagagtcatggcctcaggccacatgtggctactgggcacttgagatgtggccatcttaattgagatatgctcttagtgtaaaatatacactagatttccaagccttcataatcaaaaaaagaaaaaaaaaagaacataaaatatccattaagaatttttaagtattcattaatgttgaaataataatattttgaatatattggttaaagtttactaggagaattcatttcaccccttttactttttctaatgtggtgactaaattatttaatattacacatgtggattacattatatttctattggacagctctgttctaaagtctgcacgttgtccttttgtggcttatttccttgataattttattaaaattaaattgaagggccaggtgcagtgactcacacctgtaatctcagcattttgggaggccgaggcaggtggatcacctgaggtcaggagttcgataccagcccagccaacatggtgaaaccctgtctctacttaaaaatacaaaaattagccaggcttacgggtgcgtgactataatcccagctacgcgggaggctgaggtaggagaatcgcttgattcctggaggcagaagtagcagtgagctgagatcacgccactgcactccagcctgggggacaaaagtgaaaaatccatctctaaataaataaatagaaaaataaaactgagggcctggcacggtggctcatgcctgtaatctcaccattttgggcggcccgaggcagggagattacctgaggtcagcagttcgagaccagccctgccaacatggtgaaatcccgtccctactaaaaatacaaaaaatacctggcctttggggggggggccttgaaacccagctactccggaggctgaggcaggagaatcacttgaacccgggaggcaaggtcgcagtgagctgagattgcaccaaggcgctccagcctgggcgacagagggagaccctgtctcaataaataaagaaagaaataaaaataaattgaggaaggatttagcatgcaaaatagaatcagctttggaccctgaataccctgcagtgagaattcccctgtggttctcaggcttctgtaattccagcaaatacactcttccttcaggttcactaaaatgcagatattgtgagataatgctcatttctcacagcttgcttaaataataatgatcatcatagtaatttacaacttaatagtcaacactgcctttttaacccagtctgtgagactgaatcgtaaacgtgacattctttgaagtaaagctctcgattaatataccagactgcataaacgctaataacttacctttccacagaaagataatatgtgggtattctctttgaagacaaatggtggagagtagactctcatcaaagagcctctggcagtaatgagttgcattccagaaggttccagaaggttctgtggaaggctgcagtttgggattggttctcaggtgtctaactgctttctaaggatgaagacccctggttcgtgctttagcgacacccacaggagcaacagactaagacattcctccacacaataacagacccaggcagtgcagagccatgtgtgtcttatctgtcctgttgtccacagtctggttttatcttagacctagcctggtgcaatccatgttgtgtattggcactccacttaagtttccagtttgtaaaaagcccctttcattcggtgattcctcaggtctttaggggaaatttctggaaaccaggaagaaggaaataaaggttgttttgctgaggatgggtgacgttgggcatggaacccaaatgagtggtttgagcagaaagtagcctccatgctggactaatgcaatagccctgccatgatttcattgcagggctgtgaccgtctacgacaagccggcatctttctttaaagaggcacctctggacctgcagcaccggctcttcatgaagctgggcagcacgcactctccgttcagggcccggtaggcctcccaccctcagctgccttctctcctgctcgccactgccctggcctctccccttctcactgcagacctgggaacccactcatccagggattggcaaactaaggctacaggccagtctcctgcttttgtaaatcaagtttcactgggacacaacacactcattaacttctgagttgtctacagccgcctttgagctacaatagcagaatcgcgttttgcaacagagaacctgtggcccacaaagcctgaagtatttactctctgaccctttaaggaatgttaaagggtcttactctcctgccaatgggttcccaggcctgtggcaggatctgtggacctgtgtgtcccctggggtgtctcatggggctaaggaagggaactttgtgcaggtccacataccctgaggtgtgcccctgggtaagctggggtggtgtgggagggcgtcctagcagccctcatcttgggtccaggggatgacaagacagtaagtcctgtggagaaaaggaattagtcagtcttgtttgctgttgtaaccttagcacccagcaacaatattagagaaagcaagcccaggcctcgattggcaggggtggcctggtgctgctgatgcagccgggcaccccaaccgttgggagcctgcaggcctcaccatggcaggagatgcccgttctgggtcctgggcctgctctgtggcctctcacagggtttttttctgctccttcagctcagaacctgaggacccagacacagagcggtcggccttcacggagcgggattctgggagcgggctggtgacgcgtctccacgagcggccagccctgctggtcagcagcacaagctggacaggtctgcatgaccactggggcacttggggttggtgtgaagggcacctggccaacctgtattctcctcacccctgccagtcctgcatgccccaaccccaccacggtctcagtgagaaggggagggcgtgtgagctggaagagtggtgtctagaaacaggcccctgacattcaattcttctcatagaggacgaagacttctctatcttgctggcagctttagaaagtaggtgtgtggctgcggtgaggagctctgggctcgtcggggccactgagctgtgagctgcttgcctggtctgcagcatgttcctgtcctgggctactgggtggggcagcctggggacagtaggggtggtggaggtgggccgccctgaatccccagttgggtcattgagtgaccaggccctcaggctgaaatgccccctccaggagagtatctcacagaggctggtggcctccctgccagagcagtgcactttctccacctgaccaggggactctggctactgtttatttaaaaatttttttctgaatgggcatggtggctcacacctgtaatcctagaactctgggaggccgaggcaggcagatcacctgaggtcaggagtttgagaccaacctggccaacatggcgaaacctgtctctactaaaaatacaaaaattagctaggtatggtggtgggcgcctgtaatcccagctacttgggaggctgatgcacgagaattacttgaacctgggaggcagaggttgcagtgagctgagatcatgccattgcattccagcctgggtgacagagcgagagtctgtcagaaaaaaaaaaaaaaaaaaaaaaaaattaaatcagaaattccatgtagaattgtttctttttttaaacacagagtttgaacaactgactcttgacggacagaaccttccttctctcgtctgtgtgataacaggtactgcctgggaccctgggtgtctgtttggttgggggatggtggagggggaggggcacacagcctttaccctgtgcttcccacgatcttgtctccttaatcctcactgcagctctctgccatagggtcttacactgcttgacatgcgggaaactgaggctcagagggtttcacagcagggcagggagcccagatttgaatctgtagataccaagctttctactttttcagtagtttccaagcatcttttttttgttgttatgtcattggtgtcttttttttttttttgagacaaagactctgtcgcccaggctgggatgcagtggtgcgatctcagctcactgcaacctctgcctctcacattcaagcaattctcatgcctcagcctccagagtagctgggactaaaagtgcccaccacacccagcttatttttgtatttttagtagaaacagggcttcaccatgttggccaggctggtcttgaactcctgacctcaggtgatccacccgccttggcctcccaatatgctgaaattatagatatgaaccactgtgcccggccatgtcattggtgccttaaccaagcttcttttaatttttcaaacagaagagcccctgtcccagttactgctgctgagccctttcaagatgattcagtgaggagggagaaaagcggaagcggtgtgggaagaggcggggtctgggccagctgctggtcctgctctcctccctcctctggcctctaggctcccaggactggtttggaacccgcgccatgtgctctggaggctgtggcagggcaggtgcggcttggaacccgcgccatgtgctctgggggctgtggcagggcaggggcggcttggaacctgcgccctgtggtttgggggctgtgccagggcagagggagtcctcttgtcccctgtgcacaacacagacagaaggctgggcccacccagtgggtggtcgcgtgccaggccagtgcttaccccgccttgtttgcagcccgaggccagctggttgcaggtgcagggctatgcatcaggggtcagggtgcacatacccctgcaggtcttggggctcctgagttgcttctggaaaggcccagatagggcctgactgcagctgccgaggggtggagcttctggannnnnnnnnnnnnnnnnnnnnnnnnnnnnnnnnnnnnnnnnnnnnnnnnnnnnnnnnnnnnnnnnnnnnnnnnnnnnnnnnnnnnnnnnnnnnnnnnnnntatttagggtatttatcttctcacacaggactcctagttgaagactagaaaaggtaggaattagccaggt

SEQ ID NO: 854 - protein, 279 aa, Homo sapiens
MYLVTVLRNLLSILAVRSDSPLHTPIYFFLSNLCWADIGFTSATVPKMIVDMQSHSRVISHAGCLTQMSFLVLFACIEGMLLTVMAYDCFVAICHPLHYPVIVNPHLCVFFVLVSFFLSLLDSQLHSWIVLQFTIIKNVEISNLVCDPSQLLKFACSDSIINSIFIYFHSTMAVTVYDKPASFFKEAPLDLQHRLFMKLGSTHSPFRARSEPEDPDTERSAFTERDSGSGLVTRLHERPALLPEASWLQVQGYASGVRVHIPLQVLGLLSCFWKGPDRA

SEQ ID NO: 855 - DNA, 1063 bp, Homo sapiens
  source
  (1)..(1063)
  CDS (201)..(863)
  modified_base (754)..(853): a, t, c, g, unknown or other
tctactatcaaataaaagatttgttaataataaattttaaatcattaacacttaacgcattattttcagtcacactaagttgattccttcgtttctttcaggttgcttcagagtcttcccttctatctgattcagtggaccaagtaaatgactctctggtaacagaatttgtattacttggacttgcacaatccttggaaatgcagtttttcctttttctcttcttctctttattctatgtgggaattatcctgggaaaactcttcattgtgttcacagtgatctttgatcctcacttacactcccccatgtatattctgctggccaacctatcgctcattgacttgagcctttcatctaccacagttcctaggttgatctacgatctttttactgattgtaaagttatttccttccataattgcatgatacaaaagttctttatccatgttatgggaggagttgaaatggtgctgctgatagtcatggcatatgataggtacactgcgatctgcaagcctctccactatccaactattatgaatcccaaaatgtgcatgtttttggtagcagcagcttgggtcattggggtgattcatgctatgtctcagtttgtttttgtcataaatttacccttctgtggccctaataatgtggggagcttttattgtgattttcctcgggttattaaacttgcatgcatggacacttatgggctagaatttgtggtcactgccaacagtggtattcatannnnnnnnnnnnnnnnnnnnnnnnnnnnnnnnnnnnnnnnnnnnnnnnnnnnnnnnnnnnnnnnnnnnnnnnnnnnnnnnnnnnnnnnnnnnnnnnnnnntttattttaattgtactttaagttagataaatggtaaggtcaacagcttgttacaacccttaagtattattttcaggctgattgtcaatatgttttgtacaatgttctcacttataggtgggaattgaacaatgagaacacatggacacaggaaggggaacatcacacaccggggcctgttgtggggtggggggaagggggagggatagc

SEQ ID NO: 856 - protein, 220 aa, Homo sapiens
  MOD_RES (185)..(218): Variable amino acid
MQFFLFLFFSLFYVGIILGKLFIVFTVIFDPHLHSPMYILLANLSLIDLSLSSTTVPRLIYDLFTDCKVISFHNCMIQKFFIHVMGGVEMVLLIVMAYDRYTAICKPLHYPTIMNPKMCMFLVAAAWVIGVIHAMSQFVFVINLPFCGPNNVGSFYCDFPRVIKLACMDTYGLEFVVTANSGIHXXXXXXXXXXXXXXXXXXXXXXXXXXXXXXXXXXLF

SEQ ID NO: 857 - DNA, 1024 bp, Homo sapiens
  source
  (1)..(1024)
  CDS (201)..(824)
cttgtgaattgcttgtatccaaaatacacacacagcattaagtgctggtttttatcttttaattttccaatcctcttttcttctcatggtgtccaagtgacacagagccacagaatctcacagctgtctcagaattcctcctcctgggactctcagaggatccagaactgcagcccatcctcgctgggctcttcctgtccatgtacctggtcacggtgctggggaacctgctcattatcctggccatcggctctgactcccacctcgacacccccatgtacttcttcctctccaacctgtccttgcctgacatcggtttcacctcggccacggtccccaagatgattgaggagatgcaatcgcatagcagagtcatctaccatggggactgcctgacacagatgtctttctttgtcctttttgcatgtaaggatgacatgatcctgactgtgatggcctatgactggtttgtggccatctgtcaccccctgaactacccaggcatcatgaatcctcacctctgtgtcttattagttttggtgccttttttccttagcctgttggattcccagctgcacaatttgattgtgttacaattcatctgcttcaagaatgtggaaatctctaattttttctgtgacccgtttcaacgtctcaaccttgcctgttctgacagtgacatcaataacatatacatatatttagatagtactatatttggttttcttcgcatttcagggatccttttgtgttactatacagttgtcttccccattctaagaattccatcctcagatgggaattataaagccttctccacctgaggctctcgcctggcagttgtttgcttattttatggaacaggcattggcgtgtacctgacttccgctgtgtcatcatcccccaggaatgatgtggtggcgtcagtaatgtacgctgtggtggtcacccccatgctgaaccccttcatctgcagcctgagaaacagggacattcaaagtgccctgtggaggctgcacagcag

SEQ ID NO: 858 - protein, 207 aa, Homo sapiens
MYLVTVLGNLLIILAIGSDSHLDTPMYFFLSNLSLPDIGFTSATVPKMIEEMQSHSRVIYHGDCLTQMSFFVLFACKDDMILTVMAYDWFVAICHPLNYPGIMNPHLCVLLVLVPFFLSLLDSQLHNLIVLQFICFKNVEISNFFCDPFQRLNLACSDSDINNIYIYLDSTIFGFLRISGILLCYYTVVFPILRIPSSDGNYKAFST

SEQ ID NO: 859 - DNA, 1063 bp, Homo sapiens
  source
  (1)..(1063)
  CDS (201)..(863)
ttttactcacatacattgtgacagtggtggggaacctactcgttgcggtgactattattgtcagcccttccttgagctccccaatgtaattcttccttgcttgcctgtcattaatagatgctgtattatccaccaccatttctcccatattgattgtagacctactctgtgacaaaaagactatttccttcccagcttgcatgggccagctatttacagaccacttgtttggtggaactgagatcttccttctggtggtgatggcctatgatcgctacgtggccatctgtaagccactgcactatttaaccatcatgaatcgacaggtttccatccttctgttggtggtggccatgactggaggtttccttcattctgtgtttcaaattgctgttctgtacagtctccctttctgtggccccaatgtcattgaccactttttctgtgacatgtacccattattggaactggcgtgcactgacacctactctataggcctcactgtagttttcagtggtggagcaatgtgtatggtcatcttcgcccttctactaatctcctatggagtcagcctaaactcccttaaaacttatagtcaggaagggaggcgtaaagccctgtctacctgcagctcgcacatcaccgtggttgtcctcttttttgttccctgtattttcatgtatgttagacctgtctcaaacttccctattgataaattcgttactgtgttttatacagttatcacacccatgctgaatccttttttatacacgttgagaaattcagagatgataaatgctataaaacacctgttgtgtaagaagctaactatagttagaataagagtgtccctcctcatgtagataaggatgtatgtagacaagctcttcccagtgaaattttcagacttctaagggtaattcaaggatcccacaatggaagacaggatttaggtgctccgagctcaactgagaaatcatcccattatgacatctgtttgaatttcaagatctcaacctctatatccagactgagagtggatggggggctttggctcaggtcc

SEQ ID NO: 860 - protein, 220 aa, Homo sapiens
MGQLFTDHLFGGTEIFLLVVMAYDRYVAICKPLHYLTIMNRQVSILLLVVAMTGGFLHSVFQIAVLYSLPFCGPNVIDHFFCDMYPLLELACTDTYSIGLTVVFSGGAMCMVIFALLLISYGVSLNSLKTYSQEGRRKALSTCSSHITVVVLFFVPCIFMYVRPVSNFPIDKFVTVFYTVITPMLNPFLYTLRNSEMINAIKHLLCKKLTIVRIRVSLLM

SEQ ID NO: 861 - DNA, 1790 bp, Homo sapiens
  source
  (1)..(1790)
  CDS (201)..(1009)
  CDS (1059)..(1172)
  CDS (1280)..(1394)
  CDS (1462)..(1590)
  modified_base (829)..(928): a, t, c, g, unknown or other
tccctttatcccacgggttaactgagatggttttaaagacctcggttgtcaggggggttgatttgcatttggatagactttcctttgactataggagattgaacctacaggccacagttctcacttcatcttctcctccctcagcactccatagggttcctccctggtccttaaacacagtacctgcgaatcctgggcccatgccacccttctgggaagcgccaccctgggccaatcagagccgagcacgcgagctggagttcgtgctgctgggttttgcacacgtgccctcactacgcccgatgcttgcagcgctcttcctggcagccttcctgctcacaatgtcagggaactcgctcatcgtcttgctcaccagcctggacttcggcctccgcacgcccatgtacttcttcctgcgccaactggcgctggtagagatctgcttctcactggacgtggcaccccgcctgctggtgaccctgctgcagcctggacgtggggtgtcccccacgagctgtgccctgcagctgctccttgtgctgtcctgtgtcacatctgagtgcttccttctcatggtcatggcctgggatcgctttctggccatctgcaggccactgcgctatggcgccatcatgagcccgcagctgtgctacctgctagctactacctgctggctggcgggaatccctgtggcactcgtcttcaccatctggctctttaacttccccttctgtgggccacgtggcatccgacacttcttttgtgacatagcacctctgctgagcctggtgtgtgcagacaccagagttttcgaggccaatgtgtttgnnnnnnnnnnnnnnnnnnnnnnnnnnnnnnnnnnnnnnnnnnnnnnnnnnnnnnnnnnnnnnnnnnnnnnnnnnnnnnnnnnnnnnnnnnnnnnnnnnnntctttcatcttgcttcgcccatagtcgccatatgttgcaagtgagctgccagcgcaacatcgcaagcgcggcgaccaataggtgatgcttactgcgattaatcagcttcatcatcactgcactcccaaagtggctacgacatcactcgctgtttcgcgggtactgcctttgctggatatagcccggcgagcactgacgcggtgcagattgaagccgtgctgttcgtaaagttcaattacgcgcggtgcggtagaattgctgatcaccacttttgccccccgctggtgggctgccacacagctttccgcaagctctacctggctatcccatgagaacccaccagccgcgtagttgtgaaaccagcggtgccgggaagcggctcataaggcggatcgcagtaaacgacgtcaccatcacctgccagcgcgagcgtgcgcctgaagcctgcattcatgaatacgcatgcgtgagccttccgcttaaatgccttgatctcttcttccgggaaatatggcgctttatatttcccaaagccgacgttaaaaaaaaccgtccaggttgtaacgaatcaggccgttgaagcagtgccgattgaggtaaaggaatgctgctgcacgctcgaccgcatccagccgctgcgcgttgaatgcttcacgaattaacgtatagttttcggcatcattaagatgcctgaatgccttcattgcctcatagatcaccgaatcggggaccaccgccagcatctgatacaggttaatcaggtcagcgctgacgtcagccagaaggaagcgttcgtgcttgtctgagttaaggaacaccgagccgccacccacaaaaggctcaataaggcgtttacctgcgg

SEQ ID NO: 862 - protein, 388 aa, Homo sapiens
  MOD_RES (210)..(243): Variable amino acid
MPPFWEAPPWANQSRARELEFVLLGFAHVPSLRPMLAALFLAAFLLTMSGNSLIVLLTSLDFGLRTPMYFFLRQLALVEICFSLDVAPRLLVTLLQPGRGVSPTSCALQLLLVLSCVTSECFLLMVMAWDRFLAICRPLRYGAIMSPQLCYLLATTCWLAGIPVALVFTIWLFNFPFCGPRGIRHFFCDIAPLLSLVCADTRVFEANVFXXXXXXXXXXXXXXXXXXXXXXXXXXXXXXXXXXLSSCFAHSRHMLQVSCQRNIASAATNSGYDITRCFAGTAFAGYSPASTDAVQIEAVLFVKFNYARCETSGAGKRLIRRIAVNDVTITCQRERAPEACIHEYACPTLKKTVQVVTNQAVEAVPIEVKECCCTLDRIQPLRVECFTN

SEQ ID NO: 863 - DNA, 1379 bp, Homo sapiens
  source
  (1)..(1379)
  CDS (201)..(446)
  CDS (514)..(1179)
cttccttgtgaggaggactgggggtggtgggctgggaatggacccatgaactgttgcgacctctctgcagccaccattcctggtccagcctctaccttccacccgactcctcctccacgcgcagggccagagcatgcgtacccgacaagctctgccctcctgtgcctctcttctacaggtgcctgtgggcgggctcgtgcatggacagtcccagcaatgccaccgtgccctgtggctttctccttcaaggcttctccgaattcccgcacctgagacccgtgctcttccttttgctgctgggggtgcacctggccaccctgggcgggaacctgctcatcctggtggccgtggcctcgatgccaagccggcagcccatgctgctcttcctgtgccagctgtcagccatcgagctgtgctacacgctggtggtggtgccccgctccctggtcgacctgagcacgccggggccaccgcaggggcagccctatctccttcctgagctgcgcctttcagatgcagatgtttgtggctctgggcggggccgagtgcttcctgctggccgccatggcctatgaccgctacgtggccatctgccacccgttgcgctacgcggccgtggtgacccccgggctgtgcgcgcgactggctctggcctgctgcctcaggggactggcggtgtccgtggggctcacggtggccatcttccacctgcctttctgcggctcccgcctgctgctgcacttcttctgcgacatcacggcgctgctgcacctggcctgcacgcggagctacgccgacgagctgcctctgctgggcgcctgcctggtgctgctgctgctgccctcggtgctcatcctggcctcctatggcgccatcgccgccgccctgcgccgcctgcgctgccccaaaggccggggcaaggccgcctccacctgcgccttgcacctggcagtcaccttcctgcactacggctgcgccaccttcatgtacgtgcggcccagggccagctactccccgcgcctggaccgcaccctggcgctggtctacaccaacgtcacgccgctgctgtgcccactcatctacagcctgcgcaaccgcgagatcaccgccgccctgagcagggtgctggggcgccggcggccaggccaagctccaggcggggatctgcgcgagctctgatggcaggcccgtaccaggcagagggggccgctccgctccgtagagttttccccatcatgaggggtctgcatggggaaagccaacaaggggactcaaggactgcatccaggaaagagaaagcctcccagaggttgccccatcctccactcttcccttgaatagctgggatcacagctattcgggaggctgaggcacgagaa

SEQ ID NO: 864 - protein, 303 aa, Homo sapiens
MDSPSNATVPCGFLLQGFSEFPHLRPVLFLLLLGVHLATLGGNLLILVAVASMPSRQPMLLFLCQLSAIELCYTLVVVPRSLMQMFVALGGAECFLLAAMAYDRYVAICHPLRYAAVVTPGLCARLALACCLRGLAVSVGLTVAIFHLPFCGSRLLLHFFCDITALLHLACTRSYADELPLLGACLVLLLLPSVLILASYGAIAAALRRLRCPKGRGKAASTCALHLAVTFLHYGCATFMYVRPRASYSPRLDRTLALVYTNVTPLLCPLIYSLRNREITAALSRVLGRRRPGQAPGGDLREL

SEQ ID NO: 865 - DNA, 42863 bp, Homo sapiens
  source
  (1)..(42863)
  CDS (201)..(1321)
  CDS (14095)..(14140)
  CDS (16205)..(16383)
  CDS (42423)..(42663)
  modified_base (5847)..(5946): a, t, c, g, unknown or other
  modified_base (11036)..(11036): a, t, c, g, unknown or other
  modified_base (11115)..(11115): a, t, c, g, unknown or other
  modified_base (11162)..(11162): a, t, c, g, unknown or other
  modified_base (11200)..(11200): a, t, c, g, unknown or other
  modified_base (11241)..(11340): a, t, c, g, unknown or other
  modified_base (13970)..(14069): a, t, c, g, unknown or other
  modified_base (37976)..(38075): a, t, c, g, unknown or other
tcttgaccaacaggaaggtggtgggttgtcctttccacacccctccctctgaggtgtgggcgtgggccagggctcaccagaggccccagagaagcacttaattctacagcctccttcctagagccttcagtggcctctgccagtctggcagacacttgcagacctctcttctcagcaccaccaatctctgatgccctgcgatgcccacactcaatacttctgcctctccacccacattcttctgggccaatgcctccggaggcagtgtgctgagtgctgatgatgctccgatgcctgtcaaattcctagccctgaggctcatggttgccctggcctatgggcttgtgggggccattggcttgctgggaaatttggcggtgctgtgggtactgagtaactgtgcccggagagcccctggcccaccttcagacaccttcgtcttcaacctggctctggcggacctgggactggcactcactctccccttttgggcagccgagtcggcactggactttcactggcccttcggaggtgccctctgcaagatggttctgacggccactgtcctcaacgtctatgccagcatcttcctcatcacagcgctgagcgttgctcgctactgggtggtggccatggctgcggggccaggcacccacctctcactcttctgggcccgaatagccaccctggcagtgtgggcggcggctgccctggtgacggtgcccacagctgtcttcggggtggagggtgaggtgtgtggtgtgcgcctttgcctgctgcgtttccccagcaggtactggctgggggcctaccagctgcagagggtggtgctggctttcatggtgcccttgggcgtcatcaccaccagctacctgctgctgctggccttcctgcagcggcggcaacggcggcggcaggacagcagggtcgtggcccgctctgtccgcatcctggtggcttccttcttcctctgctggtttcccaaccatgtggtcactctctggggtgtcctggtgaagtttgacctggtgccctggaacagtactttctatactatccagacgtatgtcttccctgtcactacttgcttggcacacagcaatagctgcctcaaccctgtgctgtactgtctcctgaggcgggagccccggcaggctctggcaggcaccttcagggatctgcggttgaggctgtggccccagggcggaggctgggtgcaacaggtggccctaaagcaggtaggcaggcggtgggtcgcaagcaacccccgggagagccgcccttctaccctgctcaccaacctggacagagggacacccgggtgaagggcgcaagctgaacacactcctctttctgagatccaccaagtgtaggatccttgagtcctggggagaagctgccctctctgccaggctgcagtgccctcagggaaaagtctgatctttgatccccaactctgggtgtggtgaatgggggaggcgggggctcagatcagagctggatgtgacaaagcttaagtctttatttggagatgggaaagaagaggatctgagaataaacctctggattatccacaaattgtcttgaccttttatcccagttccacctccagttcagtatggaacaaaaggattcgttgctccatttctgctttctgcaagaatacctaggaaaacttccctaagggttctaggctaatgaatcagaggtcagtgcccatctctctctgtacccaccccccacctcaaaacagggtatcccttgtctttctccggtatcaaggccaaaaatgccagcttcccctgtcctcaccttaccatctcagtggtgaccactgaaacttgctgcctgcagaggcctcagctgcaaaagctgtagttcccttgaagggatgccaggtgtggggtattgctggaatttccagcacctgccaggccctgggtgtaaaaccctggtgctgacgggagtgcctgtgtgtctccctttaaatcaggatttgaaagaagtgaagataatgacaagtcaaagacatgggtggggtgaagggaggtgagcgattaaagaggggagggggctgggagaacaggctgcaggtagagccagaaaagcagagacctcagaaagtggtgctagtcctccctgccccaaatgcaaagcccagagtatcaatttgagtgtcagagcacctggattcacagctttacctccagcaaattactttacctctttgtacctcactgttctcaactgtaaaatgggctactaaagatttaacagtgaaatatactgttagctattattcttgtttgtttgtttgtttgtttgagacagagtctcgttctgtcgcccaggctggagtgcagtggtgtgatctcagctcactgcaacctccgcttcccgggttcaagcgattctcctgcctcagcctcccgagtagctgggactacaggctcccgctaccatgcctggccaattttttgtaatttttaatagagacagagtttcaccatattggccaggctggtctcaaactcctgacctctagtgatctgcccacctcggcctcccaaagtgctggagttacaggcgtgagccaccgcacccggtcgagctattattcttacaccctgtgtaaaatggagacagagagatgggaggaaataagcgtgcagctgggagatggggatggggaaccatgtctcagctggaatggttgtatatgctctgaagtggggtataatgaaagtctcacataaagaactcagaggttggcccctaagcccctcttgaaggtgtgttctccaggacaggggttcctctttggttcctgtattgagatgcatcaatgataaaggttagccatcagaaggattttctaggaggcagcccctagaaaggagggaggcagagggaagatgaggtagagctcccacttccactgcccccccaccgccccccgccccaagctctctggcatgacttgtaacctatgaggacgcaggctgctcaggctcctggggcagcagctgggagcagtgccgccttattaagtgcagagcgccctgtgaagggggaggccacagtgcctccaggtgccccctgtcccagttcctttaattgctgggcagaggaggctccaaagaggcacccaattcacaacagattaagcaatgtgaaaggaacttaattagcctcttgtttaatttcctctttttgatgatgtttaaactagttccaaaactccacgtctattcctagcccatgcaggcaatggaaaatccctcaccacctaagcacccatcttcccaccccagcagctccctctgatggctttgctgggctccggatattggctcctctgggggcatctctgctttatgggccccagaggtaaatattgacaaagtgtacacaggtccaagttagagatgaactgcatgcacaaagacctactcttgtgggggagtggaacgaggagggtgcagtggaggatggagaagggagggctgggcagagcaggcggcctggagctccccttggaacggagggaaggcaatgttttggtgagaacctgggccctggctccctggaacaccaagccaaatggctttgaaacttcagcaggagggacagaggttaagactgtgggttcccaaaagtgggttagggaggggacaggggacacaacggtgaaagatgtgaggaagaggcctagctctcaggagtagacacatcagacaaatgcttgtgccccatgttctggggctgaaggtgtgtgtgtgtgtgtgtgtgtgtgtgtgtgtgtgtgtgtgtggagggggttggtacggggtggcagaagggacagcactgcttcaaagaaagcagcgggggacttcacacccactctgggctgtgtctccaggtttccatgttctctgctgaccagcatctctcattggatctgtggggcattctgggagagcctgcattcccctttcttggtggtctctgcatgctgtctaatatcctcaccctacccccacctaccttccttccccacctaaaggtgccaccctcacagctctgggtcggagatacttccagctgacctggaagacagctgctgagccctgtgtccctgtgtgtgaaatgtgaagccctggtgtttttttttttttcttttctccaggcagggtcttgctctgtcacccaggctggagtgctggagtgcagtggcacaatctcggctcactgcaacctctgcctcccgggttcaagcaattctcccacctcagcctcccaggtagctgggaatacaggtgcccgccatcacgcccggctaatttttgtatttttagtagagatggggtttcaccatgttggccaggctggtctcgaactcctggcctcaagtgatccacccaactcagcttcccaaagtgctgggattataggcgtgagccactgcacccagccagccctggtatttttaggcagagtagccaagagagaaaagtggtggactggaactaagaaggccggccccctcctggcctggcaagcttcgtgcacctaggtttcccggcccataaaatgagaacaattccccattctcaggatccccgtaatggctgagaaagcaccttgtaaaggcttgatgctggtggatgagagttacagaaggggagggtgctggctgctcccccagcctgctccccatgtgacttcaattcctctttctagctgagggcctgagcccccttctcctgatctgaccccacaggctccaacagggatgtgaattcataccagcatttatacaaccctagactctcacctcctcccctcccccacagccccaaagtaagtaccaactgggaacaggaagtaaaaccaactaaaaccaagaactgaaaccagctcatctctcactgcctctcaaagagggacagtaaatgagcagctcctgtgacgggtaaccccagggcccgacatcatggagatcaacaagggcctagtgggggatggatctgacaatgaatgacactggggatgggggcaataggtggaggtgattgctgagcatggcatacaaatacgatgaacacacttttcctgataccggaattcccaacattggaacctgtgtgcccctttgtttttatccttgtatttgtgaattaaaaaaacaaaaaaaagatttgcagtggttacttttgttagtgccccctctcttcagtgaggcagaggctgtccttgcggtgagaggaaaaggcccctttcagaggaacttaggtcactgcccggctctctactaccatcctcctcagaattggcagacattatggaagacagtaccttatggagttccaggtttttaattttccctgaattttttttttaaacaacaaaattggcaagaagaaaattcttcgacatttgggggctggtcgacatttgggggcaagggttccactgaaaaatcccccaaattcacgctgaggtttcaggtcatggttgctgaggtggaagatgaggtcagggctcttggagattttccaacccaccctagaacttgtttctaaatggctggggaagaggtcagtataggtccccccgttactgcagatgaaggcagaagtcattctctcccccacccctcaacttcttcagagatgtggagataggaggcttcgatctctaattgcctacgatctcttaaaaatataaaacacgtgcagttgactttggtacaaaaaagaaaacaaaagaacaacaaaacattctggtccctgtgggttttttccctcacccccaacaaaccattatggccaccccaacctttattccatcaactccaggaannnnnnnnnnnnnnnnnnnnnnnnnnnnnnnnnnnnnnnnnnnnnnnnnnnnnnnnnnnnnnnnnnnnnnnnnnnnnnnnnnnnnnnnnnnnnnnnnnnntgtagggatgaaataaaccctagtctcccatagtgctcccaggcttattaggaagagaaaattcccgcctaataaattttggtcagaccggttgctctcaaaaccctgtctcctgataagatgttaccaataacaatggtgcccgaaacttcattagcaattttaatttcgccctggtcctctggtcctgtgatctcgccctgcctccatttgccttgtgatattctattaccttgtgaagtacgtgatctttgtgacccacaccctattcgtacactccgtccccttttgaaagtccctaataaaaccttaccggttttgcggcttgtggggcatcacggaacctaccgacatgtgatgtctcccccggatgcccagctttaaaatttctctcttttgtactctgtccctttatttatcaaactggccaacgcttagggaaaatagaaaagaacccacatgactatcggggcaggttccccaatagtgtggtggcaggcgcctgtaatccaagctgcttgggaggctgaggcaggaaaataacttgatcccaggaggcagaggttgcagtgagccaagatcgcgccactgcactccagcctgggcaacagagggagaccctgtctcaaaatacataagtaaataaataaataaataagttcagctccaaattggggaaatgtggggtccccagaaagaagtggttactattactaggggaacagggcccttttactgagagaggaacacatacaccctcatcaacacagaggcaccgacacagaaaggaagaaacagagtcttggagaaagagacagaggcagggtacccggagtcagggacagagcacacagacccaggggagcagacagaggtgcatagacgatagattcccattcgctcagatggagccagagcaatgcccgggcacagagagacccagcagctggcagaacagaggagacgtaggatagaatggtggctagacaggcgaggggcaggagaggaggagcaaggcaggggccttcatggggatctgtctgtccgtaccagccgggaggcgtagccaccctggtgctgcagtcccagaaaggtgtccagtccttctcggatctgcaggaagagggcctccttggggcctgggcatcccgatgcttgcagtctcctcctgaaacacacatcgccaccactaccgtctgtatccagtggccagtgacgggcaccagggaggaacactgcctcgcctcagcccagccctgttgcttgcccccagcccagcccttcctgttggcataagcacagcccagacccaaactggtcctactttggggctctgctttgccagggctgcagagttggctgtgggcaagagtggcccctgctggtcaaagggcagtactgcctccagaagaaagccagggttcaggggaaggcgaacagcaagagcaagctgaattctccctccttgcctggttgctgatgccaacctttgcccctgctcagccaaatagtgcactcaggactcccttccctctctaaccaaggggcagaattaatgcctgactgtgaaaggtgggtgacacttgaaagaccctgagatacagttggtgccacataaggggggcccaggcatttgggcatctctgctttcagccagctacccttaggaaggtgccatgagccctgcaggcattgcttctcatctgagttcccacccaagccagttcagggacaaggcccagggtcctctcccctcactgaaaccagccagccctgcccgggagctagggaaggttggttcactcaccagagctaaaggaacttgttcaaggggaccattgtcaaagcagagagacagtgcccttccatggccagcagcccctacaatgttcactcacactgaactcttcatgctgacccccggaccttctctttctgacttcctctgactttggggaagtggtcaggggttttccaagggagggggaagagatgatctctctgctccagtccaccaagcctatgcagaagtctgagcaagaacaactgatctcatgtggcaatgcgggaccatgagttaatccaagacatcctgggttgtcctcagcctgcaaccaaaagcccggcaaaggcctggcaatggggcaggccaaatgtcccaaccgtgagaccacctctctcaagaaatctctgaaagttctttgggcctcagtttccttatctgtaaaatgaggagattgtgccatatgctctctgagttcctttgtggttctattacaccattatgtggttctatgaaacccaccgtgggaggcagaagcaagaagatccagtgtcctgatactccccctgactccacacctccctcccactcccaccctcagtcttccctgagagaaggaggtaagagccactgtggagaggcatattttggaaggcagcatccatcctcccccaaaggcccacaaatgggattgagctctggttctccagggaaaggactgagggcccaggtctccttgattcttgttgttcttcggatggttgtctcttgagggagatgactagagagttatctagttccttcccactttcccattttctccaaggtctaggcctggaaggaaggaggtacaggaggtcccctgggggcttacgtattcagtgggccctcgagctccctgccaggcccccaactatgtcttctgaagacgtctttgttttcggccgtgggcccggaaagcccctgacctttggaggggtacagcatgcgagccattcccctcctttatttccccatctcttcttcctccagttgttctctggattcaactgcagaaaggcagaggccagtgtggcctcacgggcaccttgtctccacctgctcagaacacgtctgggacggctctgttcgtgggagacacacacagaccagtctgcgtcagcaggaaataagagtgagcagggttctagaactctgaaaccttgggactagaagtgtgtcacagtcagctggacttaggagtgcctagccaccactcactttactgagacacataactggataatgtgtcacattgtgacacattgtgacctcagggtcacattgtgacacattgtgacctcagggtcacattgtgaattagctgcagactcaaggctagaacttaggttttctggatcccagttcagtgtcctttctagtacataaagagatcctcattgtctccttcttattccatttactgaggacttatatagcagaaagccaagcaaagagaaatagatattgttcctatcctcaaggaatcagagtctagtgagtgggtgagtgtgtgtgtgtgtgtgtgaacaagcaaaagaacaaatcacagatgactccataactggctcacatatgccaaatgccacaagagaagtttcaacaaaaggctttaggctgttaaaggagtgagggcacgtgaccagttgggagactcaaaaaaggccaggtgcggtggctcagccagcactttgggaggctgaggtgggtggattgcttgagcccagctgttctagaccagcccgggcaacatagcgagacactgtctccacaaaaaaacaaaatgttagccgggtgtggtggcacgtgcttatagtcccagctacttgggaggctgaggtgggaggatcacttgagcccaggagttcaaggctgcagtgagctatgatcatgccactgcactccagcctgggtgacagagtaagacactgtttgcttttgttttgttttgttttgttttttgagacagagtttcgctcctgttgcccaagctggagtgcaatggtgcgatctcagctcactgcaacctctgcctcctgggttcaagcgattctcctgcctcagcctcccgagtagctgggattacaggcacaccccaccatgcctggataatttgtatttttagaagaaatggggtttcaccatgttagccaggctggtctcaaacacccaacctcaggtgatccgtccgcctcagcctcccaaagtgctgggattacaagcgtgagccaccgtgctcggccttgttttttttgtttcgttgtttttttgttttttttttgagacagagtctcgctctgtcgcccaggccatagtgcagtggcgcaatctcagctcactgcaagctccacctcccgggttcatgccattctgccattctcttgcctcagcctcccgagtagctaggcctacaggtgcctgccaccatgcccagctaattttttgtatttttagtagagagggggtttcaccgtgttagccaggatggtctcgatctcttgacctcatgatctgcccgccttggcctcccaaagtgctgggattacaggcgtgagccactgcgctgggcctgtttttgtttttaaaggggaggaggaaacagaaataagcagatggcctttgagatgtgcctggaagggtaaagtggttaggatttggccagggtagagggagaggattttaggcagataaagtagcagggggaggccgggtacggtggctcactcctgtaatcccaacactttgggaggctgaggtgggcggatcacgaggtcaggcgttcaagatcatcctggctaacacggtgaaaccccgtctctattaaaaatacaaaaaaattagctgggtgtggtggcgggtgcctgtagtcccagctactcgggagactgaggcaggagaatggcatgaacccaggaggcggagcttgcagtgagctgaggtcggactccagcctgggcgacagagcgagactttgtctcaaaaaaaaaagaaaaaaaattagcctggcgtggtagcgggcgcctataatcccaactacttgggaggcttaggcactagaaattctcgaaccttggaagcttatgtaccatagaaccccgagtgggcccttacacttcaacctccttgacaccagccattttgcctctctgttaatttttgtcacttgaggtctcccccctgtttctgggagaatagggtgattgagttttcacatgtgtttaatctttgattacttccttttcttccccttgcacgtaagttacactgncctttttcttgtgcgaactcccatcttttaacccaaaaataatttccctgtctatggctttccttttttcttttatccntgtccttcttccttgtgttgcctttttttctttatttttctttcttncttttcgatcttctctgtccttcttatttcatgtgccntcgtcccgtcttcttctttttctttatctccctccccctgnnnnnnnnnnnnnnnnnnnnnnnnnnnnnnnnnnnnnnnnnnnnnnnnnnnnnnnnnnnnnnnnnnnnnnnnnnnnnnnnnnnnnnnnnnnnnnnnnnnntcaaagtacaaaaattagctgggcgcagtggcatgggcctgtagtcccagcagattgtgccactgcactccagcctggtgacagagggagactctgtttcaaaagaaaaaaaaaaaagaactaactttactttttttttttttttttttttttgagatggagtcttgctctgtcacccatgctggagtgcagtggcatgatctcggctcactgcaagctccacctcccgggttcacgccattctcctgcctcagccttccgagtagctgggactacaggcgcccgccaccatgcccggctaatttcttttttgtatttttggtagagacggggtttcaccgtgttagccaggatggtctcgatctcctgaccttgtgatccgcctgcctcggcctcccaaagtgctgggattacaggcatgagccaccgcacccggccaaaactagattttcttgagctttaattttattttctttttttgagatggagtctcgctctgttgcccagcctacaatgcagtgttgtgatcttggctcactgcaacctccacctcctgggttcaagtgattctcctgcctcggcctcccgagtagctgggattacaggcacctgccaccatgcctggctaatttttgtattttagtagagacggggttttactatgtaggtcaagctggtctcgaactcctgatctcaaatgatctgcccacctcagcctcccaaagtgccaggattacaggtgtgagccagccaccgcgcctggcccttttttttttttttttttttttttttttttggagatggagtcttgctctgttgcccaggatggagacctggccaaaaagctagttcttaacgagaaagggctagaagtcaggcatgagagatagcttttcaagaacactcaggtgccaggcaccggtgttcaccactaggtgacagagcgagattccatctcaaaaaaaaaaaaaaaacccacaaaaaaaacaaatactgagtcaataaatcagatgagatctaaggggatgacaatagctgttcctctgcagaccatctttccccatcctacattctccagctgtgaagaggagctgcctggcaaggaaggtgtacggcaataggtggtgactgatgagaacaacaatcagaggaaaataagggatggaagcaaaagattcaaaagggcagatatctccatgggaacaggacccgcccacaacccctgcagcaaggccagaacccagctcgcttgcccaggggtctgggcaaagactgagttccaataatcacctgtgttcacccgggggctaagaaaacagacaagtcaatgtggcatttgtttttattagaaaaccccttagtaagcacttctctaacccagaatagacactgggtatcctccaagagtcccatagctttcatttcatcttccaccctcttctgagagggggaggcaggggataggggtggtgtcaggcagtctccaaaatgcccctcctagacccctgagagaattcacgttgccagcaataaaccaacagcacctcagtggggcatcagagggccctctaggctcaaggctattgccaaaggcattcctgtttatggcttcacgatggaaccaaggaggctctcgcagactcctagggctggtccttcactatggctgagagcagggcaggatccaggagaaagtggccaagggctaagagagaagagattgcatttaagataccctttggagtctggaaagcacctggatttcttgggagaggagcctggatttcttgggagaggagggctgtggaagccccaatcagttcttcttcgttttgggagtgtcatatttcctcttgctggagtaccacaatagcagggggatgccgatggagggaagggtcatgaccccaaaggctgcccagtccagctgtaaaggaaaacaaagaccttgcttagaagtctggattagggcacaggagaagccagggaaaatatgagtccaatgagaaagggagcagtctagcccaaatttatttatttttgatacaaagtcttagtttttttttttgagacgaagtctcgccctgtcacctagctgtatgcagtggcacattctcagctcactgcaacctccgcctccagggttcaaatgattttcctgcctcagcctccccagtagctgggattacaggcgcatgccaccacacctggctaatttttgtatctttagtagagactgggtttcaccatgttggtcaggctggtcttgaactcctgaccttatgatctgcccacctcggcctcccaaagtgctgggattacaggcatgagccaccgcgcccggccgatacaaggtcttgctctgttgcccaggctggagtggagtggcatggtcacggctcaccgcagccttgatctcctgggcttaagtaatcctcccacttcagcctcctgagtagctaggatcacaggggcgtaccaccacacctggctaattttttttttattttttgtagaggcaaaatatcactatgttgcccaagccggtctccaattcctgggctcaagtgattctcctgccttgacctcccaaagtgctggaattacaggtgtgagccacaacacccagnnnnnnnnnnnnnnnnnnnnnnnnnnnnnnnnnnnnnnnnnnnnnnnnnnnnnnnnnnnnnnnnnnnnnnnnnnnnnnnnnnnnnnnnnnnnnnnnnnnnatgggcggtgcgtacggtatcgcagggtcatagagtgtgggcgagaggtcggcaccaggaaggaacggaaggtggcacggaccggcaactggggggccgaaagggagaggaaattgtagcggacggcccccccgggagtaggggatacaggcacacccccccatgcctggataatttgtatttttagaagaaatggggtttcaccatgttagccaggctggtctcaaacaccaactcaggtgatccgtccgcctcagcctcccaaagtgctgggattacaagcgtgagccaccgtgctcggccttgttttttttgtttcgttgtttttttgttttttttttgagacagagtctcgctctgtcgcccaggccatagtgcagtggcgcaatctcagctcactgcaagctccacctcccgggttcatgccattctgccattctcttgcctcagcctcccgagtagctaggcctacaggtgcctgccaccatgcccagctaattttttgtatttttagtagagagggggtttcaccgtgttagccaggatggtctcgatctcttgacctcatgatctgcccgccttggcctcccaaagtgctgggattacaggcgtgagccactgcgctgggcctgtttttgtttttaaaggggaggaggaaacagaaataagcagatggcctttgagatgtgcctggaagggtaaagtggttaggatttggccagggtagagggagaggattttaggcagataaagtagcagggggaggccgggtacggtggctcactcctgtaatcccaacactttgggaggctgaggtgggcggatcacgaggtcaggcgttcaagatcatcctggctaacacggtgaaaccccgtctctattaaaaatacaaaaaaattagctgggtgtggtggcgggtgcctgtagtcccagctactggggagactgaggcaggagaatggcatgaacccaggaggcggagcttgcagtgagctgaggtcggactccagcctgggcgacagagcgagactttgtctcaaaaaaaaaagaaaaaaaattagccgggcgtggtagcgggcgcctataatcccaactacttgggaggctgaggcaggagaattacttgaacctgggaggcggaggtcacagtgagccaagattgtgccattgcactccagcctgcatgacaacagcaagattccatctcaaaaaaaaaaaaaaaaaaaaggtagaaaaaagtagcagggagaaaaggttcatgagtgataaagtgttgtgatttctctttctccctctccctctcctcccccttcctcttcttctccttcttctgatggagcttcactcttgttgcccaggctggagtgctatggcgtgatctcacctcaccgcaatctctgcctcctgggttcaagtgattctcctgcctcagcctcctgagtagctgggattacaggcatgcgcctccaggcccagctaattttgtatttttttttagtagagatggggtttctccatgttgatcaggctggtatcaaactcctgacctcaggtgatctgcccacctctgcctcccaaagtgctgggattacaggtgtgagccaccatgcccggcatgatttcttcttctaagagtctggtcatatgcagagtgaaagccagtctgacctctctccatggtgcaaagagaagggctccaagcatcagccacagagcacacatttcctccactctctcccaaatgggcgttgttctcagtgcccaacactcccggttggcatcatggcttgcctcagtgtgtctcagaattaagaaccctcaggtgctcttaaagttgaaaatgataagccccactccagaaagaagtgccaagtcccagagtaccaggggcaggaagggcaggaagggaaatagcatttactgcatacctctgtacacttcactcttaggccatgtctctctcgaccttctgctctaatgagtctcccaggctccctttctcctgggaccacttctagctacttagacatcaggagtgcccagaaggatcaggaagccgggacccaaaaccttccctctttcaaggctttctgtggggctgtcagaccttctccaggttgtcttaaccaccccagggaagtccaggttatcagttattgtcccttcaatctactttcctccgtcactgcaatctgttcactgccctcaccccacccagagcagctgagaagaaagtgctgcgccacaggctgggcgcagtcgctcacgcccgtaatcccagcactttgggaggccaaggcgggcagatcacgaggtcaggagtccgagaccagcctggccaatatggtgaaaccctgtctctactaaaaatgcaaaaattagctaggcatggtggcacgtgcctgtagtccccgctacttgggaggctgaggcaggagaatcgcttgaacccaggaggcagaggttgcagtgagccgagatcgcgccattacactccagcctgggcaatagagcaagactccgtctcaaaaaaaaaaagaaagaaagtgctgtgcctggggtggctgtgtgcctgtttaccacagggaagggagggaggcaggtgctcaggcctctacagacggcaatgctattcccccattgggtgggtgtctaaggagagaaaaggagaagcctaggagagtggccatggccctgtgcccatctgtgctcatcgcgtctgggagcaatggacagggaaccccttagccagccaccaggagagatcctctccctccctgcctacaaatgggccctgtgccatcaggtatgttgggtacaaacaggatgagcagatctacaggaagcaggtcagagcctaagggccatggcagggtccctcccaaccagtggcctccaaagctgagatttggaggcagagggaggttgacaaaaatactgtgaaaagctggggtggagagaagagtaggaactggaaatatactaggaaaaggggaacgggggctggaaataggacagaaactgagaggccgtgacggggaggcagggacactgcgtagatactgtgagctctggaattcagggacctcccagaagaagaaagttggtttgaactttacaccctgtattcaacctctacctcctagccttgtctcagctgtgcccacccggttgaattcttcttcttcttttttttttttttggagagaggatctctctccctctgtcaccctcaagcctcactgcagcctccgcctcccaggctcaagcaatcctcccacattagcctcctgagtagctaggactacaggtgcatgccaccacatccagctaacttttaaatttttgttttgttttgttttgttttagatggagttttgcttttgttgccaggctggagtgcagtagcgcaatctcagctcactgcaacctcctcctcctgggttcaagagattctcctgcctcagcctcccgagtagctgggattacaggcatgcaccaccacacccagctaatttttgtatttttagtagagatggggtttcaccatgttggccaggctggtctcaaactcctgacttcaggtgatccgcccacctcggcctcccaaagtgctgggattacaggtgtgagccactgcacctggtcttaaattttttatagcgatggggtctcactatgttgcctagcctggtctcaaactcctgggcccaggcgatcctcctgcctcagcttcccgaagtgctgggattacagatgtgagccactgcgcccagcctgcagggttgaatttggcaagatgaaggaagtgcagtgaactggagacctttgcttttcttctgtctgtgtggatgttcctgctagagatggtgtcctgtcaccctggccccattgacaggtacctcagatcttaagatctttgtgaaactcaccctggccccactgacaggtacctcagatcttaagatctttgtgtaactgttcacccttcttcctccagctcagaccaactggagtctgacctcttctcaaagatctaccctttttccagcatctctgtcatttcattcatggtctctgccctctgtgaaaatggaatctgtctggcagtttctccctcacatcctcatccccacccactaaccctgcctatgctatgatgccaatactttttattctgtccctcaaagagatgaggtttaacaaggcttcctcaactccctcctagcaatattccctcctccactgtctgaaattcaaactgggggtcccatcatcgtgttgcttctttttccattagattaactctcctagcccccctcccattttcccttagcctcttgagctcaggaaatggtgcaggggagaggccagggctgggtctcacacaatggctttatttagccctcaaatgagatcacatcatgtcatatcactgcttccactgagcaaagagataggagattctgaaataggtctgggatcagatgcttgagatgggggaggggagctgggaaagcaggaaggggctctaagaagtcattttacttatcttcctgcctctggatcagatggtcttcccaccactgcaaaccatcagcgtgtgctgtcccttcctccaagtgtataacctccacagattgcactggtcatcaaagatttcttagacattctactgggagctggaatgggaatatataatattttaatagagagagacatctgttattcaaaactctgagaccataatttctttagggtgttacagcttttaagtctgtcaaatttgctagctctgccactttctttttttctttctctttctttattttattttttttttttgagatggagtctcgctctgtcgcccaggctggaatgcagtggcacaatcctggctcactgtaacgtccacctcctgggttcaagcgattcttctgcctcagcctcccaagtagctgggattacaagtgcctgccaccatgcccggctaatttttgtatttttactagagacaggtttagacatgttggcagggctagtctcgaactcctgagctcaggtgatctgcccgcctcagcctcccaaagtgctgggattacaggcatgagccaacgcacccggcctagctatgccactttcataagccacataaccttgggaacttaacttttttttttgtttttgacacagggtctggctctgttgctaaggctggagtgcagctttgatcagagctcactgcagcctcaaactcctgggtcaggagatcctcctgctttagcatccagtagctgggactacaggtatgcaccaccatgctctaagtaaaaaaaaaatttttgggcccagtgcagtggctcacgcctgtaatcccaacactttgggaggctgaggcaggtggatcacaaggtcaggagtttgagaccagcctggccaatatggtgaaaccccatctctactaaaaatacaaaaattagccaggtgtggtggcgcacacctgtaatctcagctactagggaggctgagacaggagaatcacttgaacccgggaggcggaggttgcggtgagccgagattgtgccgttgcacattccagcctgggcaacaagagtgaaactctggctaaaaaaaaaagaaaaaaaaaaaagctggctggtctgggctcaggggctcatatctgtaatcccaacacttagggagactaaggcaggaggatcacttgaggccaggcattcaagaccagcctgggcaacacagtgagactccatctctaaaaaaaaaaatttttttttagagatggatctcactctgttgcccaggctggagtgcaatggcgtgatctcggctcactgcaacctccacctcctgggttcaagctattctcctgcctcagcctcccgagtagctgggattacaggtgtgcaccaccatgcccagcctgggcacccagcctgcccagccagcttttttgagcttcagattcacgtaaaatgggaatgagaagccgggtgaggtggctcatgcctgtaatcccagctctttgagaggccgaggcgggtggatcatctgaggtcaggagttcgagaccagcctgaccaacatggtgaaaccccatctctactaaaaatacaaaattagccagcgtggtggcacatgcctgtaatcccagctactcgggaggctgaggcaggagaatcacttgaacctgggaggcagaggttgtgtgagccgagattgtgccattgcattccagcctcggcaataagagcaaaactctgtctcaaaaaaaaaaaaggaatgataagacctactttgttttgggggttttgtttgtttgtttgtttgtttgttttgagatggagtctcgctctgtcacccaggctggagtgcagtggtgcgatctcggtttactgcaacctctgcctcccgggttcaagcgattctcctgcctcagcctcctgagtagctgggactacaggcacccaccaccatgccgggctaatttttgtattttctgtagagacgggtttctccatgttggtcaggctggtctcgaactcctgacctcaggtgatccacctgcctcggcctcctaaagtgctgggattacaggcatgagccaccatgcccggcctgtttgttttgttttttgagataggctctctctctgtcacccacgctgagtgcagtggcacgatgatggctaactgcagccttgatttctcaggctcaggtgacccttccacctcagcctcccaagtagctgcgactataagtgcgcaccaccatgcctggctgattttttttttggtattttttagtagagacagggtttcaccatgttgcccagtctggtctcaaactcctgggctcaactgatttgcctgcctcggcctcccaaagtgccaggattacaggcgtaagccactgggcctgtacttattttgtaaggatgttgagagacttgatgataatgtatgcaatgcacctagtcccccttccatctgtttttggtacatattaggtgctcaataaatactattattattgttgttattattatttagaggcatagagacggcagggtatattgaaacagagagctagaaagaataatgcttggcctggtgtggtggctcacgcctgtaatcccagcactttgggaggcgaggcgggaagatcatgaggtcaagaaatcaagaccatcctggccaacatggtgaaaccacatgtgtactaaaaatacaaaaattggcctggcatggtggctcacacctgtaatcccagcattttgggaggccaaggcgggtggatcatctgaggtcaggagttcgagaccagcctgaccaacatggagaaaccctgtctctactaaaaatacaaaaaaaaattagccaggtgtggtggtgcatgcctgtaatcccagctactcaggaggctaaggcaggagaatcgcttgaacctgggaggcgggggttgcagtgagccgagattgcaccactgcactccagcctgggcaacagagtgagactctgtctcaaaaaacaaacaaaaaaaattagctgggcatggtggtgtgcacctgtagtcccagctgctagggaggctgaggtgggaaaatcacttgaacccaggaggtggaggttgcagtgagctgagatcacaccactgcactccagcctggcgacagagcgagactccatctcaaaaaaaaaaaaaaaaaaaaaagaaagaaagaaaaagaaagaaggaggcaggaggcccaagatagaagcagaaataggcatcatatgatggtcacctactgttttctcttagagaaagacaataaataacccatgggctgacactaacataactatgatggcaacagttacacaccacttctgatggaaaagtgtatgcaaccagagcaagaagagcaagaagaaatgagtgcttttctgtcctttgagaccctgatgagccctgacaaagttgtcctcttcaaggagaagaaagggatagaatggcctctggaaatttaaagcaagggttagcaaactatagcctctgggacaaatctgtcctgctatctttttttaatagttgaaaaaaaataaaagaatactttgagacacaatattatatgaaattcaaatttcagtgcttgtaaataaagtatttttggaacgcagccatgctcagtcatttacatattgtctatggctgtttttgcattatgacagcaaagttggtagttgcaacagagagcccacaaagcctgatatatagatatatcctgagtctgggatcctaatatatatgtgtgtgtgtgtctgtgtgtgtgtgtgtgtatgtgtgtgtgtatgtgtgtgtatatatatatgtgtgtgtgtgtatatatatatatgtgtgtgtgtatatatatgtgtgtatgtatatatatatatttttttttttttgagatggagttttgttcttgtcacccaggctagagtgcaatgatgcaatcttggctcactgcaacctccacctcccgggttcaagcgattctcctgcctcagcttcccgagtagctgggattacaggtgcctgccaccacttctggctaatttttatattttttagtagagatggggtttcaccatgttggccaggctggtctcgaactcctggcttcaggtgatccatctgcctcggcctcccaaagtgctgggattacaggcatgagccaccgtgcccggccatatgtttggttttttttttttttagacagggtctcactcggtcgcccaggctggagtacagtagcacgacctctgctcactgcagccttgacctcccaagctcaagcaatcctcccacctcagactcccaaggagctaggactacaggcacacaacaccacactgggataatatttgtaatttttgtagaaacaaggtctcgctttgttgcccaggctggtcttgaactcctgacctcaggtgatccaccccacttcagcctcccaaagtgctgggattacaggccaccacaccaggccaagtggctagctttgaaagaaatccggcaacattatttttacccacctcattcctacctccccgaccccagccaaagaaaagcagcagcttccaaaagaaatgagataggggtcccaaagaagttcaatgtatcctttctgctccctctgttagcttagacctctgaatgaggtgatggggcgcaggcaggtctctggttatgtttgctgccagcaaacactgaacataggggaggaactgctgacagtaaccaaacagccaggcgttgtggcctggaggcaatgctggccggccctttcgcagactgagaagctttctgagtctggctctgggatcctaaatctaccgaggtggccaatattggagaagacccaagagaacaggataataaagactgaggtggaagggagaggccaaatgacatgttgtactggctctcctccaaatctcctggccctgggggtgggacacagggtcacaaaaactcttcgatggttcaaaatttaacctaacatttcttctcctgtagaaagtgaaccattaatccagcagtgccctgcaaagacggctaaagcagagcttctcttcgcctcagataaagaagccaggagctacaattccttcccacctgctccctagataccccgttccaagacaggagcacccaagtctctgacaccctcctgcttcacccatccgcctgacttggctgaacgctggtgtcctggaactcattctctttctctgatcttcctgtccactgccagagagtggtgccacaattccaaaaatgaaaggaaagtaaaagatatagaggatccattcattcagcaaagattattttagcactttgtaagtgtcaggcacagaaaagaggacccacaagggtctatgcacaaatacaatggtgggacctggctaccatcccttagtggggcagaggccagtatgggcaaaagccatgtgtcctatcagcttccgggttgtctcctgagaggcattatcatctgtacttagttcctgaatttcaaggcatccccagccccctaatctaaccacacacccctctactaagtcagccacaggcatctcagacactctccctaaatcatccccatgtccttgatgtactaggttcgtaagtcagtcaggaattttgctgctctgggcttccaagtgtgaccaccttttttttttttttaattggttagtaaagtgaacttagggaccctgccctcttcctttctgctggacctgtagctatatgcttattctatcaggggcttgggacccagactagccctttatttatggcggatagagaagaaaagggtcaagaccaaccagtcttcttctacctcctgccagtttcctgggcatgtgttctgggtgctatgccagatgggtgtggcaagagagggtctgagggtaaggacccaggaaagggaagagggaaactcaccagaactgggagatatcccaaagatgggggacctgtttctgctgtcagttggtgacttcagtgtgggaaaaagtcctgcttcaggtggcccctttaagaacccagtccagcactttggtgggggtcccctctctcttggtccttttaagggagctgttcatggtccagaagtttgcataagagaaaggggggactcattccagtccagatcagctgcctcttcatccactgtagcccttcctttccccgccctacttcaaacaccctaaacagtgctgtgcccaggaccttaactctttcagtgccattactgatcccagggactcctgggtccctctgtcttcagcattccttgaacacagggtggctacaaaattcagacttgtgtagaaacaggtacaagaagccatgctggggtcaccctgaggagagagtatgtgggaacctgacaccccagggaacgtttacccttcctccaacagggtcagggagaaactgaggaggggagaaagcggacatctctgggaaagaaacagctgcagctggaaacctacttcacagcagggtcctcaggtcagtggtgtcctttgccctctcaaattcagctacaaaactgattgtcagccgggcatggtggctcatgcctataatcccagcactttgggaggccgaggcgggcggatcacttgaggtcaggagttagagaccagcctggccaacgtggtgaaaccccgtctctactaaaaatacaaaaattagccaggcgtggtggtgcgcacctgtaatcctagctactggggaggctgaggcaggagaatcacttgaacccggcatgcagaggttacagccagccaaaatcacaccactgcaatccagcctgggcaacagagcaagactccatctcaaaaaaaccaaaaaaacaaacaaaaaaacctgattgtcggtccctttaagaggcaggttacagcaatggaggaggaaagattgtatttttttgtgatgaaagtacagggtggagcagttacaagggcagctgcactgagaagggccctagcgtcagcaccaggaacaggggtgaccaagcaactcagcatatccggggctcacggcttgttgtggataccaggcggcaggatatttgaccagctccccaactctcttcccagataacagcttctggggtggggcgggggctgactcaccttcactgctttccctggggcagaagacagctggggcggacatcggacttcctgaggtaaaggggagcactcctcgcctcctgtgggctagtagaaagggcatattagagctggaagatcttggctgcctctgccaagtcactagttgcaggaccttgtgccacctatttagcctcatcccctcatctgtaaaatgcagatgttaaatgaaacatgtgcaaacagtggaacataaatgctgggtccataataaataaatatgctagctgccactggctgggcaaccttggacaagccgcttcaccccttatctttcctgatctattaaatgagaggatcaaattaggtaatctatggtctatccttgctcaaaaattctctctgtcagtgagtggaagacagcagctgctgctggatgtagaactgtgtgtgcccttccccacctggctggacctcacccacaagatgagaaagtgacagtggttgttcctcatgttcctcactgcataacaacaaaggggtaataccagccctatcgtactggtgaggggtcctcaaaaatcctccaattaaacaatttcatgattgtgcagaggaggaaacaggctccaagagggagagctattttatatataatatatatataatatataaatatgtatatttatatatataaaatatatattatataaaaatatatttttatatttatatttttatataatatatattatatataaataaataatatatattatatatatattatatataaataaataatatatattatatatattatatataaatatatataatctgcccaaggtgggcagatatatattatatatatataatttttcttttccgttgagatagggtctcactctgtcacccaggctggagtgctgtggcatgatcatggctcactgaagacttgaactcctgggctcaagcagtcctcctgcctcagcctcccgagtagctgagattataggcgtccgccacacctggctactttttgtatttatagtagagacgagattttgccattttggccaggctggtcttgaactcctgacctcaggtgatccgcccacctcagcctcccaaagtgctgagattacaggcgtgtgccaccacacccggcctgtagaaattcttatacccgtttcccactcactttcttcgagtgccaaagccgagtacaggaagggggtggaaatcaaggcacctggctcctcctggtaccagggtggggtgtgtgggtgagccgatgccagctgaaagtctgcacaatgagggagggctggagggctagtctccaggagtggggacacctggaacatgctggtggctgacctactgtctgtattgccttttagggaggagcctcagtttgggtacccagcctccaggaaggatgtgggatcagtgcttactttcctcctccctcacagatctgcacacaatcctgagatcaaggttcacacctccctagggtggttttcagttagagcggaggagtgttgtctgccactcagcctcctattaaattacctcaagaagttaagagggctcaatcctaaagccaactattccagctaagactttctgtctatagattttagaggctcttatattctccaacaccactacttaagggaggttcacattccattctgactccaagaaagctgatctcttaggagatgaggtatctagctttggccttgtttcaaggtgcctgtgacaccaactgtcttcacaatgcttctcttgtcatctgtgtcaggcctgggtttccctcctagttgccttcttcatgacaagggccaggacacaaagtgctgagttttgtaagggaaaggtacaataaagacgcccccagcttttgggaaaggagcacctctcagagttcagattaaggaaggaatcttatacagatggtcccgacttatgatggtttgacttaagattttcgacttcacaagagtgtgagagccatacacattcagtagaaatcctcttccgagtaccataaaaccattctgtttttcactttcagtacagtagtcaataaattacatgagatattcaacactttattataaaataggctttctgggccaggcacagtggctcatgcctgtaatcccagcactttgggaggctgaggtgggtggatcacttgagctcaggagtttgagaccagcctggccaacatggtgaaccctcatctctactaagaatataaaaattaggccaggtacggtggctcatgcctgtaatcccagcactttgggagaccgaggcgggcagatcatgagatcaggagtttgagaccagcctggccaacatggtgaaaccctgtcactactaaaaaatacaaaaattagccgggcgtggtggcgcatgcctgtagtcccagctactcgggaggctgaagcagaattgtttgaacctgggaagcggaggttgcagtgagttgagattgggccactgcactccagcctgggggaaagagtgagattctgtctcagaaaaaaaaaataataataaaatacaaaaattagccaggcatggtggcgggcacctgtaatcccagctactagggaggctgaggcatgagaattgcttgaacccgggaagtgaaggttgcagtgagctgagattgcaccactgcactccagcctgggtgacagagtgagactccatctcaaaaaataaataaaaataataaaataggctttgtgttaggtgattttgcccaactgtaggctaatgtaagtgttctgagcatgtttaaggtaggctgggcaaagttatgatgtttgatatgttaagtgtattaaatgcattttcaacttaaaacattttcaatttacaacagggttacatcctgatacgcatatcatataaacctatcggacataaccctattggaagtcaagaagcacctgtattatgttccagagttatgaagtttaccctattctctagcccagaaccccgccaccaccccccactccccccgcccataggttaactcattacattttccttggagactacacagatggaaaataccatttcctccttcagaggctaacactccatagtcctggagtgcaaaatgatgcatatcagactagttccctttcccttccccacacctgttctcaaacccaagcctctgactcattggcctatcctccccattctcctgagcaagtcccaggtttccaccaggaacacaatgaacaaaagcaaatatatcctccttgcctgtaacctggccagtcttgggatgtccaagctgcagcccctgaaagagggatgtgagctggcagagggctactccatttggagcctctcgtctccatgttcttttcatcctcctgggcctggaggctctgattgctgggctaaagaaaggttaaaccagttgggcaggggagccgggggagcagaatctaaactgggaaactcggtagcagaaacaaagccggtgtttgttgggcttccctcttgcctgggaggctgttctcagaccacggcattcctgagttggacagagtcagctcagagtggcttctccccactgctgcagcagcaaaagtcactgcctttccacaggtcacgcttagagcccaactcaagggatccaggtacttcttccctgccagagctcaaagaacagaagcattacaagtaaattcaggccaggtgtggtggctcacacctgtaatcccagcactttaggaggctgaggcagacagatcacttgaggtcaggagttcgagaccagcctgaccaacatggtgaaaccctgtctctactaaaaacacaaaaatcagccgggtgtggtggtgtgcacctctaatcccagctacttgagaagctgaggcaggagaactgcttgaactcgggaggcagaggttgcagtgagctgggattacaccactgcactccatcctgggcaacagagcaagactccatctcaaaaaaaaaaaaaaaaaaaaaaaaaaaaaaagggccaggcgcggtggctggctcacacctgtaatcctggcactttgggaggctgaggtgggcagatcatttgagatcaggagttcgagaccagcttgacctacatagtaaaaccccgtctctactaaaatacaaaaattagccaggcatggtggcaggtgcctgtaatcccagctactcgggaggccgaggcaggagaatcacttgaacccaggaggtggaggttgcagtgagccaagatcacaacactgcattgtaggctgggcaacagagcgagactccatctcaaaaaaagaaaataaaattaaagctcaagaaaatctagttttggccgggtgcggtggctcatgcctgtaatcccagcactttgggaggccgaggcaggcggatcacaaggtcaggagatcgagaccatcctggctaacacggtgaaaccccgtctctaccaaaaatacaaaaaagaaattagccgggcatggtggcgggcgcctgtagtcccagctactcggaaggctgaggcaggagaatggcgtgaacccgggaggtggagcttgcagtgagccgagatcatgccactgcactccagcatgggtgacagagcaagactccatctcaaaaaaaaaaaaaaaaaaaaaaagtaaagttagttcttttttttttttctttagaaacagagtctccctctgtcaccaggctggagtgcagtggcacaatctgctgggactacaggcccatgccactgcgcccagctaattttttgtacttttagtaaagacagggtttcaccacgttggccaggatggtctcgatctcctgaccttgtgatccgcccacctcggcctcccaaagtgctgggattacaggcatgagccaccgcacctggccaaaaagctagttcttaacgagaaagggctagaagtcaggcatgagagatagcttttcaagaacactcaggtgccaggcaccggtgttcaccactaggtgacagagcgagattccatctcaaaaaaaaaaaaaaaacccacaaaaaaaacaaatactgagtcaataaatcagatgagatctaaggggatgacaatagctgttcctctgcagaccatctttccccatcctacattctccagctgtgaagaggagctgcctggcaaggaaggtgtacggcaataggtggtgactgatgagaacaacaatcagaggaaaataagggatggaagcaaaagattcaaaagggcagatatctccatgggaacaggacccgcccacaacccctgcagcaaggccagaacccagctcgcttgcccaggggtctgggcaaagactgagttccaataatcacctgtgttcacccgggggctaagaaaacagacaagtcaatgtggcatttgtttttattagaaaaccccttagtaagcacttctctaacccagaatagacactgggtatcctccaagagtcccatagctttcatttcatcttccaccctcttctgagagggggaggcaggggataggggtggtgtcaggcagtctccaaaatgcccctcctagacccctgagagaattcacgttgccagcaataaaccaacagcacctcagtggggcatcagagggccctctaggctcaaggctattgccaaaggcattcctgtttatggcttcacgatggaaccaaggaggctctcgcagactcctagggctggtccttcactatggctgagagcagggcaggatccaggagaaagtggccaagggctaagagagaagagattgcatttaagataccctttggagtctggaaagcacctggatttcttgggagaggagcctggatttcttgggagaggagggctgtggaagccccaatcagttcttcttcgttttgggagtgtcatatttcctcttgctggagtaccacaatagcagggggatgccgatggagggaagggtcatgaccccaaaggctgcccagtccagctgtaaaggaaaacaaagaccttgcttagaagtctggattagggcacaggagaagccagggaaaatatgagtccaatgagaaagggagcagtctagcccaaatttatttatttttgatacaaagtcttagtttttttttttgagacggagtctcgccctgtcacctaggctggtatgcagtggcacattctcagctcactgcaacctccgcctccagggttcaaatgattttcctgcctcagcctccccagtagctgggattacaggcgcatgccaccacacctggctaatttttgtatctttagtagagactgggtttcaccatgttggtcaggctggtcttgaactcctgaccttatgatctgcccacctcggcctcccaaagtgctgggattacaggcatgagccaccgcgcccggccgatacaaggtcttgctctgttgcccaggctggagtggagtggcatggtcacggctcaccgcagccttgatctcctgggcttaagtaatcctcccacttcagcctcctgagtagctaggatcacaggggcgtaccaccacacctggctaattttttttttattttttgtagaggcaaaatatcactatgttgcccaagccggtctccaattcctgggctcaagtgattctcctgccttgacctcccaaagtgctggaattacaggtgtgagccacaacacccagcctaaattttcttaatttttattttatttttttagagatagagtctcactctgttgctcaggttggagtgcagtggcacaatcatagccactgcagcctcaaactcctgggctcaagcgatcctccagcagagattataggtacacaccaccaggcctaactcagcacaaattttaagcagaactttaggcaagaaggttcctctctgaccaatcctgatatagaatggctctctaaagaccaatctttcaagctgtgaaaccaaaggactcacccgacccaaaccagactggaagagaagcttctgttccagacaatttttgagaatggagatgccctggtcttgcccctgacagtcaagccacctatgatctaacccttgtttacacttcaggccccctcttttccattcctccacctcacattctgcccttcagccttgataaactacttgccattcctgaatcacaccatgcttttctcaatctcggctgctctctctcctcaagtgcctgcccttccttacctcctccagaaagtcccctctcattagatgttcctgctgcaggctcctccagcacctggcatataacctctatcacagcattttccccatttaccttttttttttttgacagcgtttcgctcttgttgtccaggcagctagagtgcagtggctcgatcttggctcactgcaacctccgcatcccgggctcaagcaattcccctgcctcagcctccccatttactattttgagtcctctatgagctcgtaagatcttgttattttcagaggcagggttttgctgtgtcacccaggctagagtgcagtggtgtgatcatggctcactgcagcctcaaactcttggccgcaagtggtcctctcgcctctgcctcccaaagcactggcattacaggcatgagccatggtgcctcgccagcctgtaagatctttaatggaagggactgtgtcttattcatcactgtgtccccaaagcagagcacagaatgagcacataatctggaacatcatacttattcactgaatgaattccagcattcagtacttcaggctcatcttcaaaaaattctttcctagactagaccacagtaaagttcccacttaacctacccaatgatctatgaccctctgaatctaatcagattttttttttttaaacctcaaaatagacccaggagtttaagatgggtatctactcaaagatgggactctacttaagtcagttttatggttttggcaattgtgatctcattgccaaaaatctctggacatggctaaatcaatctatttgatgagtatctatatcagacaccaaaaaacacacagggcaagaaccaaccaacaaaacaaatctgtggaagccaagagggtccagaaccaaaagggcattctcataccaaggaactgatgagagagaacactagaaagcttacaaaatgaggggagaatcgcctgtcaaactcccgctgagccaggattcctccctgtccaggtgcactggtagagccaatctgaaaagaagaaaagaacgacattaagggaagtccacctcatgaagttccacctcatctactctgagaaagggcagtcccaaccaacccaactctatgcattagagtcttagttcccaaaggctcagaagaacttcaagaagatgagggaaagcttttggctagagagagttggatgattctctcttagtgtgttataaagaggagtacctaggagccagaagacctgagaaataccccatggagaacatatattaaacaaggtaggccaggcatgcaactgaaattaaagccaaattcttctgtctgagcctcagactctgcaaagagtgaagttgctcaccaccactggtccctctacagggcaaggtgtgcgtggaatgacttacccttggtaatcatttacttaatcctccagcaaaaatccactacttcacagggttaatgtgaggctcaaatgaaatagcaaaaatatataatgaagtataaagccctacccaaatgtacattattagaggaggggttgagtctggtccacattcctttgtcttggagaggaagccaagagtttggagcacactgcaaacaactttattccaaagtggcagcaaagcctttgattttatgtctattaacccatcaactaccaggtagaaccaaagagtcctgaggttggttctgaaagcagaaatgataccggatgtgaaaacaccgctaggtttagaagaatatggttccatgtagtttatgaaaaacgaaaatgcagaaggtgcaatgaatgttagttcttttcattctatggttgactgtgttaagtcccttccctactgtgtactaattagcctacagccctactggtatggaggatcacacattttggcttcataaatttatacatttatttggctttatacatttatgacttaagctttttgaggacttggacagtatattaatcctcttggtattccccagagtctggcacattgcaggggcttcataaatgtctattgacctttacatcaatcaaaagactgtttactactgagtttctatcatatatgggaaaaagaaatctaagacagttactggcctcagggagtttataattaaattgggaggtgggggtggggagagggaagatctataaataagaaacaaactactgaagacagtgattaaatgttcaagtgccatagactataagtgctacagaagtttagatgcagtcaatatatgtttatgaaagaatgaatagtggccgggcacggtggctcacgcctgtaatcccagtactttgggaggccgaggcgggcggatcacaggtcaggagtttgagaccagcttggccaatatggtgaaaccccatttctactaaaaatataaaaaagtagccgggcacggtagcacacacctgttgtcctagttactcgggaggctgaggcagagaatcgcttgaacccgggaagtggaggttgcagtgagccaagattgcgctactgcactgcagcctgggtgacagagtgagactctgtctcaaaaagaaaaaaaagaaaaaaagaaaagaaaaaagaaaagaatgaatagcaaagagcaatatgaactgaaggcagaaaacaaggagacatagctcaaagctgggtcttgagaaggcttcagatataatggagtggagggaaaagggtacttcaaacagaacaaaggcacaaaggaaagaataaggactgagttgggggagaaggtatgggaagtagcttggcctaattaggatgtagggtctgtatgggcagagtgggagagaaggctggaggcagaaaatagctagactactggaggggggtgcagtgagaggcagaaaagctcagccctgatgccgtaagcaggagcaatctaagcaagggaaggagagagtaacagtggagactgggaagaatctgacagtggcagagaagacagatcagaaagacaaggacatcagtaggcagcaaatgacacactccagatgaaaaggaaggcagaaggaatgaagagaaggggaaggccatggtacacctctcccatccatttcaatcactctagtccagaactttaatttgaaacatacttccttaggacaataccaagtgtctggttaatgttatctccctcagaatttagtagctactgtgtaaattttctgtaagaggtttttgtttttacaatctatactttttagatggatatccatcaccttaaacatttatcttttttttgagacagggtctcactctgttgcccaggctggaatgcagtggcaataaaatggctcactgcagcctcaacctctggggctcaagcaatcctcccacctcagcctcctgagtacctgggatcacaggcacgtgcaccatgcctggctaattatttgaaatgggggtctcaccatgttgcccaggctggtctccaactcctgggctcaagcaatccacctgccttggcctcccaaagtactgggattacaggcgtgagccaccacgtctggccgcatttatcttttctttatgatggaaatgttcaaatgcttctcatctggctattttgaaatatacattagattactgttaactatagtcaccctactaaactatcgaacactaggtcttattctttctaactatatatatatattttttgagacggagtctcactctgtcgcccaggctgaagtgcagtagtgtgatctcggctcactgcaacctctgcctcctgggttcaagtgattctcttgctccagcctcccaagtagctgggattacaggcgcctgccaccacgcccagctaatttttgtatttgtagtagagatggggcttctgcatgttggccaggctggtcttgaactcctgaccttaggtgatctgcccacctcggcctccaaaaatgctagattacaggtgtgagccactgcgcccagtcctaactgtattttggtatctattaatcaacctctcttcatccccctcttacccccaccacaagagattttaagggaaggcagatccaaattccatccagctaagggtttgggcaactcaccacaacgggcccatcctcctgggccaggtaagtaattgttgccgaggtgaagttgaaataaccagccttgagagggcgcaggaccacagtgtgggagacattgctagcactggctcaagagttaaggaacggaaagagatgaagctaaagttgtagcagcctttcaacctgtggactaaatgcaccacttacaaaacatttgccaatacatgctgatctcatgccggcaatattctgcaggaatgaaaaaatataggcttctttgccgggcatggtggctcacgcctgtaatcctagcactttgggaggccgaggcgggtggattggctgagttcaggagttcgagaacagcctgggcaacacggtgaaaccccgtctctaataaaatacgaaaaaattagctgggcatggcagcatgcgcctgcagtcccagctactcgggaggctgaggcaggagaactgcttgaacccgggaggcggaggttgagtgagccgagattgtgccactgtactccagcctgggtaacagagtgagactccgcctcaaaaaaaaaaaaaaaaaaaaaaaaaaaaaaatatatatatatatatatatataggcttctttttaaaatttactgatttttttaaatattaaaaaaaaaagagagagagatggggtctcactttgttgcccaggctggtctcaaaatcttgggttcaagtgatcctcccaccttggcctcccaaagtcctgggattacaggcatgagccaccatatggggcctaggcatcttttttaaatctaaagtgtatggtatttttttcccagcttaaattttaagggtcccatgttatactcagtgtcatggtttttgaagtaaacttccaaagcaatatatgttaggaaaannnnnnnnnnnnnnnnnnnnnnnnnnnnnnnnnnnnnnnnnnnnnnnnnnnnnnnnnnnnnnnnnnnnnnnnnnnnnnnnnnnnnnnnnnnnnnnnnnnnagtgagaagttcgagaccagcctggccaacatggcgaaaccccgtctctactaaaaatacaaaaattagctaggcatggtggcgagtgcctgtaatcccagctactctggaggctgaggctggagaatcgcttgaactcgggagccagaggttgcagtgagccgagattgcaccattgcactcaagacaagagcgacaagagcgaaactccatctcaaaaaaaaaattacagtcattcaatcagtgcttcttcttggatgattaaaagaaattatagtcacttaagctcacagaaaatcttttttttttgtttttttttgacagtctcgctccgtcgcccaggctgaagtgcagtggcatgatctcagctcactgcaagctccgcctcctgggttcacaccattctcctgcctcagcctccagagtagctggaactacaggcgcccgccaccacgcctggctaatttttttgtatttttagtagagacagggtttcactgtgtgttagccaggatggtctcgatctcctgacctcgtgatccacccgcctcggcctcccaaagtgctgggattacaggcgtaagccaccgcgcctggccaagctcatagaaaatcttttgttaactataattgaaggaaattattgaaaatacaaaaaaaaaagacaaaacaaaaacaaatacaaagaccacatttaccctcaccaataaacctaaacgtatacataattattattgatatgatttggatctgtgtccctgcccaaatctcatgtggaattgtaatccccaatgttggaggaggggcctggtgggagggaattggatcatgggggcagatttctcccttgccattctaatgatatgagttctcacaagatctggtttaaaagtgtgtagcacctcccctcttactctcttcctcctgctccagacatgtaagacgtgcctattttccctttgccttctaccattataagttccctgaggcatccccagccatgcttgctgtacagcctgcagaaccgtgaacaaattaaacctctttttttaaaaattacccagtctcagcttattcttcatagcaacttgagaacagattaataaaatacaattaattattatttaagagactaggtctcactttgtcaccaaggctggagtacagcagcactatcatagctcactgcaggcttgaactcccaagccctagcaatcctctcacctccatctcccaagtagctgggactataggcatgtgccaccgcacctggcttaaatatactttaattcacaggaagaaaaataccatctaattcaatactcaggagataattggtagattagaataagagactcactgaataagagactttaaaaggtcacccagatccttcatgctagcatcccagtgaatttcttttttttatttttgagacagagtcttgctgtcgcccaggctagagtgcagtggcgcgatctcagctcactgcaacctgcacctcccgggttcaagcgattctcctacctcagcctcccgagtagctgggattacaggctcccgccactgcgcctggctaatttttgtatttttagtagagacggggtttcactatcttggccaggctggtctcgaactcctgacctcgtgatccacccaccttggcctcccaaagtgctgggattacaggcatgagccactgtgcctggcctgaatttcttttaaaagcaccttaaatacctttgtccagccacaaacatctttattaagtgtctatatcctcccagtatagtatgtttcaggtttttttttttttttttttttttttttttgacacagagtctcactctgttgcctaggctacagtgcagtggcaggatctcggctcactgcaacctccgcctcctgggttcaagtgattctcctgcctcagcctcccaagtagctagactataggtgcgcgccatcatgcccagctaatttttgtatttttaatagagacagggtttcaccatgttggccaggatggtctcaatctcttgaccttatgatccacccacctcggcctcccaaaaatgctgggattacaggcatgagccaccgtgcccagcttgtttcagggtcttataatctgaacttcagtatcctccttcttcatgtctactctaaatcatgctcacacaatttacaccaacctctcttgctccatcttatccagagagatgacaggaggacagccacacatatccagcctatttgaagtacccctgctgctttgcaggcaaggctctccctgccccccgacccttcatcaccaagtgccaagaggatacggggcaatccggtcccatttgacattgagcattccagacacaatgccaaagtcttctggagggaaggaatcatcagatagttccacgtctaatgcagcactagaaaatggatgaaacaaaaagggttagtaagtaatggatataaaattaaagcaggccgggcgccgtggctcacgcctgtaatcccagcacttttgggaggccgaggtgggcagatcacctgaggtcaggagttcgagaccagcctggccaacatgcgacacacggcacaaaaggtgaagaccctgtcttacagaaaagtcgaaaaattgaggtggggcggggggtgagcgccttgtattccccaactgcttggggaggatgagggacggagagacctggtgtgaacccgtggaaggggggggtttcaagttaagcccaagatcgccacccataaattcaagcctggggcagagcggggctctttctccaacaaccaaaaaaatttaagccaatgtccggggcgcagtggtttcacccctataatcctagcactttggagggctgaggctggctgatttctttaaggtcaggagttcaaagaccagccttggccaacatggtgaaactccgtctctaaaatacaaaaaatcctgtctctaaaaatacaaaaattagccaggcatggtggtatgcgcctgtaatcccagctactcgggaggctgaggcaggaggatcacttgcagctgggaagcagaggttgcagtgagcagagactgcaccactgcactcctgcctgggtgacagagtgatactccatctaaaaaataataataaaaaaattaaattaaagcaataaacaatcaaacctgcctgcttctccaaaaaaatcagaattgcaaaagatatgagtaatatagcaacttggttctgttgcactgaagaatccaggtcaaggactggattctattgctcagaagcaccaaaataatcaagtatccaggaggcaataggtccaagttcatccttgcctcaatttttcttcatgtacatgcctatgtgtgtggagggagggagaagaggaacacagtgaatacagaggagaaagttataagggaataaaatgaaagaaaggcaacaaaaatgctctaggctaatgaaagaaggaaaattacacttttttttttttgagatggagactcggtcttgtggctcaggctggagtgcagtggcgcaatctccggctcactgcaacttccgcctcccgggttcaagcgattcttttgcctcagcctcccgagtagctgggactacaggcgtccgccaccacgcctggctaatttttgtatttttagtagtgacagggttttgccatgttggccaggctggtctcgatctcctgacctccagcaatccgcccgcctcagcctcccaaagtgctgagattacaggcgtgagctaccatgccaggctggaagatgacactttaaacccctgaggtaacaagggattgtgtattttctgtgtctttatctttccctcctagtttttccacaattcttgccacttccctactctaaaattcttccaacccgaaacgtgaaagatggtttcttgtagcttaggtaagaatgtcctcctttccaaaagtagatcccgaagtgtattcattcactcaatatatctgatgctggaagtgtcccaaagagaaaccactacccaccaatatgctccctattcccatctgaaaactaagaatccagaaataggcttaatctgtaactctagggcctcgagttaccttgagccaacattgtagatgttgtactgcaaggtcaggtctcgtccctccacggcgtatctgttcagcagtgatttggaagccaaaagcctggctccttcctctgcttgagtgacagcaaatagagccaacaccacaaatgacagcagcctcatctttagagaaaaaagcaaagtgagttatcaaaccaagtacgtcaaattcaccaaaatcctcttgacagcgctcccgtagaaagctccttcgatgctaccagaacagcagccccttccacagagtagtccataagccaccagagcagacccgttctccagactctcctaccatcttcaccctgcagccctcgaaaaaccggtacaagcaccaatatatctactgccctcttcctgtcagaagccccgggatgcccaccggctggtggagtcttctgaggggacaccatgtggccagagcagggcttccttggggtgcctgatttcggccgatctcggacctgcaggagcctgtagctttccctcacacaggagtgcccacagccttcccgctgctcccctcctccttggccacagctctattgggatcccaccgcggactcgcggggtcctcctcacatccctgtaccccactctccagtccagcccctgagatcccattcgtcctcgcctgtcacatccc

SEQ ID NO: 866 - protein, 528 aa, Homo sapiens [sequence omitted]

SEQ ID NO: 867 - DNA, 10578 bp, Homo sapiens
  source
  (1)..(10578)
  CDS (201)..(268)
  CDS (1043)..(1523)
  CDS (4939)..(5700)
  CDS (6723)..(6935)
  CDS (7258)..(7378)
  CDS (8961)..(9873)
  CDS (10147)..(10378)
cctgtctggaatagaggaggtagccactgagacaggcgtccctgaaatggaggaaccggaggcctggaggccagaggaagcccttggcccagcgctgggtctttcgggaattcagagacggtcaaggattctgggtaaatggcaggagtctcttttactcaccctcgcagaagctctaatgatgaatgaggttgccaataatgggagagtctgagaaatcctctgggtctttggcaggttctggaaggggagggtggccaggagagaggtgggatgagagggggaaaggctctagcacacagccagggaggagagagggagggagggagggggagagagagagagagagagagagagagtgagtcctctggggatgcccggccagagcctacccattcctgggtttcagcaccaaaatgtaaggttagccaagagaaagaacgagtagacccaaagtcaggcaagcaagtttattaacctgctgggctgctccacagcaatcagaggaggcagcagcccaggcttacagactagggggtgtaagtatattttagggagtgggggctgtttctgggtagagccacatcctggttgatgggcagatgttaggggaaaaaacaacagctggggaacatctgccttggcagagggcctgcaggtggtgagaaaaggaggggatggagaaaaacaaagcgaggggaacatctgccttggcggagggcctttgctgggttgggtccctaacacatctcaaaaaaaaaaaaaaaaagcctgaagtttctgcacaaggagggaattgagggaattctgcctccagaccgccttaggactgaagagcatagtaacatcaattctttatagaatgtccagcctgctggcctgtcctgtaaaatttgaacttgccagccctcacaatgtgaaccaattccttaaactaaatttctcactttctctctctctctggaaaacactgactaatgtagcaggtttctctgctccaggacttcaggaccttttcgatgctaataagtttctccatcagggccagcttgttcctcctactgagcttgagagcccttgttgaagttgtggtttgggggactggaccgatgacctcaaaggttccctttgctcccaagcctcagagtctaggaggccagagggtctcagcaggcctttgtccttctcagctgtctcttactggctttctccacaggtcttgtagcttcaatgagcatggctaccacctcttccaggctatgcggcttggggttgaggagataaacaactccacggccctgctgcccaacatcaccctggggtaccagctgtatgatgtgtgttctgactctgccaatgtgtatgccacgctgagagtgctctccctgccagggcaacaccacatagagctccaaggagaccttctccactattcccctacggtgctggcagtgattgggcctgacagcaccaaccgtgctgccaccacagccgccctgctgagccctttcctggtgcccatggtaagctggagcctcagacctttgcccatctcccttcaggcaagtctgggctggggcatgtgggcaagagctgctgtcccccccaaggctgcctgccccctggatctcttgggtggtcactgctctttagtcacaagtcaggggtccctgcccagcgtggttcctgccccagccttcctctctttccagagctgcttccagatccctgcctccactctcatgggaaaacccattctccttgggaactactgccactcagctgtacccctgctgccctccacttccctcctccctccagaggttccgttgcctttgttaggaatggacatcctggacgggcgctgtggctcatgcctgtaatcccttggggaggctgggcagatctcttgaggccaggagttcgagaccagcctggccagtatggcgaaaccccatctctactaaaaatacaaaagttagctgagagtggtggtgtgtgcctgtaatcccagctacttgggaggctgagacaggagaattgctggaatctgggaggtggaggttgcagtgagctgagattgcaccactgcattccagcctgggtgacagagtgataccttgtcccctccatcctccccccaaaaaaggacaccctttgcttcccaccccatagactgctccacatcatcccagtctctcctgcctgcctttccttcttccctcctggctcagaggtgctgacatgcctcaccttgctgatgtcagtcctgtctctgtgcttattcttgccctgtaccttggaccacagcccctccttggcttatggatccttccccatgggttcctgcctggcctgtggttgccctcattcctctccctcttccaggccctctaccctgagcactgactccctgccccttcccatgggagtttcctgctggcctctccctgccctcattgaccctcagcccgattctgtccccaccactcttgctttcgctgtgagctggggcaccttctaggtatccaaatcctactttgcagtccttctttatcttaggtgacttgtgatttttttttttttttttttttgagacacagtctcactctgacactcaggctggagtgcagtggtgcaatgttgtctcactgtctcccaggctcaagcaatcctcccacctcatactcctaagtagctgggtccacaggcatgtgccaccatgcctggctaatttttgtattttttgtagagatagaggtctcactatgttgcctagactggccttgaactcctgggctcaagcaatccacctgccttggcctcccaaagtggtgagattacaggcatgaggcaccgtgccctttgtgacatttttgaccagtcctcctatgagagtctttccttggaatttatgcccccctcagccccctgcccccacctggctttcacttgcagctcttctctccttttgccccacttcctctgaaaaggtaggtgattccccggagcaggcttcgccctcctctcctccccttttccagttcccaggcaggctgtgggctcgtggtttaacctcccattctcagtcccctcccctctgatctgagcccctgatgctggcccaacattgccacatcatggacccagcaaggcccagattgaccttacctccctacacaacaaaagcctcttttcttcctgtattagccccaatcctctggtggagggtagtgagggagtggccatcaccctggagtcctgcccactgctgctcctccttgccctgctccccacctttcatcctttctggcctccttttccactgccacagccacagctggaattcacaccagcatcacccctcagctagattctcccatcagtgtcctaaggcttccccctgattttagtcttaaatttcttctaactcattcctcactgaagtcagagatacgctcatgaaatgcaagtcccggccgggcaccgggcgcgggggctcacgcctgtaatcccagcactttgggaggctaaggtgggcagctcatgaggtcaggagttggaaaccagcctggccaacgtggtgaaaccctgtctctgctaaaaatgcaaaaattagccaggcgtggtggcaggcacctgtaatcccagctactcaggaggctgaggcaggagaatttcttgaacccaggaggcaggggttgcagtgagccaagatcacgccaccgcactccatcctgggcgacagagcaagactctgtctcagaaagaaaagaaaaaatgcaagtccgaacatagcacttctctgcggacatccttagggactccctgtggcttacagcagtggcccccaaccttttcggcatcagggactggtttcgtggaagacaatttttctaaggacgggtgtgtgaggggttggtttcaggatgattcaagtgcattacatttatttatttatttatttttatttttatttttattttttgagacggagtttcgctctgtcgcccaggctggagtgcagtggcgcgatctcgactcactgcaagctccgcctcccgggttcacgccattctcctgcctcagcctcccgtgtagctgggactacaggcgcgcgccaccatgcccggctaatttttttgtatttttagtagagacggggtttcaccgtgttagccaggctggtcgcaaactcctaacctcgtgatccacccacctcggcctcccaatgtgctgggattacaggtgtgagccactgcacccggccataatgtattaatataataaaataattatacaactcaccataatgtagaatcagtgggagccctgagcttgttttcctacaactagatggtcccatctgggggtgatgggagacagtgacagatcatcagacattagattctcataagtagcgtgcaacccagatccctcgcatgtgcagttcacagtagggttcaagctcctacaagaatctgatgctgctgctgatctgacaggaggggagcagctgtaaatacagatgaagcttcgcttactcaccagctgctcacctcctcctgtgaggcccggttcctaacaggccactgacctaacttctgccctgacctacacatgcttctcttcttccttgcaaactgcctccagtggaagtccctgaaggtccccaaacacacgggactatttcactcctatgcaggttttgtctcctttgcttggaatgcatcccctcaccccttgtccccaggcagattcccacccctcccccagaacctgccccagtggagccttcgcaggtgatttgtcagtttcacaggctgaggggtgctctcctggtctccccggctccctgtatccccacacccagcacagggccaggcactgggggggccttcagtggagactgaaatggctgaacgggacctcccatagattagctatgcggccagcagcgagacgctcagcgtgaagcggcagtatccctctttcctgcgcaccatccccaatgacaagtaccaggtggagaccatggtgctgctgctgcagaagttcgggtggacctggatctctctggttggcagcagtgacgactatgggcagctaggggtgcaggcactggagaaccaggccactggtcaggggatctgcattgctttcaaggacatcatgcccttctctgcccaggtgggcgatgagaggatgcagtgcctcatgcgccacctggcccaggccggggccaccgtcgtggttgttttttccagccggcagttggccagggtgtttttcgagtccgtggtgctgaccaacctgactggcaaggtgtgggtcgcctcagaagcctgggccctctccaggcacatcactggggtgcccgggatccagcgcattgggatggtgctgggcgtggccatccagaagagggctgtccctggcctgaaggcgtttgaagaagcctatgcccgggcagacaagaaggcccctaggccttgccacaagggctcctggtgcagcagcaatcagctctgcagagaatgccaagctttcatggcacacacgatgcccaagctcaaagccttctccatgagttctgcctacaacgcataccgggctgtgtatgcggtggcccatggcctccaccagctcctgggctgtgcctctggagcttgttccaggggccgagtctacccctggcaggtaagagagcccaccccagcacctcctgtcagggagaacagccaatcctgagatgagcagagtgggcactctccggtcactctaaatgccaagggggataaatgccactaacttgaggttttttgttttgttttgttttgttttttgagacagtctggctctgtcacccaggctgcagtgtagtgatgcgatctcggctctctgcaacttccacctcctgggttcaagtgattctcttgcctcggcctcctgagtagctgggattacaggcacccaccaccatgcctggataatttttcttttcttttttttttttttgagatagagtctcgctctgttgcccaggctggaatgcagtggtgcgatcttggctcactgtgagctccgcctcccaggttcactccattcccctgcctcagcctcccaagtaggtgggactacgggcgcccgccaccacgcccagctaattttttttgtattttgagtagagacggggtttcaccatgttagccaggatggtctcaatctcctgaccttgtcatccgcccacctcgtcctcccaaagtgctgggattacaggcgtgagccaccgcacccggcctaatttttgtatttttagtagagatggggtttcaccatgttggccaggctggtctcgaactcctggcatcaagtgatcctcctgcttcggcctcccaaagtgctgggattacaggcattagctctcttctcttagacagatctttctctctgatccttgccttctctcacccactgtgtcttggaagtgtcaagtgataagatccagggctaaaactgtctgtaaaggagtgtttgttagaggcctcctctcaggaggttggtggggaagattgaggggcttcctaagaaggaagggacgagaccttcctgatgggctgaaaccaccaggacggaaacccaggaaggccccaggcccttgcttctgggaccatgtgggtctgtgctgtctgtggtggcttcatgatacgcgtttctttcagcttttggagcagatccacaaggtgcatttccttctacacaaggacactgtggcgtttaatgacaacagagatcccctcagtagctataacataattgcctgggactggaatggacccaagtggaccttcacggtcctcggttcctccacatggtctccagttcagctaaacataaatgagaccaaaatccagtggcacggaaaggacaaccaggtaatggggatgtggctactcaccatgtaactggcttatgggcaacctagagcctgggggtgatgctgacacagtgtacagggagcaggaggggggccccaggggtccagctgccaccactctacccatcctggccagggaagcagggaagacactccgtaggcgagtgtgcagatgccctggggcggaagttcacacgaccaggggccctgccctgggagtgagccctgagggcagatgcacagagattctgttttctgttccacatgtgagctgtcctttgacttgggcccctacgtgtggcccctctggcttcttacaggtgcctaagtctgtgtgttccagcgactgtcttgaagggcaccagcgagtggttacgggtttccatcactgctgctttgagtgtgtgccctgtggggctgggaccttcctcaacaagagtggtgagtgggcaatggagcaggcgagctacccagcactcccgggggctgcacggtggagggagggcctcccttgggccccatgtgccctgccccagaaccaaggcccagtcactgggctgccagttagcttcaggttggaggacacctgctaccagacagaattctgatcaagagaatcagccactgggtgcggtggctcatgcctgtaatcccagcactttgggaggctgaggcgggtggatcacttgaggtcgggagttcgagaccagcctggccaacatggtgaaaccccatctctaccaaaaatataaaaaattagctgggtgtggtggcgcgtgcctgtaatcccagctactcgggaggctgaggcaggagaatcacttgaacccaggaggcggaggttgcagtgagccaagatgcattccagcctggaccacaaagcgagaattcgtccccccaaaaaaagaaaggaggccgggcgcggtggctcacacctgtaatcccagcactttgggaggccgaggtgggtggatcacctgaggtcaggagttcgagaccagcctgaccaacatggtgaaaccccatctctactaaaaatacaaaaaaagttagccgggcgttgtggcgtgtgcctgtaattccagctactcgggaggctgaggcaggagaattgcttgaacccgggaggcggaggttgcagtgagccaagattgcaccattgcactccagcctgggcgacaagagaaaaactctgtctcaaaaaaaaagaaagaaagaaagaattagccaactgaaagccttagactgaggtgtgtcctctgttagagagctgtcatcacaactcctacaaaagcagtcgtatcctgaattcaacctctttctctaaatgaatatagctattgttccctttgtgccctcttgtcctactgtcccttctgttgcccatgccaaagacagctagctccttgaacagcttggcctgaatacagatactagcgtgtctgcagcagagaaaaaaacagcattccccatccagaaatgcaaggtcaagaacagagagcaaattaggtagctaaggactcaggtccttagttggtgtccaggggccacattctttcctttcaccatctctgtagggacaggaatacttcccttctgtcctcagagggtcaggactcagagaaaccacagagcagcagctcaggaaagtggttcatggaaatgctggcaagagagaggggttacaatgccctcccttgggagcaggctgctcccatcagatcgtaacctctctggtatgtgggcagagctaccaggttaaggtcctccctagggtttgcaaaaccctcatgggatcatgagccatacagaaccgacctgtgtgtctccagagtctgtaattaacacaggcattttgaggaaatgcgtggcctcaggccccactcccggctacccccatcccactatgcctagtatagtctagctgccctggtacaattctcccagtatcttgcaggcccctatttcctattcctactctgctcatctggctctcaggaaccttcttggccttccctttcagacctctacagatgccagccttgtgggaaagaagagtgggcacctgagggaagccagacctgcttcccgcgcactgtggtgtttttggctttgcgtgagcacacctcttgggtgctgctggcagctaacacgctgctgctgctgctgctgcttgggactgctggcctgtttgcctggcacctagacacccctgtggtgaggtcagcagggggccgcctgtgctttcttatgctgggctccctggcagcaggtagtggcagcctctatggcttctttggggaacccacaaggcctgcgtgcttgctacgccaggccctctttgcccttggtttcaccatcttcctgtcctgcctgacagttcgctcattccaactaatcatcatcttcaagttttccaccaaggtacctacattctaccacgcctgggtccaaaaccacggtgctggcctgtttgtgatgatcagctcagcggcccagctgcttatctgtctaacttggctggtggtgtggaccccactgcctgctagggaataccagcgcttcccccatctggtgatgcttgagtgcacagagaccaactccctgggcttcatactggccttcctctacaatggcctcctctccatcagtgcctttgcctgcagctacctgggtaaggacttgccagagaactacaacgaggccaaatgtgtcaccttcagcctgctcttcaacttcgtgtcctggatcgccttcttcaccacggccagcgtctacgacggcaagtacctgcctgcggccaacatgatggctgggctgagcagcctgagcagcggcttcggtgggtattttctgcctaagtgctacgtgatcctctgccgcccagacctcaacagcacagagcacttccaggcctccattcaggactacacgaggcgctgcggctccacctgaccagtgggtcagcaggcacggctggcagccttctctgccctgagggtcgaaggtcgagcaggccgggggtgtccgggaggtctttgggcatcgcggtctggggttgggacgtgtaagcgcctgggagagcctagaccaggctccgggctgccaataaagaagtgaaatgcgtatctggtctcctgtcgtgggagagtgtgaggtgtaacggattcaagtctgaacccagagcctggaaaaggctgaccgcccagattgacgttgctaggcaactccggaggcgggcccagcgccaaaagaacagggcgaggcgtcgtccccgcatcccattggccgttctctgcggggccccgccctcgggggccggagctagaagctctacgcttccgaggcgcacctcctggcctgcacgctttgacgtcacgtccggcgcggagacggtggagtctccgcactgtcggcggggtacgcatagccgggcactaggttcgtgggctgtggaggcgacggagcagggggccagtggggccagctcagggaggacctgcctgggtgaggagggcgcggggtgagggagggaggggctgcgggccgccgtggctgccttccgctcggccgctcgggacctgtgggcgcggcgtgggcttcgctcacctgtccccggctgccgccctccgccgtccggg

SEQ ID NO: 868 - protein, 929 aa, Homo sapiens
MGESEKSSGSLAGSGRGGWPGERASLFLLLSLRALVEVVVWGTGPMTSKVPFAPKPQSLGGQRVSAGLCPSQLSLTGFLHRSCSFNEHGYHLFQAMRLGVEEINNSTALLPNITLGYQLYDVCSDSANVYATLRVLSLPGQHHIELQGDLLHYSPTVLAVIGPDSTNRAATTAALLSPFLVPMISYAASSETLSVKRQYPSFLRTIPNDKYQVETMVLLLQKFGWTWISLVGSSDDYGQLGVQALENQATGQGICIAFKDIMPFSAQVGDERMQCLMRHLAQAGATVVVVFSSRQLARVFFESVVLTNLTGKVWVASEAWALSRHITGVPGIQRIGMVLGVAIQKRAVPGLKAFEEAYARADKKAPRPCHKGSWCSSNQLCRECQAFMAHTMPKLKAFSMSSAYNAYRAVYAVAHGLHQLLGCASGACSRGRVYPWQLLEQIHKVHFLLHKDTVAFNDNRDPLSSYNIIAWDWNGPKWTFTVLGSSTWSPVQLNINETKIQWHGKDNQVPKSVCSSDCLEGHQRVVTGFHHCCFECVPCGAGTFLNKSDLYRCQPCGKEEWAPEGSQTCFPRTVVFLALREHTSWVLLAANTLLLLLLLGTAGLFAWHLDTPVVRSAGGRLCFLMLGSLAAGSGSLYGFFGEPTRPACLLRQALFALGFTIFLSCLTVRSFQLIIIFKFSTKVPTFYHAWVQNHGAGLFVMISSAAQLLICLTWLVVWTPLPAREYQRFPHLVMLECTETNSLGFILAFLYNGLLSISAFACSYLGKDLPENYNEAKCVTFSLLFNFVSWIAFFTTASVYDGKYLPAANMMAGLSSLSSGFGGYFLPKCYVILCRPDLNSTEHFQASIQDYTRLTLLGNSGGGPSAKRTGRGVVPASHWPFSAGPRPRGPELEALRFRGAPPGLHALTSRPARRRWSLRTVGGVRIAGH

SEQ ID NO: 869 - DNA, 29781 bp, Homo sapiens
  source
  (1)..(29781)
  CDS (201)..(1002)
  CDS (12270)..(12353)
  CDS (12644)..(12808)
  CDS (13999)..(14163)
  CDS (14784)..(14948)
  CDS (15034)..(15201)
  CDS (15276)..(15377)
  CDS (15522)..(15628)
  CDS (16460)..(16654)
  CDS (16823)..(16891)
  CDS (16967)..(17075)
  CDS (17366)..(17693)
  CDS (18064)..(18169)
  CDS (18371)..(18414)
  CDS (18675)..(18801)
  CDS (19246)..(19349)
  CDS (19470)..(19572)
  CDS (20278)..(20428)
  CDS (20611)..(20680)
  CDS (21108)..(21174)
  CDS (21336)..(21421)
  CDS (21720)..(21818)
  CDS (23858)..(24029)
  CDS (24389)..(24484)
  CDS (24847)..(24886)
  CDS (25582)..(26201)
  CDS (28368)..(28403)
  CDS (28721)..(28819)
  CDS (28920)..(28976)
  CDS (29396)..(29581)
acaggtaaggaaactgaggctcagagaggtcaagtcccttgtctaagttcacacaggtggacccaggtgacacttcaaagaccagggtcttaacttatgaggcccactcccgcagctcaccatagaaggttcagagcccatgctggctgtgctgggggcccgctgaccactgtctctctccacagggcaagggacataggatgaccccagcctgtcccctcttactgtctgtgattctgtccctgcgcctggccaccgccttcgaccccgcccccagtgcctgctctgccctggcctcgggtgtgctctacggggccttctcgctgcaggacctctttcctaccatcgcctcgggctgctcctggaccctggagaaccctgaccccaccaagtactccctctacctgcgcttcaaccgccaggagcaggtgtgcgcacactttgccccccgcctgctgcccctggaccactacctggtcaactttacctgcctgcggcctagccccgaggaggcggtggcccaggcggagtcagaggtggggcggccagaagaggaggaggcagaggcggcagcggggttggagctgtgcagcggctcaggcccctttaccttcctgcacttcgacaagaacttcgtgcagctgtgcctgtcggctgagccctccgaggccccgcgcctgctggcgcccgctgccctagccttccgctttgtcgaggtcttgctcatcaacaacaacaactctagccaattcacctgtggtgtgctctgccgctggagtgaggagtgtggccgcgctgccggcagggcctgcggctttgctcagccaggctgcagctgccctggagaggcgggggccggctccaccaccaccacatctccaggccctcctgctgcccacaccctgtccaatgccctggtgcccgggggcccagccccacctgctgaggccgatttgcactcggggagcagcaatgatctgttcacaaccgagatgagatatggtgagtctcagcagggcctgggtggggcggggtctgcaggggctgacagtgtccctggtgtccatcctggcagatcctcggccatgcatgtagctgttcactgatgtcacccctctgctgagccttgtccaaatgttgcggtcaccaaaatgcatggcagtgagacctcactcttgaagagtttgcagactggctagatgaatgggggcacagatcagataatgcagggtgatatataaacccagggagggacctcctaactgggcagccaggggaggctccctgaaggaagtaatacaggaacagagacctgaaggacaagcagaagtgagatgagggcattctaggcagagcaagaagggtgcacaaaggcccaaggctgggaatgatcgtggcaggccctggcgctgcaagttgacaagtttgcctggaggctggagtaggcagggagcagggatgcattcctgtccacacaggtcagtgagttttggcagttgccccggggtcagggcagagagaggcaaggaagagtgtccctgggtgaagaggcctgagcttccaggctgccttggagggctgggctggctcagctcccagtgtcccgtcttccccctcaggacccatgtcttctgggaccgaggccgccagctgctagagcttcctgctgactgggcaaaagctctgcgagcccttgagtcctgcctgctcccgctcccaccccagctccctcagccacggctgccttctacagaccctgcttcctgcagcttcaaggccctgagggcctcagctggatcctgtgtgcccgctgaacagtgctgggccggggactgaccaggagacctggagggaacagggactgatgacatggggatgggaaggaggcaggtctggggtctggtctgcagctctggtaccgacagggaggcctctcctctctctgggcctcagtttccccatttgggatacaggtgctggcttatcctcatgaggatcaaggatgcagggatagaggatggaaagggcatctggatttcactgggagagtgtttacaaggagacagggtatcatgtgagggctgctaggagtgctggaggagagcggcctgtccccagccctgctctgctggctagagccctggagttggcctctacctttgactgttaccttgagttgatccctttatttttggtgggcagtggtttctttgtagaatggggaggtatccctgaattaattagagggggtagttatcttgaaagtagcctaacccagtactttcgatgggggccttcttggcttctccaatgagacatctgacatcgtgcccatccacggcaagtgcccggtggctttgctgtggcctctctcccaggctagcttggcctctaacggcggtcaatgaagccgtccgagtgacagccgggccgcgggtaggttacaggccctggaggctggcctgggatttagtgcctgtaggaagaaattgaattttgcttctttgttgaacatcggcggagaacgccaggcgtatatcaggaggcttatggctcttcctgcatggccaccactgcctgtcactctgtgggggtctcccccatcgtgctcagctgcaggcgggttcttttgtctggctttccctgcggtccatcggtccagtgatctgcagtggacggagcaaggctctgccctcatgggcgggcaccatctgggcgggctgccatgtggagcacagagccaggagcagccagctgggcttggttgaagccggaagcaggagttggttggtagctggggtgtctttggggatcagagagggccggtgatgggaaaggcaccatcatcagagcctctgcagaggcctctggggctagagatgggtggagactggatgcctgattattcctgggcatgaggccaggtgtctctctgagcagggagccctgagctggggctcccagctgttcccaagcctgacctctgctcttgccccttgtcctacttggcatgtttccttggggttgctttttagggagggcccctgtagggagttggcatgggatgatgtggcatcagctgtcataagtgggctcacatggcacactggtgcccagagctgggctggcacagccccttcccctcccttggcaggcaggaagctcttctattctgccatcccctccctcctgcccaacctttctggtgtgagacatagcgggcacatgactgtttgttccacatgtcagggcatgtctgagggtccgtggcaccgtctgtgccttgtggcagcaccacctttgccgagcctttggccccctccattcctccccttgtctcctccccactgggctgcaggagaatggactggcacctgcagctgccagactgagagcaagattcgtggggatggtagtgagcaggaagggtgagacccttgtcctggcccctctcccaggcaccagggcagggaagctgtgttcatcttctctgggacacccccgaggaagatccacagtgaggcctagcagggtgggcttgggctggtaccggaagagcactgggctgggggctggtgggcagtgactggcggagtgcctgggacgcctcagagccgagtgagtttgacaagagggtacaggcgcctgttaatttcacgcaaactgcctttgatagatctcttgttatttttggtgagttgagccataaatttgtgccatcttgctgccgcaatctgttaagtgggggaaaaggaagaaaagaaaggcaggcaggaaggagcttggtggaggactggcacggaggctggctgaggtcagggctggaaggcgggccgcagagttagtgccagctgcagggctcagctcctgatggccagtgccagcctgcagttcctgcccactgaccctctaatcctgaggaggcactgggcagtgggaatggctgtgcccagtgatacttgggagaaagaaccccgcctcatgcacgcctctctccttggccacaatccctacctcccctgtgggcactggcctgcccctggctgcttgctgcaggctcaccctccccatcatcaggctccatccttgaggtgtggccaccaggtgaacctggggtctcctgggaggcaagagtgggctcaaaaccccacctgccactgctgctctgtgacttggacaaggtgctgcccatcttggggcctcagaacccccagttatctgtgtgtcaccccctgatcgagcccccagcaaatccccagtgctactgaaactcctcagcctggtgtccaagccccacccgggacctagctaccacctgcttttgagccttctttcgaattctcccccaccctttcaactgaggctcctcgaatggtgtttgcccttggttatccagaactcctgcatccttctaagcactgctcaagccctgtcccctctaggaagctgcctctgatttgcccagccctgtcctaagattggcgtttccctcccagcgctcagaccctgctgctctctcggccatcctggtctggcagcaggaagtgggggccttccctgcctgttgggggcccaggcagtgaggaggcagggtgggggcggggagacccagcacacacggtggtggtatttcctggaaggtccttccagcccagatctgtgctggtggggctctgtgtgctctaccatagggtggggagcggggcccagacatccccagacatctcagcagggactgagttccagccaatccctcacacacatcttcatgtctttatcagagtagagtttgtgccaggcctagggctggctctgaatgagtaggaggtgagctaggcacactgtctgcccaccggtgggggagggagagcactaactaggacagtggtggtcaaggccacagactgaagtcgcccagtccgggttcagttttggaccttaccactgactagctgagtgactgttgataagttccttcactcccacttcatcacctgtaaagcgggggtagtgagagctattccacagagctgtggggagggttcagtgagaggatgagagtaagtgcccagtgcctggcacatggtagatgcctaacaaagtagtagctgggtcatcataatttagtgtaataggtacgactgtgaccctgccagatgtcaaaggaagaggaagagtaagggattaaaccacaaaggggaggaaggtgctctaaagaaggtgatttggagttgagttttaaggagtgaataggaattcactagcctgtgaaatttctctttcaattgtatcatttttaaaatttaatatattaaaaataagtttcatatcctaaatggaaagagtatcatttatctgaaatagaagataaccaaagaaacaaccacagtgaaaacaaagcgccgttattaacttctagctagatgcttttcctacctctccatttgttagagagaggaattagcacacattggggatgtgttaaagtctggaactgcacaggctttatctctcatgcagttggaaggattaaagtgaccatgtaatttatcatctaaactgtgacacatctgaggttatgaaagggaagaggtgggtaccatcaattacatcaggacaacaggcacaaaccagactatcccatacaaactgatgaagagacctgggagagcctgacatcctcagtccaggatccagtgtcatttaatggcacatttgtgagccgccccaagtcatcttccgccccatgctttggggaagctctcaggaggaagggctttcgaggtagaggaaacagcctgtgcaagggcgtggaggtgtgaaccacgccgggggtaggagctataaagagactggagctgctggatggtagccctggtggagggagacggggccagggctttgactgccatcccaggacactggggcctcatcctcttggccaagggctttatggcagcaagaaactgggcgtcttgggggaagcaggctgagtcagacacgatccctgctctcgaggagcttctggccacatgggggaggtggcagggacccagctctctgtggtgggaggctgagtagataggtcagcagcctggggaggaagaattattggggggggcggtctggcattctggctaggtacatgatctcataggggtacccagtttcattggactgcaggggtagagcctgtgcctttcaaaagccacctctttcccccactgcgccctgtgattctgatacactgtggggtgcaagaagcactgctggggatggggtgccatggggggacatgacagagcatgtgtcaaggggatcagtcggctcctgctcagggctctgggaccagcctcaggaaggaagcagggagcccagggaagggacgattgctttgtaaatcacagcgctctctccctgtggaagtgatgattattgtggttatttttaacacattcataccatagtaggctgagggcacaggactgtgtggagtttggggggaggggtctgtgaagcacagcatagcaggtatctgcagtcctgtgcaagtgacaaagagcctgtgctcaccccgcctgctggcaccaggggtgaagcaagaggggcctctctgtggttggggtggaggaactcccagcaatatctggcccatgtttgctgaatgcctgtcttcccagaagctaggccctctgaacaagagcagcatgggagactgagacccttcctcagggaccacaggagggatgagcccaagatcctcacaggtatagaagaagatggcctggggactaggccatagaaaagaggaccagcatatcgaaaccactgtattgtcagtctaggaaggcttcctggaggaggtggcaactgacatgtagatgattttggcagattgcaatagagggaagggtatttcaagggcagggaatagtgttagcagatgtgtggagggaggaaagcatttgtacattctagggataatgaaaaggggttacatctccctttctttctttcttttttgttctttttctctttctttctttctttcctttctttctttctctctctctctctctttttctgaaacagggactcctctgtcttccagactggagtgcagtggcacaatcatgacttactgcagcctcgaactcgtggcctcaaacaatcctcccacctcagcttcccaagtagctgggactacaggcacatgccaccaaacccagctaaaatttttttgtatttctttgtagagacggggtttcaccatgtttcccaggctggtcttgaattcctgggctcaaacgatccgccctcctcggcttcccaaagggcttgattgcaggcgtgagccacctcattcagctgacatctccttttcattgagagcggattgtgctccagacagtccacatctctgttttcactgaattctcacaatgaacctatatggtagaaagtgtcctccttaccttcagagaatctgaagctcagagagatgaggtgtcttgcccaagggtacacagcaagacggtggcagagctgggaatcaaacccacatgtgtctggctctagaatctgtgccctttccacaggtccatatggctttgcagtgtgcttggctgcccagtggggtgtgggaaacagtattggacaggtcagcaggggccggagcatgccaggctcagagtttcacactctggctgtagccgtggaggagccgctgaagacttcctcagctggggagtggtgtggttggggctgggatccccgaggctcactttggaggttacacagaggagaatcaggctcatgtcaggggaaaggggagcaggtgtgcaaaggagcaattaaacagtagcacgaaaacaggataagaggggcaaggaccaggggcttagatggaggcggggagtgactcggggtcccatgcaaattagggaaggtgtctccgaggaggtccaagttgagtggcattttgtcagagccagtgtagtacagtggaaagagcacggcctctggagtcaggcaggcctgggtttgaatcccacctcagcctctctctagtatgagaccttggagcttcctttctcattagtaaaatgggggaaaccagccctgatgaggatgaaatgaggtgatgctgagtgcacagtgactggcatgtaggagttgtttagtaaacgttgccttattcagaacagaatagttatgaggttatcaggtggtcaagtggggaagtgtgtcccaggcagcacatctgtttgtgcccatgactggcagcccgacgggaaagctgatagattgcaggactgcaggccttggggcacctggcccacaagccgctgagctcactgggtggaacactcaggagttcttgggggtactcacgtcccttctgggggcccctccttgtcctcttggaccctgcctggctcagcttcctcttggattgccctgttttggcctcagggctggctggggcctgcacacagtgtgtgctgactaagtgtttgtttcagtaaatgacacctctgctcttatctgtcttcttccccctccagggagaaccagccttcccctgtgtgggaatgaattgctggcctctcctctcctctgagtgggatgggtgggaatggaggggcaggcaggcagtgtagggcctggctgtgtggccttgggcttgtaccttcccctctctggcccagctcaggaggccggaaaagggatccaaaaactgaacctcggacatgttctgattttcaaatagggtgaattctggaaaccactgaccccaacccactcccgcttcgccctgcccctcctgttacattgtggggctggccagcagatggtctgtgagtggttagaagaggagcagggaccacaggaaacagtgtgagaccccgacaagcaggtcaggctggtctctcacgtgtccgcatttggtgggcactggatgccagactggtagatgccccagacacgacgatgggcaggaagcccacacaggagctggatgggaggactctcagctggatttgcacctccaaagtgtttgtgaataaataggggccaggagctctgtctttgagcctgtcttagtggtccctttggtgcaggctggcatatcaaatctgaatgctggtgctgtgggacggagctgatactttgcatggggagtcaagattacaaatgaccattcctcgtgagccccattgtgggggaagctgggaacaatgtattcattggtgcttatttcttggtatttcgctgggctgagttttgtgctggcattccctgggggtcaaggagaggactcacagccttccctcaacgggcttatggtagagagttgggggtatttctgacagtcagaagatggacccatctgtgatgaaagggcacatagaagagggggtggccaactctgcctggggagttgacaatatggaagtttccatagatgagaggtcatttgaggtgggttttgaaggtcaagtaggagttttctaggcaaagagggtggggaaacaagcaagtagagatttgagagtagatggtgggcttcttggacatgctgaatttgatggtcaggagaactgctcaggaggcaggaggatatccaggaatggagcacaggagaggcagggcctggggatgatgatttgggagcattggttcagagggggttaattaagcctggtggggagcacgtgcagtgaaaacaggacaaagcatggactcctgatatgggaaacagcaggaaaatagacccctcaaggagatggggacagagtagctagagaggtgggaaaccaggagagtgcttcaagggaggacgagtcagcaggaccaaatgctgctgaggggtcaagtgagaccaggtctgcaaagtatccacaggatttagcaacaaggaggacactgatgactttatcaagagcacgttcagcagagagatgtgggcagaagccagactgcagtggattaacaggggaggtgatatttgagccaggaagtgagtgtcaggtgaaaaaccagagtgctggctgcagagcagtcactgacggaggagggaaacagagggtcagaggagggcctctccgagagcgaaggaggcctggatctgttcctgggctgccgcaaggggagaatgctgacagggtgccgatgagaagggataatgggtggagccctcctgagaaggctggaggagggggatgcaggcccaggccacggggctggcctttgtggggagaagggctgcagggaagttggtagttggagaggctgggcaagaagctgggggctcccgatgttgaggtcatcgctgagagagtgggcagagatgagcttgaggagagaggacaaggtgcagtatggccacagcggggaatgaggaaggaacagagccaagaagggccactgagaagtcccgggcgcccagcggatgtggagcccctgaagctgtcatggtgccagttggcacagccatagatttcttcagcagcctgggggtgggcgtggagagggtagcttgtcacaaggctccagggctgggggaggggatcgaggagctggcacgcctggccctgccacctcctctgtggtcccaagagaggcaggggccaagtggaactgcagatgctattcagagggagtaggctcgggtggcacatgaggggctggaaggggtggaggctgtgaagagaagggagatgataaaaataaacgagaatgactgtcttctgagcacttgccgtgtgccaagcagggtgctgagggtttcaaggccctcctggcagggggtcctcacgtgagtcctgggggcggagtataatgaatgttgttctccagaggataaagcagggtcagagaggtgaagagacatgcccgaggccacacagctggtcaatgtccacaccccatttgggatccagggttaattcactccaaagctcttctgggagtccaggtttcagagatggagaaatttcagggatcatgtggatcaggccctggggctggtgactgacgtggagggaaaggccccagagtggatgagaccagaggctgggctgggtggcagttctgagcccccagcagcagatttgctcagggtggctgctcctcatgcttggtgagaaagagcttcctctcagctgcagagcccgggctgggcagcagggggcaggaagaggcagccctggtgggtcccttcacactcagcgtgcctgtccagtactgctggcttttagagataggaaggagcctggaggtgggggagaggagcacctaatagtctggggatagcatggggtgagcccatcctcaaaggctcttccagtcccacctgctcatgcagaggctgctgggcctttcccttctgtgcccatgtctgcccctccctgacaccccattgtgggagagggccctgatgagctcatgtctgtgcaggagggccaggctttggagaatggaagccaccagggctggtagtgcttccaaggcctagcccagacacataaatcagggcagctgagagcctggtggggccagggtcaaggtagcctggcctcctcgagcacctgctgttctcctggcctcagggccagcaggagaaaggtctgttggatgtgggcacttgtcctaggccccttgggtctcagaggagtggcattctgacctgtgcctccaggtcacagtccagtgctgcttggggagcatgaactgtatctcagagataggctcggggccagggttgcagcagctcagcttggatgttttttcagcccctaggagtcagtacaatggaggagcaaatgcagctgtgtgctcttggacaaggcacttcccctgtctagccctcagtttcctcatctgtaaacagagatgatggttcttctttccagtgagaggactaaaggagagggttatgggccgcacttggcacagaagcattcccagagctctttcatatgggcagccatgccccttaaatctcccccacatctggctgaggcaagaggtggaaaagatgactgtgaggtcagggcctagtcctgtgtagccttctgaacctcagtttccttgtctgtgaaatagtggtggtggggcagagggcagaatgtgatcctgagagagcatcatgcagttggttccaggccctcaggcggagggcaaggaaggctgccttcactgtgccactgtaacagaacctagctggcctttgctgagcccctgccaccacctccgtgttccaggtgaggagccggaagaggaaccgaaagtgaaaacccagtggccgaggtctgcagatgagcctgggctatacatggcgcagacaggtaactcgggcccgcctcccttcctctgcggcgggggcccgactgtgtgcgtctggtggtgtgtgtgcttggtgtgtgcctgtctgtctctgtcctgcagttcagtcgcgtctgtgccacatgaagcttgtgggaagggctgggtggcctcctgaagagcctgttacttggggtcagggtaggaggagccctctgatgcctgcccccaccttactgccactccccctatccctatgagactgagtgcttgggaggtgccccctgccgccgacgctgtccctctctcgtaggcgacccggcggctgaggagtggtccccgtggagcgtgtgttccctgacgtgtgggcagggtctgcaggtgcggacccgctcctgtgtgtcctccccctatgggaccctgtgcagcgggcccctgcgggagaccaggccctgcaacaattcagccacctgcccaggtaggcccatcctcctccccaccccacctgcctgcagggttaggtcctgcctgggacttgggcagattaatctccaaaatggttggttgcctcctcctttcattcaacaaatgtggctgttccccacaccatgcccaactctgcgtaccatgccagcccggtgcagggcactgggggcacagatggatcagaccagggcccatgctactgggcccggttctgggcacatcattcccccagtgcctgcatcctggtaaccaaggctcgtgtttttacccactccgctctggccatatcagtagcttgcgcactttcccacctccctgcatttgctgattcttgtcctatcctttctccctgaccttggctattcaaattcagcctgtctttcaagatctaagacaaacgccacttccctgaccttcccctccttcctttggacaccccctctcaagggagcctcccctaagcctccctcagttgagtgtgtagttgttaaggaaatgcatgtgcttgcttgagacggcaagggcagggtagcctcagccagtcctgctccttgctccctgagtgggtgaagtgaggcctaggccatgccagtggtgctgtggatttagagcagggcctacctgggaagggctcttggtacctgggggtatggcaggagtttgcaaaggcctggggcaaagctgtgttccagcgtgtgagctcggtgtgtcggtgtccatgtagaggttcatgtttatttgtgtgtctgtgcgcttggggctgggaagggcgcttctcttgcccccggactgctgtgttgtattcaggctctgggtctaggggtgggtgggatggggaggggtggaatggcgtgggtcctgggtcctttcctgaattttcctgtgccctcaggagaggaggacccctggttcccctcctgttggtcctggcccccttgtccaggcgtccacaggggctgtcctatgtgaattaggaccggaagcctgtgtcttgcacatcccttcaaagggtcgcgccttggtggggccctgggagatccccctggcaacagatcccggggcagagccaatgaggagcagccgcagagctgcggagctcctgattggtgggcggatgggcaggcgccggtggtgggcggggccatggtgccgcccagccaccggccacgtgcttccttgcagtgcacggcgtgtgggaggagtgggggtcctggagcctgtgctcccgcagctgcgggcgggggtcccggagccggatgcggacctgcgtgcccccccagcacggcggcaaggcctgcgagggtcctgagctgcagactaagctctgcagtatggctgcctgcccgggtcagtagcacccgtgggcttccatgagggcgctgcccagcccggtggggggtcgggagacctggggaggcagtcaggtccagtgacctgcccctgggggccccttaaactttgaccaagcatggggagactggagaagtatgcctgcctgtgtgcgaggtgaccccctagccctgacttgacccctagccctgacatgagttagtaccctgtgacgccatcaagaggggacagctctttctccaagccctgggctgcccttgcattttggtgcatggccagctggactgtgagaggacacaaagctgggctgaagtgctggcaaagatcagaagacacccctgcagccccttcccttagccagaagtgagttgtgccttgtgctaagaggagaggtgtcctgtatttctggagctggtggcaggcaggcagcatgaggcccaggcaccacctgctcactccagccttcctcataaccccctcccctccccactccagtgggtctggcctggctcaaatctgaatgcctagcaggctctgggtcttcctgtggttctccacaccaccagccctcacacatcctgctcaacagccacccctgcttgtgtctccccatgcagtggaaggccagtggttagaatggggtccctggggcccatgctccacgtcctgtgccaatgggacccaacagcgcagccggaagtgcagcgtggcgggcccagcctgggccacatgcacgggtgccctcactgacacccgggagtgcagcaacctcgagtgcccgggtgagtgcttggcacagtggtggcaagttgcagctctgaccatgggggtacctgggcccactcatatgcctcacctctcccacagccactgatagcaagtgggggccatggaatgcgtggagcctgtgctctaagacgtgtgacacaggctggcagcgccgcttccgcatgtgccaggccacgggcacgcagggctacccctgcgagggcaccggagaggaggtgaagccttgtagtgagaagaggtgtccaggtactgccctaatgaccctgggggctgggggccccatgtgtggacccagctgaaccttacccctgcacccacagccttccatgagatgtgcagggatgagtacgtgatgctgatgacgtggaagaaggcagctgctggcgagatcatctacaacaagtgccccccgaatgcctcaggtaaggggcaggtggctttccccaccaccaccacccctgccattctcattgcccccttctgcgcccccagcctctctgagatacggaggagtgtgggtgagagctcggcccccatgcccagacctctgtcctattgccctgcagggtctgccagccgccgctgtctcctcagtgcccaaggcgtggcgtactgggggctgcccagctttgctcgctgcatctcccatgagtaccgctacctgtatctgtcagtgagtgcaccctgctgggctggggcacagcagaatctgtctcagactctgctagggggtggagggagcgtgattctcgctcgttcccacgtgccttggcatatgctgtgcccacttctgcctggctgtgcctctccttgtctggcaagctcctactcatacctcaaggcctgactctcaagtgtcttcttttatccctggtgcctacctctgcgctcctgcagaatgagctcctcagtcattaggtgctcatccaagtgtctgtgtgtgctgctagactggggcctccttgaatttatttttgtgtccccagcatccagcccagggccagtcatggggtaagagtagcatcagtgaatgtgtgtacatgtttgactgtaattgggtattaattgtgtgaatgcatttagagcttgtgttgagagagagtgagagagagaaagacagtgtgtgtgtgtgtgtgtgtgtgtgtgtgtgcgcgcgcgcccacacacatgctcattacactccagaatgtacatgacccctttgggatggggaggtaccctgttcccatactgtgcttatatcttttatatgtacatctgaacaccttttttctctaggtgtttctatttcagtcttttttaaagtaccctttgggattctctctctctctatgagtctctttctcggactctgtctcccctgtgtgcccctttgagcctctctgaccttttccccctttctctccccgtggatgcaagcagtgggtggactggagtgggatgggccagggtctggttccagctcctgacacttcagtgactgtggccccctcatcacctacagcttagggagcacctggccaaggggcagcgcatgctggcaggcgagggcatgtcgcaggtggtgcgcagcctgcaggagctactggcccggcgcacctactatagtggggacctgctcttctctgtggacattctgaggaatgtcactgacacctttaagagggccacctacgtgccctcggctgatgatgtgcaggtactgcctaggaggaaggagggcggagggtggagaaggcccaaactgaagcgggaggccaggcccctaggcagagtctgctgtagaggcggcaagtgtggctatagtgggggaagccccctgttccctggggctaggaccccctgccactcattgctctctcctcagcgcttcttccaggtggtgagcttcatggtggatgcggaaaacaaggagaagtgggacgatgctcagcaggtgcggggcacagctgccagcttctcctcccgtgacccaccctgccttggacccttacacactttctgtccccaggtgtcccctggctctgtgcacctgctccgtgtcgtggaggacttcattcacctggtgggcgatgctctcaaggccttccagagctctctgattgtcacagataatctaggtagaaggagtcaggcaagggtgggggtcctgaatgtgccagaactcaagacgttctgtctttcctctacctaaccccgtatttgtatctttctgtccacattctaccctctccttcatctatgtgtggtctgtttctctgtgtatgtctgtctctgtgtttgtaccaacttcggtgtccacatctacctttcctggtacgtgtttcccctacatctgtctcttcccctggtctgccaccctttgtttctgcccctctgtctgtctctgtccaccctcctcccactgcagtgatcagcattcagcgagagcccgtctcagctgtgtccagtgacatcacgttccccatgcggggccgccggggcatgaaggactgggtgcggcactcagaggaccgcctcttcctgcccaaggaggtgctcagcctctcctccccagggaagccagccacatctggggcagcaggcagccctggcagggggaggggcccaggaacggtgcctcctggcccaggccactcccaccagcgcctcctcccagcagaccctgatgagtcctcctactttgtgatcggtgctgtactctaccgcacccttggcctcatcctgccgcctcccaggtgagtcctggggatgggtggctggggctgctgagggtccaggaaggcccaggtaagggaaggaggactgagccagtgctggctgcagagagatccatggcagcctcctccaccttcaggaaccccttgcctggctctggacacatgcttctcaaatttatccatactgctctcagaggctgggctgccacccagcgggtgagggacagagctctagacctcacctgaagtcctggaccccactgagttaggccttcccctgggccttggctccttggaagcctctgcacacccatccaaagcggcttcagggtttctgactggggctggcacccgctggcaggagctgacttcggtacctgtcccgcaggcccccgctggccgtcacatcccgggtgatgacagtgactgtgcgcccccctacccagcctccagctgagcccctcatcactgtggagctctcctacatcatcaatgtgagtggagatccatgcagagaccttgggtgcacctcaacctgggtggccagaggcctggctggtgggaagcactctgtccctgatggtgggctgaaccctggacctgtgtgggagctgctgtggcccccatggcatgggcagtggtggggtgtggtgagcttccctccctagactgcactcatgtcttttgctccccaggggaccacggatccccattgcgccagctgggactactccagagcgtgagttgggtggctcctctgggtgaggaagggagcagccctagggccctttgccagaaaggggtctcctgcctaaaaggcaagagggatttttggtgccatcctagcctaaggggtcaagaacgtatcctgggactccctgctgttgcctcgtggatgtggccttactgtggatttagcctgtccttgggcagtggccaggactgggggcagggccacgtagctggcctggggctcactgaatctctcccctacccaagagatgccagctcaggagactgggacactgaaaattgccagaccctggagacccaggcagctcacacccgctgccagtgccagcacctgtccacctttgctgtactagcccagccgcccaaggacctggtgagtggaacagaggtgcctgggctgaataagggaggaggccctgggcttccagcagccatcagtgatggtgttggcaggcgcctgggtgatcctgaatgtgcatctgcaggtgcgcttgtgggattgtacgtggatgtctgtgcccctgggattgtgctcacagcaatgatatttgcctgggggtatgcggcagtggccagttgtgtgtgtgtgtgtgcacatgtgtgtgtctggttgtgtgtagaagagtgcaggtgactgagcataaatatgtgtccacatagatacccgggtctgttctgtgcatacatgagtacaacagcaagaaggtgttgcccttctgcctgtgggtatgccagtctatggtagatgaggggacagggcacccctgcagctcccccctcccaggaacccatctgactgtctgcccatcttccccagaccctggagctggcgggctccccctcggtccccctggtgatcggctgtgcagtgtcgtgcatggcgctgctcaccctgctcgccatctatgccgccttttggaggtaggtctgacacctggctcttgtggctgggggagggggggcaggcgcagaaggtggccagccacaccaggtcggatggggcagccagcgcctctgtccctgcctgctgtgccccggcaggttcataaaatctgaacgctccatcatcttgctgaacttctgcctgtccatcttggcatccaacatcctgatcctcgtgggccagtcccgggtgctgagcaaggcaggtgcagacttccagggctgccaggggtgtgagtggggtggaggggtgagggtggagagcgcagtgtgtgtgtttgcttgtacgtccattagtggtggtgtatgtgtgccccatgttgggattagagtgtgtatgaaatagtgtgtgagaccatatgtgaggacattggagagggggtgtgtactcaagtgaggaacttctgtgaacatcagtaaatgtgtgtgtgagctgagcgctgggtgtgtgttgggcaggtggcattgggcctccttgtgtctgtgagcgtgtggaagcctgagtgaggcctccttttgccacctacctgtggacgacctgtgcagactcttccctatgcccccttggccttctctgcacagtgccagcaccatgcatgccaggcacagggcctgcccagctgtgacgtggcaggtgctcatgtctgtccccctccctgccagccccgtctgtgcgtgggcagcctgcccacccgcctccctggatgccgagtgctgtgtgtgtgtcaccaggcccgtgtcgtgctgtgtgtgggtgcaggaaggcgggggtgcctggcagggctctgtggggggcggggctcaggtgggcggctgtggcagcgcccagcagcgggcgtgggaagcccggcgcctcctgccctggcggctgctcagggccactccctcccattccctctccctgcagggcgtgtgcaccatgacggctgccttcctgcacttcttctttctctcctccttttgctgggtgcttaccgaggcctggcagtcctacctggctgtcattgggcggatgcgcacccgcctcgttcgcaagcgcttcctctgcctgggctggggtgagcagggccagtgctggactctgctgctgggccttggtgggcaggggcagcaagagaggttcagctttggccctggcccagctctctgggcacaggggtcagctgggatgggagtctgggagaacaaggggtccctgaagaccagcaaccatctcactctggcacccctgctcccccaggtctgcctgccctggtggtggccgtgtctgttggctttacccgaacgaaaggatacggtacatccagctagtacgtgggcctcccgtggtgggtggtagcgggtagtggatctgttagggaatcggactgggcagctggctgaaatcctagcccatgcctgttttgggtctttgggcaagttcctccccatttctgagcttcagtttccctgactgagggaatgtgctaggactgggtaatccctaagggactgtttagctcaggagtcagccttgcttcatccccatgggagcactgggggatgagcctaatgttctggacctttgttggaggggaaaccgaggctcagcaggagccagtggctcactctcaccgtctggggctcagactgcactggtgatgcgggcatggcagcctgggaggactgagggatggtgtttgagggtggggagggaggctgctgggtgtctgacacccttcttctcccccaccccagctgctggctctccctggagggcggcctgctctacgcctttgtgggccctgcagccgtcattgtcctggtatgtgcccgttcagcatcttggaaggggcatggccccagagggtcatcctgtttctccctctacctcctccctgcgctccagctcccacatggggatttccctgccaggagggcacctggtgatcctgtctcccccactccactctactgggcccccaggtgaacatgctcatcggaatcatcgtcttcaacaagctcatggcacgtgatggcatctccgacaaatccaagaagcagagggccgggtaaggggggggcctctgagacttggcctttctggaaatggtgcagggagggagggacatgggtgctcttggagactcagggctcgatgatgcgaccggggctccccaaccttggtgcatcaaggttgcaggcaaggtgggcacccggagtgctcagccgcagcccctcacccaccctaacccagctctctctctctcgtctgccctcccctcccaccccactcggggctcattctgccccatctcccggcttcccatgtgtttcccctccttctcccatgtctgtgccgcccccgaggtcggagcggtgcccctgggccagcctgctcctcccctgctcagcgtgtggagcggtccccagccccctgctcagctcagcctcggccaggaacgccatgttagtcgtgccccctggggggcggtgggggtgggtggggcaaaggaattggggggggcagtgcccatggtggggggaggaggagggatatcagcccagtgccctggaaagcttgccctttcctgccagccaccacacactctcaagggctcggcaagaggtggccaaggcgatgaggagtggatgtctgtgcctcccacaggtgcccggttccttcgcccacccttggatcccgcccctgccctcactcccagctaatgttctatcctgcaccgccccacacccccaacctacagaggctcagacaatcttaagccttagaatttttgagctatagaaccttagaattagaatgatagaatcttagaataagacaatcagaagctaagaatgttagaatgagtgaatcatccagtcttatcatctgtcatagaatctgagacttagcatttcagaggcattgaatctcacactcaattggagacagagaatcacagaggtagagaattatttcactgagacccccgccctagcatctgagaatcttaaaatcccagctatgcaagggtaaaacaaatccacaaagaccttaggctcaacctcccacccaggtctggaaatccacccaagcctccatgcccagtgaggtccagctttatcttgcacacctgcagggtcagggagctcagggcctctggaggcagctggcaccgtcaccacgaagctccctctgtcttgggctgccgtctgcctccctcaccccgtctgcactagctgtttcaatgcttgggctttggagtcggtcaagctgtgtttgtatcccaactgtgcctctccctgcccagctgggctcactccagtttcctcatctgtaaattgggataataatcccatgcctgttaattggagttgttttgatcatgatttgaagtaatatatgtaaagtgttcagtgtagggcctggtagagaattggtggttaatcagcgtagctcttattactgtgattagaccctctcttagtcttggctacacctccggggacttcagagtccattgtgcctgccccctgccaggctgaacagccctgaactgcacttcctagggcaggtcttggccccctgcccatctctctgctttggcctcccccggctgtctctgcggaatggtgccaccctctgccatgcctagagctgtgcctgactctcccactgggggtgtttgcgaaggagagtgggctgagtgtggcacctggcccgggagggtatggtggcctggctgtccctcatgtgctatagcaggttagggaggggtgggaatggcttggatgccaggccccatctgctttttttctgccctcccctggcagggaggccagggaggtgtaggcctggcccgaccccagcttttagccccagctctgagccttctgcccaaggctctgagcagtccgtgggagcctggcgtcttctctgtgtgtggggggagttctgcttcactggtcctggccccctgtcttctccctgaggattcgtgctctggatgtcccccgcgtgctctgcctgtttaatctttctgtctgggtgtctctgtcgcatgcgttctctcactgtggttgttgttgctttgtccctcttccagtccccctccccagcctacccagttaggctctggggatgccgtcccggccccgtgcatttttaaaaagctcctcaggtgattctgtgcatctgtctgcctcctcttctctctccccgtccctttccactgtctgtggctcggtcccactgtgtctgcgtgtccttccccaccttcctggtccctgctctgaccccgtagttcgctgctttcggtctctgttctgtttctctggctctggctcctcagcccctctctgcttggggacattactgaggccctggggtttggggccctcccagtcttgggcagctgaagagctccagctgagtggaggcctaggctcaagccatcctgtcccccggagtgtcactctgatgggctctgccactgtcccctcagggcctcactctggagctcctgcgtggtgctgcccctgctggcgctcacctggatgtctgccgtcctggctatgacagaccgccgttccgtcctcttccaggccctctttgctgtcttcaactccgcgcagggctttgtcatcactgctgtgcactgcttcctgcgccgagaggtggggctgggcctctcccgcctgtgtgtgcccaccacacctgccaggcccttggcttctcctcactgtgcagaccgggaggatcgaggccccgaccagggtgccccaggccccatctgggcagcccttactgtggaagctgatagcccggggtacccgcaactgtcccttatgcttatccttggcctcctgggtctcctcctcccgttgcaccctgcccaggtgtcatcaccttccccaaggttggatgtgttgccttccttctacacttgcctgggcatctggggtgggaagcacagccatctgtggtcgggggccctgcagtggcctcaggcccagcaggcgccctctgtccccaggtccaggatgtggtgaagtgccagatgggggtgtgccgggctgatgagagcgaagactcccctgactcgtgtaagaacgggcagctgcagatcctggtgagttaggggcctgggcagggcctgggcagattctgggcaccccccaccccaatcctcctgccctagaccatttaccttccccatccatggcagggttgggacagggattgggtttgattcaggctcagccactaacacctgggtggcattgggcaagtccttcccccactcagttttcctagccatcaggtgggctggggtaggccatgcctgggctctgctgggccatgggctatgggccatgggcagccctaaggcaggcagactgggcaaagctggctggggagggcctgagcctcctcccaccctgatacattaatcctccctctgcccacctgcccctccctttctgcctatagtcagactttgaaaaggatgtggatctggcttgtcaaacaggtgagtgtgccgtggcagaactgagaatggtcctggggttggagaagaaggggaggccttgagccccatcatgggaggccctgatggagttctggctgctggagtccagcttcgaagttagacagccctgagctggacgcaaggctgcgaatgtcccttactgtatgaccctgggcaaacaacctgcctctctaagcctcagttaacacacctgtaaaggagagaatactgtcctcccagggcaggtggggggcttaggggcatgcatgaattcggggacatcgagttcttagcaggacccatggcacagagtgttacgttattatatcatttccagattcttaccagaatctttccatttctgtctcctggggagctgatgcacagggaggtgggaagacaaagccctttgacagccgtggggctgtggggtcaaagtcgggacctgcaccaggacactgggagctgggccttgcctttgtttcttgccctgtctcaatgtggggactttggagccgttgtcttcttaacccctcttatatgtgagagattaccaaccacccagccatctctccaggacccagtttcctttcctgtccaagcgcagaagcttggtacctccccagcctgggcaatggcatctggaggttccttctcctcaggactcaccccctccctcccactcctgcccccagtgctgttcaaggaggtcaacacttgcaacccgtccaccatcacgggcacactatcccgcctgtccctggatgaggatgaggagcccaagtcctgcctcgtgggccctgagggcagcctcagcttctcaccactgcctgggaatatcctggtgcccatggcagcctcaccagggctgggggagcctccgcccccacaggaggccaaccctgtttacatgtgtggggagggtggcctgcggcagctggacctcacatggctgcggcccactgagccaggctctgagggagactacatggtgctgccccggcggactttgagcctgcagcctggcggtgggggtggaggtggtgaggatgcccccagggcccggccggaggggaccccccggcgagctgccaagacagtggcccacactgaaggctaccccagcttcctgtccgtggaccactcgggcctggggctgggccctgcctatggatctctccagaatccctatggaatgaccttccaaccgccaccgccgacacccagcgcccgccaagtgcccgagccaggggagcgcagccggaccatgcctcgcaccgtgcccggctctaccatgaagatgggctccctggaggtgaggggctgtagggaatggggtgtgtgtctgagactgtgtcaatcacaggctgcagccaggaggggacagcctcatcctccccagagcggcctctcgtaaaagtcactgggagtggatacactgagcatttctctgtttctgctcatggcagctccgtggtgtctgtgaatccttcagacaggctgggacttcacacagtagaattgtacttctcgactcgttcacacttgctttagggcctactttggggtgactggttaggatgagtcctcatttcaggagactgtggctcaggcaatgtgtgagcctgggcctctgcgtcatgcaggtctgagttccagtctggactctgattggcagtgagatcagtgagccttcattttctcgtgtgtaaagtggggataccgtagcagtctctttgtggagtcgttttgaggattgagtgatgtaaaacatttatgtggagcaagtagaaagtgctagataattggggattgctgctgttagcacccctgaaatcagctgcagatgctgcccacaggcctgtggtaactgaccctctcttccggagaaaagcaaacccctccgggtccctgcctgtgtgtgttctgtgaatccttcaccttcacgctggcctcctcaggtctgctccctgcagaggatcactgagaacagacagtagtggcctgctgtggaactctagaacattctgcaactttattggagtcatgaaggggatgtggttaaggaaagggacaggagtcgtggcttagccacaattggctgttcctgctcggcctcagaaacccactccccatccgccacaagacgaaaattaagttagtagctacggggctcacaagtttagtttttctcccaaagtgtttctggaacatttggtgcctgcttctgccacagatggcaaaaacaggaaggcgtaacaaagacaaaatgcaacgccagtgtcggagaagggcgcgcttggcgtcatggcgggttttgttctgtggacacctgcctgccggccactgttgagggcggacatcaggctccttgtgtgggaggcagtagtaaatgcagcagcgctttgaggggtcaaggatgacatccagaattcgggcgtgggcaaccgtgatgggcggaggaacaggtctgggtagggaattacaagtgtattccattggtgtgagctgcatgtgcagtgcctgtggggcatcagacagggagaggtgccctgttgcccccagaaagagagatgtggctgggttggggaggatacacgtgtgtgtggtaaaggcaggagaaggtgccggggcagagtgtgagtgcctagtattacagaagccagggtaggcagcggagagaaagcaggtagggagaggagaggaaaaccaggagagtgaatgccatgggcccatggtggtgagcatgcccacaggcctgggagatccagatggtggtcctagtatcaccttcgaaggcctgggagcaattcccttcacctccctgggtctcagtttccctatctgtaacctgggaaagttggccttggcttcatgggtctccctgtgctgacattttaagactctcaggcctctttcttgagtagcactgggtacagtacagcttactggggccttgaaagtggtctgggacaaggagggccaggagaggcatgagggagcagagaggccagggaggcagcgcctggtttggcaggaaaaggggcagtgtgaggtcaaaggaaggtttctgaaagcctgaatacctgtgtttgcaggacaagtggaaggttccaaggggaggggtagctatggctggcagagagaatggggcaagatggggaaggatgcagggtgggctctagggcacagagaatgagcactggctctgattccatgtgggcatctgggcctgtcatgttggaagtccgcaccatgccatttgacgtgtgtgtgtgtgtgtgtgtgtgtgtgtgtgtgtgtgtgtgtgttcagtgaggcctgaaaagctgccccatgaaggtccgcaacttctgggcctgggttggggggaaggtgcagcgggcagacccctgggatgccaggcttcctgtctctaaagcccctgccggtggtaaaaagctttcttctcctccattgcctccttgttgctccttcccagcgaaagaaattacggtattcagacctggactttgaggtaagggccatgtgtgtgctgggcggtgggacatctggctgtggtgtctgtccctggagggctcactcctaaaagtagtccaagctctgttgcagagcctgaccccaggagcccaagcccgggggttccgtgggatcttcccatgattccctccctgcccaagcccatagcaccaacgtgaagagagaactaggtcttgtcccagaggggctggcagcagggagggatgtggggggcttggggtgctgagtgccctgggtaggggggatcatggtgctgccccggggagcgaccctctgatgccctgtggcccctagaaggtgatgcacacccggaaacggcattcagaactctaccacgagctcaaccagaagttccacactttcgaccgctaccgcagccagtccacggccaaggtgagggctcctcccgtggctgcccctgccctgaagctcagggcctgacctggtgcagtggcccctggggttggagcctgaccggtggcccccgttgcagagggagaagcggtggagtgtgtcctcgggtggggcagccgagcggagcgtgtgcaccgtgagtccccccgggctgggtggggtgaggtgggcctgagggacccgtgccctccctgccctcctgcccctcccaggcaaccccagcctgtctcaccaagggcctcccccacggcatgggcaacagtctggggccgcctgggggtggggaaggtgctgcagatggcgaacaggggtggaggtcctccaggattgggagggagagtggtcagcaggagacatgtcctgggggccactgagaacaggggtcaggagccccaccctggaaccaggcaggtctgtatttgaattctgcttgacacctgattgctccataactttgggcattaccagccctctctgggactcctcagtttgatcgtctgtacaatgggtaaggatattggcccatctccacggcccctcccgctccctccacaggataagcccagccctggggagcgccccagcttgtcccaacatcggcgccatcagagctggagcaccttcaaatctatgacactgggctcgctgccccccaagccccgagaacggctgactctgcaccgggcagcagcctgggagcccacagaaccaccggatggtgacttccagacagaggtgtgagtgccacgctggactgcccactgcatataaatatatatatctctctattttcacactccactttggaactacccaggagccagcgccctctcccctctcccgagggctgggcagggaggcgccgtggactcagccaggctgggggagccggacatggcttggcctggggtcccagggcccttccttgtttctcagaggcc

SEQ ID NO: 870 - protein, 1573 aa, Homo sapiens
MTPACPLLLSVILSLRLATAFDPAPSACSALASGVLYGAFSLQDLFPTIASGCSWTLENPDPTKYSLYLRFNRQEQVCAHFAPRLLPLDHYLVNFTCLRPSPEEAVAQAESEVGRPEEEEAEAAAGLELCSGSGPFTFLHFDKNFVQLCLSAEPSEAPRLLAPAALAFRFVEVLLINNNNSSQFTCGVLCRWSEECGRAAGRACGFAQPGCSCPGEAGAGSTTTTSPGPPAAHTLSNALVPGGPAPPAEADLHSGSSNDLFTTEMRYGEEPEEEPKVKTQWPRSADEPGLYMAQTGDPAAEEWSPWSVCSLTCGQGLQVRTRSCVSSPYGTLCSGPLRETRPCNNSATCPVHGVWEEWGSWSLCSRSCGRGSRSRMRTCVPPQHGGKACEGPELQTKLCSMAACPVEGQWLEWGPWGPCSTSCANGTQQRSRKCSVAGPAWATCTGALTDTRECSNLECPATDSKWGPWNAWSLCSKTCDTGWQRRFRMCQATGTQGYPCEGTGEEVKPCSEKRCPAFHEMCRDEYVMLMTWKKAAAGEIIYNKCPPNASGSASRRCLLSAQGVAYWGLPSFARCISHEYRYLYLSLREHLAKGQRMLAGEGMSQVVRSLQELLARRTYYSGDLLFSVDILRNVTDTFKRATYVPSADDVQRFFQVVSFMVDAENKEKWDDAQQVSPGSVHLLRVVEDFIHLVGDALKAFQSSLIVTDNLVISIQREPVSAVSSDITFPMRGRRGMKDWVRHSEDRLFLPKEVLSLSSPGKPATSGAAGSPGRGRGPGTVPPGPGHSHQRLLPADPDESSYFVIGAVLYRTLGLILPPPRPPLAVTSRVMTVTVRPPTQPPAEPLITVELSYIINGTTDPHCASWDYSRADASSGDWDTENCQTLETQAAHTRCQCQHLSTFAVLAQPPKDLTLELAGSPSVPLVIGCAVSCMALLTLLAIYAAFWRFIKSERSIILLNFCLSILASNILILVGQSRVLSKGVCTMTAAFLHFFFLSSFCWVLTEAWQSYLAVIGRMRTRLVRKRFLCLGWGLPALVVAVSVGFTRTKGYGTSSYCWLSLEGGLLYAFVGPAAVIVLVNMLIGIIVFNKLMARDGISDKSKKQRAGSERCPWASLLLPCSACGAVPSPLLSSASARNAMASLWSSCVVLPLLALTWMSAVLAMTDRRSVLFQALFAVFNSAQGFVITAVHCFLRREVQDVVKCQMGVCRADESEDSPDSCKNGQLQILSDFEKDVDLACQTVLFKEVNTCNPSTITGTLSRLSLDEDEEPKSCLVGPEGSLSFSPLPGNILVPMAASPGLGEPPPPQEANPVYMCGEGGLRQLDLTWLRPTEPGSEGDYMVLPRRTLSLQPGGGGGGGEDAPRARPEGTPRRAAKTVAHTEGYPSFLSVDHSGLGLGPAYGSLQNPYGMTFQPPPPTPSARQVPEPGERSRTMPRTVPGSTMKMGSLERKKLRYSDLDFEKVMHTRKRHSELYHELNQKFHTFDRYRSQSTAKREKRWSVSSGGAAERSVCTDKPSPGERPSLSQHRRHQSWSTFKSMTLGSLPPKPRERLTLHRAAAWEPTEPPDGDFQTEV

SEQ ID NO: 871 - DNA, 1555 bp, Homo sapiens
  source
  (1)..(1555)
  CDS (201)..(1355)
gggctgcagggttccccttggcctgcaaacaggaacacagggtgtttctcagtggctgcgagaatgctgatgaaaaccccaggatgttgtgtcaccgtggtggccagctgatagtgccaatcatcccactttgccctgagcactcctgcaggggtagaagactccagaaccttctctcaggcccatggcccaagcagcccatggaacttcataacctgagctctccatctccctctctctcctcctctgttctccctccctccttctctccctcaccctcctctgctccctctgcctttaccactgtgggggggtcctctggagggccctgccaccccacctcttcctcgctggtgtctgccttcctggcaccaatcctggccctggagtttgtcctgggcctggtggggaacagtttggccctcttcatcttctgcatccacacgcggccctggacctccaacacggtgttcctggtcagcctggtggccgctgacttcctcctgatcagcaacctgcccctccgcgtggactactacctcctccatgagacctggcgctttggggctgctgcctgcaaagtcaacctcttcatgctgtccaccaaccgcacggccagcgttgtcttcctcacagccatcgcactcaaccgctacctgaaggtggtgcagccccaccacgtgctgagccgtgcttccgtgggggcagctgcccgggtggccgggggactctgggtgggcatcctgctcctcaacgggcacctgctcctgagcaccttctccggcccctcctgcctcagctacagggtgggcacgaagccctcggcctcgctccgctggcaccaggcactgtacctgctggagttcttcctgccactggcgctcatcctctttgctattgtgagcattgggctcaccatccggaaccgtggtctgggcgggcaggcaggcccgcagagggccatgcgtgtgctggccatggtggtggccgtctacaccatctgcttcttgcccagcatcatctttggcatggcttccatggtggctttctggctgtccgcctgccgatccctggacctctgcacacagctcttccatggctccctggccttcacctacctcaacagtgtcctggaccccgtgctctactgcttctctagccccaacttcctccaccagagccgggccttgctgggcctcacgcggggccggcagggcccagtgagcgacgagagctcctaccaaccctccaggcagtggcgctaccgggaggcctctaggaaggcggaggccatagggaagctgaaagtgcagggcgaggtctctctggaaaaggaaggctcctcccagggctgagggccagctgcagggctgcagcgctgtgggggtaagggctgccgcgctctggcctggagggacaaggccagcacacggtgcctcaaccaactggacaagggatggcggcagaccaggggccaggccaaagcactggcaggactcaggtgggtggcagggagagaaacccacctaggcctctcagtgtgtccaggatggca

SEQ ID NO: 872 - protein, 384 aa, Homo sapiens
MELHNLSSPSPSLSSSVLPPSFSPSPSSAPSAFTTVGGSSGGPCHPTSSSLVSAFLAPILALEFVLGLVGNSLALFIFCIHTRPWTSNTVFLVSLVAADFLLISNLPLRVDYYLLHETWRFGAAACKVNLFMLSTNRTASVVFLTAIALNRYLKVVQPHHVLSRASVGAAARVAGGLWVGILLLNGHLLLSTFSGPSCLSYRVGTKPSASLRWHQALYLLEFFLPLALILFAIVSIGLTIRNRGLGGQAGPQRAMRVLAMVVAVYTICFLPSIIFGMASMVAFWLSACRSLDLCTQLFHGSLAFTYLNSVLDPVLYCFSSPNFLHQSRALLGLTRGRQGPVSDESSYQPSRQWRYREASRKAEAIGKLKVQGEVSLEKEGSSQG

SEQ ID NO: 873 - DNA, 6784 bp, Homo sapiens
  source
  (1)..(6784)
  CDS (201)..(868)
  CDS (1751)..(1864)
  CDS (6275)..(6584)
agctacgccctccccccgggtgccccggaccctgcacttgccgccgctttcctcgcgctgctctggaccttgctagccggctctgcacctcccagaagccgtgggcgcgccgctcagctgctccatcgcctcactttcccaggctcgcgcccgaagcagagccatgagaaccccagggtgcctggcgagccgctagcgccatgggccccggcgaggcgctgctggcgggtctcctggtgatggtactggccgtggcgctgctatccaacgcactggtgctgctttgttgcgcctacagcgctgagctccgcactcgagcctcaggcgtcctcctggtgaatctgtctctgggccacctgctgctggcggcgctggacatgcccttcacgctgctcggtgtgatgcgcgggcggacaccgtcggcgcccggcgcatgccaagtcattggcttcctggacaccttcctggcgtccaacgcggcgctgagcgtggcggcgctgagcgcagaccagtggctggcagtgggcttcccactgcgctacgccggacgcctgcgaccgcgctatgccggcctgctgctgggctgtgcctggggacagtcgctggccttctcaggcgctgcacttggctgctcgtggcttggctacagcagcgccttcgcgtcctgttcgctgcgcctgccgcccgagcctgagcgtccgcgcttcgcagccttcaccgccacgctccatgccgtgggcttcgtgctgccgctggcggtgctctgcctcacctcgctccaggtgcaccgggtggcacgcagacactgccagcgcatggacaccgtcaccatgaaggcgctcgcgctgctcgccgacctgcaccccaggtattggcccagtgcatgccgacaggcccaggccagggacttgggcgctccctgggcagttggcttgaggagcctgtgggcatcaccaccgttactctgcccagagttcaccagccacagcactgcccctgcacgctgctcacaggggtttcctgttggttcattggtgcagacactgcgggggcctctgcctcctgggatatgtgctcacagtgcacagggagctttgcgcagagctgtggggtgtgcttctccgggaggggttccgcgggctctgctgtgggcggccagacacacccctcctgtgcatggctgtgggtctgaggcatctgcttgtttctgcccactgctgacccagtgcccttgcatggacttgggcttcaagtcttgagcagggtccatcccccatgctttctgctcactacttggcaggatttgtctcctgaatctctagctggtgtcgccattgttccaaattacctcctgtaggtgttcccctttcccccttggccccccacagaacacccaagaggctctcctgctcctggggtgggcaggccacgtgacttctccctccttgagggccccagccttgcccctccatcagcagcctgcctcagttgcctctgtgtggagaaggatgagccagagggaagggaggaggagctggcccttctttccagacttcctttatttcacctacaaaaaagcaagcctaccccttgttctttctctctcccccatccctctgtcctcctcaggttccaggctaaacatcctcctgaaaccctcctgtctgccctcacttcagcccctgggctctgggcctgggttctgtccccaccctgccatcatcctgaccactgtcctctgtccccacagtgtgcggcagcgctgcctcatccagcagaagcggcgccgccaccgcgccaccaggaagattggcattgctattgcgaccttcctcatctgctttgccccgtatgtcatgaccaggtgggtcctggcagtccggctcctgttgtgggaacagctgggtgggcttggcctcagttgagtaggcctctgaggtttcccagcaagatatctggagggcggccaccaccagaggaccctcctccacacctgacgggctcagggctgtgcttcagctcctgggaaagatcctgggagggaggtggcactggctcccatcctgtcctataaatgaggagactctccttgtccaggcacaggcagatatggggtctgtgaatcagcacctggctctttaaacctagaaagctttcaaaatcaggcaacctgggactaactcaggcctcagactccgcatctcctgggcgtggagttgggaatctgggtggaagctccagctggagcctcggggcagtaacactgccaggtgagtgttctctttgcttctctctttcctggagaccttggcctgagtgcttgtcaggtcagaattacctggagtcacaggtaatttgggaaagagtgtgtgtaaagggcctgctggtaccatcatcacagtgctgtgctgaggggcaggggagtctgtagtttttgcctccggggttcctgggtcacccactcggccacttggttactaccttagctccactcaaggaaatgtgtgcaccctgccttgctggaaggcaccgtggttagagggaggcaggttgtttattagagatggtgactgcttgctattacgttttgcctttcttggaatctccatggaatttctggccaggcccctgaagcgctcaggctgtctgggaggtctccaccctatgtgttgagccatagcaggaggataccctgaaggaagacgctcctgggaggggtccatggccctcatcctcaaggggcccaggtccccaccccaggggagggagccagcagggagtatagtaccaggatcctggctctgtttgtgtagggtcctcctgaggttgctatctaatgccctacaaggtctgccagcctgtccaggatgactgcttgtcttcccaggttactgggtggcttagatatgttgttgggtgggtgggggggaaacagttgtgtcccaggaacccgggaggccccagagtgcccacgctgagtggcaccagctctctcctgcctgccaggttccctctgagctcttcagaatcagcacgtgggacaggagctcttggcaccactgatcccatctggcttagggacagggagccaggtttcttgtggatcacaggcatcctccttcctcacataaaacctggcaaaggcctctggttcttaggaaacttcatgggcacaagtgtggatggggaaactgtagcatccttctcccgggaaccagctatttatctgattatcatgtttgtgtgtatgtgtgcccatgtgcctgcgcatgcatgcatgtgtatgttgtgagggttcatgtgtatacacacatgcatgtgtgtattcatacatgcacatgcatgtacatatgtgtagaaggtgagtgctaaaatttcaagagctccagcatttagttttgaaattttaaatgaatgatgagtgagactggcttactcagccatattatgttgattcatgggtgtaactgttattttcctgtgtgtttacaatgccctgaacatgtatgtgagcatgcatagctatgagtgtgcacacgagtgtaagaggaagaatcccaaacaaagtcatgaagcctgcctttgcagtgttgtttccacaatgtcgttaccaactctgggatctgggcagctcaggctctcttctctgtgaaaaatgtgggtacaatatagcactaacgaggttatatatttcttcatgcactcactaagcatttaatgagcacctactctgagctgggctttgtgcctggtcatgcagttacaaaagcaaatggaacacaggctcctctcggttctgatggtgggagatgcaggtcagcaagaccaggcaggtgtttcagtgggggaggggtcttgagggctggcgcctgggagcagcacagctggaccagtttggacggacctgcctcacaggcgcctctcacatcataggagtgaaccgaatcagaacctcactcctgagtgtgtgtggatgaggttctaatgcagttggtggcttaacccacaggaagtcagagatccaggagtgtgttgtccctgctgccccttaaaaggtagtgcactcattccagttgtcctgcaattgctaaaaatatttcagagctcttctcctgggaattgttttcagaactgggctgcattgttagactcttctgtggacatctagaaggtgaatttaatctggttagaaataactccaagtcaccttgagccagttcatgcggataaagtaggtaaaggagatgggggacatgggatttttattttgtttcttggttgtcactcttgagttttactgactcaatcagtcgtgcagatgaagcccgtggggtgtgcggcagtgagaccaggagggcagggatacagagccctcccttgtggagtctgtggtctactggagacgggggagggcagatggctacggtcacaaggtgttgagcagcagtggacacgtgagcgagccctcttctctgcagggtcatggctggtagttgatacatgagttctggtcccagtgtggctccagacacagcctcagctgggtgtttctgatgacttccacctgcaccgtggcttaactaggggatagacactctggcatgtgtgtggctttcttactcacctgcagcccagtcccctagtggctgaaagaaatgccagcctcctcagatccttcgataggaccttccttcccacttgcctgatggttggctgtgaccagtctccagtctatgcctgatggtgggctccctgtatgtgggggtgacagtgtacctgatgtgcatgtgctggccggtggcaaagccctttccggactatcacttactgtaactggatcctcaccacagcctggggtaggtggttagagccatgactgccttggatctgtgtccctgccctgatttttggattctggatgcctctgctctggctgtgcccctcaccttctctctgtcgtcacattctggccctgcccctcagcttgaggtggttgcctgcctgcctgcctgccagcctcctcatccccatcccgccggactgggtgcctcggagggagggagtcagtctgatccattgctgcaccccagcagctgctgtgtttgtgggtggtccaaactaatgagtgacccagccaaacttgtaaatcacagggctgcagtccttctgagtgggggtgggacatcctgggacagaaattcactgcctgggagatcatcaggctgtgggggaaagccctggcctttgggggccctggttcaaagccaggaactgggaggtggaacagctgccactggtcagcaagtgtgcttgtgacagctgtcagaagcctcgtcctcactctgtggcccccacctaaggctgtgctgccgctggtcagaagccttgtcctgactccatggcccctaccctaggctgtgctgagagcggaggggtccgtcagagtccccagaggcccatccccctgctgctttcccccacgcagagcccagtcccttctactctgagttctaatctgatttcagaaaagcactgggctcagacacagagtgtgagactgagcctttcttatgggagttgtgtgcctggtggtcctagagacaccctcgagcttctctgagtgatgcttcgggacagtgggtagggaagcaccctgcgtggtgtgtggtgcccgtggacatcctgtgagtgactgctgttcatgtgggtgaggtggtcacacttgctcagggtctgttctgcagcccaggttgacacctgttactccagcctggttatgagcattgttctgatctgttctcaacattgtccaggtttgggagataaatgccagaggagagtctggttgggggctcccagagctcacatctggggtgtgttggtctgcagcctggtagtggtaatggctccctcggtagctggttgtgtgtgcaggtgtccgcggcagctgtacgtgcaggtgggtggactgagctgagtgtgaggatggtgggagaaggccttggtgacggtggcagtgctgccacctactgagcacctgctgtgtggtatgcgggctgatgtcggcttgcaccgcagtcccaggactgggccttgtaatcccattttaggaagaggagcccgaggctcagggtgctggtgcagagccccctggctagtgagcatcagggctgcggtatgtacttgagtatggttctagcaccttcccccggagcgtgagtgcgtggcaggtgctgtcactgtggctgagttagctgctccgcttccccaacaggctggcggagctcgtgcccttcgtcaccgtgaacgcccagtggggcatcctcagcaagtgcctgacctacagcaaggcggtggccgacccgttcacgtactctctgctccgccggccgttccgccaagtcctggccggcatggtgcaccggctgctgaagagaaccccgcgcccagcatccacccatgacagctctctggatgtggccggcatggtgcaccagctgctgaagagaaccccgcgcccagcgtccacccacaacggctctgtggacacagagaatgattcctgcctgcagcagacacactgagggcctggcagggctcatcgcccccaccttctaagaagccctgtggaaagggcactggccctgccacagagatgccactggggacccccagacaccagtggcttgactttgagctaaggctgaagtacaggaggaggaggaggagagggccggatgtgggtgtggacagcagtagtggcggaggagagctcggggctggg

SEQ ID NO: 874 - protein, 363 aa, Homo sapiens
MGPGEALLAGLLVMVLAVALLSNALVLLCCAYSAELRTRASGVLLVNLSLGHLLLAALDMPFTLLGVMRGRTPSAPGACQVIGFLDTFLASNAALSVAALSADQWLAVGFPLRYAGRLRPRYAGLLLGCAWGQSLAFSGAALGCSWLGYSSAFASCSLRLPPEPERPRFAAFTATLHAVGFVLPLAVLCLTSLQVHRVARRHCQRMDTVTMKALALLADLHPSVRQRCLIQQKRRRHRATRKIGIAIATFLICFAPYVMTRLAELVPFVTVNAQWGILSKCLTYSKAVADPFTYSLLRRPFRQVLAGMVHRLLKRTPRPASTHDSSLDVAGMVHQLLKRTPRPASTHNGSVDTENDSCLQQTH

SEQ ID NO: 875 - DNA, 1621 bp, Homo sapiens
  source
  (1)..(1621)
  CDS (201)..(1421)
cagcctccttccacattctgctctcaggaaataagcaaggggaggatccagaagtgtcatttgacactgacgacagagtacttatttcctatgcaaaagagcccaggcagaaagacaaacctaaataagaatctaacttctgtaagaagctgtgaagagtgatgctggcagctgcctttgcagactctaactccagcagcatgaatgtgtcctttgctcacctccactttgccggagggtacctgccctctgattcccaggactggagaaccatcatcccggctctcttggtggctgtctgcctggtgggcttcgtgggaaacctgtgtgtgattggcatcctccttcacaatgcttggaaaggaaagccatccatgatccactccctgattctgaatctcagcctggctgatctctccctcctgctgttttctgcacctatccgagctacggcgtactccaaaagtgtttgggatctaggctggtttgtctgcaagtcctctgactggtttatccacacatgcatggcagccaagagcctgacaatcgttgtggtggccaaagtatgcttcatgtatgcaagtgacccagccaagcaagtgagtatccacaactacaccatctggtcagtgctggtggccatctggactgtggctagcctgttacccctgccggaatggttctttagcaccatcaggcatcatgaaggtgtggaaatgtgcctcgtggatgtaccagctgtggctgaagagtttatgtcgatgtttggtaagctctacccactcctggcatttggccttccattattttttgccagcttttatttctggagagcttatgaccaatgtaaaaaacgaggaactaagactcaaaatcttagaaaccagatacgctcaaagcaagtcacagtgatgctgctgagcattgccatcatctctgctctcttgtggctccccgaatgggtagcttggctgtgggtatggcatctgaaggctgcaggcccggccccaccacaaggtttcatagccctgtctcaagtcttgatgttttccatctcttcagcaaatcctctcatttttcttgtgatgtcggaagagttcagggaaggcttgaaaggtgtatggaaatggatgataaccaaaaaacctccaactgtctcagagtctcaggaaacaccagctggcaactcagagggtcttcctgacaaggttccatctccagaatccccagcatccataccagaaaaagagaaacccagctctccctcctctggcaaagggaaaactgagaaggcagagattcccatccttcctgacgtagagcagttttggcatgagagggacacagtcccttctgtacaggacaatgaccctatcccctgggaacatgaagatcaagagacaggggaaggtgttaaatagatttaagtttcaaagcaaaacaaactgtgattattgtatttacttgtactgctgcttatcaatattgctgactttacaaactgatataattattaccattaggaattataaaaatatttcacaatctacactttccaaatgtgcaatgtggtaagtagagaaccatgttagaagtaataattgtttcagaattagaactt

SEQ ID NO: 876 - protein, 406 aa, Homo sapiens
MNVSFAHLHFAGGYLPSDSQDWRTIIPALLVAVCLVGFVGNLCVIGILLHNAWKGKPSMIHSLILNLSLADLSLLLFSAPIRATAYSKSVWDLGWFVCKSSDWFIHTCMAAKSLTIVVVAKVCFMYASDPAKQVSIHNYTIWSVLVAIWTVASLLPLPEWFFSTIRHHEGVEMCLVDVPAVAEEFMSMFGKLYPLLAFGLPLFFASFYFWRAYDQCKKRGTKTQNLRNQIRSKQVTVMLLSIAIISALLWLPEWVAWLWVWHLKAAGPAPPQGFIALSQVLMFSISSANPLIFLVMSEEFREGLKGVWKWMITKKPPTVSESQETPAGNSEGLPDKVPSPESPASIPEKEKPSSPSSGKGKTEKAEIPILPDVEQFWHERDTVPSVQDNDPIPWEHEDQETGEGVK

SEQ ID NO: 877 - DNA, 1705 bp, Homo sapiens
  source
  (1)..(1705)
  CDS (201)..(1505)
gacaaatcacgaggacaatcgacaaaaacaactaagcgcaaagccgcccgaatccatctccctctctgtgcgtgtgccttttcaactaactttgggaactcgtatagacccagcgtcgctccccgcgccgcctcgcctccactttggtttcccgcgtcctgcccgccctcttcggtgcctcctcttcctccgggacaaggatggaggatctctttagcccctcaattctgccgccggcgcccaacatttccgtgcccatcttgctgggctggggtctcaacctgaccttggggcaaggagcccctgcctctgggccgcccagccgccgcgtccgcctggtgttcctgggggtcatcctggtggtggcggtggcaggcaacaccacagtgctgtgccgcctgtgcggcggcggcgggccctgggcgggccccaagcgtcgcaagatggacttcctgctggtgcagctggccctggcggacctgtacgcgtgcgggggcacggcgctgtcacagctggcctgggaactgctgggcgagccccgcgcggccacgggggacctggcgtgccgcttcctgcagctgctgcaggcatccgggcggggcgcctcggcccacctcgtggtgctcatcgccctcgagcgccggcgcgcggtgcgtcttccgcacggccggccgctgcccgcgcgtgccctcgccgccctgggctggctgctggcactgctgctggcgctgcccccggccttcgtggtgcgcggggactccccctcgccgctgccgccgccgccgccgccaacgtccctgcagccaggcgcgcccccggccgcccgcgcctggccgggggagcgtcgctgccacgggatcttcgcgcccctgccgcgctggcacctgcaggtctacgcgttctacgaggccgtcgcgggcttcgtcgcgcctgttacggtcctgggcgtcgcttgcggccacctactctccgtctggtggcggcaccggccgcaggcccccgcggctgcagcgccctggtcggcgagcccaggtcgagcccctgcgcccagcgcgctgccccgcgccaaggtgcagagcctgaagatgagcctgctgctggcgctgctgttcgtgggctgcgagctgccctactttgccgcccggctggcggccgcgtggtcgtccgggcccgcgggagactgggagggagagggcctgtcggcggcgctgcgcgtggtggcgatggccaacagcgctctcaatcccttcgtctacctcttcttccaggcgggcgactgccggctccggcgacagctgcggaagcggctgggctctctgtgctgcgcgccgcagggaggcgcggaggacgaggaggggccccggggccaccaggcgctctaccgccaacgctggccccaccctcattatcaccatgctcggcgggaaccgctggacgagggcggcttgcgcccaccccctccgcgccccagacccctgccttgctcctgcgaaagtgccttctaggtgcttggtggtcagagacgggtcatctgtcgctaaggcgcaacctccagggaactcgaggcctgccagggtctgtccagatcacaaggggcaggagagtctgtgagagagtgacactgaagttgtccccttcctccactctcctattcccttctcatgtttacatttccctatgctcttccagtttctcttcttcccta

SEQ ID NO: 878 - protein, 434 aa, Homo sapiens
MEDLFSPSILPPAPNISVPILLGWGLNLTLGQGAPASGPPSRRVRLVFLGVILVVAVAGNTTVLCRLCGGGGPWAGPKRRKMDFLLVQLALADLYACGGTALSQLAWELLGEPRAATGDLACRFLQLLQASGRGASAHLVVLIALERRRAVRLPHGRPLPARALAALGWLLALLLALPPAFVVRGDSPSPLPPPPPPTSLQPGAPPAARAWPGERRCHGIFAPLPRWHLQVYAFYEAVAGFVAPVTVLGVACGHLLSVWWRHRPQAPAAAAPWSASPGRAPAPSALPRAKVQSLKMSLLLALLFVGCELPYFAARLAAAWSSGPAGDWEGEGLSAALRVVAMANSALNPFVYLFFQAGDCRLRRQLRKRLGSLCCAPQGGAEDEEGPRGHQALYRQRWPHPHYHHARREPLDEGGLRPPPPRPRPLPCSCESAF

SEQ ID NO: 879 - DNA, 4213 bp, Homo sapiens
  source
  (1)..(4213)
  CDS (201)..(461)
  CDS (1398)..(1631)
  CDS (2592)..(4013)
tgatccgcccacctcggcctcccaaagtgctgggattacaggcatgagccaccgcacctggccgtgttccacttttatctattttacacactacagttcaggataagattttgttggaaacaataaaattttgttgctgaaatagatgatgaccactgatccatttcagtcttcctccactttaggaaaagaagacactgatgtctgcaggatttatgtgctgtcactgcagtgacaccttggtgattggcccagtgggcccagagcccagaccttcccatctgatatggtctcctttcattttcccaggtgtatgcgatggtgtctgtacagactactcccagtgtactcaaccttgccctccagacactcagggaaatatggggttttcatgcaggcaaaagacatggcacaagatcactgacacctgccagactcttaatgccctcaacatctttgaggtaatatcttttcttttgcaatatagattctaatgtggactctatgagcacagtggagcctcccattggcagtggatattgccctcagtaagaaagaggacgaccatgtagcagggcagcatgtagggatgggcgaatagataagcacccactagcctcactttctatgcaaaaatagccttctaaactttgggtatctgaaagtctgtgcccatggacacctggccatgtgaaggggcaggctgcaggagggccagaagggagtcctctaaagcaagggtcagcaaacttctggaaagtgacagagagaaatatttcaggctttgtgggtcacatggtctctgtcatgcctactcaactctgccattgtagcatgaaatcagctgtagacagtatttaaatgaatgggcgggctgcattccagtaaaaccttatttacaaaaaccaggcagccagcctgggtctgtagtttgccacccctgccgtaaagtgtaggaaccagagtctgaatctatgggagatactttctattgctattttcaatcttggtgttccagttgattcatccaactcgagtttcaaatttctatttttaagacagactcatggctcatgatttgcccttcataaatattacaaataagcttaaatgccactagaaatttctatatatacaggttatctgaagagatatgctgaagataacagttgttattcggagagaggggagttaaggaataggtagatgggaaggagggacttttatttgctggttcatacaacttggtattggtcaagttatttcacagcagatgtgactctgagagtgtaaaatagaaaaacattatgttaggctgtcctaagttttagtaaaggtacttttacatttaacacaaaaataaaatataaaaatttctttctttttctatattgtaggaggattcacgtttggttcagccatttgaagacaatataaaaataagtgtatatactggaaagtctgagaccataacagatatgttgctacaaaagtgtcccacagatctgtcttgtgtaattagaaacattcagcagtctccctggataccaggaaacattgccgtaattgtgcagctcttacacaacatatcaacagcaatatggacaggtgttgatgaggcaaagatgcaggtgagtgtccctgaatagttggtagagcattatctcagtgggaaaggaatgcaggtttgttggagtattctgtgagcttcttagggactaggaaccatgtctttcacatcagtatttctaatgtttagcaaagcaagtgttcagtaaatcttcattaaagaaaggatgaataagtgaatggaaaaagtaaacatttaatcaacaaatatttatagagagcacttacttggtactgtattgaactttggagtatgagttaccgatgtatcttttggctactgaatacatttaagaaacattctatgttctggagagagaaagactcttcttattttcatttgtgagtcaggataggttgctaaaatggaaaataattgaaggcaaagaaaacagccatacctatccactgcagaagcatgaaatagaacggggtccattttgcttggttttaatcttcaaagcaaagatagtaaaaagtagattcagactccagggtgaatttccaatttattatgttcttgtatagggccctgcaacacatttgggatgcaacagaggttaatcacgtgataggttctctgagcagggtaagcaagttgctagtttcgactaggtgtgatatggaggggatgatggacatgagcatgtggaaagctgcccagtggcctggctcgcaggaggccattgcataaatggagaagggcatggtgaggcaattcctttgtagctctatcatctaagtcaaacttcagtgtacatgcaagtcacctgagtatcttattaagatgcagattctgattcattaagtctggggtggggcctgagattctatattgctaagaagttcccagagtatgcctaggttgctgattggagaagcacgctttataaaggtgagtgttgaatgtgctggcagtttcagagagtggctcagtactaacactggttcttcattggcagagttacagcaccatagccaaccacattcttaacagcaaaagcatctccaactggactttcattcctgacagaaacagcagctatatcctgctacattcagtcaactcctttgcaagaaggctattcatagataaacatcctgttgacatatcagatgtcttcattcatactatgggcaccaccatatctggagataacattggaaaaaatttcactttttctatgagaattaatgataccagcaatgaagtcactgggagagtgttgatcagcagagatgaacttcggaaggtgccttccccttctcaggtcatcagcattgcatttccaactattggggctattttggaagccagtcttttggaaaatgttactgtaaatgggcttgtcctgtctgccattttgcccaaggaacttaaaagaatctcactgatttttgaaaagatcagcaagtcagaggagaggaggacacagtgtgttggctggcactctgtggagaacagatgggaccagcaggcctgcaaaatgattcaagaaaactcccagcaagctgtttgcaaatgtaggccaagcaaattgtttacctctttctcaattcttatgtcacctcacatcttagagagtctgattctgacttacatcacatatgtaggcctgggcatttctatttgcagcctgatcctttgcttgtccattgaggtcctagtctggagccaagtgacaaagacagagatcacctatttacgccatgtgtgcattgttaacattgcagccactttgctgatggcagatgtgtggttcattgtggcttcctttcttagtggcccaataacacaccacaagggatgtgtggcagccacattttttgttcatttcttttacctttctgtatttttctggatgcttgccaaggcactccttatcctctatggaatcatgattgttttccataccttgcccaagtcagtcctggtggcatctctgttttcagtgggctatggatgccctttggccattgctgccatcactgttgctgccactgaacctggcaaaggctatctacgacctgagatctgctggctcaactgggacatgaccaaagccctcctggccttcgtgatcccagctttggccatcgtggtagtaaacctgatcacagtcacactggtgattgtcaagacccagcgagctgccattggcaattccatgttccaggaagtgagagccattgtgagaatcagcaagaacatcgccatcctcacaccacttctgggactgacctggggatttggagtagccactgtcatcgatgacagatccctggccttccacattatcttctccctgctcaatgcattccaggtaagtccagatgcttctgaccaagtgcaaagtgagagaattcatgaagatgttctgtgattaggtgcttgtgacattagatttctacataaaagccaatggatttggaatagcatatggagtggggaaataaacttttgttccagagatacctggatttggatcctgactctttcatttactaataatgtataacatgatcttgggatatttactcaacttttttcaagccatattttcctcacatataaaatgagtgc

SEQ ID NO: 880 - protein, 638 aa, Homo sapiens
MSAGFMCCHCSDTLVIGPVGPEPRPSHLIWSPFIFPGVCDGVCTDYSQCTQPCPPDTQGNMGFSCRQKTWHKITDTCQTLNALNIFEEDSRLVQPFEDNIKISVYTGKSETITDMLLQKCPTDLSCVIRNIQQSPWIPGNIAVIVQLLHNISTAIWTGVDEAKMQSYSTIANHILNSKSISNWTFIPDRNSSYILLHSVNSFARRLFIDKHPVDISDVFIHTMGTTISGDNIGKNFTFSMRINDTSNEVTGRVLISRDELRKVPSPSQVISIAFPTIGAILEASLLENVTVNGLVLSAILPKELKRISLIFEKISKSEERRTQCVGWHSVENRWDQQACKMIQENSQQAVCKCRPSKLFTSFSILMSPHILESLILTYITYVGLGISICSLILCLSIEVLVWSQVTKTEITYLRHVCIVNIAATLLMADVWFIVASFLSGPITHHKGCVAATFFVHFFYLSVFFWMLAKALLILYGIMIVFHTLPKSVLVASLFSVGYGCPLAIAAITVAATEPGKGYLRPEICWLNWDMTKALLAFVIPALAIVVVNLITVTLVIVKTQRAAIGNSMFQEVRAIVRISKNIAILTPLLGLTWGFGVATVIDDRSLAFHIIFSLLNAFQVSPDASDQVQSERIHEDVL

SEQ ID NO: 881 - DNA, 37633 bp, Homo sapiens
  source
  (1)..(37633)
  CDS (201)..(278)
  CDS (7757)..(7853)
  CDS (8832)..(8939)
  CDS (17071)..(17189)
  CDS (17557)..(17663)
  CDS (24222)..(24375)
  CDS (24970)..(25129)
  CDS (29682)..(29742)
  CDS (30317)..(30386)
  CDS (30472)..(30560)
  CDS (30924)..(31062)
  CDS (32058)..(32099)
  CDS (37266)..(37433)
gcccgggaccggcagaggggtgcggcggggcgggcccaggggtctctggcggccggaagaaccgggaccctgccaggcccctcccgcgggcagggcggcccctcgccggctcctcccccaccgcccgccaccagcccgggatcagtctccgcacgcggttccgcaggtggcagcgatggcccagtcctgaactccccgccatggccggcgcccccggcccgctgcgccttgcgctgctgctgctcgggatggtgggcagggccggcccccgcccccaggtgagatccagggaccccgacgacaccgggggaggcgggtggctctgcgggctgcaggcgcagtgtcctggtggagggccccgggacttgaacgaaactccgagaccgctggcgggggcatccgaaagcctcggggggagtagggactggagacttggtgcccctgggctggaaggcccaggtgagggcttggactacagaggattccccccaaccccagcgaggcgccctcttcctcgccacccgggtccctctgcccgggcacccgctgccccgcggccgccctgcgctgacttctgctccgcttctcctttgtccccagcactttcccaactccttctaaaccgtgtcagcggccctggcacagcccggcatcctcccggactccctctgccccacagtctgacccagacccctctcccgcagtgcctccccagacaatccacctgctcaaagaccctgagaagaccctgggaggagctgagagggccagggtgcggagacccggctcctctccctttctcatcagcccccagcacagcctttgattcatggctcctggggccctgcggtggcagcttgtccttcccagtgacctcccagatggaacctaccccccgtcccctaccagcctctgtagcaaacaggcagaaggctcagtgcccccctggaagcagccaggcgcccccactcacccactctgctgacctcccattctcatcctgcactgacagcaggccccaagagaaggcatactgggacacgcaagaacacctgggctccttggtgccaccagagagcaggccacaggtggaccaccgcagcccctctctcttgcccttgttgcttttcctgccctgggatcctgggctagggacagtggtcagctgcttttgaagaggggagctgtccaaagatgctgggacttgcttgagcagagaggagacatagacttgggtggcctgtcctgggtcaggaaacaggttcttcctatcacctcccactgctacccccagacctaaagaactgagatctgtggggagtggacctgaacgaaccttgaagtttgtcccagaaccattgccttggtgagggcagactccacctcggcggaaaccccagatgtggacagacatacctctcagctaagatgccagcacatttttcagcccccagattattttccagacgcatcctctccctgcccctgttccccagcccagctgctgtcctgagccccaggagacaacctcccccttccaagacaccttcctcacagcgcccccagccaggccttggttttcctggtgcggctgggatctttcaggggccagggctgcagacccaagatgtggttcttgcccatcgttccctcctcttacggactgggttgggataggggtggaggctctgcttcctggttccatcctcctccaggccaggtttacaggtctggtttgaatgaagggaagaaagcaaagggaagaggaaagtttctgtgagctgtcttcccagaggccttattcccagaagtgtcaggctcctgaacccacactttcctctgatccgattttactccttagccccaggcctaaggcaaaagctgggcatcctgggggcataacaggattggggtggtagagaaggataggaggggacaggtcctagcagggaggggagctttgagggggtgctcttgtcatgggaaactgagctgccacagagatctgagtcacaggaggtgttaaggatagattgcaacaattatgacacaacatcatgcgtgcttataagactaaaaaatagtgtattttgcattttgttttctgtctatgaagtcaaaagggttagagttactcccctcatgttgctgatgggggaatgaaagctcagaaaaagagggtcccctgtataaagtagcccagcagttcaggagcagggaagagaaaggggtgaagggctgggctcttgacctaacacctcctactcagacgggactgaagggagacctctgagagtgagctgctcactgtcaggtctcgtgaggctggaaacagcatccctgcaggtagggggatggctgagttgacttctgaagaaggtgccctaggctactctttcattgctgctgggaaggctcattcccctaccctggtccttacctctccaataccctggtgagggagcgggcctactgaggagacaggcaagcctttgacactcaaagttaaaatcagacacaactggattcaaatatagggtctgctattagctggtgatctggagttggacacttggttatccccaatacatgtccttatctgtaaataaggatcataagctctatcacatagggttatggaggggattgagacactggcccctgaaatggcaactttagtcactttagtcaaatggcagaactgacccatttgtccttggggatccagaagtgttttccagggctgcaggatagtatgagagaggggctgttggagaccctgggtctctgtactctagtgaatggcaggtggagtccagggctgagccttgatcagtgcggacattgttctaagctgggtttcctcctggacaggacccaggctgggggctggggcaggagcaaccaagaaaccacatcctgccctcgaatgccttgcaccaaggcaaaacaggcttcctcagctgcagcctgcccctaggaaaattcctatgtgtgtgtggtggtggtggtggttggaggaggggacagagatacagacaggtagtctgagacagaccagggggagaagggagtaggctatatgaacccccagttcccaggtatgtgtgagtgaccctgtgtgtaacagtctgtgtgggaatgagtccctgtgtgtgcaacatctcagcatgcaactgtacatctgacagtgtctatgtttttgtgaccctgcatatgatactgtgtctgtgggagggtctgtgtgtgtgtgtgggggggggggcatcttggtgtgtgaatgggtgtcaactagtgtgtgtctatatgtgcaggagagatagtgtgcatgtgagagtgtctgtgtgttcctctgtgtgtgtgtgttggggacagtgtctcagcatgcgactgtgtacctggcagtctgtgagtgattgtgtgtggtgggagagagtctgtgtcagtgtctcagtattgggaatgtgcttgggggcgtgtgtgatgatgcgtgtgaccgtgtgtccacgtgggggtttttgtgactgtaagaacatgtgtgtagtattccttttcctgtcctttcgttcagatatctaaagcccttagggaaaaaaaatggattgtaagctctgagcttttgaaaaaaaagaaagaaagaaagaaaaacaaggggcggtcaaagagacaggggtctgttgatggaaggggtgatttgacttctgggaggtgacacagaggaaggaggttggggtcctgggaggagatgccagggaacctgaagggctggacttagttgggggactccagaaatttgagttggaatccctccttcctccttctgagaggccttcctgcatgtctcccacctctgtgccacctccttcccgtcaccaaaatggtccccagagaaagaaagaatctgatacacttattcgcactgagaaataggagtgcctttcagattggcagccagtgtttggagagggagccccttcctggggtgttggaaagcccaccaccccgggggcttccactccacctgcttccttctctgctgtccttccttccaacgctgcctgcttgtacagggcttgagaagtcacaaagattttcacctgctttatcttgttggatctgtgcagtttgagaagaatgatatgcccattttatggacggcagaactggcaactgatgaggaaactgaggtcctaaaagataaatcgtgtcccacagtcctgcattaacagagctgggatttagaccaagaacttataaatcgctgtccagtgctccttcctgtagaccacaccactccctcctggtgtcctctttcctgtctcctgcttcctccaaaaactcctgaatctgagggatgccccttccttcttgtaacctccaacccaggtgtcgtctccacgtgccttcatccacctcagagagatcccatgaagcctgtcaagtcttgattctagaaactgccatcctgcccttcccatggccctttagaccccctctgaccgctgctttgctctcctggtcagctctgctgccttgtgagggacagggacatctggattgcatccttcccgctacccagaacccacagccccaccttgtcaggcttgcagcagggacttatgttgtgggaggatgaaatggaggagtgggggacactggtgggcagggccttgcccctcctcacagggcatggggtccaaagcttcctccctgcttcactttgccattggctgtggttactgctggaagatctcacaaattaagcagaatgattggtcattggacatgaacatatattcatttcctctttctgggaatatgttgatcctagaagtgaggaaggggtggggccccagtccccaggaagcctggtcactccctcccactctgccctttccactaaacagtagaaatcatggggattgctgccattgactgagccttctccatgtgcccaccatcctaagcattaactcagtccccacagccatcccatgggggaggggctgctgttcccttttgcacaagtgtaagctgagcctaaaacatacaactcttgcactcggttgcaaacctaatatctgggtgacccaggtccaggcccagatctgagcccaaggccagggttgttcagcctccactatgttacctgggcacccaggccctatggcactgggtggccctagcctcatttactcagtctttccccagaccagaacctcccatctgtcccagggcccaccaccactctctccctgccccaaaaaatcctcctgataacagtccacagctctcctctgctctccggagcactgatgtccccacctttgtaccttttccctgctgtgccctcctgctgaagtgcccgccctcctccttgctagcccagtctgcctccaacccccttcaccccagccccacctcacagtccccaatccctcaggcctcttgagtctgcactgaaccctgccccaaccactccctgaacactttcacccactgccttccctgttatgtcacttgtcctgtaaagcattgacccccgagtagcctgaagactctctcaggcagggctcctgcagtcacctttatactccctgcattcccctccacccacgaccacccagaacctggcacagttatggtttctgtaaatacgaggcgtgggagaggccagaagtctgggtagtttgcactgtgtgtgcctgcaggggtgggatgaaggctcgaaggtatttagaagccctgatctggtgtagggaggggacaagatactcttactgtcaggaatccctcacctaagggggagccacagccccatcctcaggaagctccagtctgaggggagacacagccccgtcctcagggagccccagtctgaatatagttttatgtccacagctctgctcagagtaggtgacagcgctgccctggggtgcaggaggccagattggccttcatggcgctgtcgttaacccctccccccgcctctgggaagaactggcttccatacctctctgcctgccccagacacaccttctgccccagttcccagcagtgaccttgtgtgtggtctgctttcattctagaaacagaaaccaagggggatttctccgtctctctgccctccacccccagcagctgctgcatttaggggcagcatggaagagccctttacccggagaagagggaagaagtgagaagggaaacggggcggtgggggttgatccaccaggacttgctctgatgaaaactgtgccacctcctcagctgtggctaatatcatggacaacacctttgcagctgttatgtttgatttcttgttctttttttccccaagcaaatacagttgacctttgccctcagaagagctctgtccttcagggtagcccctgccgccttggcacacttatgccaaggatgctgctggggcttaaagtgagctgggcccttccatggggcctccgaggcagcaaggggtgagcaaggcaacccaagtctctcagggaggtgtgtgataagccagctagaacccgagactggatccagcatgtgcccagcacgctacaaggcaagggggcaagcttctaaaaagaagctattttaatttcagcacacgtggacatttttgtgatttcaaaaagcaaaatgttgttttaaattatgtatgggtcctacattttatacatggggctcttgggtcatttcagcatctgcagcctctgaaggacgaatatttataatttttaaggctgttcaggaaaaaactaaaaagaacgacaaccccaagacatagctgaaggaagtgcacaaaaacactcagaaggaatggtggattctcagtgggatgggtctgtttgggtctgtgtgctgaaaagccatttcggtgacctcactggaagtggaggctcagctctccctactcacaggtgagagggatccctcccattgcacgtgtgacttcagtgttctggaacctccctgaccccttcacctcatgtcctcaggactcttcctttgggtggatagaagctgggttgaatattagatttggttgctgtgtcagaggggagcacggggagggggtggggggtgctgtgttgagtgcatctgtaagtgagtgcgttttggaggaggaatgctaatggcagacatcccagctctttgtagccctgaacgccactactctccccggcccccgcacaccttgcgatattctaccatggtcactgatctgaaggactccagattctagccttaactctgcttcctgggggggctgtgcacccttgattcagttcctctcccactctggcctgtgtgtcttcttctagaatggttgaaagtgcaagaagccctcaggcaggctgactaggcgccagaaggagcttagagtcctgggccctcagaaagtctctctcctaagtgagatcagagatcacaaatgagacacacacgctcctttcctccttcacccacccacctccccaaaagcatcaatttagcagacatttgctgggtgctcgtgacacatcaagctatgcaccctgggaggaatgaagatgtcaaaccatccacctggggcccctgggtggcagtgacttattctcactctctttcagaggtggctgatgcctggcagaatttggggctttgaggtttcatggagattgagaaaccaagtgtgttagggggtgagggggcaggagaggggctggctgaacccacaggcctcccatatatgccctccccccagggtgccactgtgtccctctgggagacggtgcagaaatggcgagaataccgacgccagtgccagcgctccctgactgaggatccacctcctgccacaggtgagtccatgtaggctccccacctttagtgctccccacccaaccaacttctggaggactttgatgaactcaatgtccatggctgggagccatttgcctctataggatgccacccctgccctctgccttcatctcattgtccaagctactccttcacctggataccttcctttctgccgaccaaaatcttccttttcttcaaagtccgcggaagcactgcctcctccagaaaatcttccccaggacttctgccatcatttggcccttactcgtttgctgtagtctgctttggggttgctgtcttatttctgtcttagctgtcttatctgtgtgtccttccctgcaccgccggccagccccccagctagagcctctcagagcaggcacccggcctttccatttttgtcctcagcacctcccagcctgtgcatggactgagggctccacaaacatatttataggaataaatgtttcagggagttcacaaggtggtttaaagagcacgggattggagcccgctgggcctaggttgaaatcctgactgtaattataacacgtgacctaaagaaggttatcttaagtgagatcagaaggaaggtaagctaacatttccctctaatctgtgaagtgcaatttaagaataggcccatagggatttttcattgagcacgtactatgttccattatctatgtagcatatagtcttgatcccacaaaaccctatggggctggaaatactcctgttttacagatcaggaaacagacattaagttacttgctcaaggtcctgccactgataagtggcaagtgcccctgcttggctcttgctgggtggggaaagtgcttggcatacagtaagcattcagcagaggttagtggcatgcagcctccgaggaggggaggggtcttggggaagggagggaaagggccatggccagtcacaagcagggactcagagactgttctttctgctcccagacttgttctgcaaccggaccttcgatgaatacgcctgctggccagatggggagccaggctcgttcgtgaatgtcagctgcccctggtacctgccctgggccagcagtggtgagccccctccccgacctggtacctgccctgggccagcagtggtgaaccccctccccgacctggtatctgccctgggccagcagtggtgagccccctccccgacctgatacctgccctgggccagcagtggtgagccccctccctgacctggtacctgccctgggccagcagtggtgagccccctccctaacctggtacctgccgtgggtcagcagtggtgagccccctccctaacctggtacctgccgtgggtcagcagtggtgagccccctccctgacctggtacctgccctgggtcagcagtggtgagctccctcccccaccgtcccctgtatcgaggaggctgaggtcaaggcgctgcttcctttcctctgagacacagccctccccacccagaatgtctttaggcctcctagtgagtggtccgcctgcctttcctggggtgaggggagcagtcagtagtgataagtttcatgatggcctgaggtaccacctgggtctgggcgtgaggccagtgctggccagtgtgtggggaagggaaagtaagtgtctgaagagaaatgcgaccccttccaattcagtagtcaggaaaagagctgggtggggacagactcttgcggggagggaagctacccagggtgtctgctgtgtgtatacatgtatgtatgatatgtgtatgcaggtggcccatacctggcagtgacatttagctacttcctcactctttagaggttcactgggagaagtgatcagggcattggtggggtgacgaaccccaccagactcagccctcctcagctcactcctgcctgcaagggggaccttgtactggggaagatgtgactgggtaggtgggaaggtcatttcattgggggtacagagatttgcagaggctgcaagaggatccctgactggagggttagttaatgtgccccgctatctatcccagcctcccttgctgagcccagtttcacccaggcaccgtggaggataacaggagacaagcaccctcatggcaaggagctcccagtctccataaggggagaaaagatatttccctatcatcatcatcatcatcatcatcatcaccatcaccatcatcatcgtcatcatagccagcatttattgagtacctactgtgtgccaagtcctgccctaaaagcagggctttataactaccctgtggttatacctgctgtacagatgaggaaactgaagcacaaaaagtttaagtcacttgttccaaatgatgtggtcaatggcagagccaggatttgaatccaattcgtgctcctatcatcacaccttgaaggggctggagcccaagcagcaactggcccagaaacaagtgcgggcatgaggttatgctctggggaagccaggtgtcttcctggaggaggtggcctggtggggcccaatgtaagcttcaccttggcacgtgggactgaagtcagatgaggcccaggctggtctcctaaaagtactgtctccttgtccacactcacagtacactcacctctccccaaggagcagggagagcctgggcctagaaggaggcaggagcctgggcccatcagtggcctgccttctccaatactgcctgttggaagcactttccgtgctacactcttttcatcctcacaaccctctgaggcaagtactctgattaccctcccattttcagatggggaaactaaggcacagaggtgctcagtgacttttgcaagctcacacagccattagtgggcgacccagaagcttggtttagagtcagtgtggctaattgctacaccaaagtcttccttgggggtgtgtgtgtgtgcccttgcatgtggctctggcctggagacaggtgagtgatctggatgccctctgctgtctgggcacacctctagggacaggggtgagctgtctgccctctcctatgaactctgcaatctggtggttctgctgactagccgtgtaagcaggagcaagttgccagacctctctgtgccttggttgactcatctgggagatggtatagagccaagtgacatgggtgtcgggaggaccacagggccttgagaaatggtagctgttaatttttcccacctccctacatacctccctgacttcctgcaatacacacactttctctgcctcccatagatttgagactggcagcttggccagcgtctgctgggcctctagaccccagggagccaggcgtaggacagggcccatcactcagcactaagccacccccagctctgcctgccgcttgcagctccatccatcacctttaattttatttgagcaggaaataggtcctggtggtgcccgtttatgagcaaacatggttttattgctttctccatgaagataacggccactgcacaggccccctgccagcctttccccaaccccgtccccctgccactcaccaggctaatttactcccttttttgacacttggaatcaccgactctgctgccctctcctcactccctgagttacggatgctcagagacaactaccacaggctcaagctgcgtaattgctgcctctggcctgtcctggagctttccttggcaaaggttggcagcggaggcttccctgacccccacccaggtgtgtgggagcagttctgaagaaggggacagttctggagctttcttgggctgatcaagcgagtagcctgtggagaaacgtcacagtgtgccctggtgtcaaggagaaggaagggagttatctcaggcagggtcctggcagaaaacatgctcagttggcaatttggagagaatttaatgttggggaggggtcattttcagaggctggcaaggtaaagggaccaatgaggcatataaagcaccagggactacaacaatggaaagcttgagcacccctagacctgagaaggaagggacaagaatggggctggggggtccccatgacagctgggctacaatggagaagccacccagcagggctgtggccacagaggggacaaagtcacaggcagacttcaaatcaaggcagggagggagcaggggagaacacccagcctctctctccctctgcccttccatcttctgccaatgcctcccactggcccaacccaacagaggccagggaagccgaggggtgctgtcccatggctcaggcttctagagttcagaatggagcagaggagtggtgatctgagaaacagcaaaagtcaaaacaatcaccagacccctgagctgggttgtgttaggagctagggatgccactgagaccttagaggtgtgtgagtgtgtgcattggggagaaggggtaacccccctccatggagctgaaggtcggctcagcagcccaggcagtggtactgagggaggccagagccaccccttctgccaggagtgtggcggcattaggaaggcttccagggacaggtgacactggggccagacgtgaaagaacaggcagatgcagaagggaaaaggaagctcctccaaggaatgagggttccaggcagcaccctggacatggggccaggccacgggcctcggaactacgcagtgtcctggagaagccagccaagcccttgaattctgacccctctaattgagaacttgggtctcaggattgtgcagagagagcaggagcagatgagtcaaagacagaagatattcaaaggaaatggctggtacaaacgagactgggaggagaaggctgaagtggcttcagagagcctgttggccgcccgagggcccttcagcagcctcgtttacccacaaacagctgatctgcttgttacaaatcattccagcctcattagctacacctcctcctgatccctacctgtttgttagcttagttctaattatatgagagtcataaaatgctttaaaaataacctataactcacagttcttggaaactctggcgggtgcctcccctgagtaatgtggagcctgggggtttttacgacagcctggggttgccaaggggaaactgaggcccaagcttgtccccagaggagttctggctgaagtggtgtcacaagctccatctccagcctcagtgaaggagtgccccttcaagaaaccggcatgggggaggatgtttcaaaggtctactatgtaccgggcacttcacatgctttatcttctgggaagtcattatgcttcccattttacagataaggaaactgaggcctgaggatgtgaagggacatgctcaacatcccacagctggttgaaggcagaaccaggatttgaacttgagtctgtgttgttcagaacctgagctccttctcctaagccctgatgctctacagtacccttcaccctggccttgagctgatgccttcatttcgagcctggcctttgaccctcacctcactcccttggggaggccctgtgcctggcctctctgagtctcagcttctgcatctgtaaaatgggggcccagtagtccttgctggccacctcgttgccagggtgcaggagctaatggattcatgagcagctctccacagccctgagtgccagcatccacgtggaagggcggctgttagcttgattacaggcgccgcagcagcttccgggaggggaagtgtttaattgggggttttatttccagcagcagggtctggcttaatgaaatatccctgggcctcctggcatgtggctgccctgctgcctccctgtgttgacaagccttgagccaaatccctggctgtgatttaccagctcctcccaagtcagataaagctgggttgataagtagggctatgccctgacccaccccacctccagccaaggtgggcatctggggatcatgggcccagccaggaaccagcctggcttttaatatttgatgttaatgaagggtaattgacagatgcacttgcacaggctcactgagcgagggacacagtgatcctttgactctgtgctagtaatgcacacatctgtgcacacaccacctccccaccctcccaactggctctgaacagagggagcaggaatggtgcagcggccgggggtccacactggcaagggggcctgctgggaggagactgaatgttgagaaatctgagcccagaggaagggcagaggagaatggcacatgccacattctttcctattaacagcaagtttggctgctaacttgggacctccggaggcaaagagctggcggattttagtcttgactctgctactttctagttgatgatcttaggcaagttgtttggcttctcagaggctcagtttcttcatatgtacaatgggactaactgttcctaccttgaaaggtggttctaatgtccaaaggtgtcaggtgtacagtaggtgttcaaaaactgattctgtgaaggcacagcctatggaaagagcaagtaaggagcatgttgtgaaggaatctgcaacaaggcagtgcctactgtatgccaggccctgtgccagctgtgggaagtgcatcttactagcatcacacggttgcaggctgagtcctgggtatgcgggtctttagatggtttgtgtgcctgtggttccatggctgtgtcttcttttctctggtccctcaaccttcttcctttctccccatttcctcccatcaaagcaggctgctagtgcaggctctgacaccatctcattccgcatggagtcagctcaggtccccatcactgcttttgggggtatctacaggaaaacactgattttgcctcacgtcagaagacttggccccagtgaagaatctcaggcatccatgcagcagataagagaggcatttgtgggcttgagaggggcccttcgcgttgctaaaatcagaccacgtgcctccccttctctgccgttgggggtacacctgattttgttcataaatgcgttcgaagggtattggaacaccatcgttcccactgctgtcagtttcaccattagattttcaggtttttgtttttctcccaggtgaagtatcttttaaaatgcaggttcttccagaaggagtcatgctgcaagctgacttgccccactgtgttaccagataatttctgtgtcttgaagggggacctggttcagggtttgtttgggaaaggagctgggaaggaggagaagaaagagcagggaggctgtcctggtgtctgggatcagggttaggggagggcaaggtccattggcaggccttgctgacagtgctggaagaggctgtcaccagactctgcagtaaagttgtccctgccacattttttgctagggtgaaaaatagaactcccagactagatggttgcccctgtcctgcacccctgagggtcaggccctggggctgccacagtccccatcgtgtacacacacacacacacacacagacacataacacacacacacacacacacacacacacacacacaccccacattaatgaagcctcttctcaggagactcagttctttttttttttttttttttgaggcagagtctcactctgtcgcctaggctggagtagttagtggcttgatcttaactcactacaacctcctcctcccaagttcaagtgattttcgtgcctcagcttcctgagtagctgggactacaggcgcacgccaccatgcctggctaattttttgtatttttagtagagatggggtttcaccatgttgcccaggctggtctcgaactcttgagctcaggcaatccacctgcctcggcctcccagagtgctaggattacaggcatgagccaccacacccagccgagacccagttctgactgctgtctctccacatgaacactgagcagccactgcccccagtgggcctctggtgccttctccattctctggccttcactccctccttcctcccacagctgggaaaactggtctttaaaatcttctagtcttttagaatgttgaactcttttaaagtttgtcctggctgcagcttctctccttggtccccctgttcttcctacaggtcaatatccccccaccctctcattgtgcccttttgtcccaagttcattggccctggtgtcaaacttaagttcccctacagagaggccaggaatgaaccatttcctcctggacacaagtaagcagtggcctctatcagcctcacatcaaacctgaggccacaggccagccatctccctggtaggtggacatggggcatggtgggggacagcctctgctgggatgtgaatgggcacaggcaatgccccgccttgcctctgcagggcctgtgtttgatctctgttagtttccatctatgctcttcctttctcaggtcttttttgttttttctgtgtgagtcttgattctctgaagacagggacggtgccaccatcctcagacaggggagctccctgaggacgggggctggatccctttcctctctccaagggctatctccatttccaacctataattagagtctatgtgaaggtaggagctgggtattccctttttctatgggggatctccaaaggccaaggctgcatacgaccaagaggccgtgtactccttttagaccagggggtccttgcaggtaggtctgtgtctcctccatcagattagaacttcttatgggcagggctgtgtctctctctctctcagatcagtgctctgtcttccttcccttctcttgggaactcagtgccaaccttgttcccagggtctgctctccccaaggagtgtgggagggaggtgggcactgagtcctaaaaatcagaaatagcgagtgactgcggggcaggcacggctgctgctggtcggtgccagaccttgtcagtagtgtgatttgaggctggaggcagggacatggaactgagctaaactcctgtcatctcaaaggcatgaattcattaaactgtgtcctagggttgccgagaggcagggctgagggtggagctgaggagcccctgccttggtggccccctgtcttgtccctggaccaacagcgtatatgtcaggggaggaaggtccaggtgtgtgtgtgtgtgtttgtgtgtaaagaagggaaaaggatgtcactaactcagagtagtccattctgggggagcagggatagccctcagaatggggaggaaggggagcatctagcactgggcaggctgccctattctgggctgaggctcagggccaggtctccccaccccagtgccgcagggccacgtgtaccggttctgcacagctgaaggcctctggctgcagaaggacaactccagcctgccctggagggacttgtcggagtgcgaggagtccaagcgaggggaaagagtgagttgaggcggggttctgagccagggagcggggagccatgtcttggagcacttcactggagcaaagacccttggctttgatgggggcatctgtggtcatttcatccatctccttgcctctgggggctttgcacaccatgctttctggacaaaggtggtgtgtattcacctctctggccttggaacagggcccaagatatccaagaaccatcgccgtaggttacggttattctctttcttggtcttggtatccccggtgagtcctgacttggggccccagctctgtctctgtgccatgggaaggaagattgtgggaagagggccatgggctgcccatgtacacgtatgtcccccgtgtgccacagagctccccggaggagcagctcctgttcctctacatcatctacacggtgggctacgcactctccttctctgctctggttatcgcctctgcgatcctcctcggcttcaggtaaggtggcccggaccctgggagggggctgcttcatcctaactcccccagatagaggaatgaagcagcccaacaccaaatcaaagcaacagtgcagcacattcgtccttctctcaagagctctctacagagccctgaccgtagaatatgaggttgaaaacacaggatgtgatactgtgttcttggtctagtctccacggtgtaaaagtgtgcgtatgtactgcaaaaaagaacaaaaataccacgcaagcaccaccaacctcaaaaccttaaccgtcggtgatgggattacggaaaatcccaggagatcttctccaatgaacatgtgtaactttaataatcaagaattcagtatgattttagaaaagatcttggggattagagatcttcctccctttggagcttttcagccccagtggaaaagttcctccttagatctaacctagatgagacgttccttccaaactaggagctgggaacagagtaccaggttcttcccactcctctgcacttggagaaggggggccagggggactgggttcaaagagggaagggattctgagagaatgagacctcaggacaccaggcagcaagagcaggagaggtggcattccctctcctaccttcaaagcacctggcacagtcctgggcacacggtgctcaataaatgcattcactcaatgaatattctcctcttttattatgaattattccagtgattcaaaaatgcaatgactgatactatgatcactcatgcacacaccatccagcctaagaaataacatgtcccatagttacacttctctgggtaaccctctctgatcccatccctctccctgccctacacccatcagaggtaagccctgaatgtgcctcttttaattccgacacatttccttgtacttttaccacatttgtgagtagctatagaaatatatagcaaggttctgtgtatttttaatagtgtattgaacatatttgtcttagtcttttcctgctgctatagcaaaataccttagactgggtaatttctaaataacagaaatatattcctcacaattctgaaggctgtgaagtccaagatcaaggcaccagcagattccatgtctagtaagttcttgtcctctctttccaagatggcaccttctcactgtgtcctcacatggcagaggggcaaatgggtgaaaagctctcacaaacaccctcaggtctcttataaggtactaatcccattcgtgagggcagagccttcatcaaccttatcacctaaaggcttcaccttttcatactattgccttggggactaagtttcaacatgaattttggagtgacacaacattcaaaccatagcattctgcccctggcccccccaaattcctgtcctcctcacatacaaaatacattcatttaatcccaatggctccaaagtcttaattcatcccagcattaactttaaagtctaagtccaaagtctcatctaaatattatttaaatcaggtatgtgtgagactcaagggatgattcctcctgaaggaaatttctctctagctgtgaacttatgaaatcactgaagttatgtgcttccaaaatgaaatgttgtggcaggcattctcatttcataggacagacattcccatttcaaaagggagcaataggtctgcatgtggtggctcatgcctataatcctagctaattgagaggcgaaagtgggaagcctgcttgaggccagagattggagaccagcctgaccgatgtaagagaccattaaataaatacaattgtttatttttttatctggaaaaaaataaagaattaaaattcaaataaaaaaagagagaaataggaaggaagaaaggggtaactggtcccaagtaaatccagacttaatgggacaaacaacattaaatcttaaagcttgagaataatcttctttgactcagtgtcctgccttcctgatatggaggtgggagttgggtccccaagtctccccgaagccccactcgcacagctttgctgggttcagctcatgtggcagctctcacaggctggagttgtgtgctggtggctctaccagtctggggtcttggaggagaatcttgccccccatgactctgctagtcattgccctagtcaggactctctgtagcggccccacacctgtgccttaactactatagatttattagaaacctccactctgcctgggccctgaggctctccaggatatcctttgaaatctaggtcttcctggatttcaaagaagtaactatgttccctacagctcgtgcactctgtgtgtctgtagagttagcaccacgtgaacactgccgaggtttactgctacgtcctccagagggacggcctgagttatacctgggcccacttgagccgcagctagggtagccaaggagcactgcacccaagtgtagggagcagagacaggaggtggccctgggcagtgacttccaatgcctcacagtgtcctgggctcctcccccagaactgttctgctctcaagaccctgacatctggacctgaaagatctctgaagtgcattcagggtcattcttccattttctacccatactaattttattaaatgttcacttggccacacccttggtattgtctcctgaacatgcttttgcattctttacaatatggtcagactgaaaattttccaaatctttaagttctccttctcttttgattataaatttcatctttcatttctctcttctcatattttgctataagcagtcaagggcagccatgctgtaccctcaatactttgcttagagatttcttccaccaaatattctatttcattgctcataagtctttgctcccatgaaacacttggacatagacacaattcagccaagttatttgccactttgtaacaaaaagatggcatttcctctggtctccaatgccatgctcctcatttctatctcagacctcatcagaatggcctttactgttcatatttctaccattattatgttcacaaccacttagataatctctgtgaagattgaaatttttggccgggcgcagtggctcacgcctgtaatcccagcactttgggaggccgaggcaggtggatcatgcggtcaggagatcgagaccatcctggctagcatggtgaaaccccgtctctactaaaaatacaaaaaattagctgggtgcggtggcgggcgcctgtagtcccagctactcgggaggctgaggcaggagaatggcgtgaacctgggaggcggagtgagcagagcagtgagcagagatcgtgccactgcactccagcctgggcgacagagtgagactctgtctcaaaaaaaaaaaaaaagactgaaattttctacatagctctcatcttcttctgagctctcaccagaatcaccttgtatggcccatttgtggaaatatagacttttttctatcccaccacccagttcccaagctactgctacatttttaggtatttgttacatgactccccactctcggtaccaatttctatcttagtctgtgcctgctgttataacaaaataccttagactgggtaatttttgaaaaatagaaatttatttctcataatttagagggtgggaagcccaagatcaaggcaccagtgggtttgatgtctagtaagggcttgctctctgcttctgagatggtgtcttctcactgtgtcctcacatgatggggaaggagtgaacactatgccctcacatcacagaaggcaaaagggcaaaaagggctcacaaactcacttaggcctcttttataaggacgctaatcccattcttgagagcagagccctcatgatctaatcatcttctggaggcttcacctcttaatactatcattgcattaaggattaagttttatcatgaattttggaggaacacaacattcaaatcatagaaatatttttctgtaattttttggtccaacattatgtttgtgtgagattcattcacattgacacgagcagtcctgttttgtggatttttaaccaccattccatattccgttgtataatacagcacagtttatctgtcaaccttttaatggacatttgagttgttctctttttttctttctgaattacaaatgttgggtgcaatgtacattcttacttgtgcatttctctggggcatataactaggagtagaattgccaggtctgactaccacctgctttcgcaattttactatgttaagttgttcttcacagtggtcacaccagtttaccctctcatcagtaataaaagagagcttcctttgtctagccttctcaccaatatttagtgtcttcagacttaattgttgctaacctgaagtatgtgaaattgccttatgattttaatttgcatattccagattcccaaagagatcaagcattttttttcatgattttttctgtgagttgctttttcatatcctttgcttactttttcattggcttatttgggtttttcttttctattttacatattcattatatattctggatacttatccaggatttaccctctctttagtctgtggcttattttttcactcattttatggttttttatgcacagaagttcttcattttaatggaataaagtttatcaatttagtattgataaataaaatttatcaataaagattaagcagttgataacagttaattttattgattgctttaaaattattcattttttccaaagaacaaattctggacagtcttattaagaaatctttccttggctgggtgcggtggctcacgccagtaatcccagcactttgggaggctgaggtgggtggatcacaaggtcaggagatcgagaccatcctggctaacacagtggaaccccatctctactaaaaatacaaaaaattaggtgagcatggtggcacccgcctgtaatcccagctactcaggaggctgaggcgggagaatcacttgaacccaggaggtggaggctgcagtgagccgagatcacgtcactgcactccagcttgggcgacagagcaagattccatctcaaaaaaaaaaaaaaaaaaaaaagaaagaaagaaagaaaaagaaatctttccttaccctagtgtcataaagatggccgtctatattttctgtaagtttcagagttttgctcttccttgtggttctttgatctgcttggaattcatattgcgtatgatataaataaaggatttcatttttttttctgtatgtggaattagctgcctgagtaccatttattgatagcctttccttcccccttggtttgcaatgactgccattccatgcagcaaggctccacgtatgtatgggttggtttcagtcacctacagtttttttctgtttatctttccctgtccggataccatggtgccttagctactgtagatttactagaaatcatatagcaaaatctcctcctctgtgattctttaggagtgtctggaatattcttagccctggctcttctttataagtttttaaagttctactttaaaaataaggtagaatttttatgaatacggagagacttgactcctttaaggtagcgagtctttctatctgtgaatgtgatgtatctatctcccactagtttaagtcttcgctaatgattttaagcaagatttataaaattctccatcgagatcttacctatcttctgttagactcatttcaagctagttaattaaaaatattgcaaaagaattatttctaaacatttacttttaaatttttttaacgcaggcatatacaaacatacttatcagcaaccttgctaaactgtcttattagttctaataatttgtccatagatttcttgaattttctatgaagataatctaccatctacaaataataactattttgtttacttctgattcttgtacatttttcccttgccttattatagtgggcaggatctgtagttacaatgttgactagaagcagtgataacagacatccttattttgttcctgatttcaaaggaaatgctcccacagtttctcagttaagattgatatttgcccctggttaggtaaatagccttcattaggttaagaaatgcccctgtactttcaatttgctacacattttcacatgaaaggatattaaaactctatccaatagtttctgaattcctaccaagtgcctagtcctgctctgcctctgtgaggcatttaggatgtgggccctgtcaacaagaagcagtgttcccactggggaaactgatcctcatgcataaatctctttggttatgcaagactttgtgtcaaagaagatgctgcagagagaaggatagaatgtggatgggaggagggggcagtgactacatagcggaagccttcatggagaggcaggatttgagttggacagaaggattttcacgatgatgaggaagaagggtattcatagaagaagacacacgcacagtcccagggctggaaacatgcctaatgtgtgtgttagcttgagagcctggggttgtagagcagaactgttggctgccttgccagggaaaggccctgctttctccctcagacacctgcactgcaccaggaactacatccacctgaacctgtttgcatccttcatcctgcgagcattgtccgtcttcatcaaggacgcagccctgaagtggatgtatagcacagccgcccagcagcaccagtgggatgggctcctctcctaccaggtgtgtggtgcatccaggaccgcctcaggagggatgggcggttggaggaggcctgcctctgccaccctagacaggcctgggacaggagaagacaagagccgaacagtcctggcccttcgggagcccccagtctgatgggagaggcagttcgccttgggaccctccagtctgctgagagaggcagtctaccttagggagctcccaatctaagggaggagacactgccctagggaattctcagtctgacacaaaagagtagtctttggagacacacttgagtttgaatgtcagctctgtcacttactatctgtacacttttaggcaagtcacttacttctctgaggctgagaaataggtgagaagtcacttacttctcacctgcagggggatacattactttcttccaatcaggatagtgaggattcaatgagctaaagcagataaagtccttagcactagccctagccagagatgtgagctctctcctcctgcattaaccatggcaggatagtggctggagcaggacggggagtggtatcaagagaggcagagggcagagctgttgtccccatgacacccttcctctacccccaggactctctgagctgccgcctggtgtttctgctcatgcagtactgtgtggcggccaattactactggctcttggtggagggcgtgtacctgtacacactgctggccttctcggtcttatctgagcaatggatcttcaggctctacgtgagcataggctggggtaagaaccgccatcacccaccctggacctgtggcacgggggtgggagaccttgacccctcttctaacatggtacttggaacgcactgctgagcaaggggcaaggcccactgggtaaccctcttcctgggcacaggaccttctgccccggtgctgttaagatgccgtagggggttatggtcctcccctcctctgcataactctcctcccttaatggaagcctccaccgcatgtggccaaacaccaccctctaccactatcatgcacaccactggaggtcatggcactgttctcttaagaccacatggggacataagttcacacccagtcccgggcagcccgagggcctgagggaaatggtgagtcctgggcctcaaggtggggaggggatcaagagggtagggggctggctggggggagcctgctggtgctctgtcacatgacgatgaagaggagggctcagaggagagccaagtacagtggggcaggggggccagaggccagccaaggaaagggtggacggcggatgtgcctggagcccagctggaaatgttctagccaaaaaagtttgccaagaaccattgtgtctttttttttgctggaacatttctggttgtgcttctgcctctcaccacgtgggattgtaatgaggggcagcattggggttgggaagggggctgggatccccttcacccctgggaaaacatgcaacaggcctttctggagggacccacggtacccagagaataggccctgccctctgtcctccctaatctgccattgaatccatgagttttcctgttccacaccatcccccgccctgcttgccactccttcattcactcctccttccttcatgcgcccacctcacgctgctctgaccacggctgcccctgccacggacctccggggactttccagctcagtcacatccagactcctcttccctgacaatggtcctgtccctgagcctttgcaaggctgttctccatgcaggaatgttcagggagcatccttcccacaccagggtgtccgctgcctcttcaggaagctgcctcaggccaccagtcctcgtggttctgtgctctctgccctctcaagctctccatcccctgtccttgcacttcatttatttttactggtgttcctcagccatttttctctatacagctccccccaccccccaggagaagagtagcctgagagattttaatgtgaccagtgtcttgaggacaccaaggcccagagctggcagggccttacaggcagagcaggccctggaacccaggcctcctgactcccaggctctgggcctgcggccatcatgccctgttctcttgcctgggctgcatcccttcagtcccctgcagcacccctgagcaggctcaggcctctgcacaggtgggcaggtaggcctggctcctgctcacagatccctgctcctcacctgcctcctccactcccagaacccagtcccttccttggccttttctccccgaggcttcttcctcctgctagagcaggaggagggaggccatcgagggcagctcagggaaggctgtcttcagggtgggggacggtgtctgtccattctaggaaatagcatcagcgctgttagtgcctgtcaccatggcgacccgagggcaggaacaatcaagggacgtgtgtgatgtgtgcagaggagcgggggtggctggagtttggtggggacacactgccctagaggtctctgagtgggagatgggggagggagtgccaagtccttttcctaccacctcacaccctagctcagggctcggggtctgtgggagcacaagggcaagacccggaggacaccctgctctaatcagaacacctttttcttgaggattggggtgggggagacggagagagattcacaggttgctaggagctcagacgtgatgccaggaggccttgcccaagctgggatacttgggaaacaactttcagcttcatgtgcaagtggaagaattaaaattaggactctgacacagttggagaggtcccccaaagggcatggcagcttctgctgcagtccccaggcagttgggggcctgtagaaacccacatggaggctgtgcaagagggaggcaaatgatggttgagggaatcattacttcctggagccagttgtgtgtgtcttaatttgagcttttttctccaacctgtcttgctcgttttctaaatgggagaaagatgaagccagcagggagtgcgtaatgtttgcatgcagcagggctttcgtgactgtgttttttgaaaaggccttgttaaggaaatgctgacgatgagtgaaacttgccaggtctggctgataacatgggtgagtgccctgatcctggaaggaggtctcagagagaagggacagcagggggcgagggatacccagaaggaagcttctgcatgtgtacgtggttcaggaaatcggcatgctcttgcccagacaatgttccttcccttattggtgtgttgactcacccatcattcgttccattctcactgggcatcttctatgtggcagggcctgtaccatgtgctggggcctttggagaccatcccattccttgtccagtctcataaaggcctgttactaaagcaccgtagatgctgagaggtccgatttgtgtagaaatcaatgggccaggagagagagagctgatgaagaatgctggtccgctgggggctcctttgcctcctccatctctccctgcatcatcaggcacagtagatctgggcacacaacctgcttagtagctgctgttgagtggacactgatgtgctaaagacatagacaatggtgacaggaaaggctatgaagtggttctgtcctggaaatgtgctccaggcagagattcccaaagtcatacgtgcacactcatggtccacccaccacaccctcacacacacatgtctacataccttaatatgcacatgcttacctatctcagacacatctccaacactgagggaggggccaacggagacgagcatggagacagccagtgcagaaggccattgagggcggtgggagtgggtatgggattgcagccctgaattcgagccccacctgtgcccttctgagtccctgatccatctcctcatatgtcatgtgaggaaggaaaatccaattttaaatcaaccaacacagaccctgagctctcagggtgatctgggcattgaggctctgaaggtgagtgaggcccaggctctaccctcaaggaactgggaaccagttgtattaattctctattgctgcagaacgattaaccctgaaacttagctacttaaaacaacgaaccattgttatctcacagttcctgtggcctgcaatctcggttcaacttagctgggtaccttgtggctcaggatctcacagagaaaactctttaggcaagagcatgtggatttcctgaatcacatacacatatagaaacttccttcttgggcatcccccaccccctgctgtcccttctctctgagacctccttctaggatcagggcactctcagagaagcagccagctgtcaccagggttgctgtcatctcaaggcttaactggggatggagaatctacttccaagctcattcaagaggcagttggcaggaagccgcagttgctggccaaaggctggaggcctccatttcttgctgcagagacctccatctaggccttctgagttctctcagcacatggcaactggtttcccccagagcaagtgatcagagaaagagaaagagaatgcaaaacaagccacagtgtcttttataacaatcagaagtgacatgccatcacttctgccagaggttcctgggtcacatgaaacaatgctgatacaacgtggactaactacccaagggtatgagcacaggaggtggggatccctaggggccatcttagaggctgtctactacacaagtcaagtctcagccgagtggaaagtagtattgttgtagctgttgttattgtaggccactgcggacagttagttggtcagctggcatcaaggactgggctcctgtctccattccaggattctgccgagccctcttgaaggtgcacagtggtagggaagagatgactgaaaggacatccagtgcctttaggagttgactggcaacgtgggctgaagcaagagagaaaatgggcatcagagggttcgcctgctccttgcctcatccgtcatgctgtccccaccgcatggcccagtcccgctgctgtttgtgtgtctgtggcctggtaacttagccgggactctgagggcaagtcctgacagtgtgcctggcacacaggaggtgggggactgatgactgatgaggacctctctgtaaggaagagtctgggggtccgcatggggctcctgctgcctctgttctcccaggtgcccagaaaaaaactagaaaacatagttggaggccaggcaaggagaggggctggaagtgtgaggggcttggggcagggagaggcctcggcatgtagactgtggctctggcctgccagcccctctccccttctgtctttccctctctcttaggtgttcccctgctgtttgttgtcccctggggcattgtcaagtacctctatgaggacgaggggtgagtgtcctgctccaagggggcgggtgtgcccaggtccccatcctcaaggtccatgggattccttggtacctggggcacccatctgttgagaggataaaggggggtaccaggagcttagaaggtgaatttagttctctaatctcccctccctgcccctgcccctgcccctgcccctgtcccaggattgtttgatgactaacggaactgggtctgtggggtacatggtgccctcctgcaggtttttctgtaatatctgcaagtgaaatgtttgtgtcattttgtatatgatgctgggtacacacatgactgtgttggtaggtccttgaaagcttgtttgggggctgtgtgcatctctgtgtatgactgtgtatttggactatgcgtgtgtgttgtgtggctgtgcactggcagggctctgtgggtccatgggactggtttttgggtggctcctgggagctgtgtgtgtggcactcaacatggccatgtgcattggcggcctctgtgcctgcacctgagctgggggtcctgtgagtcctgctggatgcatgtgtgcatctctctccctccccagctgctggaccaggaactccaacatgaactactggctcattatccggctgcccattctctttgccattggggtgagtgatggtgtcagggatgggagtggcagctatgatagggctgggctggtgccccctgccaatccccggccccaccccgcaggtgaacttcctcatctttgttcgggtcatctgcatcgtggtatccaaactgaaggccaatctcatgtgcaagacagacatcaaatgcaggtgatgtaactgagctggctttactgaggaccctcagcaagtgcccctttccttctagcagagagagagagagagatcctgggatgcttagcttagagccctacactaccctctccttccacccaggcctggccttggaccccaaacccttgcttttgccctgtctctgggcagcccctggacttgttggggtcttgacctctattctttccctccaggcagcctgtcccagggtatttggggtgggagaacatccatgacccagatatcaggacttggtaggaagtggggagggtagagaaagggaagaagagtccatgggagaggtccagaatgactcgagatctctgccctgcccctcagacttgccaagtccacgctgacactcatccccctgctggggactcatgaggtcatctttgcctttgtgatggacgagcacgcccgggggaccctgcgcttcatcaagctgtttacagagctctccttcacctccttccaggtgacttcatgcttggggacacttgcttgtaaagtcctagagtgggggtgggacagacaccagcctgcatcatgcagatggaaaaggtgggaagactgggacctggaggggtgatccctgcccaaagtcacctagttggagcagagccagaactagtatccccaggtgtcccaatacctgggccagtcttctctgtaagcacatgggacaagaagccttcctggatgtagctctgggtaccagcctggcattgcagctgccatctacttggtggcgagcaccctgccaggtgctttacatgcattgtgcatttactcctcacagaacccaggagatgtgcagggttagcctcactttacagaggagactcagaggtgttaaaaccagagttacggtgtcacagtttcaaagaaaagaactgatcctctccactagcattagatgatgctaagggggtgtaaaaatacaaaaaaactggtccctgcctgcccctcaagagtgtcatgagatgcctgcacacatgtgggctcatgtgtgtgtatttacatacatgtgcagacatacagaacacaattctggagccctgggtctccttcatgaacagatggggctggagtggggaatattctccatgatcagagtcattgtacttcactggatcaggcctcctcaaggagaggttggatgtaggatctctacagcttctgggcagcttctgagcagggtctcctggaccccatggcacatgcctgggagacccatggggagaggctagctggggcctgtagccaggcctagtcgcagaggtgcaaccctggtgttccttcagaaaggaaatgagagggaagccactgccccattcctggatctgcctgggccgctggatttggggagggggttgttgaggatggagtcccaaagtgcttccgaccagggccagtctgcagggcacctccctcctgcttcctccctcttgatgtgactcttgtttccaggggctgatggtggccatattatactgctttgtcaacaatgaggtaagctctgaggagggacggtggggaccctggtgggtgggtaccatcagcccgtctggagtagtacaatggggactcccatcaatcttgccagctgaaaccccctactcacctcactgaggcactagggttgagaagccatcttgtccacagatttggttttctgtgcatggtctctctcacacatgaacacacacacacaagtacatgtacaggtataccctaatggcatgtgaccctaaggaagacccagactcatgttaaggggatcctgaatgaccctctttgcttggtggtagtgactgtcacttacaaagtgattcaacacacacatacccaagccacatgcttggggctttaataatcactatctcatttaattatgacccccacatccctcaaaaaaaaaccctgctaaaattcttatttcatattcccattttttatatatacatgaaaacactgaagatcagaaagagtcaggaacctgccctaggtttggaaatagtggcacacatcgcttcttagccttttggctaaggtgaagtgtggaaatagtggcatggcagagccaggattcaaattaattctgcattaaagcagaaagtaccccattcttcatacacacaggcaagagccctggctcactgtggggaagggggtggctttctggtgctaggatgggagaagggggttctcgctggccccacacactctcctgaaaatgtctgcaggacagcaggcctccctcccatccctgagatggtcagctcctgggaggagggcatggctgtgttcatgggcacctggaaaaggccccttccaccaaggtactcagctttggaatcccagagctcagggatgttggagtcagcacattaataggcttgtctttttctatgggtgtgggggatgcagaaaggacagtgggtggggacctgggtgtttcaaggagctatgagatggctcaaagaagcaatgtgatgtagcagaaaagatgcaaggatgcaggctttggcatcttatttggtctgatctgggccccatcacttaatgagctgtgtgactttgcctaagttacctgcccactctgaaacttagtttgctcatttacaaagtggggataatcctgtgaggattaagaaagtctgaaaaaggtgcgaaaggggaacagagaacaagtccttccttcaaggtgggatgctgaaggcccatcctagctcctcacaggtgctgcttggcatggagaaacacacaccattatctccagatgctcagtaagcaatcactattagatcagtattcagtgattcccagagacaggggcctaaggaatttcagaggatgccgtgcagagaaaatgaggctgggtgaaagggaagggaggggaatgttcccttgtccctgaggcctccccctgcttctgctgaactggctacctgtgggaagtgtggccctcagatctctaaatgggagggaaaccaaggtctcttaagggtttactgcatataaggtgctcagagtgtctcattacatccaatgctgtgcagcagatggtatccccaattcacagctaagaacgttaagcctcagcaaaatgaaatgagtagcctaattcaatagacagaagatggtagagctagtgggctgtggcgggggcaagatcccacttaatgcctcagggaagcaggtgctggggaggtgaaggcagcgccaggcaaagagtggcccataaatgggattctggctgctcctgggacaggtcttagaggacccagcggctccgtttggagggtagggcagggaacaggctcgtgacccacaggaggcagtcctggtcctcctccactgccatatcctcaaaatgagtttctttaaaactgatgcaaacgaggaagtgcaaaaacctaagctctgtgggtggcctcccctccaggaatgctctcagccagctgggtgatgcgctacccagccctgagctctgctgctttccattccagcccagtggtgatgggggcaagacagggtggcatgtatcctgtgtggggatgaggagcagaggcctgtagggagagactgaggctccctgctgccaccttgtcatcttgacccccccacgtccccgtttctcacttctctatcctctgacactgtcactgcagccctactagcagacacgtgtgcttggcttcccccccgccattgtgaacagtctcccctgacccctggctcagctgcctctccagattccatccttccaagcctagtcatctcatcacctccctcctcatgcaccacctatggctggcccacctttgtaaggggatagtacttctttgcccttggaaaaaaacttgatcctgaatcaccagggttgcacctctctgaccaggcctggctacagaccccagctagcatctccccgtggatcttccaggctagtgccacggggtccaggagaccctgctcagagaacgggagaacctgtctcccttcagagcaccagccagttcctttaaacccaccctgagactcctcatgccctggctgctccaggcacaaggacagatacatcattgtcactgggccacaaaagacacatgtggctctggggctaaggcctctgtccacaagagctgttctgcagacccagggttgccatggcaatgccaggtacttgtgacctgaggagaaaagatggcttgaatattggttctgtgtggctgccaaggcctgcaccagctgctggtgggcgtgagtggggacagggagggggaggcctgaaggtggttttgctgtagcttgtgcctgagagccacagtgaggtgactcagagccctgagtgcttgtcccagccctgccactgccgagctgtgtgacctggggcaagtcattttgcctcccttgcctctgtctccccagccgtaaatgaaggtgaatgagcttcccaattcaccccgaatcctgaggctggcatggtgcctgctggagagggaggtcaggaggggtgtgctgcactgcagaggtcgagggcagggatgaggataaaaatccgatggtggaggaggaagtgtggtggcctaagtcccagcccaggtgctcagaatctgtggtgttgtctttgtgggttcattttcatagctgaggaacagaaggaacctgatgtgagatgctcatgcatttatgtgttcattcatttggttcatttaaaacacatgtactgagcacctgctgtatgctgggcactgtgctaggttcagggatgctgagatgaagaagatgtggtcccagccctcgaggtgctcccaggtgagaggtaggagatggaccagggacaagcaggactgcaagagccacgcaggcaggaggccaggggttaggagccgggcattggaatcaggccagatctaggttcaaatcctggctgagcgacctgaggaaataaacactctgcacctcagtttcctcatctttaaatgtggagctactttgcagggttgatgtgaaagtcagctaagataattaatggaaaattctgtgcatacagtaagtgcccaataaatatggtgattttcaaggacaatcgtgattacaggggtcacagcagaggttcaggaaaagtgctgaaggagatgggggcagaaggagacactgtgtgtcagcaccctgagaagtcccataggtgtccctgaaacctctctttggtctctggtttcccggaggtgtgcctcagtttaccatctttccccccctctccagcggaagggctatgaaacaagcctggcctcctggcagctgcacaagtgggggccaccactggactcagggcccccatcccagctgtcagcatgcgctcccttcacaaagactcagccgggcagggagctggcatacaacagggtggctgtaggtggtgtctgctcagcctccttccctcccccactcaagcttgggttcatgacgctgcatgggacactggcgtcatcctggcaggcagcctctgggccatctcaactctactcagtgcagaaaatgttcttttaagggatggcatgcagccataccaggcgtcttgctgggcatagctggatggacgacaaaggaggagaggagggttgtttgcacaggggctggtggggagattggccccttatccacagccgctggcatctggctgtcttggtgacttggcctaaagggaagggcccagaccccagacactctggtgtgggaagggtggggacttcaaagaagctctggaaagcaaatgtatgggaacatcacccagaagagcagtccagaccccccaggactagcttggcaggttccagctaggcctctccagggaccagaatcactggccaccaccgggagccacagcattgccacaaaccctcaagggatgggggctccacagtgttacttggatttgtctctttctgccccaacaatctggcccccaagcatcagccctcctgagaggcttttcctgatggggaggccagagcccagcacaacagggatcctggctgactgagctcccctgggctgcacccccatggtcactgcagtgtctctctagatggcatcagttgagaagccctcactggctgccccttcctccctgctgtttcccgtctcagccacattccttccttccctccctcctcccctgtgaggtgctggggcctggagagaagccctcagggagtttagaagggtctgctgtagacaccaggaaggctgggggttgccgtcccccttctcaagcatccaagctgaaactggactgtgcgctgtaaagacagagtctctcttctctctcccatctcctgtctccctgtgtttcaccctccctctcattctcttccgttaaataatactgtgatggattgtaaaaggtacttagctgaatcacagagtttagagatggaaaagaccaattaggtcatcaagctgatctctctcctgaggagctgcagaaaataggagacaacaataaacaattttattgggatattaatttaggagcccgaaggccttgacttgtgtctcttaatataatgcagtggatttcttcccttccccactaatgtaatagtggggccattttgttagccattggtttgcatgatggctttcgtttccctccttttcccatggaaggtccagctggaatttcggaagagctgggagcgctggcggcttgagcacttgcacatccagagggacagcagcatgaagcccctcaagtgtcccaccagcagcctgagcagtggagccacggcgggcagcagcatgtacacagccacttgccaggcctcctgcagctgagactccagcgcctgccctccctggggtccttgctgcaggccgggtggccaatccaggtgggagagacactcccagggacaagggaaggaagggacacacacacacacacacacacacacacacacacacacatacatcctgctttccctccccaaacccatcagacaggtaaatgggcagtgcctcctgggaccatggac

SEQ ID NO: 882 - protein, 463 aa, Homo sapiens
MAGAPGPLRLALLLLGMVGRAGPRPQGATVSLWETVQKWREYRRQCQRSLTEDPPPATDLFCNRTFDEYACWPDGEPGSFVNVSCPWYLPWASSVPQGHVYRFCTAEGLWLQKDNSSLPWRDLSECEESKRGERSSPEEQLLFLYIIYTVGYALSFSALVIASAILLGFRHLHCTRNYIHLNLFASFILRALSVFIKDAALKWMYSTAAQQHQWDGLLSYQDSLSCRLVFLLMQYCVAANYYWLLVEGVYLYTLLAFSVLSEQWIFRLYVSIGWGVPLLFVVPWGIVKYLYEDEGCWTRNSNMNYWLIIRLPILFAIGVNFLIFVRVICIVVSKLKANLMCKTDIKCRLAKSTLTLIPLLGTHEVIFAFVMDEHARGTLRFIKLFTELSFTSFQGLMVAILYCFVNNEVQLEFRKSWERWRLEHLHIQRDSSMKPLKCPTSSLSSGATAGSSMYTATCQASCS

SEQ ID NO: 883 - DNA, 39703 bp, Homo sapiens
  source
  (1)..(39703)
  CDS (201)..(524)
  CDS (3968)..(4102)
  CDS (4517)..(4687)
  CDS (5787)..(5888)
  CDS (6700)..(6891)
  CDS (14506)..(14748)
  CDS (15377)..(15440)
  CDS (16990)..(17067)
  CDS (18612)..(18762)
  CDS (19258)..(19390)
  CDS (20773)..(20889)
  CDS (20987)..(21167)
  CDS (22295)..(22422)
  CDS (23003)..(23131)
  CDS (23354)..(23497)
  CDS (24275)..(24444)
  CDS (39365)..(39503)
gcggtggcggcgacggtggcgagagccgcgggggccgtaggaagccaaccttccctgcttctccggggccctcgccccctcctccccacaaaatcagggatggaggcgcctccccggcaccctcttagcagccctccccaggaaaagtgtcccccctgagctcctaacgctccccaacagctacccctgccccccacgccatggggcccggggccccttttgcccgggtggggtggccactgccgcttctggttgtgatggcggcaggggtggctccggtgtgggcctcccactccccccatctcccgcggcctcactcgcgggtccccccgcacccctcctcagaacggcgcgcagtgtacatcggggcactgtttcccatgagcgggggctggccagggggccaggcctgccagcccgcggtggagatggcgctggaggacgtgaatagccgcagggacatcctgccggactatgagctcaagctcatccaccacgacagcaaggtagccctggacatgggggtgggtgggaggtgggggcttgcggggcagggggccagccagctgcacgcgcccccatctgtctgagtcgtctctgggattgcgaggcagacccctcccttgtgtgactggcaggagatgggctgggggtgcaggagcttggggagagtcgcaggggctggaggtccaagatgagggtctaggggctcaagatggttaagcatgctgcaaggcagacccttctgccccgctgcgggagtctcgcagaagtgtcggggtttggagaaactggtggtggatttaaggtattaggagacactgatcctctgagggagtaaactaaccctggaatgggttgggggtggagggaatgtcagaggtggggagctggattgggggtttacatttaccatggtaacaaggtaaaatcttggcgtaggttggagctggaaggaatagggacagaatgaggaaaattttgagagacttgagagctctagtttatttatcttaacaaaacagcaaggtagtggtgagccctacctgactccttctcatccttctattcccaaccctgttgagcattcccagactgtgggatagatggcatatggtgattggggaaggctaatgatcaagaggtgggcagaggcactgggaaaatgaattggattggggatccacatgggaacccccacaatagcatggggatgaagaagagtcaacatacaaggagaagagaacagaaaagaatggcagtgggggagaggggcaaggaggtagcgtggggataatgagagatcttggggcaccttatggaacttgggtcctgaccttcccttcccttatagcattgtggcctctaggatgtgagaagggaaatgggatgtagggattagggaggtgagttgagggagagagagaaggtaagcaaatttgggtccaggggtattaggggatagcttataatgaggttttttttcccacccctctcccctacatgaataattgggggtgcagggaaggatgtgacacagggaaggagatttaagatctcaaatttatcttcactgacatgtggccccagagacttaaggaattgggttagggtgaaatagagtacacaaggtgagaatttggtgatcttaccaaatatcaaccttggggtgatccaaggatttatattcatttttagaacatcactatacacctagaaataggtgtgtgtctgggataggtgtgtgaggggacagaagtgaggttgaaggtagggtgcttgaagagaagagagcacaaggattatcaggagcttggcaagagaacttaaaatcctttttgactgttactttctcgtggttctcagccttcagtgtacataagaatcaccagaggagtttgttaaaaatacagattctagctccttggtcagggatgaatcccaagtatttatctgtatttttactaatagacatcctatcttggtggattcctgagctgtaagctaaccccagaatgcctatgggaagagcagcagggtacaggaaaataattaggtattagggtacgggaggcaggaagagaagtagaggatcagatctggtagagggtcagacttgggacagtcagagagatcattggttttggggagtggagtgtgaagaaaatgacagggagagatgggtgcaggctttatgataggggatcacaggagataggggaggcctggctgtgagctcaaactcatccaccatgacaggtgattccctggaggtggcggggagcagacgtgggacctgggagaagggaactggagaacatcagaggcatcaagcggggtgggatgggaaggcagaagaaccagaatgtgtcaattggaatgagtcggtttcctgcctgcaaatccagatccttgcaagagcaaagagagggaggagaactaaggaaatctattggggagggggagagaatcacgtggtggagagaatctgcagtgatgaatagtgtgtggaagagggaaacggttgcaagaaaaggtagataagaaatcaggaaacaaaatggggggcatgccttgccctgttgatatgtatcttatatgttcttgtatgtcctcattgttcctattaaccctgtctttagagaagtggaggggcactgaggggctgtgggagaagctgggagcaggatctggagtaatagatgtggggagagtgcaggaaggtgggtcctgagaatggtaaagatttacaaagttgccctagtgggaggcataaagagaaaaccttccaatgttgttgagcactgcccttggccagagtgagggtagggtgggcaacagagaattctcagtgactgctggttcttcagattccaacagcttcccctggctcccccttctccaacttcccaccgtgtcccaaatgtcaggcctcagtgggaggtaagcaggctccagagtgctttctttatttcctttctacttatcctcccctcctggcaacatttcaccctccttagtcccctgagccccctgtctgtgtcccctctgccctggctccccactggctgccatttcgtcttcacatgcattggggttccagcagcttctgaaatgtcatatatcagtgggaggggaacaggcagtgggagacccaaggctggctcttcctcccccatttcccctcctcccaagcttcctttcttctccagctttctgcttgtttactttccctagctccaagcctctctttaaggcacctctcaaattgtctggtttcttgagagttccattctattcattctctctgttctttcctcatcctacattcttccctacttccaccccccagtgtctttttttctaatggacctgtcaaatgtcagcgcccagcaggagggatggatcactgagcgggaccccctactggtcttgttcctgttctctctttacttatcactagctctgaaaagagaagagggaggaaacaaatggaaggtggggagaaggggtttgcagaggtgaggaaggaattttcataatatggctttgagcaagctatctggggatgtggaaagagtttaccgtattcctactgacttcttccacccactggtgtttgaagcatagaaacatggggtaaagggcttggtgacagagggaagggggatgtctgagggtgagctgaaaggaggtaaggtggtatgttcattaataccaaaggaggggtgtgcaggagaggtgatgggtaaggctccagatggaagacagagaaggaagtttaatgaaagaggagaaaaaaggcacttgacaggaagagatgccagaaaggagaagaaaacggtaattaatgatgaaagtgagtaattgagaaaggaactaatttgttcgagaaagataagagcaggaattgcagacaggggaggggccccaggagagcttgccctcatctcctcttgtctttcagtgtgatccaggccaagccaccaagtacctatatgagctgctctacaacgaccctatcaagatcatccttatgcctggctgcagctctgtctccacgctggtggctgaggctgctaggatgtggaacctcattgtggtaagcagggctatgggggtcagaagatggggtcattcccttttgagctctactgaagggacgatggcgattgtgggtttgtattgaaaaggagtgtggaggacctgctactaagattcagagtcctctgcagacctgagctaggcagcctcctagcaacagtggcctgacagtgctgcagctgacctccttcttcagaaggaattgaaattagatcagtgaaagagcatcccggttgtgaggggtgtgtgggcctttgagaatctcttttccttaggcagaccagaggtggggaggtttggagagagtaaggaagagaaacccaaaggcaggaagagggttaaaggaactcttggccactcttggtgtcctcagtgaacagaccctgttgcactcactctccctgccccacagctttcctatggctccagctcaccagccctgtcaaaccggcagcgtttccccactttcttccgaacgcacccatcagccacactccacaaccctacccgcgtgaaactctttgaaaagtggggctggaagaagattgctaccatccagcagaccactgaggtcttcacttcggtgaggaggggttgggcaaggggtaaagggacataagctcaaattccagcaccaggagatgtgacgtgagagtcacttttaggggcaagaacttgattcttcattgaaagagaacgcattccatgtggattaagtgcagttctttctgtagccaggggaaagaatgagttgagtttttgggatcctctctgtctttatgattttatgatttttttcccctgtttgatgccctgttccccagacatatagacccagaatgactcagttctgttaaagtaggttcaatccaaagtgggggcaagagatgggagcgaagatgagataggaatccaggaaggcagcagattccagaggctttcaaggggggtggtgggtgggtgtgaatgggaacagaggggatggagccagtggattacagaggagagagggagaggaaagagagagagagagaggaatgagggagaggagagagaggggcagaaaggcagctgcatggatctggtagttggtactaagagagagaagccgacagacaaggagaggttgagggggaagagggagatttggggaggtagagaggaaatacaggctctacatctgaagaaggcagtctgctccctcccttttattctattctttgggtcttctatccactgtgttcagtggccctttaatcctcccccactttcactctgattcagaccattcttctctgatcctttgtctgtctgcccatttgcctcttgaggttgacatcatgctgtctgtcccagtccttgccttgtcttttcctggttcctttatgtttctttaccccatctttgccttcagtggtaggagtgggtgaatggagtggcttcccccacacagagcctcagcaggggctcaccattcaccttcccacttggaatccacatcctaagaccagatgccttcccgaactcctcacttcagggacagaagctgttgaaggaaggttcagaatggctgcttctttgctctatctgagtattgctctgaaatccccagttaacctctctggtctttattccctcatgcaccccgtgtttttccaacttgttttttattcccacccaagactctggacgacctggaggaacgagtgaaggaggctggaattgagattactttccgccagagtttcttctcagatccagctgtgcccgtcaaaaacctgaaggtcagatggctgggagtggtgggctctgtttacggagggaccaagctgggggacagtgactggttggagaggaaagccaggcgggggcaggttttgattctctgaggcaatagcatctcctggggaagtttagctccatcttccagttgacgtttattcactatacgttgagcgttaccctgcactaagcactttgggatgggaaatcaaagctgtgaagacatctggcttagcccctcaggcattcccgggcatccctcaggagctgtttctttctctgttgtagcgccaggatgcccgaatcatcgtgggacttttctatgagactgaagcccggaaagttttttgtgaggtggagttggatctgaagagggaggggcactgggtgggagtttcccttggttttcttgtggggcctcctcttggcatctgtgcctgagttgatagcatatgatctgaggtgacgattcataggatgtctctgtctgttggctctgactgcatcccttgtctgcacacacatgatactttcttcagatctcatttttctactgctttgtgtttcctgagaagcccatgaattccatctgtcctgactggctggaaaaggccactcagaaatacaggggctggggagaaacttagaaggaagaattgtcagcctttcctactatccccaagacttgtagatttctctttttagttctactgctcttccctgattcccaagaggctaaatagtatcaagtgagataagacaaaaacaaacaaatgagcaaacaaaaactcagccattctcctctgtattcaggtgtacaaggagcgtctctttgggaagaagtacgtctggttcctcattgggtggtatgctgacaattggttcaagatctacgacccttctatcaactgcacagtggatgagatgactgaggcggtggagggccacatcacaactgagattgtcatgctgaatcctgccaatacccgcagcatttccaacatggtgagagtgtggggacttgcagtctggcacctgggagggtggagaggactgagggggccttgcaggggaaagggtggcagggagagggtgcggaatttggatataaaggagaagagggggctgtgcccaccctgaacttgtctgcattatgtttcctgtggatcctacctttgctctgacttccttgggtagagagagaaaaaaaaaaaaacgatggagttgtatgttcagtaggttcctgatgagtggaagggctgttaccatggagacgaggagcagttggtgagaagtcaggaggaaccggcattaatgataatatggatgcttgtatactcaagcacacctttacaggagcactgtgtctgggcagaattgcatttcattttcttggtgatttatgttagtgttttagagttgcttaatattcactcatgattgatatgcaattagcttggatcctgttgctttttttaatgattctttttttagaattttatgtggagaaggggcttttgaaatcatttagccccagacagctggttaatgacagacttggagcgaggaggcgcattctctgatttgagagggctggggcagccctgcagctgaggggcagaagtgagtgtgggtgtgggcacaggggaagaggcttctttgttgctcagcactacattgtaaagagtacaggaattttgggtaagctcgatacggccacctatgtgtctgcttattacaccaagtgtgtacctgctttggagagcatgttaggggtgagttaatggttgtaaagccccaaaatagcttgatttaaaaagttttactaacagtggcatttgtgtggtacttagattcatgatttcagggattctaacagcaaaactctgatgtggacttatctacattttgtagaccaggaaaatgagactcagagtggtttaatgacttgtctcaggtcatgcagctactcagcagtccagctggaattgaatcctagttaaatctggctccaaactgctctgctcatcacttcccatggaaaaccatgaagcctgactaaaaagtttgtacttttatctgctaacactgtttagctactggcaattgctgagcaaaggagaaataagatttaggaagttgactctggtggtgtgttgtgatgaaagatctgctgccacatggactctgatgatacacactgttttgggacattctaaatggactctatgttttaaggtatgttagttgaaaaatacaatgaaaaaattttggaagatcactttcctgtagagtacccaagaggtgagtcatccataaaacctgggaaagtattggaactggctaccaaagccagaaagacttgttggtgccctgagcccaggacttgccaatcgttgcttctgtcttatagcagggagctagaggaggctgacagaaaacagggatttggctggatctagtggctcacacctgtagtccccagcaccttgggaggccaaggcagaggatcactggagcccaggagttcaagaccagcctgggcaatatagtgagacccccagctctaaacaaaaagagagagagagagaacagagagatggttagggacatagagggacacctgagcattggggtgggaagacttggaaggtccctttctgactttgtgtctagagaaagatggttcctgcttttgaggccatagggcttccagtgggaccagcctaaaatgccagtggggaagccaatgttttctgaagaggatagagcagtcttaacaataggttaggggcaaaagagattatagattaatcaaacagcacaaatagaagtggatcaaagcaagggttggacctagggggccggagccatggagacttagaaaagaagcagagttgcttttattccctaaggatggccttatgtttagatcaatagttctcaaactttaacatccgtcagaaccacctggaaaggtagttagttcacaggttatcaggcccttcccctggaaattctgattcagtagatctgggctagggcctgagaactgacatttctagcaagtccctggggatgcagatgtactggtctggggatcacacctcgagaactattagttagggtagtggttttcaactactaccctagactcagacgctatactatctggaggcatttttggttgttacagttgggggtaggggatggggagggatacatgctcctgatatctaatgtgtagaagccaaagatgattctaaatatcctacaaagcacagcccctggcaacaaagaattatcttgctcaaaatgttaatagtgcagagaatgagaaaccctagtttagagaaaacatctttaggggcaatatgtggaaatggagagtgggttagagtggttttagagaaatgtagctgtgggctagaggggaatgtgggaggtggcatcctggagataagattgtgaggaaatcttgattggggtagagatcccatcagacctaggaccagtacaaactaaaaagctacctcaagatatacattttagcccactgtcaagcatccattcttgagagccagacaaggctgttaaaaaaattaggtataaatttgcacttggttgattaactaattgctgtgggttgaggggtctttattgttcagatttccttaagctgcagagtagagtgtctctttgacaatctataactgtatctttactgactcaagggggaagcattctactcttctttactcttggggtggcaggagcagtggtgcccccagtggttaggcgtgttagtggtagtgacctggcgtgagcacagggtctgaccacctgagcaggggaccgcatcgtgctgagcagattaatccctttctttctgggtgatttttttgatgccatatttaccttgaactgaagattggatagaccaatctttcaatttgaagccaaaagactactcaaagtattagcctagctgctatttgtgcaggtgctcttagagagaggcagtctcatgtacagagactgtgtagggtggctggtaagagtatggattagctctgctactcattaatagtataacttttttataggcaagttatataacttttctgtgcctcagttttcttatctctaaaatggggataataacacctcattggattgtttgaggattaaataaggtaatatagtttcctcaggaaaatgctcgatacgtcctaaggactgtatacatgttagccaccatcatcgttatcattatcatcatcatcctgtgtaaggagggatcgatatcaatgaaacatttcaacaaaagagttaagaggactcagtgatttgaaagggtctgatgtaattccaaggcttcagtctcatttactgggagctgtttgggagtaagaaaaaattgagcttcatcttggatattttgattttgagattattcatcatacattaaaaatgcctcagagtcagttagaaatatggacttgaggctgggcgcggtggctcacgcctataatcccagcactttgggaggctgaggcaggtggatcacaaggccaggagttcaagaccagcctggctaacatggtgaaaccccgtctctgctaaaaatacacaaatcagctgggtgtggtgtcgtgtgcctgtaatcccagctacttgggaggctgagacacaagaatcgcttgaacccaggaggcagaggttgcagtgagccaagatcgcactactgcactccagcctggcaacagagcaagactccatctcaaaaaaaaaaaaaaaaaaagaaagaaagaaagaaaagaaatatggacttgaaatattgggctgaaattatagatctgagtatcaataacaaagatgaggttgagagtcaaggaaattcacgtagagaaaatgtaacttacttcatacccagcatttttatacatgttctaatttcatttcatactattttagatagtattattctcattttaaagctgaataaccaactagtgaggtttaataacttgtttgagatttcatagcaggtaaaatgattagaatatgaattcatccatttatctatccaacagactttttttttttttttttttttttagtagagacggggtttcaccgtgttagccaggatggtctcgatctcctgacctcgtgatccgcccgcctcggcctcccaaaatgctgggattacaggcgtgagccaccgcgcccagcctttttttttttttttttttgaggtagagtatccctctgctgcccaggcaggagtgcagtggtacaatcgctgcagccttgacctcctgggctcaagtcatccacccacctcagcccctcccaagtaagctgggatcacagacatatgccaccaagtctggctaactttttttttttttctcgagatagagtcttgctctgttgcctaggctggagcacaatggtgtgatctcggctcactgcaacctctgcctcctgggttccagtgattctcctgcctcagccttctgaatagctgggattacgggtgcgtgccaccatgcccagataagtttttgtatttttagtggacatggggtttcaccatgttggtcaggttggtctcgaacacctaacctcatgattcaccctcctcagcctcctgaagtgctgggattacaggcgtgagccactgctccaagccaagtccggctaattttttttttttctgagatggagtcttgctctgttgcccaggctggagtgcaatggcatgatcttggctcactgcaacctccgcctcctgggttcaagcgattctccgattctcctgcctcagcctcctgagtagctgggattacgggagcccaccatcacacccagctaatttttgtatttttttttttgagacagagtttcattcttattgcccaggcttgagtgcaatggcgcgatcttggctcacagcaacctccgcctcccaggttcaagccattctcctgcctcagcctccggagtagctgggattacaggcatgcgccaccacacccggctaattttgtatttttagtagagacagggtttctccatgttgctcaggctggtctcgaactccggacctcaggtgatccacccgcctcagcctcccaaagtgcggggattacaggcgtgagccaccgtgcccagctaatttttgtatttttcatagagacagggtttcaccatgttggccaggctggtcttgaactcctgacctcatgatctgcccgccttgacctcccaaagtcctgagattacagatgtgagcctccgtgcccaggccaagtctggctaatttttaaaaaaattttgtagagttgggtcctctctgttttgcccagtcttgtctcaaactcctgggctcaaggaatcctcctgcgttggcctctgaaaatgaaaatgttgggattacaggcgtgagccccctgtgcctggctgcctttttttttttttttttttaaaggcagagtctcactccatcgcccaggctgaagtgcagtggcgtgatctctgctcactgcaacctctgcctcttgagttcaagcgattcttctacctcagcttcccaagtagctgggattacgggagcccaccaacacacccagctaatttttgtatttttagtagagacgggtttcaccaggttggccaggctgtctggaattcctgacctcaggtgatccaccctccttggcctcccaaagagctgggattacaagtgtgagccactgtgcccagcctgacttgttttttataatgccttttttttttttttttgagacggagtcttgctctgtcgcccaggctggagtgtagtggcgtcatctcagctcactgtaacctccacctcctgggttgaagtgattttctcacctcagccctcagcctcctgagtagttgggactgcaagtgcacaccaccatgcccagctaattttttgtattttagtagagatggggtttcaccatgttgcccagctggtctttaactcctgagctcaggcagtctgcttaccttggcctcccaaagtgctaggattaaaggtgtgagccactgtgcctggccttttttttttttttttttttttgagcagttttagtttcccagcagaattgagatgaaggtacagaaacttcccatatgcttcccacatgcatagccttctacattatcgacatcctccgccagagtggtacatttgttacaactgatgaacctacattgatacatcataatcacccaaagtccatagtttacattagagttcacccttggtgttatatattctatgggtttggacaaatgtataatgagacgtatctactattaaatactttacagagtattttcactggcctaatccaatggacatttattgttacttcattatggttgggcacagtgctagatgctgatgattaagagagggcatgggatttggtcttgtcctcaagggtagaacctaggcccattgcatcttcaaagcccaggctccttcaaagcccagtgtagtagcaactgctgtaccttgcctgtgccctttgcgtatctcactcctctatctctctagaaagttggagagaaaagtgagcaaggcatgaggaacaaagttatttatttattcttcattcatctatttattctttcattaccgtttgtgttaaaacattccaaacccaaacaattatttgtatggtcccctgtgtattacttgtggtttcccaagaagtagttgctaagcttttccttgtatggtttctgtgaggtaaggaaggaatgatgtgattttctccagtatgtagaatgcagttccaagaggttaagtaatttacttacagttatttagccaaacaaggttactgcaaggtatatgaagtcaggtctcttgacccagttcatgagagagttaaaggaactatcattctttttagctttcatggaaaaagaaggttgagtgttgggaggggtgtgggtaggattgataatggacttcaaaaatgtgaagggtatttctgtagttttcattcttctgaaagccttctaagaggcagtgaaccaaaagcacacaagaatggcaagaagttagcatgctgaagaaatatcctcctggctggcaagcagagtgagaagactgctatcaccttttctagaatcttttggaattgtaggagctgttagatcctgggttaactctatgaagaaagtcagaaggatcagagaacatcagtgtcacagctcttcattggaatatccatgtctcctcctttactctgctctaccttccatcctttgccactaattatccagagtgtttgtcaaaattctctgtttgcagttctgagctagcaactgtacacactaacaccatcagacacagctaatacctactctagtctagtagcttccgatctaaggcagacacatgggtatagttaaagattttgaatgtacatgtgtccaatctgacaacagtaacacaaaccatccattcaagtagaagtgattgagtcagaattggattgcaccccttcccccacacccacacacatttcagttctttcctcatgattttttcctcccaagacatcccaggaatttgtggagaaactaaccaagcgactgaaaagacaccctgaggagacaggaggcttccaggaggcaccgctggcctatgatgccatctgggccttggcactggccctgaacaagacatctggaggaggcggccgttctggtgtgcgcctggaggacttcaactacaacaaccagaccattaccgaccaaatctaccgggcaatgaactcttcgtcctttgagggtgtctctgtgagttaaaacttccttcatactcccctgtcttcccaatcttgagagagactcccaagaggcaccttctacaaacatgcattctctgtttttctcagttacttctttgcagaatcagtctccgaccagagaagtagggaccttcaaattagaagaacccatcaaagactagaggaaaaaaaatgatgtattccatttttttaaacccctcccctcatttcttttcaaactagaccaagtattcatgagtcagatgagaactataggattttgaaagacaaaacagtctgaaaggtcatcttcttattccttttaaaatgaaaagattagtttccagagagatttgctgacttgcttaggccacacaaccagaagcctgctggtgttctgtctggggattttttcccattcaaatctcataagtgaagctccttctccaaagaataatgtttctaaaatctagggtatgggcatctggggtatgtcctatatgcaggcaaatgccataaatagcattcattcagaggctcaattacatcaaaaacagaaggatttaaagagtccctgatgttctctttcactcttgcttttgtctcctttgccttgctccacatgttccttccctcagggccatgtggtgtttgatgccagcggctctcggatggcatggacgcttatcgagcagcttcagggttagtacaggggcaggaggggaccggacatgggggctaggctggggctgggctgggatgccccctggggaagaatgccagagacatcacaagattgccctggcacctcccaacttctgcccttctcttttaactctgttcatcaagcttgtaaataataataataataagcttaactacaagaagattgatgtctttgagttgcactggttttgctcttgaaaagaggtgtgcaggctgggtgtggtggctcacccctgtaatcccagcacttttgggaggccaaggcaggcagatcatgatcatggtcaggagtttgagaccagccagaccaacatggtgaaacctgtctctaccaaaaatacaaaaaaaaaaaaaaaaattagctgggtgtggtggcaggtgcctgtagtcccagctacttgggaggctgaggcaggagaatcacttgaacccaggaggcagaggttgcagtgagctgagatcacgccactgcactccagcctgggtgatagagtaagactctgtctcaaagaaaaaagaaaagaaaagagacatgcaaattaaaaacagctactctctttcccagtggcttccattaatttcaggaatttccccttgagtggcttgggttgagaggttgatgacctgtcagttagactcaagaaagctgaatctaggagaaccgctattttttttttaagggaatctgccaaatttccttgctgtgtaaagcttcaatgtgtatagcttggcttttgtagattgtattttcttgaaacttagcacacaggtatttgcagaacttctaggagttaatttttctgctccactcggctctcagtcttttacggcatggccaagagagctatttcttggcctcctgtgaaaagtttctttcttcctttctccccacctccacatcctttcagctcctctttgtatccaggacaagaggaaatggacttcagccatggtgaaaggagtgtgagttggcttttgaaggaaaagttatggtaacggaaacagttctagaacagaaatcttagaaatgaccaaattttactcaatggcgctttaagaggcagatataacttatccaaggaattaaaacccaagccaacagaagagaatgttctaaaattaaaatgaaagccactgggaaaatagagcctgcccatcatgagaggaagaataagcagaaatatgtgtaaagctttagaagccaaaatcaaagtgagagacatctcgccgagagaggtgtgaggaatggaataggtggcagacatgttgtggagcctcctcactgaagacttttaaacatagatattcttatttatttgagttgtcttgggaaccaccttatattgcttttaagtcatgttgctgattcaagagtctcgtaggtccttccaagcatccttagggcctcaggtgaaaataaaatcagatacaaccatgcaaagctctagggaagtgggaagttgaaaatgcctaggatcagctctttggctacctgtggtcactccttttattgtcgtctgcccaggtggcagctacaagaagattggctactatgacagcaccaaggatgatctttcctggtccaaaacagataaatggattggtgagtggatcttgtttgtattttccttcagcccctctcgacagtcaagggaaaaagtcatgcctttgagtgaggatggaatggtagagactgttaggttggaatgtggctggcagctgggccaggagaaagggttaagtgagagtgaatacaacccctaaggcgtgggtaggggagactggtgtatttggagagggaataggcggtggttagtactatttttaatggtgcattgctggggtaactggggattagaggcagggggtgggcagagggcgggaaatggaaactccatttgggtttcccagatgtcctggtgtcttgatatatttgaaccagctacttcaagcccagagctgtctctttgtctgtctctgtcaggaaaacggttgcttaaactatggaggaggagggaaaacctcatgtaattgtcatctgccaaaatgtgctttttatttttatatgtatttttaaaaattttcctatttttatgtaatttagaggtagacgtgcagttgtgttacatgaatatattgcatagtggtgaagtccgggcgtttagtgtgcctgtcacccgaacagtgcaccttgtacctaataggtagtattacatccctcaaaatatactttttaaagagagaaagcaagcagttattctttgtgtacttggtctaaatgataggacataggagagaaactgaaggtggacaaaaggaaggacctactgataaaagaaagcctccttgagaatgaaggggaggctcaaccattgaagatggctgccgtctgccctgcccagcagatatccagtcattcccagcactgctggagttttgcccttttttttttttttttacaattcgaatttaggacaatgttctggattgctataaatgctgcatggcctaaattattctttaaaaaaaaaactaagcaaattgaaattagttttttttggtgaactctgacaaatttgaacttccccctaataataactggaaaacatatttgggaatattaccctgccaggattaaaatttcagattagctttccttctttttttgtttgtcttaagaataggtgtccacactagatacttcaaggcctttttagctttatgattccataattgtcatttaaaactttgatttgggttataagaaaccttataacattttttaatgatccccttctttctcctcccattttcctttgctgtaagaaagacagaaaaacttaaagaacaaacaaaaacaaagactacaactttggggacatgcctcagcatttcccaacctatggatagaccattcactccatcttctcatctcatttctggttgcttcctaacggccccagtggcactgagcattctgcctgcagtaacctctgtccagtgcagttagggcctcatgtccccagccaatgactgaatgtccatcagcaatctagttctttgcccttttctcctatcccgtcttcattcctttgtcctccttcccttctcttttcccttcccctcttcctcccctgtgccatgcaggagggtcccccccagctgaccagaccctggtcatcaagacattccgcttcctgtcacagaaactctttatctccgtctcagttctctccagcctgggcattgtcctagctgttgtctgtctgtcctttaacatctacaactcacatgtccggtaagtttctcttctgacgttttccttgtctgcctctctgagatactgatcatgttcctggacaggatgagaataaaacctgtgtaactcccatggccatgtatcatggagtttttcattctgacttgttgagaatgaaaacagggaaaccagatataacccccactcctactccaaagtagctaacgggaggaaaaaagaaaagaagagaaaaaaacaacctttggggccaggtctcacagtcttggactctacataaatagcctgtattctagtgggggcctgtgcttgggaagccctctgcaactccatcttcagccccatgactgcattgctctgcctctcaaggctccactgtcttctccaatcctgtcttcctttagcccctggccctgaaattagggtcatgccattgcgtggtatttggagagctcagcctccctggagaagaggggtaattctctctccctctcaccctctccacctctgccctagttatatccagaactcacagcccaacctgaacaacctgactgctgtgggctgctcactggctttagctgctgtcttccccctggggctcgatggttaccacattgggaggaaccagtttcctttcgtctgccaggtgaggaggtggtgggcaaattccttacaggatgtgactctcccacccgtctcaggagcaccttccatgatttatgattctctgcccttcctcctcagctttccctgactcttgtccctgttctttccttctagcatcacccctctgttctctgtttggctctgtcccttctttctgtgtctgcaggccattttcattctgtagtttacttgtcagttccaaggttgccatggcaggccttgcagagaagaggagggagccattgaaggcaaaggaaggggatctgctcaaaggtctcctgaacaatggtggcttgtctgtggtatgggggctgagaatcagaactgtggactttttttgggagcctttgttgggtttggaaggatagaagcagagatggaaacacagcagagagttggggggaagggaccactgccacacagggaggaggggctctgggactgttggtacatggaaggttctagtgctgtggggagaggccagcttcaacagtgatagttgagtggttctcttttccactggtggaaacacccactctttctcctgatctgcctgcctgtccttgctctctctttttcctctgctctgtgctgtcctgatcatacatctgtgcacatggcatttccatgcacatgcacatgcagttcatcaggaatcctctgttcccagtgaggccagagtgcagctggagaagcagacaattagctgtagtgcaataggagaggttccagagtagggatctgcacaaagtgctttgggggcaaagaagggaacacagttcactgctggcgtgattgggtggacctcactgaagaggtggcatttgaatactgaaggacaaataggattttatcagctagagaaatagaggaaggctacttcaggggcatagggagcatcgtgtggctagaaaatacatgaaagagagtagatgaagagaaagtgagtagttcagcatggctggagcgtggggtaggtgtggggctgggagatgagcctagctggacaggtggatgggagcatgttgtgaagggtctgtgtcatatccagaagtgttcaggctataacttatagatattggggagtggttggaggtttttggccactaaagccaggaggttttagcaagatcaccctggtggtgtggaagtagagggtggatgggaggaattgttcaaggtggggagactgctctcctcctgccgctccccgtcctgctcacattttcgcatcctccctgtgccaccatgagctccctgcccgtgctccctgcccactctcccttagggttctgcccatccttactgcagtcccggctactactctaccctgttctgcctgtgccctctcttcctttctaggcccgcctctggctcctgggcctgggctttagtctgggctacggttccatgttcaccaagatttggtgggtccacacggtcttcacaaagaaggaagaaaagaaggagtggaggaaggtgagctgctgcccaatcctcagcccccagatccttggctcctggggcacagagcattttcccctgacgtgcctgttctccccacatatttatccagactctggaaccctggaagctgtatgccacagtgggcctgctggtgggcatggatgtcctcactctcgccatctggcagatcgtggaccctctgcaccggaccattgaggtaccactggagaggaggtgctatggtcaggagaatgagcagggctcagtggccatcagggccctggggctgtgtgtgtcttgagggatgaagctacttggagagagtgccttcctcgtattggaagctcttcctttccttcctagaaggagcccctcataggcctccagattcagctgaagaaaggaaggggtgggaatctgggaagggtgtgtagaacttccaggcatcagggaaagtggggaacaagcacctccaagggttcaggaaaacattcttaggcctagaatgagatttggcatcagcattgagggtctcataggaaaacagttggaagccagagactgagaagcgttgaggagaggaggggaggctggcaaccatctttcttgtgaccttgtttctgccctagacatttgccaaggaggaacctaaggaagatattgacgtctctattctgccccagctggagcattgcagctccaggaagatgaatacatggcttggtgtgtgggatgtgggcaaaggagggcagggatgcacaaaggcaggagggaaggcaggggtagagggcttggagggagaggggtctttggaagaggaggtagagagcttgtcaacccagtttgaacaccctactctttgttattgcactaatcttttctgagaataggggagagttgctcttttgctatgaggagcttagggcccaaagcacagaaagcacagatgaagaacttgtgttcagcagaggaacaagtgggggtaaccccacctccagacttgacattatcttttagatcccccttggccttattagcattgttcgattcatggtcacaaattgcaaacctaccctctgcctggaaagccaccttcccacctgtagggtaagggtgaggcatgtgtggcccagactggcctatttctagatattcaacaagcccttgcctgactgacagcagcttgccaccattgctttcctgtgtgaatcccaggaaaaagtgatgtggtctgggcaagttgggtggacataagggataggggacacagggtgaggtttgctaggtcagaggggttggattggagaggagggccccctttccatttcagagtaggtgaagggcagagaggggatggggattgagtgaggagcattgtggtccttgttgctcaagtgactctctcctgccatcctaggcattttctatggttacaaggggctgctgctgctgctgggaatcttccttgcttatgagaccaagagtgtgtccactgagaagatcaatgatcaccgggctgtgggcatggctatctacaatgtggcagtgagcactgaccccatggcattgaccctgtaggctgaccacagcagcccagatatagaggactaggaagaatcaatgctagatctgggatcggttgcttagaagtcttaaaaagtttgttaattcttcaggtctataaagcactttacagtttacaaagctcactacagacattgtatcattaatcttgcaactacccagtgaagtagatattagtatccccactttataggtgaggaaacagaaacacagagacgttaaattgcttgtctgtggttaatgggctggactctattgacatttcctgccagggaccgactctggaggacccggaatctgtgcatagagatcctgggagttcctgccttgaggggaggggttaaccaagagtgaaaactggtttgggacagtttgagatttttctcaatctatatttgaggatgatcctgaatttggatccttttcaaagggaaagttcaccaggaaactgtctgcatagactccctcccatgggaagtaaactctggatcttgtctgagcctgcagacctgagactccctcaatgtgtctttccctctaggtcctgtgcctcatcactgctcctgtcaccatgattctgtccagccagcaggatgcagcctttgcctttgcctctcttgccatagttttctcctcctatatcactcttgttgtgctctttgtgcccaaggtaaggatctggcttttctcccaccctctttgttcccatgttccctccatccctccttcctatattactgagttcctctgcccttccgttcaccctcctctcactcctccccttgttttgggcccaactcttatcagcattccttccacctccaaccttccatcagccagtcactagtacagtccttgctgggccaccccacgcccaaacatttgcccccagatgcgcaggctgatcacccgaggggaatggcagtcggaggcgcaggacaccatgaagacagggtcatcgaccaacaacaacgaggaggagaagtcccggctgttggagaaggagaaccgtgaactggaaaagatcattgctgaggtgcgggggtgggtgtcagggtagggtgttggagtggtccaggaggcttgcgtcttagcttgggttgtctgaagccaagcctgagatacagggtcagatgttcttggctcatggagggagggtcctaggagacaacctgtaaggagtgaatggagcagcataggggaggggaaagggctgagcaagattctatctcaggcaaaatccagtgttggcctggcaggtggaagggctctggagtgggagctatgtggttgactcagcctccttaaggcaagaggatggctgttggctgtaggtgacaactggagagaggcagctgtgagcctctagtagtcaacactcacagcagctgggtgtagcatgcagccccagcataaaggacctgggcaggcgttcactgtgccccaggctgtcattaggggctggtgcaatgccaaagagagggatgttccaactgggttgacacatctctctgatttattggaagctctgtgcactgacttttctctccttccccactttttccttttgtttttaaattctctcttatttccctgatcgcattttttctatcggtatccttatgttctctggcttttcttgttctgttttgatttctccttttaatttattctgtccacttaccctacgtcctccccctacatttttctgtgcccttcctctctttccctgtgcccttcctctctttccctcctccccactccttcatcacctcctcttctcctactatcccaattgtgcttcttcctccagaaagaggagcgtgtctctgaactgcgccatcaactccagtctcggcagcagctccgctcccggcgccacccaccgacacccccagaaccctctgggggcctgcccaggggaccccctgagccccccgaccggcttagctgtgatgggagtcgagtgcatttgctttataagtgagggtagggtgagggaggacaggccagtagggggagggaaagggagaggggaagggcaggggactcaggaagcagggggtccccatccccagctgggaagaacatgctatccaatctcatctcttgtaaatacatgtccccctgtgagttctgggctgatttgggtctctcatacctctgggaaacagacctttttctctcttactgcttcatgtaattttgtatcacctcttcacaatttagttcgtacctggcttgaagctgctcactgctcacacgctgcctcctcagcagcctcactgcatctttctcttcccatgcaacaccctcttctagttaccacggcaacccctgcagctcctctgcctttgtgctctgttcctgtccagcaggggtctcccaacaagtgctctttccaccccaaaggggcctctccttttctccactgtcataatctctttccatcttacttgcccttctatactttctcacatgtggctccccctgaattttgcttcctttgggagctcattcttttcgccaaggctcacatgctccttgcctctgctctgtgcactcacgctcagcacacatgcatcctcccctctcctgcgtgtgcccactgaacatgctcatgtgtacacacgcttttcccgtatgctttcttcatgttcagtcacatgtgctctcgggtgccctgcattcacagctacgtgtgcccctctcatggtcatgggtctgcccttgagcgtgtttgggtaggcatgtgcaatttgtctagcatgctgagtcatgtctttcctatttgcacacgtccatgtttatccatgtactttccctgtgtaccctccatgtaccttgtgtactttcttcccttaaatcatggtattcttctgacagagccatatgtaccctaccctgcacattgttatgcacttttccccaattcatgtttggtggggccatccacaccctctccttgtcacagaatctccatttctgctcagattccccccatctccattgcattcatgtactaccctcagtctacactcacaatcatcttctcccaagactgctcccttttgttttgtgtttttttgaggggaattaaggaaaaataagtgggggcaggtttggagagctgcttccagtggatagttgatgagaatcctgaccaaaggaaggcacccttgactgttgggatagacagatggacctatggggtgggaggtggtgtccctttcacactgtggtgtctcttggggaaggatctccccgaatctcaataaaccagtgaacagtgtgactcggcaccttgcagtcttcctgtgaacagaatgggcttcaatccaagaagggaggctcagaggactccaagttcatgaaaaggcattaaagcggagggtgaaaagaggtgttttattgatccattgagggcttagcagaatgaagcaggacatgattaagtctgagattagtgagtgaggacactactggttaaaagtgtgggctctggagtcagactgccagggtatcagatccaaccacatgcaaacattttcttagtctctattccccatgtcctcatttatgaaaatgagaataacagtaatacattcctccataggttgggtacaaagactattataaattgtgcattcaggtgcctaggttggcccttgggccatggtatatgttgcgtgaatgttagcctctgtccctgctgtttaatgagttccttgacagtagtgggcatgtattgggagcctggagcaagtgcctaagcatcccctctagggacgctccttcccaggaactaagaagagtaaaagaatgatgactgctagaaggtaatggatgagatggctgctgagtgcttccaaccttaaacatctttgtttaggaactctgagcatcttggaaataatttgctatcaaactgaaaaaaaatcttgaatggacaagggcaaaaacatttgcctgagactttaaacattttttgtgtcatcttggagagtgcttttttgaagctcaaattttcttttattttggcactgatttttaaagtgattctcagatttttgtaagacagctgcaagggttggatgggccctgtcattcactgacctgttaagagccaatttctgaacttccactaaagcatgggctggttgaatcttagaccagtacttgaaaaactttccactgtgattatccaccttggaccagttggacttaatttgagtctctcttcttcccacagtgaaatatccgctaggaaaagagaagaagtctatggagtagataagcctgcagtttggaaaatgaatagttggcatcagaacagcagcaggaggctgggtgtggtggctcacgcctgtaatcccagcactttgggaggctgaggtgggtggatcacgaggtcaggagttcaagaccagcctggccaagatggcgaaaccctgtctctactaaaaatacaaaaattagctgggcgtgatggtgggtgcctgtaatctcagctactcgggaggctgaggcagataattgcttgaacccaggagatgaaggttgcagtgagtttgtgccactgcactccagcctgggcgacagagtgagactgtctcaaaaaaaaaaaaaaagaaaaaaaaaaaagaaacaacagtagcaggagctatagaacagccctgggtagaacctaaaagacccaaattatcatctcaaacttgcattgcacttaagtgggctgtaaattataaacaaagggtgaaaagttctactgtggccaaaggtaagccagacactctgctagcaggagtgcaggagtcgagagccaaacggtgcggctagcagagtgcccagtgcaaaggggtgggaaggagtgagattgagaatattaaaaaggtacttagaagagaacttgtaagatttttactggccaaatttaaaacatgactgagcactatttttcatacaggcctcctactaataagaaaaacaattttgagataactacttatttgagttcacagttaatgttcctgatgattaagatcagttgcaaatgttcatctgtcaatgcttatctacaatgagacttcatgtattcatttctgaaagtgtcttttcagggtgaatggtgctattgattagcactaatactaattattagtacattatatataattacaatgagatatacacacacatacacacacacatatatacatatacacacacacaatgatatataattaatatataattgtaccccaaggggtgcaaaggagatgtgttgccaggtggagaggctaccgcttggcagttctgggaggacttgctccctgtgcactgtgaggcaggctttgcctttcagacctgcctttgggtagggttcagatcactttctaactctggaatgtcctagaatgtagactgcctgcaggcttccatgtcccctgcttttccctgacttagcctgttgcctccctgccctcctgttggttgtctaccagtagagagcactttgtgtgcacttggctgctacattagttaggtgatcttcaacaagtgttgatggtgagttgctgtggcaggtgctttttttggcactgaggcaaaatggtgagtaagatggctttcaagcgttgtaccttctcgacgtgggaagatgaccagtaagcagaaaaacaaacgagatcacttaagagagcaaccaggagtgttgggcatctcacagccattagctctggtgtgaaggacaaatctaaaagcaaggggactgtgtgttcattttctggggtcacaaaactaaggagcaaagccagtattcaaactgcatatattattatctattgccacaaaacctgttaccctaaatggcttcagacaacaataatcatttattatccatcatggtttttgtgggctagaaattcagatagggtacagtggggagggttcaccctgctccacagcatctggaagatctgaagtctgagggttgttgtccaaaagatccttcactcagcatctaaaggaggtattggctgtcagctgagacccctacacatgacctttccatgtggcctggtattcctcatgacctaatgacagttccaaaggcaagtggaggcagttgtagagagtcagccaggtttaagctgtattttttttttccctgacaaagccttgaaagtcacgtagcatcacttctgagatattccactggtccaagcagtcacaaggccatgcctaggttcaggagaggaaacacttcacctgttggtgggatgagcgtaagtcacactgtaaagagaacatgtggaatgggacaaatgtgtgttgcaggctgctttggtaaaagcagtctgctgcatctggtctgcctgctgcaaagccagtgttcacttcactttaacatgttctttgtccgccctctgagctgagcaccctagccttgtatatttgctgtcatacagcctcttaccaggccctggattcctctggatgcttgggggccagctgtgatctcaccccagcagaaaatgggaagtgttgaagatggtcctgccaattgctcctcccacagtccttggtagttttaggacaccctggataggcaacagtttgtttatccactcaggcttttgaaacagataattctgtgactttgcccttgagggaagctatcacttgacatgaagcttaccaaaaggtaggcttcatgttaagggaggctgtcacttgaaggcaggcagaaaggtgctattcattagccaccttatggtgggttcatgttaagtgacagcttccctcaaatgggatgctactcaaaatatttaaccagtatggcatccacttacatggctccctggagtgtggaaggatatgctggagactctcctggaaggtgagttcagcaccagcagcagctgtgatagggacacgtactgaggcctgtgtgggctggacactgggactgatgcagcaaagctagggagacagatgcagaagcaacgtcatgtggcctgcagagtgcattccccaggtgtgtgtagggagtgtaggaaagaaaatccttttcctcttcctgtcttaggttctccagccgtggctgtgtaaattagagtggcataagacagattaatgagagaaaaacaaatagaagtttattaacatttgcttcatgcatgtacacatgggagtacccagtggtgaacaatgcaaaggggcagttagaatttgggctcatggctgggtgtggtggctcatgcctgtaatgccagcactttgggaggctgaagctgggggatcacttcaggtcaagagtttgacaccagcctgggcaacatggtgaaaccctgtctctactaaaaatacaaaaattagccgggtgtggtggcaggcacctgtaattccagctactcggtagggtaaggcaggagaattgcttgaacctgggaggcggaggttgcagtgagcagagatcgtgccattgcactccatcctggttgacagagcgagactctgactcaaaaaaaaaaaaaaaagaatttggagctcatatagttgccccttgaacaacttggggtttagggttactgaccccacacacaaacgaaaatctgcacataactgttgactctctccaaacttagctactaatagcttactgttgactgaaagccttactagtagtgtaaacagttgatcaacacatattttgtatgctatacatcttatatatgtattcttataataaagtaagctagagaaaaggaaatgttatcaagaaaattgtaaggaaaatacatatagggtactatactgtatttattgatgccttaagtttacatcatttacatgatgaatcgtctgtctgaaatggcagcaaccccagcaacagaccttgatctatggtgtatatcaagcaattcaactttttatagagtcatgactttgcttcttgggagaacttccagcatcactgttggcacttcatatgggccctatggtgttatttaaggttcacagtattgctctagacatgatgaaatatatgcaagaatcttgagagaccactctttactgctatacacaatttactggatagatgaactgctcatgcagagatgattagtgtcacttggcattttaggcagatacttgcaacagttgagctctttgcaatagtaagaggaggtggctatcaaattacagtagaacagtatacactacagttaattttatgccgttatgatttaattctgcatcttttgttaagctttctcttgactttgagtggcttatgtatggtctgtaagtgtgtgcgtaagttttgataaattttatttattttttgagacatggtctcactctgttgcccaggctggagtgcagtggcgtgatcttggctcacttcagcctcaacctcctaggctcaggtgatcctcctacctcagcctcctgggtagctgggactgcagatacatgccaccatgccggacaaattttttgtatttttagtagagatggggttttaccatattgctcggattggtcatgaactcctggattcaagcaatctgcccacctagcctccctaagtgcctggccaaatttttggtttttatagtagatttgtgtatattttttggtagtatctacatatattttatacatttatttgttgatgaaaaaagtaaaatttgtaaaatatttgaagaggtttattctgagccattctgaggagttcctgagaacatgtgcccaaggtggttgggttacagcttggtttcatacattttagggagccagaagttgctgacaaagacataaatcaatacatgtaaggtatatattggttcagctcagaaaggcgggacatctcgaagcaagggagctcacaggtcatagggggattcagattttctgattgccaattggttgaaaaagttaagccctgcctaaagagttgaagtcagcagaaagaaatgcttgagttaagggggcgtggaggtggcgttgggggagatgtttgtggaagcaaagattcttgttacgtagatgaagcttccaggcctcagaaagaatagatggtaaatgtttcttatcgcaccttaaaagatgtcagactcattagtaaaatccctcctggatcagaaaaagacctggaaggggaaggggattctctacaaaatgcaaatccccatgacaagaaatggctttgcagagtcatttcaaaatgtcaaataagtatattttggggtaaaatactttgatttccttcagggcctgctatctgtggtgtgatgctgtatcagagtcaggttggagttgactattttattgctacagagaatcttttgtcagtcttatgatctctattgtaatgttaatgctggtcagttgtccctaaactccagaggaaggagggtatcattggcatgtcttacctttcttcctgtcagttagggggcttagaattttatttttggtttacacatgacatacttttctcttatttatttatttatttatttgagatggagtctttgtcgcccaggttggagtgcagtggcaccatctcggctcactgcaacctccgcctcctgagtttaagcgtttctcctgcctcagcctcccaagtagctgagatcacaggtgtgtgccaccacgcctggctaattttttgtattttttaagtagagacggggtttcaccgtgttagccaggatggtctcgattgcctgacctcgtgattcacctgcctcggcctcccaaagtgctgggattacaggcgtgagccaccgtgcccagccctatttatttttttaattgaggctggagtgaggtggtgcaatcacagctcactgcagcctcaaccacctgggctcaagagatcctcccacctcagcctccctagtaactgggactacaggtgcgtgccaccatgcccagttaattttttttttttttgcagagatggggtttccccatgttacccaggctggtctccaactcctgagctcaagcaatgcatccatcttggcctcccaaagttctgagattacaggcatgtgccacagcacctggcccattaatttttccagtgcttctaagctatgtggtttgtgagttttttcaaattgtcacaaatctccaaaaattttcaatatacttactgaaaaaaatcatgtgtgagtgaatccatggagttcaaatcgtgttgttcttagcaactgtataacatcttggctaggtaaaggaaaaggagtttggggcttctgggtgagtggtagatgggcaggcaagttatgggaaagtgaccaggaaaatatggaacaaagtggtttagtaaggtttgttatgtggatttaaactgtcttctccattagtagagttgtacctttacagatagaaaaggtttgttatgtagatttaaactgatgtcttctccattagtaagagttgtacctttacagatgtgaatttatttacaaaaggaaaacttgtatcctgttttacagcattcactagtctgatgattttcaattgttagctcaaaataatccacatgctaaagatagtttgaggtggcatatactggtacccttcaagggtgagcgattaattctgcataggaggagccagaaggtttccccttccctgggagatagaaggataagacagggctgggccctacacataagcatctattcatgattcggtgagcccttcagacgtttgaggtttattttattttattattatttttttgagatggagtctcactctaactcccaggctggaatgcagtggcgtgatctcggttcaccgaaacctccgcctcctgggttcaagtggttctcctacctcagcttcccaagcaaggggtttacaggcacctgccaccagccctggctattattattattattattatttgtatttttagtagagactttttaatttttattagagacttcatatttttagtagagacgaggttcttgaataatgttcctttaaggcttccaactcacatgtcatgttagaatgaatagttaagtgcctgccctcaggagacctaaatcatgtaggtttgaaacatctgtaagggatccttttttttttttttttttctggttgtattcaattcagtagcttctgtatctttctgaaataatctctaccttcctgcttaatcattttgctcctcggtgtaactccttcccccacatctccctatcttaatgcacaacatgcttatttttgtctttagccttttctgttatagaaccaaactggggtctgcttgcctggtgcaataaaaccagatacttacaccaaggattgcaccaatagaaagaaaggcatttgttgcaggacactacgcagggaggaccaggcagctaaacactcaagtcctggcctccctgatgtcttgcaggcaagggtattagcggcagaatgtatcagagttacatggcatgaaaatatgttagcagctgcgaatctgtacaggtctgcagcaacctcaatttttgcctcctcagaagaaagaatctgactgaggggcataaagcagagtaagagaccgaagcaaattttagaacaggagtaaaagtttattaaaaagctttacagcaggaacaaaataaagtaaagccaacttggaagggggccaagcaggcaacttgagagatcaagtgcgtggttttgaccttgacttagggttttatatgttggcagggttccagggtcccttctcccctgaatcttcccttggggtgggctgtctgcatgtacagtggcctgctagtgcttgggaggggctgcatgcacggtatgtttactggagtagtatgcatgctgacttgaggcattcttcccttaccagggagtgttcctataaggttataaaccagttaaatgctgtcatttctcccttagtgcccatgcatgagcccacttgcccaactcctgagatcttagtttcaggtttttctatttattgggagactgtttttccctggcacaggctgtgaccaatgattattttagagagacagcttaacaaccgcctatcacctgatggttgcctgacattcctggtggggaaggaggccctttcctgccctgctcgtgtctgactaactattgtaacatgggtttttaaaggcaggggtaaggcagtgtgcagtggctcacacctgtaatcccagcactttgagaggctgaggcaggaagatcacttgaacctaggagttcaagaacagcctgggcaacaaagtgagaccccaactctacaagaaataaaaaaattagccaaatatggtggcatatgcctgtactcccagccactcagaaggctgaggtgagaggatcccttgaatccaggaggttgaggctgcactgagccatgattatgccactgcactccagcctggacaacacggcaagaccctgtctcaaaaaacaggaaacaaaaaaaggcaggggtaaatttcagaaaagcagaagctacaaggaacattggaaatcagtgcatagaggttccacatttttttttgagatggagtcttgctcggttgcccaggctggagtgcagctgtgtgatcttggctcactgcaagctctgcctcccaggatcatgccattctcctgcctcagcctcccgagtagctaggactataggcacccaccaccacgcctggctaatttttttttttgtattttttgtagagatggggtttcaccgtgttagccaggatggtcttgatctgacctcatgatccgcccacattgcttcccaaagggctgggattacagccgtgagccaccgtgcccggcctccacattggttttgatctaaaagggtgggatatcttgaatcagggacttacaggttataggtagattcaaagatttttctggccaggtgtgggtcatgcttgtaatcccagcactttgggaggccaaggagagaggatcccttaaggccaagagtttgagaccagcctgcgaaacataacaagactctgtatctacacacacaaaattttttttaattagaggctgaggcaggagaattgcttgagcctgggtggttaagctgcagtgagctacgactgcaactgcattctggcctaagtaacagagcaaaagcctgtctcaaacaaaaacaaaaaaaccccaaatttgcaattagttaaggaagagaacctttgtttaaaaatttggggtccagtagaaaaatgttaactgcctagaaggtgttactttctccaagctcctcaggaagaaacttagaacaaaggatgatggttataaagttcagtcattttcctgtcctctgaggtctatgccagcagattcatttggtggggttccgagtttctgagagacaacgcagagacatatgttaagaggttatctttagtttctatgaggaaagcaaacctattcagaacgcttaacttccttggctattgtcttaggctgctattaccttgttgcttttcaagttgctacttatttctcagagccagctaggtgcctggaattttccttgaagaaacacaggattttgctttatttccatgcttaggagtccccaagcccctaaaaagggggtctttgcatcatctcatttctacacagtcagcaaatacttcttattttgtttactcttctgtggttcaaacctctaagaggcttccatgatcactgccgctccaagcactcacacacattattctttaattctgtattcctgtagactcttatttgctccaattcagttgtgtaactgtcatgtatgctggcactatgtgcctgaccatccctattttcactggacattgtgggggttgtgactgagtaactttatattggattttctcacagagtatccaatagatgactgtcacatggaaacaatgaatttaggataagagatgttagtcctaagtcctatgttaaaccatttattcaacaaagcagattcttttagactactttatttaattctctgttgcatttcccctagagtcagtctagaaacgattttactatatacaaacattatagcctctggctgtagggagatgataaacaggagaaaagtgtagacatttctaggtgccagtaagagaaagcagatagagggggtcatgaaaaaaaggtcttactacagtgatttgaaaagtggaattaagcttagccttacctgtagggctgagattatgattatgattatgattatttgagatagagtctcactgtgtcgccctggctggagtgcagtggcatgatctcggctcactgcaacctccgcctcccaggttctcctgccttagcctcctaagtagctgggattacaggagcacgccaccacgccaggctagttttttttttgtatttttagtagagacagggtttcaccatgttggtcaggctggtctcgaactcctgacctcgtgatccgcccgccttggcctcctaaagtgctgggattataggtgtgagccactgcgcctgactgattaggattattaaatataaaatgggggctctacattaagattagaatatgctctaataacgaggtcaaggagacaataagattaacacaaggatggctaggataaagattaggattataatagaattaatgttgctgttctgtgctgatgccaggataaatgttgaatcaaaatcattttatgttggaactagaaataaaactaagattttcctttttcttattttatcggcgtgtactcaaaagggaatttggtattgctgcccttgccagggaaaagctgggagacagcgtatgtgggattggaaccccagaaccttttatatattctctttggagagtaagattcattcattcattcattcattcacttatacatttataaaactgggtgccaattttatgcaaaattctggtccttgccttctgagagcctgaaatctagtgggtgaactaagccagaaacacacacacaatgaactgtaacacaactttttccaaaagttttattgttctgttgtttcttatgctttgaagtatttgaaaaactcttattttaaggaagtgaaaccccttcagctgggggatcatttagatatagttttagattgaaatgatttcctcaaagcttgttgagaagttgaagcttttcacctgggcctgggaggcattatttttaccaaaaggcaaggttaagagcaaggagtctggagccagttttcctgggttcaaatcctgtcttgcacatttgcaagtggtaacataaattctgtgttttagtttttacctctgaaaaaggataataatattatctgcttcatagtgttgttataagggttaaataagtcaatatgtgtaaattgcagggggttcctgactttgaccattttttgactttataataatgcaaaagagatacattcagtagaaaccgtactttgagtaccaatataaccattctgttttttcacttttagtacagtattcagtaaattacatgagatattcaaaactttattataaaatagactttgtattgaggattttgctgaactgtaggctaatgtaagtgttctgagtatgtttaaggtaggctaggctaagctatgatgtttggtaggttaggtgtatgaaatgcatattcaacttacaatattttcagtatatgataggttttttgggaggtaacatcattataagtcaaggagcatctgtactttaagtgttacttgggttaacataacaattacataaatgcttatagtatcataaccatatctatgtctttgagcaaagtacagttcggatgaccctggagcagaagtctgggatgtcacatgcaataccatatttggccggtagatgacaccaaggtccacaatgtgccagcctaaacatgaagatatttttgtgtctttttggctgctcctttacctgcgatttgtgggcattgtaagagaagaaataggactgaagaagctaagtttcctttgtaaggctcaagcctgaaatactgggatatttgattatggtgtgaaagcaacagtgtgtatttgagagttgcctgactgaaaattatggggcctggattttagttctgatgctgtggacactgtgtgttcttgggtgagtttccgaacttagctgggcttcagcttccccttctcttttgctgttatttgaggaataaaatagaatgagaatacaaaacagacatatagtgaagtgggaaaaacatgagggagaagcaaagaagatatggtaggaattagaattggaggtgaaggaatagtggggatatggcaagggaggggaattaaaaatggaagtgataaaggtaggaacatgactatggaggcgaagacttaaagtagaaaaaaatataaaatatacttgatgcctataatttttcgcataaagatacctccctttactacatttcagtcgctgtctcttgcacacatacatgcacacacacagacatgtggctttcatccattcccacaatgtaatgggtgtgaagaaggcagaggggcagggaactcaaactttctgataaaagcacatagaatctcctctcttttaaagcacattaagcagctctccctcagctttgtgtgagccccatttccttccccagcaatctcctgaatgccctggttacctccttgttcctcagggtgtatatgagagggttaagtgaaggagtgcccactgcatagaagagaccaaagaacttgcccctctcttgggcatagggatttttgggctggaggtagacagcaatgactgagctgtagaagagggtgaccacagtgagatgggaggagcaggtcccaaaagctttcctccgcccttttgcagagttaatcctcagcactgcccaggtaatggctccgtaagagacaaggatgaggctgagaggcacaaccaagatgaagacactggcaacagccacctggatctcattgtaggaggtgtcttcacaggagagtcgaattagagctgggacctcacagacaaaatcatccacctgccgatcggggcagaagggcaggtgcagggtggatggtgtctggaccactgactccactagcccaatgacccaggccacagatgccagctgccagcacaggcgggggtggatgatggtggcatagtggaggggctggcagacagccacgtagcgatcaaaagccatca

SEQ ID NO: 884 - protein, 866 aa, Homo sapiens
MGPGAPFARVGWPLPLLVVMAAGVAPVWASHSPHLPRPHSRVPPHPSSERRAVYIGALFPMSGGWPGGQACQPAVEMALEDVNSRRDILPDYELKLIHHDSKVALDMGCDPGQATKYLYELLYNDPIKIILMPGCSSVSTLVAEAARMWNLIVLSYGSSSPALSNRQRFPTFFRTHPSATLHNPTRVKLFEKWGWKKIATIQQTTEVFTSTLDDLEERVKEAGIEITFRQSFFSDPAVPVKNLKVYKERLFGKKYVWFLIGWYADNWFKIYDPSINCTVDEMTEAVEGHITTEIVMLNPANTRSISNMTSQEFVEKLTKRLKRHPEETGGFQEAPLAYDAIWALALALNKTSGGGGRSGVRLEDFNYNNQTITDQIYRAMNSSSFEGVSGHVVFDASGSRMAWTLIEQLQGGSYKKIGYYDSTKDDLSWSKTDKWIGGSPPADQTLVIKTFRFLSQKLFISVSVLSSLGIVLAVVCLSFNIYNSHVRYIQNSQPNLNNLTAVGCSLALAAVFPLGLDGYHIGRNQFPFVCQARLWLLGLGFSLGYGSMFTKIWWVHTVFTKKEEKKEWRKTLEPWKLYATVGLLVGMDVLTLAIWQIVDPLHRTIEVPLERRCYGQENEQGSVAIRALGLCIFYGYKGLLLLLGIFLAYETKSVSTEKINDHRAVGMAIYNVAVLCLITAPVTMILSSQQDAAFAFASLAIVFSSYITLVVLFVPKMRRLITRGEWQSEAQDTMKTGSSTNNNEEEKSRLLEKENRELEKIIAEKEERVSELRHQLQSRQQLRSRRHPPTPPEPSGGLPRGPPEPPDRLSCDGSRVHLLYKVNPQHCPGNGSVRDKDEAERHNQDEDTGNSHLDLIVGGVFTGESN

SEQ ID NO: 885 - DNA, 1513 bp, Homo sapiens
  source
  (1)..(1513)
  CDS (201)..(1313)
ctgataggtttttttttttttttttttcagatattctgatggcaaaacaagtggaagaaaagaggaagcatgactgcagatcagatcagttctctttgtggattatattttcagtaaaatgtatggatctatcttttccttgttcttatatctagatcatgagacttgactgaggctgtatccttatcctccatccatctatggcgaactatagccatgcagctgacaacattttgcaaaatctctcgcctctaacagcctttctgaaactgacttccttgggtttcataataggagtcagcgtggtgggcaacctcctgatctccattttgctagtgaaagataagaccttgcatagagcaccttactacttcctgttggatctttgctgttcagatatcctcagatctgcaatttgtttcccatttgtgttcaactctgtcaaaaatggttctacctggacttatgggactctgacttgcaaagtgattgcctttctgggggttttgtcctgtttccacactgctttcatgctcttctgcatcagtgtcaccagatatttagctatcgcccatcaccgcttctatacaaagaggctgaccttttggacgtgtctggctgtgatctgtatggtgtggactctgtctgtggccatggcatttcccccggttttagacgtgggcacttactcattcattagggaggaagatcaatgcaccttccaacaccgctccttcagggctaatgattccttaggatttatgctgcttcttgctctcatcctcctagccacacagcttgtctacctcaagctgatatttttcgtccacgatcgaagaaaaatgaagccagtccagtttgtagcagcagtcagccagaactggacttttcatggtcctggagccagtggccaggcagctgccaattggctagcaggatttggaaggggtcccacaccacccaccttgctgggcatcaggcaaaatgcaaacaccacaggcagaagaaggctattggtcttagacgagttcaaaatggagaaaagaatcagcagaatgttctatataatgacttttctgtttctaaccttgtggggcccctacctggtggcctgttattggagagtttttgcaagagggcctgtagtaccagggggatttctaacagctgctgtctggatgagttttgcccaagcaggaatcaatccttttgtctgcattttctcaaacagggagctgaggcgctgtttcagcacaacccttctttactgcagaaaatccaggttaccaagggaaccttactgtgttatatgagggagcatctgtaaatctttagccttgtgaaaactaaccttctctgctgagcaattgtggcccatagccatattttgagaagaaattcaagaatggaatcagcagttttaaggatttgggcaacattctgcagtctttgcaatagttcacctataatcctattttaaatctcagagtgatcctgctgactgccagcaaag

SEQ ID NO: 886 - protein, 370 aa, Homo sapiens
MANYSHAADNILQNLSPLTAFLKLTSLGFIIGVSVVGNLLISILLVKDKTLHRAPYYFLLDLCCSDILRSAICFPFVFNSVKNGSTWTYGTLTCKVIAFLGVLSCFHTAFMLFCISVTRYLAIAHHRFYTKRLTFWTCLAVICMVWTLSVAMAFPPVLDVGTYSFIREEDQCTFQHRSFRANDSLGFMLLLALILLATQLVYLKLIFFVHDRRKMKPVQFVAAVSQNWTFHGPGASGQAAANWLAGFGRGPTPPTLLGIRQNANTTGRRRLLVLDEFKMEKRISRMFYIMTFLFLTLWGPYLVACYWRVFARGPVVPGGFLTAAVWMSFAQAGINPFVCIFSNRELRRCFSTTLLYCRKSRLPREPYCVI

SEQ ID NO: 887 - DNA, 967 bp, Homo sapiens
  source
  (1)..(967)
  CDS (201)..(767)
ctctctcctacaattaaaagtgaatcattccagccagcgcagtggctcacacacctgtaatcccagggctttggaaggctgaggtggaaggatcacttgagcccaggagttagagaccagcctgggcaacaaagtgagaccctgtttctaaaaaacacataatttaaattttaaaaaataaatgaaaatcctccaataacatgcagcctcttctgtatgaagccaaaacttccttacaaggcacaaaggtgctttccccttgttccttcccatgccctcaactccccagccccctcccagcctgccttgcacccagccctaggcagccacattcttggtgctttctgcctattgttcttggtgctgttcttggtgcttctgcctatagttcttggtgctgttcttggtgctcctgcctattgttcttcgtgctgttcttggtgctcctgcctattgttcctggtgctgttcttggtgctcctgcctattgttcttggtgctgttcttggtgctcctgcctattgttcctggtgctgttcttggtgcttctgccttttgttcctggtgctgttcttggtgcttctgccttttgttcctggtactgttcttggtgctcctgcctattgctcttggtgcttttcttggtgctcttgcctattgttcttggtgccgttcttggtgcttctgcctattgttcttggtgctgttcttggtgcttctgcctattgttcctggtgctgttcttggtgtttctgctattcctgtaacctgcaaggcttttctccacactacaccatggaaagtcctctctagtaaaccgtagcccagcagaaccactcgtgagtcctgtgattccttccaaaccactagacctggggcaccttgggccccagcatggtgcctcactgattttggactgggcacaacacgattcatccaaacaccacttgacaaaggccagcaggac

SEQ ID NO: 888 - protein, 188 aa, Homo sapiens [sequence omitted]

SEQ ID NO: 889 - DNA, 12596 bp, Homo sapiens
  source
  (1)..(12596)
  CDS (201)..(240)
  CDS (962)..(1276)
  CDS (6614)..(6713)
  CDS (11526)..(12396)
atagatgtggaagtgttatgttaaatgctatgcaggcagaacagctgatcatgggatgggaggaggcaaaggttgagcaggagcccctgctttggatgttctgctgaatgtgatgtgcctcttctccttagccctggttcacagttccccttcattctccctttctctactgccttcttgcctttctcaactaaagttccatggaggagatgaaggggaacgacatcaaagagtttgagggtataataattgggtcccagcagaaaacaaatggtgcactcagaaagggtttaactgaacagagtttaatggaagaagagagggttaagagaaccagccagaaacggtgaagcacccagggactcacaaccacaggaagctgttaccattgagtgcaaggagagggaagagtgttactgtagtcaggtgagggctagagccatgaaaggggactcacccaataggagcaggctgtggctatagggaaaaacagctgctgaaagaattgggccaggcaggaagggaatcagaagacaaacaccctgacctctctctctgctcctgccctcccatctccttcagggcctggcattggctgaacccagctagaagccagaagacaagggaaccagggcaatgcagaacttagaggttagcctctggggcacacaggagggccaagaaagttggaacctaaatgggatgggggagttaataaagaaaaaccaacattggagaatgagttatgggcaagacagggcatgaagtacaagaccagggtttgagtggttgtaggctgaaagtcttggatcagtgcatcaagttgcaactggagctggggacatgcttgggggaccagggcatggttaaggtttggcacacagagggtctcattagtggtgagaaatcggtaatctcttctttgcctaaggtcctgaccaatatattcctttggtcctaggggagccctcccagcctcccaacagcagttggcccctaagtcagaatgggactaacactgaggccaccccggctacaaacctcaccttctcctcctactatcagcacacctcccctgtggcggccatgttcattgtggcctatgcgctcatcttcctgctctgcatggtgggcaacaccctggtctgtttcatcgtgctcaagaaccggcacatgcatactgtcaccaacatgttcatcctcaacctggctgtcagtgacctgctggtgggcatcttctgcatgcccaccacccttgtggacaacctcatcactggtgagtgcgggcagttggcagcaggagtgtcccctaccccccacttcaacttctcagataaggctggaaatcaaagcttagaagacagatatcattgctgggctggcctcttggccatgccgtggtctcgaactctcaagacagtcttggggctgaagagttagactagaaataagagatttaatgaatttcctgttttctttgtgcctggcatgatgttacttctcatgcattatcttaattcatcctcacaacaatccagtgaagtagagtttatggtcctccccattttatggaagaggaaacatgctcggagtggttaagaaactggtctgtagttacacagctaataggtgtcaaggtcaacattctcacacccatacttctaattattgtattataccattcagtcccactctctcacggagctcgcatgggcagaattagagccagtggggagaagtggaagggaggcaggtttcctctgaatcgggaacgaaaactccactcatttgagctggaaattgagcagggcacagaagagagtcctgcctgtaagtaatgagctctctgtcccttggagtgtctaagcagggactggccggccactcagtggaccacttgacctctaaattcctgccggtgcatcctgcagatgtcagaacagtgccatctactctctactctctcatgcgactggcctttcttgttttagaatcaagtttccaccaacctgagactccaggtgagggactggttttcagagatatggagacccctagaggtctgagcctgcagattctgagctcagagctcccagcagctcactggtcctcaggatccagagcctggacagccctattcagagtgacttcactgactcggggcagagggagccacagcccacgtttctgtaggttctaggacccaggatgtggagccagtgcagagtcagctcccctccacagtaccagctctgtctggtggaaccgttacccactgctgagtcccagcttcctttgccaatgctgaacataaactgcattcctctcctttccaacacatagacacacacacgtgtactcaggcacacatgtgcagagatgcacacatgcatacacataaatacatgcataccagtcaacagtgatataatgaggtcactagctggttaaggtggcgtctccccatctttttcatacactcatatttaaaatattgtttgaatacataaaacattcagatgattcaatagtcaaaaactaccaaaattctccagtgaaaaatctcccttccgcccctgtcctctggcctcccagctcttctccctcctgggaggcaaccagtgttgccagtttcttgtgtctctttcaaacactattttatgcgagtgcaagcaaattgaggacatgctaaggttccaaacagccagtcccgtacttttacttcccaccacaccccacttaaaaatataccatgtatgctgtaaaaaagattcattaaaataaacttacatgttgttatcccatattaataaataaaagagtttctcactattttcaccaactgcttagaattccattgtatggatgtactacaatttattttgatttgtatttatgttgtttctaatagaatcttctgcaattaaataaaacttcacacagcttcactattttttctttcttttttttttttttttttttttttggagtctcactgtcacccgggctggaatgcagtgctgggatctcggctcactgcaacctccgcctcccaggttgaagtgattctcctgcctcagcctcccgagtggctaggattacaggcttctgccaccacacccagctaatttttgtatttttagtagagatggggtttcaccatgttagccagtctggttttgaactcttgatctcaagtgacctgcctgcctcggcctcccaaagtgctgggattacaggcatgaaccaccacaccggcctcttttttttgagacagtctcactctgtcatccaggctggagcgcagtgcacgatcatggcttactgcagtctcaacctgcctgggcccaggtcctgggactacaggcatgtgccaccaccaatggctaatttttctattttttgtagagatggagttttgtcatgttacccaggcttgtctcaaactcctgggttcaagccatctgcccgcctcagcctcccaaagtgctgggattacaggagtgaggcaccatgcccagctttttcttcctttctttctttttgttttgttttgtgttggttttgttttttttttaactcacatacagaaggttgaatcattcattcagtttacagttcatggcactatgtgatttcactctgttgcaaagctcttcttttgtttatttgtttccttctatatacctattccactctacatctcttctctgacccataggcagccattctgttatatttctgtcttttgtatgcattctcagaaaatgtgctgtgaatggccgggcgcggtggctcatgcctgtaatcccagcactttgggaggccaaggcgggtggatgacaaggtcaggagatcgagaccatcctggctaaaatggtgaaaccccatctctactaaaaaatacaaaaaattagccgggcgtggtcgtgggtgcctgtagtcccagctactcgggagggtgaggcaggagaatggcgtgaacccaggaggcagagcttgcaatgagcgagatcacgccactgcactccagcctgggtgaaaaaagaaaatatgctgtgaatgtgtgcatgttttacatttaaatatttttgttaatatataatttaacatacattaaaatctgcctttttaagtgtatagttccacaggggcttttttgttgttgttgttgttgctttttaaaaagacacggtcttgctctgtcaccaaggctggagtgcggtggtgagatcatagctcactgtgacctcaaactcctggcctcaagagatcttcccacctcagcctccccagtagctgggactacagaaatgcgccaccatgtatggctaattttatttttaatttttgtttttgtagagtcagagtctcactatattacccaggctggtcttgaattcctgggctcaagcgatcctcctgcttcttcctcccaaagtgctgggattactacacctggctgagaatagtatttagaagccaagatctgggttctaggtgtgctcatgggtattggggtgtcatttcttctaggtgctctcaagggacagagctaggaaatatacgtatactaacagaaatatttaacacacatatctttatttctatatctgtccatctgtatgtgtattaacatgagttcagactgatacctctgattctaacccactgtcacagattcattttaacttgaccctcttccttaatggtaacttcattttcagacagtgagaaatctagctgtatttatctacaacatatttacttatttgttcaatcttagtatacacataaggtagtttcattattgctaacatacttctgtgatttgggtttgcctgatattttcccataattaaatccagtttattcagttttgtcaagaatatacaagtttagtaatgacagtacagaatttgtatacagttctttttgctgttatagtatacagtcaaaatactgttttgcaaagttactccagttcgtgtgttccttcttcaccccttcagtgtaaatattattcaatttaaatacaatattattcatttgtaatataattagacttatttgttaatgtttgtattttactttgggtcccccctccccaaccatatcctgatagatgttaattatttatcttgagtaagtgattcattgccatgattctaaaaagtcagaaccatacaaagatatactcagagaggcatcactctcattatctcacctatcccattcatccattatttctacccagttcttatcttctctctgtatggatagctaatctcattattctgatttatcttttctgtatttctttggtacaatgagaaaataaccatatattttcttaatctcttttttctcacatgaagggtaatatagtacagatagtctttatactttgctttttgcaaaccacatgcctgtggttccagctgctcaggaggctgaggcaggagaatggtttgagccaggaagttgaggctgcagtgagccatgatcacaccattgtactccagcctcagtgacagagcgagaccctatctcaaacaaaacaaaacaaaacaaacaaaacaactgatgtctgggtcctgtcactagagattctgattgtaactggcctggcatgggtctgagcatttgttctttgcaaagctctccagatgattctcgtgagcagccagtgtcgagaaccactggcctagaacccaagacagggctatgggagcagagagccaggcagggctggacggtctaaagctcatggaaagaaatcactggtcaacataaagaaaatctcactaatactgttgacccttgaacaacatgggtttgaactgcatgggtccatttatatgagggtttttttcaactaaatgcagattaaaaatacagcaaaacccgtgtatattaggccattctcatgctgctataaggacatacttgagactgggtaatttatagaggaaagaggtttgactcacagttctgcagggatgggaaggcctcaggaaacttacaatcatggtggaaggggaagcacatccttcttcacaagtcagcaggagagagaagaatgagaacggagtgaagggagaagccccatataaaaccatcagatctcgtgatgagaacttactcaccatcacaagaatagcatggaggaaaccactcccacgattcagttacctcccatgggtccttcccatgactcgtggggattatgggagctacaattcaagatgagatttgggtggggatacagccaaaccatatcaccatgtacatacagagggctgcctttttctatacacaggttctgcaaggctgactgcaggacttgattatgtgtggattttggaatacttgggggtcctagaaccaatgcactgtataaacgaggggatgactgtagtgagaactgtccatggttttatgggctggttggttcctcatttctgaaagtctgcaagcagagaccagataacacctagcaggtcatggaggaaagatccaagctcagaggggacctggcttggagggctttcagtctctggctcttgatgcgtgggcatctctcactctgtgggggcctctgtcattgcagggtggcccttcgacaatgccacatgcaagatgagcggcttggtgcagggcatgtctgtgtcggcttccgttttcacactggtggccattgctgtggaaaggtgagaggtttcctggctggattatgcctgagccaactagggcctggcattaagaggagccactgcctctaatgctgggttggctggaaggctggggctgcaccatggtaagtggggctaaatcctgagccacaaggagaagggccctgggcccagctgccctctccctaaacttggggaacctgatgaggacactaccacccccttctggaaggcctgaaggtagccttggttggcttttgttgggattcctggggcctgtgaggagctcaagagcagtccttatttcctgagcagcaggaatcctgccacctctaagtctgagccaggtgagccagagctaagggggccagcttatgggtgggtcacggtatggctggggaggaagggtttctccctgctccttattctgtccccactggctccttgctggttcccggcagcccaggctgtactcaatccccacgttcaccgcttctcgtctctcagcctcatattccatcagattccctggtaagtataaatctatcatgtggccaaaggtatggagcagagccagggagaaggaggcttgcaatcaataaagcactgaacccaggaggcctccatattgcactacatgagtgctcctcccccacagcattgttagcaggggaagggcaccctctgggtgcttcaccccagggaaaggtgggcaggcagatcagctggagatttgctcactcctgccttggtgtatcatgttgggtgggtcacctaactactctgagcccttgtagtctcatctgtaaaatggtagctaccctacaggatggttgggaggcttcagtgagctcctgcttgtaaaagcttatgcacagttcttggcatagagtccaaatatcagttgctaatagtatgttgtttcttctgcacacccatcccctcctccttgttctctccccagcacaggcatatcttaaccctgccctttgtggaatctagtgttcacatcctctctccacctcaagcccagttttttgtaactcagtgaagtaggcagctggagtaatgaagtgggttctactctccacaaggccactaactagctgggtgatcaggagaagtcccttcccttcatcgacctttgttttgttatcattgttgaaggaaatgagagtgtacaacttctcccagtggtgtttgcagtattcttcaagtcccacctcatccaggaagcctgcccagattaccccaagattctcctccacccatttactgctattgcattcatagccagcactacaggctttaagaattatttattctctggagatttctttttctttctttctttcttttttttttttgaggggggagacagagtcttgctctgtcacccaggctggagtgccatggcgatcttggctgactgcaacctctgcctcccgggttcaagccattctcgtgcctcagtccccggagtagctgggattgcaggtgcgcaccaccatgcatggctaatttttgtctttttagtagagaagggtttcaccatgttggccaggctggtctcgaactcctgtcctcaagtgatccaccctcctcagcctcccaaagtgctgacataagccactattctctggagctttcttgagtatgtgaagtatgaagccagtaggtcaaagtcatataggttgagataacaaggcctgagtcaggctgtgggagaggtaaaaggtcaggctatcaggccaaaaactgggttggcaggagggcaggacacagtgtagcgaagtggaaaggacacttgactgagagtcagctctagacctatgttccagggcaggctctgactccaaacagccatgtgaccataagacccccactgggcaagctttcccctccattaaacaagtaagattgactggacattcttcaggtttctattttctggcatcagtagatgacagaagccattctggggaataggagcccctcctttttcctcactattaagcatttgaaatgtctcaagaagtgtggtcagtgtcatctcacttaatcttcacaactacccaacagagtaggtcatactatgggcttcattttacagatgaggaaactaaggctcagaaagtattttgagtaacttcccctctggtcattcatgcatttatctaatcacaacctaggaatactgagatgaaaagtcaaggcatctgccctcacagagcttgcagttgagcaatcgtctttgaaccatgctgcagggggaggtttttacctccccctacagcagctgttttcaactctggttgcacagtagacttctccaggagctttttttttttttggagacaaggtcttgctctattgccttggctggagtgcagtggtctgatcatggctcactgcagtctcagcctcaacctcctgtgaaggggtggcctgcctctccacacctgtgggtatttcaagtcgggtgggatgagagactgagaaagagaaataagacgcagagacaaagtatagagaaacaacagtgggcccaggtgaccggtgctctgcataccaaggacctgcgccggcaccggtctctgagttccctcagtttttatttattattattttcattatttcagcagaaaggaatgtagtaggagggcagggtgataataaggagaaggtcagtaacaaacctgtgagcaatagaatctatgtcataattaagttcaagggaaggtactgtgactggacgtgcacgtaagccagatttatgtttctctccacccaaacatctcagtggagtaaagaataacaaggcagcactgctgcaaacatgtctcacctcccaccatagggtggtttttctctcatctcagaactgaacaaatgtacaatagggttttatactgagacattcagttcccaggggcaggcaggagacagtggccttcctctatctcaactgcaagaggctttcctcttttactaatccacctcagcacagaccctttacaggtgttgggctgggggacggtcaggtctttctcatcccatgaggccatatttcagactatcatatggggagaaactttggacaataccctgctttcaagggcagaggtccccgcggctttccgcagtgcattgtgcccctagtttattgacactagagaatggcgatgacttttaccaagtatactgtttgtaaacattttgttaacaaggcatgtcctgcacagccctagatcccttaaaccttgatttcatacaacacatgtttttgtgagctccaggttgggtcaaaatggctggggcaaagtggctggggcaaagctacaaattaacaacatctcagcaaagcaattgtttaaagtacaagtctttttcaaaatggagtctcttatgtcttccctttctacacagacacaataacagtctgatttctctttcttttccctacactcctggactcaagtgattatcctgcctcagcctcctgtgtagctggaagaataggcaagcatcccctcatctggttaatttttttggtagagatggggtttcaccatgtttcccaggctggtctccaactcctgggttcaagtgatcctcctgccttggcctcccaaagtgctgggattataagcatgaaccatggcacctgaccccaggagctttaaaaacaaaaacagcacataacaaataatgctaaaaccactttctagactaattaggttggaatccttggcctgaaaaaataggcacgggttttgtctttgttgttgaaatgcttcaggagagtctcatgcacatggagggtttacagctactggtttatatggcatatgaagcaagacaaatctgggttcaagactggtccttgcaacttgctatgtgaacttgagccaactgcttaacactcgagtcccagtttccttgtctgtaaatcaacagtgtagtaactatcttaaaggcctcacctttaaaaaataataaagggtgtaataacagatgctgagttgtcctcatgaggaaataaatggtgcagacttgtccttgcattgtagagatactgatactatggccaagatgacatagggacagcctgacatgtaggctctacatctgacctcctgaggttttctggagaatccataaacagaaactgtgttatttgacgcacctaatcgtccttgtcgaggacagactgcgcactctgatcgctctgctagctgccagctaatcagttgacccccaaaagtacacaaatggccccgcaaggaggctcatatctataatcccagaaattcgggaggccgaggccggaggatagcttgagcccaagactttgagactagcctgggcaacacagtgagacctcatctctccaaaaattgaaagaaattagccggcgaggtggcagcgcattcctgtggttccagctactcaggaggctgaggtgggaggagaggatcacttgagcccgggaggtggagactgcagggagccgtaatcgcgccactgcactccagactgggcgacagaaggaggccctgtctcaggaaaaaaaaaaaaaaaaggagaaaagtgcaaaagtgcacacaggattcattgttcccacacgatctgcggtttcctcctcccttctcataaatcctgtagctgcctttgttctttgactactcagccaattcaggtctgagctgttcttcgacgccgccctagatgcgatgatgaaggtcaggtgcccgcatcccacccaccgtcccctcgcaggggccctaggacccacccagatcccgcctgtctctctccccgcggcaggttccgctgcatcgtgcaccctttccgcgagaagctgaccctgcggaaggcgctcgtcaccatcgccgtcatctgggccctggcgctgctcatcatgtgtccctcggccgtcacgctgaccgtcacccgtgaggagcaccacttcatggtggacgcccgcaaccgctcctacccgctctactcctgctgggaggcctggcccgagaagggcatgcgcagggtctacaccactgtgctcttctcgcacatctacctggcgccgctggcgctcatcgtggtcatgtacgcccgcatcgcgcgcaagctctgccaggccccgggcccggcccccgggggcgaggaggctgcggacccgcgagcatcgcggcgcagagcgcgcgtggtgcacatgctggtcatggtggcgctgttcttcacgctgtcctggctgccgctctgggcgctgctgctgctcatcgactacgggcagctcagcgcgccgcagctgcacctggtcaccgtctacgccttccccttcgcgcactggctggccttcttcaacagcagcgccaaccccatcatctacggctacttcaacgagaacttccgccgcggcttccaggccgccttccgcgcccgcctctgcccgcgcccgtcggggagccacaaggaggcctactccgagcggcccggcgggcttctgcacaggcgggtcttcgtggtggtgcggcccagcgactccgggctgccctctgagtcgggccctagcagtggggcccccaggcccggccgcctcccgctgcggaatgggcgggtggctcaccacggcttgcccagggaagggcctggctgctcccacctgcccctcaccattccagcctgggatatctgagggggtccagggagggcgggacgctgcctcagggccccgattggacacgagatacatgcaggcgatagcggcctggtgtggttaggtgaggatgcgtggtccctccctctccagagccaggcagtggtgggcagctgctggtgatgtcttctctgctgccttcaccctcagtagaggcaaatgcgggggacgggaaggaa

SEQ ID NO: 890 - protein, 441 aa, Homo sapiens
MEEMKGNDIKEFEGEPSQPPNSSWPLSQNGTNTEATPATNLTFSSYYQHTSPVAAMFIVAYALIFLLCMVGNTLVCFIVLKNRHMHTVTNMFILNLAVSDLLVGIFCMPTTLVDNLITGWPFDNATCKMSGLVQGMSVSASVFTLVAIAVERFRCIVHPFREKLTLRKALVTIAVIWALALLIMCPSAVTLTVTREEHHFMVDARNRSYPLYSCWEAWPEKGMRRVYTTVLFSHIYLAPLALIVVMYARIARKLCQAPGPAPGGEEAADPRASRRRARVVHMLVMVALFFTLSWLPLWALLLLIDYGQLSAPQLHLVTVYAFPFAHWLAFFNSSANPIIYGYFNENFRRGFQAAFRARLCPRPSGSHKEAYSERPGGLLHRRVFVVVRPSDSGLPSESGPSSGAPRPGRLPLRNGRVAHHGLPREGPGCSHLPLTIPAWDI

SEQ ID NO: 891 - DNA, 2029 bp, Homo sapiens
  source
  (1)..(2029)
  CDS (201)..(276)
  CDS (862)..(1829)
caggaggaaaaaggcagctaagatgggatggggaaggaaacttgaataaatggagggtttttaatgggctgatgctcatggtgtgtcttaaactaaggagtgtagttaattctacactttgccctgaggtctaatttttttttttttttaagagacagcatctcgctctgtcttccaggctggggtgcagtggcgggaccatggctcactacaacctcaatgtgccaggctcaagcgatcctcccgccttggcctctcaagtaggtgggaccacaggtgtgtgccaccatgcctggctaattaaaaaaaaaaattgtagagatgagatcttgctatgtggcccaggctggtctcaaactcctggcctcaagcaaaccccaaagtgctggggttacaggcatgcaccaccacgcccagccctaaggtctattgtttttttaattaactcacagggtttgacaattacaggagaaaaaaaaaatgatttcaaatgtttctatcaaatagtttttctacatctattgataataatgatttttctataatagatgtagaaaaagcatttgataaaattcaatacctctccatgatttaaaaaataattcaaagcaagatagaagagaattttttaacctgataaagggtatttataacagctttgtagctataaaggtgaccctggaggcagatctgggctgagtgagtcacaggagtgggggaaggttaagcctcccggtcatggtctgttacataaagaacctggaggggagagctctgaagctggaaattcgaggggcacccaggggtcccccgtggtcccagcaacacagaatttcacattggtacatcttcctctcgtagggatgaaccagactttgaatagcagtgggaccgtggagtcagccctaaactattccagagggagcacagtgcacacggcctacctggtgctgagctccctggccatgttcacctgcctgtgcgggatggcaggcaacagcatggtgatctggctgctgggctttcgaatgcacaggaaccccttctgcatctatatcctcaacctggcggcagccgacctcctcttcctcttcagcatggcttccacgctcagcctggaaacccagcccctggtcaataccactgacaaggtccacgagctgatgaagagactgatgtactttgcctacacagtgggcctgagcctgctgacggccatcagcacccagcgctgtctctctgtcctcttccctatctggttcaagtgtcaccggcccaggcacctgtcagcctgggtgtgtggcctgctgtggacactctgtctcctgatgaacgggttgacctcttccttctgcagcaagttcttgaaattcaatgaagatcggtgcttcagggtggacatggtccaggccgccctcatcatgggggtcttaaccccagtgatgactctgtccagcctgaccctctttgtctgggtgcggaggagctcccagcagtggcggcggcagcccacacggctgttcgtggtggtcctggcctctgtcctggtgttcctcatctgttccctgcctctgagcatctactggtttgtgctctactggttgagcctgccgcccgagatgcaggtcctgtgcttcagcttgtcacgcctctcctcgtccgtaagcagcagcgccaaccccgtcatctacttcctggtgggcagccggaggagccacaggctgcccaccaggtccctggggactgtgctccaacaggcgcttcgcgaggagcccgagctggaaggtggggagacgcccaccgtgggcaccaatgagatgggggcttgagagccgcccacaggtgcttcccacctgtgcgagcccatgccctggagattcccgagccgtgagctgcctcccacctcgtccctgccaagtgtctggcccgccttcttgggggagccccaaggactttgcagctgcatgtgggggtcacttccctgcatgtcaaaactccccacaacacctgtgtcctggatctcacaatg

SEQ ID NO: 892 - protein, 347 aa, Homo sapiens
MAHYNLNVPGSSDPPALASQVGGTTGMNQTLNSSGTVESALNYSRGSTVHTAYLVLSSLAMFTCLCGMAGNSMVIWLLGFRMHRNPFCIYILNLAAADLLFLFSMASTLSLETQPLVNTTDKVHELMKRLMYFAYTVGLSLLTAISTQRCLSVLFPIWFKCHRPRHLSAWVCGLLWTLCLLMNGLTSSFCSKFLKFNEDRCFRVDMVQAALIMGVLTPVMTLSSLTLFVWVRRSSQQWRRQPTRLFVVVLASVLVFLICSLPLSIYWFVLYWLSLPPEMQVLCFSLSRLSSSVSSSANPVIYFLVGSRRSHRLPTRSLGTVLQQALREEPELEGGETPTVGTNEMGA

SEQ ID NO: 893 - DNA, 1345 bp, Homo sapiens
  source
  (1)..(1345)
  CDS (201)..(1145)
  modified_base (1036)..(1036): a, t, c, g, unknown or other
ggagatattgtctggctgtcattcattagagtatagaccaccacctttcatatttgcatgtttgttatttacatgttcaaagaagacgaagattatggaatatgccataagctcctggtgacatcgcaaagaatgttgcagattttatcttcttctacctctgtgagtaggaggtgaggttctgaaagttctccccagctatgcctactgtaaaccacagtggcactagccacacagtcttccacttgctgggcatccctggcctacaggaccagcacatgtggatttctatcccattcttcatttcctatgtcaccgcccttcttgggaacagcctgctcatcttcattatcctcacaaagcgcagcctccatgaacccatgtacctcttcctctgcatgctggctggagcagacattgtcctctccacgtgcaccattcctcaggccttagctatcttctggttccgtgctggggacatctccctggatcgttgcatcactcagctcttcttcatccattccaccttcatctctgagtcagggatcttgctggtgatggcctttgaccactatattgccatatgctacccactgaggtacaccaccattcttacaaatgctctgatcaagaaaatttgtgtgactgtctctctgagaagttatggtacaattttccctatcatatttcttttaaaaagattgactttctgccagaataatattattccacacaccttttgtgaacacattggcctagccaaatatgcatgtaatgacattcgaataaacatttggtatgggttttccattctaatgtcgacggtggtcttagatgttgtactaatttttatttcctatatgctgattctccatgctgtcttccacatgccttctccagatgcttgccacaaagctctcaacacatttggctcccatgtctgcatcatcatcctcttttatgggtctggcatcttcacaatccttacccagaggtttggacgccacattccaccttgtatccacatcccgttggntaatgtctgcattctggctccacctatgctgaatcccattatttatgggatcaaaaccaagcaaatccaggaacaggtggttcagtttttgtttataaaacagaaataactttggtttaagaactgagttttcagaatctctagctatctggtaagtgggtatgaaagtggtagatgggagaggtcagctgataccgtaggaaataactcagtgagtacgatgtctggagcaaggtcaactgggaagttacagggcttattcttccattttttaaacaacctaggaaagcaatgcaatgtttgactgaa

SEQ ID NO: 894 - protein, 314 aa, Homo sapiens
  MOD_RES (279)..(279): Variable amino acid
MPTVNHSGTSHTVFHLLGIPGLQDQHMWISIPFFISYVTALLGNSLLIFIILTKRSLHEPMYLFLCMLAGADIVLSTCTIPQALAIFWFRAGDISLDRCITQLFFIHSTFISESGILLVMAFDHYIAICYPLRYTTILTNALIKKICVTVSLRSYGTIFPIIFLLKRLTFCQNNIIPHTFCEHIGLAKYACNDIRINIWYGFSILMSTVVLDVVLIFISYMLILHAVFHMPSPDACHKALNTFGSHVCIIILFYGSGIFTILTQRFGRHIPPCIHIPLXNVCILAPPMLNPIIYGIKTKQIQEQVVQFLFIKQK

SEQ ID NO: 895 - DNA, 1393 bp, Homo sapiens
  source
  (1)..(1393)
  CDS (201)..(1193)
agaaatgagtttgaatccaggtgctaggactccctggcccttaataaatgacttaatctcttcaagcctctgatttcctctcctgtaaaacaggggcggtaattaccacataacaggctggtcatgaaaatcagtgaacatgcagcaggtgctcaagtcttgtttttgtttccaggggcaccagtggaggttttctgagcatggatccaaccaccccggcctggggaacagaaagtacaacagtgaatggaaatgaccaagcccttcttctgctttgtggcaaggagaccctgatcccggtcttcctgatccttttcattgccctggtcgggctggtaggaaacgggtttgtgctctggctcctgggcttccgcatgcgcaggaacgccttctctgtctacgtcctcagcctggccggggccgacttcctcttcctctgcttccagattataaattgcctggtgtacctcagtaacttcttctgttccatctccatcaatttccctagcttcttcaccactgtgatgacctgtgcctaccttgcaggcctgagcatgctgagcaccgtcagcaccgagcgctgcctgtccgtcctgtggcccatctggtatcgctgccgccgccccagacacctgtcagcggtcgtgtgtgtcctgctctgggccctgtccctactgctgagcatcttggaagggaagttctgtggcttcttatttagtgatggtgactctggttggtgtcagacatttgatttcatcactgcagcgtggctgatttttttattcatggttctctgtgggtccagtctggccctgctggtcaggatcctctgtggctccaggggtctgccactgaccaggctgtacctgaccatcctgctcacagtgctggtgttcctcctctgcggcctgccctttggcattcagtggttcctaatattatggatctggaaggattctgatgtcttattttgtcatattcatccagtttcagttgtcctgtcatctcttaacagcagtgccaaccccatcatttacttcttcgtgggctcttttaggaagcagtggcggctgcagcagccgatcctcaagctggctctccagagggctctgcaggacattgctgaggtggatcacagtgaaggatgcttccgtcagggcaccccggagatgtcgagaagcagtctggtgtagagatggacagcctctacttccatcagatatatgtggctttgagaggcaactttgcccctgtctgtctgatttgctgaactttctcagtcctgattttaaaacagttaagagagtccttgtgaggattaagtgagacagtgcctatgaaacaaacactaagtgcagtgtctctggaactgccttactcacaggcttccacc

SEQ ID NO: 896 - protein, 330 aa, Homo sapiens
MDPTTPAWGTESTTVNGNDQALLLLCGKETLIPVFLILFIALVGLVGNGFVLWLLGFRMRRNAFSVYVLSLAGADFLFLCFQIINCLVYLSNFFCSISINFPSFFTTVMTCAYLAGLSMLSTVSTERCLSVLWPIWYRCRRPRHLSAVVCVLLWALSLLLSILEGKFCGFLFSDGDSGWCQTFDFITAAWLIFLFMVLCGSSLALLVRILCGSRGLPLTRLYLTILLTVLVFLLCGLPFGIQWFLILWIWKDSDVLFCHIHPVSVVLSSLNSSANPIIYFFVGSFRKQWRLQQPILKLALQRALQDIAEVDHSEGCFRQGTPEMSRSSLV

SEQ ID NO: 897 - DNA, 1369 bp, Homo sapiens
  source
  (1)..(1369)
  CDS (201)..(1169)
agcaagaactggatttcaaactggatttgaggacccccaccttttgataggtgacttattctctgtgagtctctgatctgccctctttaaatgaggaagtaaatcccacatggcagggtggtggggagaatcagagatcatacagctggtgatcacaactggtttctgtttccagggtcaccagactagggtttctgagcatggatccaaccatctcaaccttggacacagaactgacaccaatcaacggaactgaggagactctttgctacaagcagaccttgagcctcacggtgctgacgtgcatcgtttcccttgtcgggctgacaggaaacgcagttgtgctctggctcctgggctgccgcatgcgcaggaacgccttctccatctacatcctcaacttggccgcagcagacttcctcttcctcagcggccgccttatatattccctgttaagcttcatcagtatcccccataccatctctaaaatcctctatcctgtgatgatgttttcctactttgcaggcctgagctttctgagtgccgtgagcaccgagcgctgcctgtccgtcctgtggcccatctggtaccgctgccaccgccccacacacctgtcagcggtggtgtgtgtcctgctctgggccctgtccctgctgcggagcatcctggagtggatgttatgtggcttcctgttcagtggtgctgattctgcttggtgtcaaacatcagatttcatcacagtcgcgtggctgatttttttatgtgtggttctctgtgggtccagcctggtcctgctgatcaggattctctgtggatcccggaagataccgctgaccaggctgtacgtgaccatcctgctcacagtactggtcttcctcctctgtggcctgccctttggcattcagtttttcctatttttatggatccacgtggacagggaagtcttattttgtcatgttcatctagtttctattttcctgtccgctcttaacagcagtgccaaccccatcatttacttcttcgtgggctcctttaggcagcgtcaaaataggcagaacctgaagctggttctccagagggctctgcaggacgcgtctgaggtggatgaaggtggagggcagcttcctgaggaaatcctggagctgtcgggaagcagattggagcagtgaggaagagcctctgccctgtcagacaggactttgagagcaacactgccctgccacccttgacaattatatgcgtttttcttagccttctgcctcagaaatgtctcagtggttcctcaaggtcttcaaatagatgtttatctaacctgacagttgcggttttcacccatggaaagcattagtctgacagtacaatgtttaga

SEQ ID NO: 898 - protein, 322 aa, Homo sapiens
MDPTISTLDTELTPINGTEETLCYKQTLSLTVLTCIVSLVGLTGNAVVLWLLGCRMRRNAFSIYILNLAAADFLFLSGRLIYSLLSFISIPHTISKILYPVMMFSYFAGLSFLSAVSTERCLSVLWPIWYRCHRPTHLSAVVCVLLWALSLLRSILEWMLCGFLFSGADSAWCQTSDFITVAWLIFLCVVLCGSSLVLLIRILCGSRKIPLTRLYVTILLTVLVFLLCGLPFGIQFFLFLWIHVDREVLFCHVHLVSIFLSALNSSANPIIYFFVGSFRQRQNRQNLKLVLQRALQDASEVDEGGGQLPEEILELSGSRLEQ

SEQ ID NO: 899 - DNA, 1813 bp, Homo sapiens
  source
  (1)..(1813)
  CDS (201)..(1613)
ttgtatgaggactccatgaggtcatccacttcaagtccttggcataggataattactcaaaaggtgatgacaatggcgcagggagggatggtgacttgcctggagatgcacagcaccgtctctcccatactcggtcattcacaccatcattgattcaccaggcacccactccgtgtccagcaggactctggggaccccaaatggacactaccatggaagctgacctgggtgccactggccacaggccccgcacagagcttgatgatgaggactcctacccccaaggtggctgggacacggtcttcctggtggccctgctgctccttgggctgccagccaatgggttgatggcgtggctggccggctcccaggcccggcatggagctggcacgcgtctggcgctgctcctgctcagcctggccctctctgacttcttgttcctggcagcagcggccttccagatcctagagatccggcatgggggacactggccgctggggacagctgcctgccgcttctactacttcctatggggcgtgtcctactcctccggcctcttcctgctggccgccctcagcctcgaccgctgcctgctggcgctgtgcccacactggtaccctgggcaccgcccagtccgcctgcccctctgggtctgcgccggtgtctgggtgctggccacactcttcagcgtgccctggctggtcttccccgaggctgccgtctggtggtacgacctggtcatctgcctggacttctgggacagcgaggagctgtcgctgaggatgctggaggtcctggggggcttcctgcctttcctcctgctgctcgtctgccacgtgctcacccaggccacagcctgtcgcacctgccaccgccaacagcagcccgcagcctgccggggcttcgcccgtgtggccaggaccattctgtcagcctatgtggtcctgaggctgccctaccagctggcccagctgctctacctggccttcctgtgggacgtctactctggctacctgctctgggaggccctggtctactccgactacctgatcctactcaacagctgcctcagccccttcctctgcctcatggccagtgccgacctccggaccctgctgcgctccgtgctctcgtccttcgcggcagctctctgcgaggagcggccgggcagcttcacgcccactgagccacagacccagctagattctgagggtccaactctgccagagccgatggcagaggcccagtcacagatggatcctgtggcccagcctcaggtgaaccccacactccagccacgatcggatcccacagctcagccacagctgaaccctacggcccagccacagtcggatcccacagcccagccacagctgaacctcatggcccagccacagtcagattctgtggcccagccacaggcagacactaacgtccagacccctgcacctgctgccagttctgtgcccagtccctgtgatgaagcttccccaaccccatcctcgcatcctaccccaggggcccttgaggacccagccacacctcctgcctctgaaggagaaagccccagcagcaccccgccagaggcggccccgggcgcaggccccacgtgagggtccaggaacacgcaggcccaccagagcagtgaaagagcccagggcagacagaggaaccagccagtcagacaggtggggagccgccgacagctttgtccttaaaaaccctgctgagtccgtcaggcctggaaggaggacttgagggaggggaaacaatccagccagaagtctcaggcagttccatgtcagcgacccct

SEQ ID NO: 900 - protein, 470 aa, Homo sapiens
MDTTMEADLGATGHRPRTELDDEDSYPQGGWDTVFLVALLLLGLPANGLMAWLAGSQARHGAGTRLALLLLSLALSDFLFLAAAAFQILEIRHGGHWPLGTAACRFYYFLWGVSYSSGLFLLAALSLDRCLLALCPHWYPGHRPVRLPLWVCAGVWVLATLFSVPWLVFPEAAVWWYDLVICLDFWDSEELSLRMLEVLGGFLPFLLLLVCHVLTQATACRTCHRQQQPAACRGFARVARTILSAYVVLRLPYQLAQLLYLAFLWDVYSGYLLWEALVYSDYLILLNSCLSPFLCLMASADLRTLLRSVLSSFAAALCEERPGSFTPTEPQTQLDSEGPTLPEPMAEAQSQMDPVAQPQVNPTLQPRSDPTAQPQLNPTAQPQSDPTAQPQLNLMAQPQSDSVAQPQADTNVQTPAPAASSVPSPCDEASPTPSSHPTPGALEDPATPPASEGESPSSTPPEAAPGAGPT

SEQ ID NO: 901 - DNA, 1348 bp, Homo sapiens
  source
  (1)..(1348)
  CDS (201)..(1148)
acaacagtaacatcatgtcatgttgtaacatattatttattaaaacagttgaaattattctagtttataatcaaacccaatcaccctggtatccaatagtcccatccaaaagccttgtatataataataacacttgttttgattgttatcatctgcagagagtagattgcgttcccagcagagaccatattaaccagtccatggtgctggcttcagggaacagctcttctcatcctgtgtccttcatcctgcttggaatcccaggcctggagagtttccagttgtggattgcctttccgttctgtgccacgtatgctgtggctgttgttggaaatatcactctcctccatgtaatcagaattgaccacaccctgcatgagcccatgtacctctttctggccatgctggccatcactgacctggtcctctcctcctccactcaacctaagatgttggccatattctggtttcatgctcatgagattcagtaccatgcctgcctcatccaggtgttcttcatccatgccttttcttctgtggagtctggggtgctcatggctatggccctggactgctacgtggctacctgcttcccactccgacactctagcatcctgaccccatcggtcgtgatcaaactggggaccatcgtgatgctgagagggctgctgtgggtgagccccttctgcttcatggtgtctaggatgcccttctgccaacaccaagccattccccagtcatactgtgagcacatggctgtgctgaagttggtgtgtgctgatacaagcataagtcgtgggtatgggctctttgtggccttctctgtggctggctttgatatgattgtcattggtatgtcatacgtgatgattttgagagctgtgcttcagttgccctcaggtgaagcccgcctcaaagcttttagcacacgtgcctcccatatctgtgtcatcttggctctttatatcccagcccttttttctttcctcacctaccgctttggccatgatgtgccccgagttgtacacatcctgtttgctaatctctatctactgatacctcccatgctcaaccccatcatttatggagttagaaccaaacagatcggggacagggttatccaaggatgttgtggaaacatcccctgagcaaagggtcagtgtatccccatcatttacattgccccactaatgtggggacattaatgaacatttgacaggctattacttattatcactaagtcagctctgtaaataactggctcagaggtaagcaaccctctagaggcaagagaaacaattttcagggtacctagaaaagagatacctgagagatgtgatggataaga

SEQ ID NO: 902 - protein, 315 aa, Homo sapiens
MVLASGNSSSHPVSFILLGIPGLESFQLWIAFPFCATYAVAVVGNITLLHVIRIDHTLHEPMYLFLAMLAITDLVLSSSTQPKMLAIFWFHAHEIQYHACLIQVFFIHAFSSVESGVLMAMALDCYVATCFPLRHSSILTPSVVIKLGTIVMLRGLLWVSPFCFMVSRMPFCQHQAIPQSYCEHMAVLKLVCADTSISRGYGLFVAFSVAGFDMIVIGMSYVMILRAVLQLPSGEARLKAFSTRASHICVILALYIPALFSFLTYRFGHDVPRVVHILFANLYLLIPPMLNPIIYGVRTKQIGDRVIQGCCGNIP

SEQ ID NO: 903 - DNA, 1408 bp, Homo sapiens
  source
  (1)..(1408)
  CDS (201)..(1208)
gcaggtcctgtaactgtgcagagcctatgtgtaattatttacggagaatatggctgtgtgcagagcctgtgtgtgattatctgtagagatatgcctgtgtgcagaagccataactgtcatcgggcctgtaagtatatgcaggccttgtgcatatggacactctactaatgtattcaaaaatctgaagctcttttttccctatggcacaggtgagggcgctgcataaaatcatggcccttttttctgctaacagcataggtgctatgaacaactctgacactcgcatagcaggctgcttcctcactggcatccctgggctggagcaactacatatctggctgtccatccccttctgcatcatgtacatcgctgccctggaaggcaatggcatcctaatttgtgtcatcctctcccaggcaatcctgcatgagcccatgtacatattcttatctatgctggccagtgctgatgtcttgctctctaccaccaccatgcctaaggccctggccaatttgtggctaggttatagccacatttcctttgatggctgcctcactcagatgttcttcattcacttcctcttcattcactctgctgtcctgctggccatggcctttgaccgctatgtggccatctgctcccccctgcgatatgtcacaatcctcacaagcaaggtcattgggaagatcgtcactgccaccctgagccgcagcttcatcattatgtttccatccatctttctccttgagcacctgcactattgccagatcaacatcattgcacacacattttgtgagcacatgggcattgcccatctgtcctgttctgatatctccatcaatgtctggtatgggttggcagctgctcttctctccacaggcctggacatcatgcttattactgtttcctacatccacatcctccaagcagtcttccgcctcctttctcaagatgcccgctccaaggccctgagtacctgtggatcccatatctgtgtcatcctactcttctatgtccctgcccttttttctgtctttgcctacaggtttggtgggagaagcatcccatgctatgtccatattctcctggccagcctctacgttgtcattcctcctatgctcaatcccgttatttatggagtgaggactaagccaatactggaaggggctaagcagatgttttcaaatcttgccaaaggatctaaataaatgctttcaacttagtctcaaaccttttctatacctatcaattgtcccatatttagcccattctcacctctacatcttccaattatccctgtgttattctcatcgatctcccaatttttttaaatatgtcacctattcaaacccacctctgatttcttttattggaaatctttagtaaaatctgtctcattctcttactc

SEQ ID NO: 904 - protein, 335 aa, Homo sapiens
MAQVRALHKIMALFSANSIGAMNNSDTRIAGCFLTGIPGLEQLHIWLSIPFCIMYIAALEGNGILICVILSQAILHEPMYIFLSMLASADVLLSTTTMPKALANLWLGYSHISFDGCLTQMFFIHFLFIHSAVLLAMAFDRYVAICSPLRYVTILTSKVIGKIVTATLSRSFIIMFPSIFLLEHLHYCQINIIAHTFCEHMGIAHLSCSDISINVWYGLAAALLSTGLDIMLITVSYIHILQAVFRLLSQDARSKALSTCGSHICVILLFYVPALFSVFAYRFGGRSIPCYVHILLASLYVVIPPMLNPVIYGVRTKPILEGAKQMFSNLAKGSK

SEQ ID NO: 905 - DNA, 13695 bp, Homo sapiens
  source
  (1)..(13695)
  CDS (201)..(264)
  CDS (1113)..(1535)
  CDS (3116)..(3248)
  CDS (3899)..(4046)
  CDS (5312)..(5443)
  CDS (5789)..(5905)
  CDS (6139)..(6184)
  CDS (6427)..(6530)
  CDS (7286)..(7404)
  CDS (9308)..(9594)
  CDS (10681)..(10789)
  CDS (11610)..(11878)
  CDS (13365)..(13495)
ttggggagcggcctctggccgctctggggaggtccatgggctttttccacacttgcttccccacctcacctcccacatccatgccacactggcctcctcttctgcagggccagcccaaccaccacacagtccacactcccagctaacactcctggtctcttccaggtggtgacttccaagagtgactccgtcggaggaaaatgactccccagtcgctgctgcagacgacactgttcctgctgagtctgctcttcctggtccaaggcaggtcttcccaggggtgccctgggctgttggaacttacgttaaaatgcccctgtgcctagggtggctgccagcacacatgctaactcctttaggcagttacagctcggctagtggagggtaccttggagaaaagcaaaagacactccttccttctggcaggtgcagccctgcagtgcacagcttagggtatggaatatggatggggtactggccccactcacctctgcagccagagcattcttgtgcagtgtaccacctgcacaaccgtctatgtcagccatggcctcattaaatacttcattgctgttaaaaatatgttttccccttgaaattactattcgttttcagtttcctctttttttttttttttttgagacggagtcttgctctgtcgcccaggctggagtgcagtggcgggatctcggctcactgcaagctccgcctcccgggttcacgccattctcctgcctcagcctcccaagtagctgggactacaggcgcccgccactatgcccggctaattttttgtatttttagtagagacggggtttcaccgttttagccgggatggtctcgatctcctgacctcgtgatccgcccgcctcagcctcccaaagtgctgggattacaggcgtgagccaccgcgcccggcctcagtttcctctttttatagtttgatgctgataagttttgagtgggaaagactaacacatttttgtagacccttggaatgtgtgtgaatctcaggctccaggttcacatgtactcagcctaggtcctgtccccttccatgcctctggtcagcccctgccacggggtcccatctgcagcctctgcctcctcaggtgcccacggcaggggccacagggaagactttcgcttctgcagccagcggaaccagacacacaggagcagcctccactacaaacccacaccagacctgcgcatctccatcgagaactccgaagaggccctcacagtccatgcccctttccctgcagcccaccctgcttcccgatccttccctgaccccaggggcctctaccacttctgcctctactggaaccgacatgctgggagattacatcttctctatggcaagcgtgacttcttgctgagtgacaaagcctctagcctcctctgcttccagcaccaggaggagagcctggctcagggccccccgctgttagccacttctgtcacctcctggtggagccctcagaacatcagcctgcccagtgccgccagcttcaccttctccttccacagtaaggcaacttccaggcggagggaacaactgggcagtggtctagaggcagggaaggcaaaatgcaaagtggactgggctcacaatatcagatcatgaagactgggctttgctcacaggcactggggagccagtgaaggtgtctgaggaggggaggagtgtaatccaagtgctaggattacaggcatgaaccactgcgctcggccccactgtcccttgatggttactttgtgggcaggcaggggtgaggatggaagggcaagggcccgtcctgaggctgcagagaaggtcttggtgaaggaggatgaggtctgaatagggtgagagagcagagactggaaagggactgaagatcaagagccccaggaagaattcttcctcagcatcagtgtagactgtttatttcctttcacagaggaggaaactggggcacagagaggatgcccaaagctgcacagctagccaatgggagagccaggatttgaacccagcagctgattggagtggggtaggggtgaggggcggagtatgagaggtcaaaggtcaggaaagcagtggggttgactctgaggtccagaagctgcatcttcccccttgagtgtgacaggtacatgtggccactgccattcagcaccattaaatgctgaatggtggccaggaagggaggagcatcagaaggagcttgaaggtttactggggggttttcatgtctttccagcacctcaagtttgaggcagggctttcaggggtggggggcacagcactttgattgtgtcagtgtaacaggctaatgattatgtccagtgcaacaggcaggcccaggcccgtcagtggtggggggttccccacaccccaggctgggattctgccccgcaacctgggaggatttagggcaaagttgatcctagttgcaaattggcattctgaagaccagactgaacttggtcttgtttggcctgtagagggtttttaaaaaacatggaccagggatttcaaatcacctaaaacccaggctttctcggttatgcattcaaaagatggagctacccagggcctgccttcctcagtggcacagaaagtataccctccaacccccactgtttgtcttcctcatctgagtcccagctaatccctggagacaccttagtcggccgccttagtaggccgcccacgctacctgggcagaggggcccgagcctggagtcagggaggctggtgggtgtggagtcccaggaaccaccaccaagccccgcacatccctcctaaggaggcctggctgggccctctctgctccgtgtgtgtagccgaaggtgtctgcggagggtgctgagcaaggcacatcccaccccatcccgctggggctggcattgctggcgggttctgtaagacacaacccccacgggttggcctcatctgagtggccttggcagagtccactctgcttcttgaagcctcagtttcccctttgtaaagtaaagatcgaggcattcagagtcatgtcagggtggtagggggcagaatgggagggtcctgggacctgaatcggcagcctcggcgggggcctgtccacccctcccccaggtcctccccacacggccgctcacaatgcctcggtggacatgtgcgagctcaaaagggacctccagctgctcagccagttcctgaagcatccccagaaggcctcaaggaggccctcggctgcccccgccagccagtaagtttggcacctggggctgtgaggggaggcaggaaggcatcagagatctggacctgggcagggtgggacctggagtaggggctactgcgaggccttccctgggactggaatgcttctttgatttctctttctgccttctgggagtcaacacatgccccccaggctgagccctctcctgtctgagtcagtaaccaacatcacatccaccatcccaagccctcctccccctcataaagaaaggatgggtggtccacagtacagcccagcagaccaaggctcagagacggcagagccgctccaaggccacagagtaggttggcacaggcggagctgggcccaaacccatggtgctgagtcccaggacagcccccaccacaccattgctctcctttcccttggctcccaggtcctggcctcctctgtctgaccctaccccagctcattctttctctcccacacgcagatgcctgcttttctcttttgtctgctctccactctctcttgcccaccccacccctctctctgcctctgcctctgcctctgcctcttccctgtgtctctgtctgagtctctcgtcctcctgcctcagtctccctggtggcccggccccctccccaccatcaccaccgctttctcctccctgccaggcagttgcagagcctggagtcgaaactgacctctgtgagattcatgggggacatggtgtccttcgaggaggaccggatcaacgccacggtgtggaagctccagcccacagccggcctccaggacctgcacatccactcccggcaggaggtcaggggcaggcctgggcaggaagcaaatgcgggttgggccggggccagatggaggtgggggctgtgagcactccctgaagctcagtgccgtcgcagcctctccctggggcctcccgagaaggttccaggcccgaggatagccatcctaagtcagtagttcaaccgtgggattgaggaccctgtgtgggcacagtggcagggtctgcttcctataccagtctcctggggccacccgtgtgaacagaagaccagcccctaaacgcctgtccacgcaccccccccccccgttttttttttttcgagacagggtcttgctttgtcacccagactggagtacagtggggtaatcatgtctcactgcagcctcaaactcctggtctcaagcgattctcccacttcagcctgtgagcagctgggactgcaggcttgctaccacacctggctttaaaaaattctttgcaaggctaggtgcagtggctcacatctgtaatcccagcattttgggaggccgaggcaggcagatcacttgaggtcaggagttcgagaccagcctggccaacatggtgaaaccctgtctctactaaaaatataaaaattagccgggcatggtagtacatgcctgtaattccagctactcgggaggttgaggcaggagaatcgcttgaacccgggaggcggaggttgcagtgagctgagattgtgccactacactccagcctgggcaacagagcgagactctgtctcaaaaaacatttttttatttttgtaaagacaaggtcttgctacgttgtccaggttggtcttgacctccggggttcaagcagtcctctcgccctggcctctcaaagtgctgggattacaggcgtgagccactgcacccagccacacaccccatcttgagactgccccctgagtggctctggttagctgggaaccacccacactgcccacatggccacccccaagttggctgctgtaggcagagctggcatctgaagccccagacaacagaacatcatgtggttctcccagggctatttgccctggagtcctggattctaaccacaagactccccagccagagctggtagcagggaagggagggatgaggagggctgtcatgagtcaggcttgacttcctgaagaaatgggcttagaagtggcagcgtccaggaacggatgggtgtgtgtgtgtgtgtgctagggtggggggcacggatctaggggtccgcatttggctgagccctaaagggacctctgcaggaggagcagagcgagatcatggagtactcggtgctgctgcctcgaacactcttccagaggacgaaaggccggagcggggaggctgagaagagactcctcctggtggacttcagcagccaagccctgttccaggtatggggtcctcaccctcatgcctcccaggagaaagcagtttttttctgacagaggtggaaagaaggcacgcagatgagctccttcctctgggagtcaaagcctttccttgtaaagttacaaattgcactgcaatgtgcaaatctccctgtgagagggctaagcaatgttcttcttactatagtgtaaatgactacatgggcaaaagtggttccagagggagacgcagcatctcaaggcaatgtgctgggagagggttatctagagagggtaaggggcttctgggcccttcttctcagtcctgaactccctccctactctcttcctccaaccccatgtatctaggacaagaattccagccaagtcctgggtgagaaggtcttggggattgtggtacagaacaccaaagtagccaacctcacggagcccgtggtgctcactttccagcaccagctacagccggtgagtgggggccagccatcaagagaacaagcgcccctcggccatgtcaccctttcctctccctccctccagactcatttgtctttataatgaaacgattgcctgatcgagcagtcaggtccaaatggggcgggtggtggcttgactgtgttctagacttcctctgcctggcctgtaaagttggaggggtggggggctgtcacagaaaccactctcctttcttgtccctacagaagaatgtgactctgcaatgtgtgttctgggttgaagaccccacatgtgagtatgcaggggtctctgggctggacaagtatctggaagagaaatagagtcctggggggtgggggaggtggggttaatcaccgagggcttcctggagaaaggaggactttgaagagagagcgatggcaggctatgagtaggccgggtggaagaatgacacagtcgtgcttttgggggtggacacagtggggtcctggaggactggacttgattggagccccgtgctgtcccctcctcagtgagcagcccggggcattggagcagtgctgggtgtgagaccgtcaggagagaaacccaaacatcctgcttctgcaaccacttgacctactttgcagtgctgatggtgagggtccctgctcccacctcgcagccacaccccaggccgtgtgcttgttctgtgcaagcacttttcatatattcagtcatttattcctcataacagctctccaaggtagcttctattgttgtcccattttatagatgaggaaatggaggctcagagaggttaagcaatttacccgtggccacacagctagtcagtgaaagagctggtttgtagagcccctgctctttattcccaaattttggtgtgtacgaaaatgcagattcctggccctcacctagggttctgatttggcagtgatggggccaagagtgtttctaatgaggcccctgaggtggcctccagtgcccccaagacctcagaattcatgctcccaggactgtaggattctgcctgtgggtatccacctggggcttgaacacccctgggtgtgggaatctcattccctcacaggaaacctattcccatgttaaatgttatagaagaataatcaatgccaggacagaataggggttctctcatgaagggttcttggcctctgtgggtcaggaagccgcttgagaatgtggtcaaatctaaagatgcccccactccagaaaaatgcacttatgggaccacattctgctcagttgggagagggggttcttaggcttccgaggcccaccagggaccccaggttagcccctcacgcagggcaagcctccaggttgtgtgggggacacagaggccagctctctcctgtctcctggggccaggtctcctcggtggaggtggacgccgtgcacaagcactacctgagcctcctctcctacgtgggctgtgtcgtctctgccctggcctgccttgtcaccattgccgcctacctctgctccaggtgaggcctgaaaggggtgggacaggggaggggaccctccattgcacacacctccaccagggcgccgcacacatctccggtcatggcccgcccgcatgacctggaactgtgtgtgtggttaggggagctgtttggggtaagctgacccttgggggccacgtctcctcctcagatcagtggtgtttggataacatagtatttacaaattttagctgtcgacattgtatttatttatttttatttttattttattattattatttttttgagacagagccttgcctctgtcgcccaggctggagtgtagtagcatgatctcggctcactgcaacctctgcctcccgggttcaagtgattcttgtgcctcagcctcctgagtagttgggactactggcgcctgccaccacacctggctaatctgtatatttttagtagagacggggtttcaccatgttgctcaggctggtctcgaactcctgacctcaagtgatccacccacctcagccccccgaagcgctgggattacaggcatgagtcactgtgccaggctaattgtcaacatttaaaattgagagagtccacctaagaatctgtttctttcctagagtaagacaggaaagcaaaataaaaaacttaaaaaaggaaagatttttcatttctgcctttgaataagcagatttgtgagagcactgggtggacacaataatatcacagcggtaatgatcatacttaacgtgtgtcaaacttcccgtgtgccatgcactgttctaagtgttttacatgtgtgaactcaattcatcctcacaacagccctatgaaggaacactcagagagggtaagtgacttgcttgaggtcacacagcaaggaagtggcagaggtcagattgtcagtgcttggcttggcctaaattggggtccacttgccctcagcgctgaacccatttgggtagaggagaggcaccctcggttctcactgtccccagccacgaggaaggagaggaaagtgaagctgtatttatgcgtgtgcacaagcacgtgtgtgcctatatgactgtcctgtgtgtgcacagctgtgtacctggggagctaagtaggtgatggtgatgaggaaggacagctgggtgatgagatgggctcggcggaaggctgggggtggaggcagaagtcctcaacacccagttgctcacaaacatgcccaaggacacagcacaggaacccttaggaactgagcaccttatctgtgtcagatgctttgtgtcagtgtaactctcaccccaaccctatgagggtaccatcctcccacttcacagataggcaaactgagagtctcaaggggaggggaccagctgaagatggtgccatgagttaggggcagggcagggtgggactccaggatggtgacactggggcctgcatgttctgctgcaccctctagggccatgtagaatcctggagtgggggtggggtggggtgtgcacacattgacttgcaaacctcagacagaccgatgcgggcagcccacactcagactcacaggtgcacagttgtgcagacagacgggaagacacagaatgtggatggcatggattctccaacatggtgaaaatgccaaagtgtttccgctctgactttgagagtatctggtttattactgtggttgtcttcctcgctctgcctggctgaggcttctgttaaacgtgcacgtggtgcctgagtctgtgggtgctgggcacacagtaggtgcacagggggatgtggggaacagtttggctgcagccacaggaataggataggggccatgtatgactgcatgtgtgtgtcggggtggggggcagtctgggaaggcttcctggaggagatgtgggcacactcccctctctaccttcccacactggcccaccagggtgcccctgccgtgcaggaggaaacctcgggactacaccatcaaggtgcacatgaacctgctgctggccgtcttcctgctggacacgagcttcctgctcagcgagccggtggccctgacaggctctgaggctggctgccgagccagtgccatcttcctgcacttctccctgctcacctgcctttcctggatgggcctcgaggggtacaacctctaccgactcgtggtggaggtctttggcacctatgtccctggctacctactcaagctgagcgccatgggctggggtaagtggttgggcggggggtgcctcagacctgcctctcccacttggctctggcaaaacccaggcacctggttctgcctctccacctatctctctgacttccctcctggcctccttcactcatcctcaggtgtccttcaccttggctgaatcaaggtcccctttaggaagaagcagtgagccctgtccccaagaaacacttccaaattctccacatcactcactccattgcaaaggggatttacgagcagggccaccgtgtgtgaatgtgcaggttgtgcactgctcaaaggcacccagttcagagatcagaggggctgaaatccagtcccgctccagtcatttaattcactcgggctggcagtggccctgcctcaggatccccctggaccttgggtaacagattccctgtggcttggcattttgttcttggccaatgactgttcaattcacctgtggccagccctcttatgtcagacctacagcccaggggctcatgatgccacaagtctgtttggacattgcacagacccctcaacctccgcatgcccctgactccagcttgctgctcttcgcgggtttgtcattgggccccttctttgtccattcccccatttgcatgaaattcctttggaggtgtctctgtgtcaggactttgtgtttggaggtgggcagccccctctagggagcttctaatctccaccgaacgggcgaggtcaaggcccagtgcagacgtcccctgatggcagaactcttgccgtccctcctaaactgtctgcccctcccatctcccctgtgacatccagccctgcagcagagacccacaggcctttctcccaggggcccccagggtgacgaagggcagggctaaggttggaggagatggcatccccttataggaaacccatactggaatggggagggggagggtccaaacttgggggaacttccccaccagatggggctgggtgggcttcaggagcccaaacttcagaggggcccttgccctccagactccctgaggccagcagggaatgggcaggcctcagagagcgggaagtagagcaacatgcattgccaccctcaggcttccccatctttctggtgacgctggtggccctggtggatgtggacaactatggccccatcatcttggctgtgcataggactccagagggcgtcatctacccttccatgtgagtggctgtgtgcaatgggggcaagaaggtgggtctctgggcacagaggccagagtgcagcccgggcccaggtcatgctggccaggggacacctgggttccagtctcctcgaggaattggcctggcagtggctgaagcactggtctaagagtcatggagggtgagaaaaggcctggatctaccactcactcaccaggtgaccttgcacaggccccggcccttctctgagcctcggtttcctcatgcatgaatgggggtatgggttggagcagatgagcctcaccacattcctcagcagcacctctctgtctccccatgcagatgggaagacagaggctcagggagggaagagatccgctcttggccacactgagggctggtgtgctgttcggaggcagaggatgagtggggttgaagtccagtccttctccactcacctgattcacccaggctggcagcggccctgcctgtggatcccctgaacccaaaccggaagccagggttcctgagctccagcctgggaaggaatccttcccattggctcagtggttttgaaattttcagctctttatgttgtgacccagtgatttctgcctcacttttgtactatctatattattacttacttaacattttcctttaaacaatctgacttgttaactcaaatgtatttttaaaattacatcaacactgtaaatagaaaacaagcgcacttgctgtaaacagtggataatcctgaaaacaaacatgacaaccacagcccaggaaatgctgcccgtgctggccacacgctgagccctcctgcctttgcccgcaggtgctggatccgggactccctggtcagctacatcaccaacctgggcctcttcagcctggtgtttctgttcaacatggccatgctagccaccatggtggtgcagatcctgcggctgcgcccccacacccaaaagtggtcacatgtgctgacactgctgggcctcagcctggtccttggcctgccctgggccttgatcttcttctcctttgcttctggcaccttccagcttgtcgtcctctaccttttcagcatcatcacctccttccaaggtaaggagaagacccgtcccttggcccaggcagggtgtctacacatggagcaagggcagggaagagatcacccagggaacctgaagacttcccttctctgggcctcagtcatcccattcataaaatggggacatccaggccacagtcaacaagtcttgattgagcacctactatgtgcaggccctgtgttaagccacagggcttatggctgagctggttgggtgtgggccttgttcttttggaactcagctctactggggaagactgcgcatgagcaggcaagcatatagccatcaaaggtggtcccagatagtagggacatcgtcgtgagcacgtgctgcacagggcctcggctggggtgggggacaccctaagaagggtggccagggaggcctctctggatatgagacgtgtgaagacaagagaaggatccccccatggagagatgggggggcctccctactccaggcgcggtccacagaccagcagcagcagcgttgttaggagctttttggaaacgcagcctctgggccacccgggccctgccacatcagaatctgcattttcacaaatgcccaaggggtcacgtgcacatgataggatcaggagccctggtctaggggaaggaagctccaggcagagggagaggcaagaacaaagatcctgaggttggaaccggttgtgtgtaggaaggacagtgagggagagcgtggccagatggcggcgggtcggggcggagaggtgggatcccagggcagggtcatgatggctctggcttgatgccaacagggtccctttctgtgcatgtacctgtgtgtgtacattgaggtgcacacacaggcatgcacacccctctgttcctggccgtgcagaatggaagggggttgtatggccaggcccaggggctctcatggggttcaaggccagcctcccatacagggtcaccctagaatgggagctgggagttggtggtggggagatgttaccacatttcggttatttaacattcaagccttcattcctgcctgtgagatgaggggactcaggattgtaagtgaggcccatacattcacacagacatttactaagctgtggatacatcatagtgctattaatttgaggggtgcaaaatctcacagtgcttaagtgggtggacttcagagcctgttcaccacagtttgagccctggctcagccacgtccctttacctgagcctcctgggcctcagtttccttgtttacaaaagagaatagtaatgaataggatgggcctaggaagtttgtgacagtgagaggccacacggggacgcagcacagtgcccggctcataggaggtgctcgctgggtctcatgggtgcccgacagcacgtgcttggcaaacactatggagaggtggggcagacccgagtcacaatggctggggagggaggaggagggatggggtggggctcccccacctgctgaccccgtgccctcactgcccgcaggcttcctcatcttcatctggtactggtccatgcggctgcaggcccggggtggcccctcccctctgaagagcaactcagacagcgccaggctccccatcagctcgggcagcacctcgtccagccgcatctaggcctccagcccacctgcccatgtgatgaagcagagattcggcctcgtcgcacactgcctgtggcccccgagcccggcccagccccaggccagtcagccgcagactttggaaagcccaacgaccatggagagatgggccgttgccatggtggacggactcccgggctgggcttttgaattggccttggggactactcggct

SEQ ID NO: 906 - protein, 693 aa, Homo sapiens
MTPQSLLQTTLFLLSLLFLVQGAHGRGHREDFRFCSQRNQTHRSSLHYKPTPDLRISIENSEEALTVHAPFPAAHPASRSFPDPRGLYHFCLYWNRHAGRLHLLYGKRDFLLSDKASSLLCFQHQEESLAQGPPLLATSVTSWWSPQNISLPSAASFTFSFHSPPHTAAHNASVDMCELKRDLQLLSQFLKHPQKASRRPSAAPASQQLQSLESKLTSVRFMGDMVSFEEDRINATVWKLQPTAGLQDLHIHSRQEEEQSEIMEYSVLLPRTLFQRTKGRSGEAEKRLLLVDFSSQALFQDKNSSQVLGEKVLGIVVQNTKVANLTEPVVLTFQHQLQPKNVTLQCVFWVEDPTLSSPGHWSSAGCETVRRETQTSCFCNHLTYFAVLMVSSVEVDAVHKHYLSLLSYVGCVVSALACLVTIAAYLCSRVPLPCRRKPRDYTIKVHMNLLLAVFLLDTSFLLSEPVALTGSEAGCRASAIFLHFSLLTCLSWMGLEGYNLYRLVVEVFGTYVPGYLLKLSAMGWGFPIFLVTLVALVDVDNYGPIILAVHRTPEGVIYPSMCWIRDSLVSYITNLGLFSLVFLFNMAMLATMVVQILRLRPHTQKWSHVLTLLGLSLVLGLPWALIFFSFASGTFQLVVLYLFSIITSFQGFLIFIWYWSMRLQARGGPSPLKSNSDSARLPISSGSTSSSRI

SEQ ID NO: 907 - DNA, 886 bp, Homo sapiens
  source
  (1)..(886)
  CDS (201)..(686)
ctccctatttcataatgaggtgaaacctcggagccgctagatttaataagacgctgctatccttctttcccgcgtttccccgcctcatcaaggtgcttttcaattatgccaagggctctcccggacccccttgatactagaacaacaaaaccaaatcacccccatccccgggtccggacagcatcctccctcctggctccatgggcaccgggtcagacgctcgaccccgggtgcggccctggccacatcgcgccgcggccaggagggccacagcccgcgcccgctcccctcccccacggagcccgggctcaggccaaggcccgcgggacttacgctctcgtggtcccaccgcacgttgctgcgcttctcgtccggggctaggtttcggtcccggcccattaactcatccaacaactgcgcggccgaaatcatggtgcttccttcgggcggctgttcccaccagcccaggcacccgccaacgaaaacacgggcgacaccgtcgccaatctcctcggcccgctctcaggccgaaatccctcctacacacaggagccgacaagacaaaatggccgccgcgcggacgccttcccagcatgccgtgcgcccgtgggacacgcccaggcccgggcggagagggcgagctcggcttccgccgtccgggggcggggcccgcggaggccgggtagggactccgcccctgtctagaggccgcggggacgggtagcctctgcccgcgcgcctccccaagcgcccggttttcccgagcttcttcacggtgagaaattggagcctaggtcttgaagcctggacaccgcttcaaaatggagaaagtgtctcctttagtccacgtggtgcacatggtgcctcatgcagcggaggaaactga

SEQ ID NO: 908 - protein, 161 aa, Homo sapiens
MGTGSDARPRVRPWPHRAAARRATARARSPPPRSPGSGQGPRDLRSRGPTARCCASRPGLGFGPGPLTHPTTARPKSWCFLRAAVPTSPGTRQRKHGRHRRQSPRPALRPKSLLHTGADKTKWPPRGRLPSMPCARGTRPGPGGEGELGFRRPGAGPAEAG

SEQ ID NO: 909 - DNA, 34118 bp, Homo sapiens
  source
  (1)..(34118)
  CDS (201)..(777)
  CDS (840)..(1132)
  CDS (2814)..(2958)
  CDS (11667)..(11859)
  CDS (15571)..(16708)
  CDS (19019)..(19183)
  CDS (20563)..(20774)
  CDS (20872)..(21252)
  CDS (21502)..(21641)
  CDS (29482)..(29640)
  CDS (30690)..(31519)
  CDS (33757)..(33918)
  modified_base (5068)..(5167): a, t, c, g, unknown or other
  modified_base (14848)..(14947): a, t, c, g, unknown or other
acacggacccagccatcgtgacctagattctgggttcaggggtagagacttgtttgctagtgggtcgcactgagtcaggctcttctgtagcacaccccaggtaacagaggtgctgggcggcctgagcaaagggacaactttttgccacccatgccagtgggcagtgggtgcagacactcacagcacaggcacctgctgcgatgcacgcggcgcccacggaaacccgaggctgccagccgccgccctggagaccccagagacagcggcagatgcgtgtgcttcaaggggcagcgtggctgctggggcgctccctaaagggcagtggcacggggtcgcgccgcgagcagaggggcgcgggtgggcgcgcaggagttagcgaactgacacggaggcgccaggcggacgcacggacgcaccgagggccgcagggccgcacagccgggcacacatcgtcgcgcagcggttcaggctcgggggcctcctcggcggaggcggccaactctcaccctcagcgcggggaggggcgggcgccgggggcggggcggcgccgtccgggccctccccctgccccgcctcgggtcggcgtccttagccgctggcgcgttgttggtttcgggttgtcaggcagcgcgcgaggcggcgggcagctagcagctggcggacgcgacccggaggcggtgggggtgcggctgagccatgcccggtggcgcggcctgagcccctccacctgctgcaatcatgaaggacagcggggactccaaggaccagcaactcatggtgagacccttttagaccctcctccccaccccgctccgtggtctacttcagtcggcctccagcgacagagtcctgtcccctcgccgccaccccactgagaggacaggcaacgaccagggccgggactcttcagagcaactttccccaagtcctgcaggatgggtgtcaagaagggaccatggcctttttagactttcctgagcctgaaaattaccccaacttcaaccccacccccacctttccaccctcccattgggagatcccgcccccaaagcgtgcgcagatgaatctcggctctctcatccagaaacgccaggggcagggagggcttgacctaactgcccccagaaggagggtggcggtttcccagttaatcagaggctgctccagccctggtgaggtcaggagtttaaagggatgtgggggtcaccagtaggaagacaagggcccctggtgtcaggatggggcccggagtgcctggttcttgggctgcaacacggatgctgcccaagtccggattcgaagtagttcagagaagtgctagatgcagctaccatggccccacagagccctggggcctgggacagatggggaggtgagagtgggggctgtggaggggaaggtggaattcctgatcatcagtggtgcctgggccagagcaacaagggagatgactcagtgacctcgaggccaccactaggctgtgggtgggtgggtgtctctctcagcaagccccttcctcatcccctaatttttgaggtctggggaagggccctcatcaccagaaggtgggcagtaaggtaactggaggataatgttgctcccagagtcccctacctctcaagggtgggcttgcttctctgaaaggagcctcagctccagcccccaagcaagccctgggctctaggacatcctctctggctttttagaatgtgtctctttgaaaatcactggccttggcatgtattgtgtgccccggggagcagggatgaagggtcctcccctcccgccagtggaatttggctgaagatgccactaaaggtgacccgtcaggtagtgtagttccctctgaaagtgccttttgttttgttttgttttgtttttcttttttgagacggagtttcactttctcacccaggctggagtgaagtggtgcgatctcagctcactgcccctcaagttcaagcgattctcctgcttcagcctcccgagtagctgggataacaggcatgcaccaccacgcccagctaatttttgtatttttagtagagacggtgtttcgccgtgttggccaggctggtctcgaactcctgacctcaggatccgcccacctcggcctcctaaagtgctgggattacaggcgtgagccaccacgccaggcctgaaggagtcttcactcggccagagggccgttcattctatccccacacccagcagctgttgccctttgatcagcacaagacgtgctccccactccaccctgttctttagggagatccacgcacaggatgagacccatttcacactggctggaggacaggcagatgggggtgggcgctctaggtgacactctcctcggtgtaggaatgtggtcacaggctgttgggatgatgggggacattccctgctccatcccacctaccaggcctcatcccagagccgtgcctgcaccttcctctgcagcacgtcattcgcggaaacacagagaggctgctccagtgccagggccccaagttcaagcccaggggagctgcgagtgttttatttgggcgtgaggctgaggcaggctggaggagcagacagctctctcccctggggctctcccggaggccagggctcctggggagactcatcaactcagacacagtccaacactctgtggacctgctgccctctgacctaggtagagttttacttaggacaagggaggcctgagatggctgaatgctagagaagccaggggcttgcttgaggtctctctgaggcccagcatggtcctctccctctaatcccaggggcttggttttccctcccaggtggcgcttcgggtccggcccatcagcgtggcagagctggaggaaggagctaccctcatcgcccataaagtggatgagcaggtatgcagggctctgcagcaggagctgcagggcagaggtctgctcagatggctcagctcacctggtgagggcagaaagggcccctgttgcttgcagcaccctccttcctctactcactgaactcttggctgtgctgttgatgacatcaccaaggaagctgggggctcttcttccaggaagccttcctagattgatccaaggacaactgggagcttccctagcctgggtgggccctgatcctttacctttcacatgctcattgcttgactttcccaccctaatatgcctgctgcccacagagcacatatatatatggttgaggtaaagctcgcctctagggtgtaacgtgtggcaaaatcctcgctctctgtttgcaatcttggtcctcatgtcaccaggatgaggaaggcagggcacacgaggcaataagtgtgtatcaagtaacagcagcatgctgggtactgttctagaaactggaaactgtggtgaacagaaaaggccctgtcctctctccattaccttaagtctagtgtgaagagatgaggcattcatcaaagaattgcatcacaaacaaacgagtttgcagctaacaagggcttcaaagaaatgcttagtggcatgagagtaggtaagaaggggataagacctaaacctggaggtcagcgagggcttccttaagaaactgtgcttgacactttgggagccgaggaggccagatcacgaggtcaagagatcaagaccatcctggccaacatggtgaaacccagtctctactgaaaatacaaaaatttagctgggcgtggtggcacgtgcctgtagtcgcagctactcaggaagctgaggcaggataatcgcttaaacccaggaagtggaggttgcagtgagccgacatcacgccattgcactccagcctgggtgacagagtgggactctgtctcaaaaaaaaagagaaaaagagaaaaaaaaaaaaaaactgtgcttgagctgaaaacataaggggtgaagaagaggtcattagtagcatgcatgaggggagaaatgttgacctgaggggcttgcatgtgcaaagggcctgtggtgagagggactgggatgcaactgggtagctgagaaaaggccagagtggctcaagcaggagagtaaggggcaagaggtgtgaatgggctgggccaaaccacatactctgtagaccatggccaggatgtttgtttgggtaggcagttgaggactcgtgctgggatgtacacaggcacagtggtgggggcaacaggagtgggcttggttccaggtaggagcatcgtggtggtaggatgtgctaatggctcagagaagttgggtggcactgtacaatgcagagaaaggcacacgtgagcacctgatgggcctgggctcaggtcccacgggctggactcatgaagccctgggcccaggataagcaaaccagaggcagatggcacacttccaatgcctgtttacctctgggctccccaggggcaggggcccactcaagcctctttcttcagcagtgatgatggaactgtgggcacagtagagccatgggtagcagcatcctcatttctttgcccatattccttcttggaaaagggtgggcttcctcaaagaccttggggaaagcaggggatgactgggaagacctcgtctaaatgggtcagacccagctggagcagaatgaatgcacataaacagtggttcgaggaggttctgccatttgccagctgtgcagcctggggggttgcttccaggagcttcagttgcctcatgtgtaagtggagacagacatcatgatgccttctttagagggtctttgtaggctaatgtacgcacatgcttacccagtccttggcacacaggaagagtttcatagatgtcagttatcaacgcctgtcagagactgcaattatcccccgctgacgggttggctcacgacaggagaccccgcagctaggaggcgaaaaaccctccaggcaaagcacccccgcctgtacaaccagctcccccgacaaacgagtcccccggccgcttaaaagcgggtacctcccagtcaacactccgcccccctccccctctgtgccggctcaaaattacgcccgccacctgtcgcacacccccctctcacgcccccccccattgtcctccccacgtccacaaccccnnnnnnnnnnnnnnnnnnnnnnnnnnnnnnnnnnnnnnnnnnnnnnnnnnnnnnnnnnnnnnnnnnnnnnnnnnnnnnnnnnnnnnnnnnnnnnnnnnnnaacttctgggctcaagtgatccacctgcctcagcctcccaagtgctgggattacaggtatgagccatcgcacgtggtacaatacggtttttactgaatcagtgtttattgacagggcaggaggaaatattgatggtgatgatgttggactaaattccctgccatgctgggcatgaaacacacaggacacagatttgagacccctgggcctcttcttgaacccctcctctccaacccaatgacccaactccccacccaattgtccaaaaggctcgttggttgccagactctggcctccaccactgtctgggtaccatcctggaaatctcttctctccaaccaggacagagctgagagtcaatcccagacagagagaaagccaggggcttccccaacaggcgggacatggaggcctttgggaaagcctctgacgcgtgctactggtcatgggacacagcagggaattgggaagtgggctgggctcggccctgatttcaagttctgggcctcccgtcaccagctgcgtgacctaggcagggccacttagtctttctgagacctgacacacccacaggatgctgagaagtgaaatgaaagtgctccagcagcatcagaggcggggttcacaggccacgcaaggaagggtttctcactgatgctgattagaagttgtaaaaatgcaatgggctgggccattcccacatattgcccttgacctttctgactcccccatgacatcactagactccactgggtctgagggctttctcaatgagttcagtggttggcgctttgacctgtgtacctgccatatcacaccatggaattagcagagatttccgtctgccagccacctgcactttcagaaattgtgcctttgatagcaagtttccaggggctcagattgaggatctgtgcaaggctcctggggttgcacagagccttaggacaaaagatgtggatgagtggctggtgctggtgggaggaagataaactgaaggagagcttgccttggtagatttacaaccaaaggcctttcaacgcccaagagattaggccgggcattgtggctcatgcctataatcccagcactttgggtggccgaggccggtggatcacttgaggtcaggagttcaagaccagcctggccaacatggcgaaaacccatctctactaaaaataccaaaaattatccaggcatggtggcacgtgcctgtaatcacagctactcaggaggctgaggtaggagaatcgcttaaacctggaaggtagacgttgcagtgagtcgagattgtgccactgcactccagcctggatgacagagcaagactctatctcaaaaacaggattacgtgagcaggtttgcctgtgagcaggttttgctatttttttttaatttttaatttttgtggttacatagtaggtgtatatatttatggggcacaggagatgttttgctataggcatgcaatatacaatatacaatcatgggaaatggggtatccatccatcccctcaagcatttatcctttgtgttacaaacaatccagttatactctttcagctatttttaaatgtataattaaattattttgactatagtcaccctgttgtgctatcaaatactagatattaatagtcacatcatggagaatggggtatccatcccctcaagaatttatcctttgttagttatttttatttatttatttattttgagacggagtctccctctgtcacccaggctggagtgcagtggcacgatctcagctcactgcaagctccgcctcccgggttcacgccattcttctgcctcagcctcccaagtagctgggactacaggtgcccaccaccacacccggctaattttttgtatttttagtagagatggggtttcaccgtgttagccaggatggtctcgatctcctgacctcatgatccacccaccttggcctcccaaaatgctgggattacaggcgtgagccaccgcgcccggcctgttagttatttttaaatgtacaattaagttattgctgactgttgtcaccttgttgtcctatcaaatagtaggtcttattcattctttcttttcttttctttctttttttttgagatggaatctcattttgttacccatgctggagtggagtggcatatctgctcactgcaacctccgcctcctgcgttcaagtggttctcctgcttcagcctccagagtagctgggattacaggtatgcgccaccatgcccggccaacaatgttaacaaaaagagaagccacagacttggataaaatatctgcaaattatctatttgataaagaacttgcatccagaatatgtaaagactgaccaggttgcaagcactatgaacaacagtttccaggcgtgcttcctgcatgcccagcaccactcccaaagagtgatcacaattctcactaacatttctttttatgagacagtgtcttgctctgtcatccaggctggagtgcagtggcatgaacacagcttgctgcagcctcaacctcccaggctcaagcaatcctcccacctcagccttctgagtaactgggaccacaggcagacactaccacatcagactaatttttttttttttgtagagttgagggtctcactatgttgcccaggcttgtctcaaactcctgggctcaagtgatcctcctgcctcagcctcccaaagtgctgggattataggcatgagcccattttcgagatgaagaaactgaggcctggagagatgaagtattaatacagggccaaaggtcacagttcttcagttcaggcagaaccaccaggcatgtctggctctaaagcagtgattgttagtcctgactgcacatttagaaacacctgcagggctttgtgaaatcacaatgctgtttgaaccccagaacaactacatcagaatctctcatcagtatatgctttttttctttaattctccaggcaattccatgtgtagccaactttgaggaccattgatttaaagtgagggaacttaatctctcaaccagcgtttctgaaacctgggatcttccttaaaaatacacagactcccaggcctctctcctgcaaatgctgaactagatgcctggggcagggcctagcaattcgtgtttttcacaatcaccctaggtgaacatgactaccagacctgtgtcttacctaccctctcccgcctccagggctacaaggcaccagaccagtgggtcctggccgctggcccctgagaggcagggcaggagctgtgtgcccctagaagcatgtgccagggggaacttgggccctggagcagctggggcagcaggtggggagaaggagggtaggaaggttaaccctttgcatccatatacattgtgtcttgaagacagtaccaccccatcccactcctagccccagagcaactcaaccttaaccagactgttgcagaaagtggcattttctttctttttttcttttttctttttttttttttttttgagatggattctcgctctgtcgtccaggctggagtgcagtggcaagatctaggctcattgcaaactccgtctcccgggtgcaagcgattctcctgcctcagcctcccgtagctgggattacaggcacatgccaccattcgcggctaatttttgtatttttagtagagacagggtttcagcatgttggccaggctgttcttgaactcctgatctcaagtgatccgcccacctcggcctcccaaagtgctgggattacaggcatgagccaccgcacccagccttgttttcttctctttcttgtagtttggaaattctctttcctgggtgggagcaatggcttagagggcacagggtgggatgagaagcccagattgtagcggggtgccccagtgtgtttttaccacatggacaaagctacggccttgtgaaaaagcatgcaaatcccgtggcatcctcccctttgccaacacagtgtgaagcaactgtgcctcccacatggggctgcaggactcaggcaattagggctgcctgtctctgacttttaaaagaaattgctgcaagccagctggctcctaggggacacaaggagattgaagagaatgaggaaactccaggaagacagaaatagcctctttagcccagatcagatttttaacagctttgctttccttcttggtgtttcccaaggccaagccccgagtgagaacagaggcattgtcttgtgtctggaggcagacagaggggacatttaaagactggcctggtgacgggaagacaacccattcaaggacccagagcaagctcttctcacaagctagcagggcacacagatgaatagcaaggtcagcaaagggcgtctcaggaggtctcccccaacctcttgtgagactagtgctagagggtgggcttccccaagcaaggcctgagcaggagtgtctgcatggggtgacagagcggggacgggagcagtgtcactgccctctggagttttggggggagatcctcccccccgtgggaacctagagtcccagaggcgtgaagaacaccactgtgagtctcaaacacaggaacacgcagaatcagggacgctgtggtccagacatcaaagattcaggcgtctcccgcatccccggggaggcagtcagatgggaaccttcactcactataaaaacaaaactcgtcttgtgcagtgagaatgagcaaagtaattcctggagagaacctccggtggcttaagggaaagtgtgttttccaagctgggaggaaggccaagggagtgatggggaggaggagtgtcagcgtgggagactgggaaggaggcaagctggaaggtcagccctccacattgaactccctagtggaataaggagatgagaacattttcctcttcttcttggtccctggtacagcccctactgggttcctgcgagtggtgggccctgcatggcacctggcaggagaggacttccttccctctttctttgttgttgttgcttttgggacagtgttgctctgtcacccaggctggagtgcagtggtgtgatattggctcactccaacctctgcctcccaagttcaagcgattcttgtgcctcagtctcctgagtagctgagactactggtgcatgccaccacactcggctaattttttttttttttgagacggagtctcagtctgtcacctaggctggagtgcagtggcctgatctcagctcactgcaacctccacctcccaggtttaagcaattcttctgcctccacctgccgagtagctgggactacaggcgtgagccactgcacccggccagaatttttgtatttttagtaaagatggggtttcaccatgttgggcaggctggtctcaaactcctgacctcaagtgatccatcctcctgggcctctcaaagcactgggattacaggtgtgaaaaccgcacccagctttctttctctttcttatgtccttgtgcaccttctggaattccggggtcctgagggactcactctaccctcaaaagaggcagacctccctagaaagcccccatttattttcccccaggatagcactaagcatggctgagccccccaaggaaagtgaaggttgagggcaggacgagttgggaagaggtccccagaattggagaccgatgggggtcagtgactacctgccctcacaactaccttgtggtctccttgacggaaagactgtggtcttttattcactcccgtccccagggactggcacatagaaggggcccaagactcctgtcacctgctgcgttagtgactgtgataccagcgcctaccaggcttctctctacagctctctcccctgttcctcctctgctgaccgtgacaaacaagcaaaggatttgaaaccaaggattcgagaggaaaacacatagggtctgaaagctgggagaagacgcacttctgtggttcaagagaatgtggtaaaccttgaccttgagcaggaaggaggaactgcacacgctccggaggaactcaccaactgtatgacctcgatcacacgagaacgccagctcccaggttgaggaagaaatgaaagaaagcacttaaaacacctgccacctagcaggtgtgcaatactgttaatttacatccctctatcctgagcagaaagctctcctcttaaagggcccatcttcccatcaccctagccggaggctgtttttcttcttttttttccatccattcagctgtaaatccttcagaggtctccagtccactccaggacaaggactgtatcaggacctgagtgggtaggagggtatgaggcagggtgtacagaggctgcagggtcctgcgacttggggcggatccagggcagcgaggactaaggggaagagggcactaggagcgctagtcctggcagccaccatctggcagagctatcccagaaggaagccccccaagaggaatgtttggcactcttggtggttattaccctgtaagtctctccctgtcactctccactctagtctttagcctccgacgtcctcctggcgcccgccccttaccctgggtccgctccttctgcttctgggtctctggggaagcgttcaatccacggtcgcggctccggtgctcctcaaacggcggcgtttaccggttgcttggcaaccccggcctggctccggacgcgcggggcgacgcggaaggaccccggagcacgtgactcctttcctgccacgtcggaagcgcaggccatccctcttctttttggaggtctcctgagttaggagaagaattaaccaataggttggtaacatactaataatgatcatgaatatttgtaggggcgttgccaaggcgcttatccaagcctacgtttgtatgcatttgcatcgagcaaggcacccagaaaatgcaaggaagaatagtcagtgcttgggaagccctgatccctgggtggtgatggcgggctctgcttaccatcttggccgactgtgttgtcctgccttccttcagtttccgcatccattcagtgggaattataactctgccctcccctctgctaccatccttcctccactttctgtaataaagacatcttcccgcaccaccagaatggaaactccttgggagtagaagctggggaatttttttttttttgagacggagtctcgctctgtcgcccaggctagagtgcagtggcgcgatctcggctcactgcaagctccgcctcccgagttcacaccattctcctgcctcagcctcccgagtagctgggactacaggtgcccgccactacgcccggctaattttttgtatttttagtagagacggggtttctccgtgttagccaggatggtctcgatctcctgaccttgtgatccgcctgcctcggcctcccaaagtgctgggattacaggcgtgagccaccgcgcccggcaaagctggggatttttacagcttagctgggtgattggcacgaaatgtactgtgttcattgaatgaatggttgaatgaatgaaacgagtcatgtttctcagggagttaaggcaattgcgatcatgtaaattaaaacaagggaatttggggctagaaaaaaatgaatttgaatcccagattggctacctactaatctcatggccctgggcaagttcctttccttttctaagactcagctatcctcatctgcaaagtggcaggacagtggcggtgcttattagataatggggaggattaagtgagagacaacacaggggcgtgtccagcccccgtccagagctactggtgcctgaatgagtggcagctcggggaatgaggttatcccgagttcagatgctgacatcggaaatttggactgggacagaagaggagtgcgtcatccaagaagtgggattggggttggaactgggccttgaaaaatggttatgagttgcagggaagaggagtggggagggcgttccagattgggggagggcatggcgtgagcaaggaaggaaggggcagtcgtcatggaagaaaggcattttgcgaggatggtgggtggatcagtctggctggggttgagagtccctgcaggggaaaaatgagagaggaatttgcaaaggtcagccagggccagtctgtggggggtcccaagagaggcaggctgaggggcccagacagctttccatgggaagccctcagcgggtttgggatctgtgaaaggacaggaaggaagcaaacgtttctctcccacttcccaacttctccatatatgtgttgtcaccactacccacctgcctttagtggggcaggtgcaaggaaattcccaatgagacggcaccttgcagggccgcactaaccaaagacaagcacctaaatgactgctgccaccaatctctcctgatccgttctggctcgcaccagtttctcgggacaaagaactcttaggggtgggtgctgagggtcctgacaggggctgggtggaggagctcctgaaagacgcattgaaatggctttgtgtggtcagaggtgaatcagacccaaagtctccaagaataggaaacgatccactccatgatgaggtagtggctggctggggttgcaatcataatgcaaccctttccactccacctccagccctgggaagccgagggctctctgaagacacattattttgtgggtgggaaagtgggttagaagcggaaataggaaaagttgaaaggaaactgcagccacctttaccatattatccaacaatttagtacaggctccccacccccaccctcacccagaaggctgcaggccaccgaccacagagggcagctctgttcactggccaaacagttaccccttggccggctgcctcggcgtgaggtcatataattagaagtattcacaaggacctagtttgaaaacaattgcggtgcctctcagatcttcacccaatcacagcataattggcagcagaaattctttgctgagagccgcccctggccctggacatccccaggcattgccacaacccgttccactgctgtgtccccctttagtcccaatttttgtgtgcgtggtgaactacacataaaatttaccatcttaaccatttttcagtgtatagttcagtggtattaagttcattcacattgttttttggtctcgctctgtcgcccaggctggggtacagtggtgtaatcatggctcactgcagcctcaacctccagggctcaagcgagcccccctcctcagcctcccaagtagctgggaacacaggtgcacatacccatgctcggctaatttttttcattttttgtagccacaggtaagaggcaggacttgattctggaggcagggctcagacaccagaccagactgagggctagctaaaatagggaagaggcggaagcagctctccataagacacgcccaccagtgtgccatgtcaatttaccattgccatggcaacacctggaagttatccaccccttccatggcaatgacccaatgacctgaatgttaccaccctttttctagaaatgtctgcatgatccacctcttaatttgcatgtaattaaaaatgggcataaatatgactgcaaaactgcttctgagctgctagtctctgcacactgcctacaggtagccctgctctgcaggagcagtcatgagctgtagcactgccacctcaatcaagcagttttcctctgccactggctcacccttgaattcnnnnnnnnnnnnnnnnnnnnnnnnnnnnnnnnnnnnnnnnnnnnnnnnnnnnnnnnnnnnnnnnnnnnnnnnnnnnnnnnnnnnnnnnnnnnnnnnnnnntctagatcctgaggcctctcccccatgtggggctagcaagatccgtatgtcctatcccactggctttcacacctgcccaggcacccctcccagagagggtcaggcactgaggcggcccagatgccagaaagtctcacaaccccagatgaggcggttgcccctcgaggtcagggctcagaaactgcccagctaagcccctcagcctcaaagtgaggaaactcctgcaaggggaatggggtgctccctgactcccccgcaaggggaatggggcgctccctgtctcccaggcaggtgggttgctgtgaccatgtggatgcttttacctgccctagttctgtgtctgggtggggggaaagctcaacaaaggggagtgaaacccctaaaccccctggcttgtgggaccctccctgggttgtttttacccagaaactgagtggttcaatcatccctttaccactctgagcatcggtttattcaggaccaagaacgttccttcaagtcagctgtgaaatcagctcttgaaaccaggcatcttgtctaccacgcctcacctggactccaccccagccctagggtggccggcgcctggccatccaggggaccaggcttgttgccacctccaggctcgccttgcccttcccagacccacagggaccacctaggccaggcctttattcccagaccccgaggctacttgggggtccggataagggtgtggtatacgggcttgacgatgaggtgcaggtgcagggcgttctcaaccaggtactcggagttgcgccgctgcaggtcggcgtgcgccaggaagtcgccggcctcctcgctgctctggtggaagctgtaggcgtggcggaccagcaggcggccctgctggcgcgcccccaccagcaccgtcttctggaagctcacgcccgccgcgtcgccgccgctgctggccggcgtcaccaccagccgcggtcggccgtcctccgggcgcgcggcgggcagagcagtgcccgcggcgtccgcgtaaacgggccgcaggctgacgggcagccagcgcggcgagaagagcacgttccaggtgacccggcggcccgcgtcgtggccactcgggcccagctgcgtctggaagctggtgctgcggtcgtcgcgggccgggttgttgatgacccacggggcgccccaggcgggcgcgaggtagttgcggggcaggaaggcgctgccgttgacgtcgaagaacttggcgtagtgcagcggcgacgcggcgtggaactggtaggcctgcagcaggaggtcggccaccgcggggccgtggcgcgccagggctgccgagcgcgcctgcagctggaacagctgtgccggtgggatcatggggtagcgtatggcgcgcagcgcccgctcggccacggcagggggcggccgcgcgcgacccagccaggcctccagcgcgtggaacagctccagttcatcctgcagcaccaggtccgagcgttgcaggagctgccagagcagctcggggctcacggcgccccactcggtgctggccgccacggccgacaggttccaggccaggaactgcaggcagctctcgcgcagggcctcgtccccggtgcccaccgcgtagtggtaccagcccaccgccgggcccgcgcctcccgccaggtgcgcgcgcatgtagtcggccacgccgcgctgcagggaggacacgccgtacttggtggccagtctgtgcagggggatggcctgggtcagcagcacggtcagctccccgcagtacaggtacctgcgggagagaccgagaggtggggcggggtcagggcggtacccacctcccaggatagattttttagagtccacaggggacccggcctggagttggagcttcactgtccgggtgcaaacacagtggaagccccaccctgaggcttcccatgttttctttcaaggacccttccaggccattcttacttcacaggctcttctttccgtttccgcggtgatgtagaaattgcctgcattgactgtgcctctactaggcgtgcagccctaggctggaacaaaacagacgtggctcctgcctttggggtttccagtctggttgggatccatggcctgccttctccttgccatgagtctgggcaagtcacttaacttcagtgaaccttaggctaatcaatcacctaggaaagggggagtggcacacacccctcagggttactgtgacaaccagaggagaataaagaatcttgctacaggccaggtgggtgctagtggctcacacctggaatctcagcactttggaaggccaagatgggaggattgcttgaggccaggagttcaagaccagcttgggcaacatagcaagaccctatctctacaaaaaataaaaaatgttaaaacattagtcatgtgtggtggtgcacgcttgtagtcccagctgcctgggagtctgaggtgggaagatagcttcagcctaggagttcaaggctgcagtgagctatgatcatcatgccacgacactccagctttttttttttttttttttttttttgagatggggtctttctgtattgctcaggttggtctcaactcctggacttgagcagtcctccaccttggcctctcaaagtgctgggattacagtgtgagcccccatatcttattgcagcctcacctttctttttcctctcctactgttggtgatcacttctgctgagtatctcttcgtcttacttctgccactgtcccatggctcacctttcctgccagtccccaccggcacacggcaccgcacttgcctctataggagtgtggcagccactgccagccatcttccccaacgtccatttctcccctttcccctgcgtgattgcctctgggaataaaagaccacatttcccaggctccctcattctggccttggccatgtgactaactgctggtcaatgggcgcagtttgggatttgcaggaaggctgattaaatgcaactgattccgggttaacaggaagaccctttttgcccttctgtcttatcccctttcctgttgcctggaacttggaagcaatgtatggaattctgcaggcatctcgtctgagccgttagaacagagttactttcttagacactagtgtgaatggcaccccctgagcagcatcacggcaggaggcaggaggtggagagagccgtctaactttttcagctccctagccctgtggttccaaacctggccaaacaccaaaaccacagcgatgctttcaaataaaaaatattcgtctataatggaatatttaggaaaataaaaagtaaataaataaaataaaataaaaaatgattgctggccctaaccctagacctgaaactgacaatccaggttgggatccgtgaaactgtagtttttttgtttgtttgtttggttggttggttggttggttggttgatttttttcagacagaatcctgctctgtcacccaggctggaatctagtggcacaatctcagctcactgcaaacccaaactctgcctcccaggttcaagccattctcctgccttagcctcccaaatagctgggattacagtcgtgtgccaccacacccagctaattttctatatttttagtagagacagggtttcaccatgttggccaggctggtcttgaactcctgacctcaagtgatccacctgcctcagcctcccaaattgctgggattacaggcatgagccaccgtgcccggccccaaaactgtagtttttaaaagctgtctatggccaggtttggaaacagctctgagggggttactaggaaccgaaagtgacatcaaactgcacagatgacacgggcaaagacagggagctgtacagtggaagaagggatgcaggggtcactgtcatcccagtgatgtccggggaaatggacataacaacctctaagggcctgggcttccctgaccctgtaggtggaggagccgggggctgaggaagggatgaagccatcccctagtcttccgcgtccccacctgatgaacttgtcgaagacagcggcgcagtcctgtggctcctgcagcaccgcctcgctctggttacttagcagctccaggaacagctcactgtgcagtcccagcagcaggcggtgggcgtggaatacccggacctcatcggtgcccgcagcctgcacccgcagaaccacatcgctggcgttgcctgccgcagcagctcctgcaagcgctggagcaccgcctgggagtggttgatggaggtgccagctgcctccccgccaacatcggctctctgtgctgcagcaggaaggaacacagcatagcctgagaaggtgcccgggcccagaacctcagtcaggggtggagagggaccagctggagacatatgcatgggtgtgagcagagggcaaggtgggcctaggcgggttgtatgtgcatacctgtttgtgcccacgaggcgcgtggatgcatcggtgcacatacaaacgcaccctgggtgggaaggtcatgccaatgcaaaccccaagaggatgctcttggaagggggtgcattcaggcagggggaggttgtgctcaggtttaggacaacatgcccagaactcatctccatgctgccagccccccaggcaagggttgaggaaactcgtggtcccacccttctcacttcctaaagaattatccatctaaccccttggagcagtagtcagaagtggtgcattcactaacaaatatttattgagcacttactatatgctagacattctcctaagagcttgggatgtggcagtggacaaagcaagccaagttcttatgctcataaaagcacgaattgacatatcaaacgggtaagacacacacaaataagcactccagttttaaaggagccagccagggaaccagtgtcaaggcaggctccagccccgcaaaggcccttgaacggaatgggcctggggtactgggagcagagagagcattagggaggccacagcagtagcaggagagaggggcgggtgtgagacgaggctgcgggtgtggaagggaagctgttttccaggcccagccctgccctcttgggtcctgatctctgagacagaagccgattttctggggtggccagcaggggacaggagaaagtgcgaagggccagctggtgctggaatagaacttcctgggtaactgagcattgaggctggcaggccggccctttgcttatgctccaggatgccccgacagtcagatggggatatgcactcagttatagaaactgtcagcagctttcccaagccgagaacagcgaggggagcctcgcagagggaggcgggcgggggcctgattgcagcagatggccgcagccacatgtgcacgcacagcacatgcaggcccgtggtgcacacaggagagaaggctcacacaggagcagagcatctgtgcatgagagagggaggccgagggacaaagggagggtgaaagagaagcgggtagtatgtttcccagcacggccttccccagctgtcactttgaaggacctgaatgctgatggcgtccccattcagcctctgcccaggacaatgggcaatggagggtcctcttgtccttaagagccctgcccacctgcctgccaggcccctccttccttcagacagatgagtccgtggagctgtccggtccaccccgtgctctccccagcagctggacaccgccccctcctggccggccgcgtgcagccagggctgggacgacctgccgctccaccctgccccgcacctggcccactgcccgctcacctgcatgggtgaccaggcccaccaaggtcagcatggcccagaagctgccccaggacccaggcttggagtagcctctcctaggcatctttatgctcagcccccaagtccactggagggacggtgaagcccagaccactctgctcacatccctcttccttatataggatccggcacaaggggacggcaccccccttcctgcttggcctccctcccccactcagcctcctccatggattggtggaaactggccccagctgttgcccaggcaaccacttaagccagagagcggcagccccgggggctattgtgctgcctgtgggcccccaaggggaacagatccggaaccctcctcccccaatctccttaccacccagcagggctagccgtgcctctccctggaaagtttcaggctctctgcagaataggcgaggggctccaggaccactggcagccattggcctgagggtccccagttccctcccccaaccccaggcctcggccctggcacagagcacacttggcagcgtcgtgcctggagcaccatggtgagccggctgcaaaggaagggcctggaagaggaaaggagaggcggctgaggctcccacccctcccccactcccattttggggtggggcagctcctcagagagaagctcagagatctctcgaatagggcccatgggcaactgatgtcagtttcatattctttgttgaagaaggttcctggaatgctgtggggagggtgatgggctggcaggaaagttctgtggggactgtgactgtcgcctcccccaggggcaagctgagccaggtggcagggctgggcatagagcagatgcaccctgccccgtgcaccactgcatgggtgacccctgcccagagcggggctggccaccttctagctctgcgctccagccagcccaaggctggggactgtctgccctgctatttcctgacttgaattctccttccccaagtggcctcaggtctctgggttcacctccttggaaggcttgttttaccagcttctgtcttatttcccactgtaatttttccttttccaggctaaggaggcatgctgcagacctggtgtttcactcccaatgtaaggaaactgaggcagggagctaggttgcagtctcagttgggttagtgcagaggagtgctcttctaaaaacaaaggcaacagagagaggaaagtgagtctggagctcagcaaaagcgcgcgcgcatgtgtgtgtgtgtgtgtgtgtgtagggtggcatgctgtgagtcctcacctttgcagggagccagcagggtctgccccagttcttcgtgggagggactcctttgagcttggctaaccgaagtgggtgactcccaagggatctgactccgaggcagggctctaggttggggatgaattaaatcttcctctccctggctctctggatcccaggggccagctcgatgcattgatttctgcctctgcgtggcacagagacccagcagctccaccccctctctggagccgcagagagagcaagaactgggtctggcacctgcctcgtccgggttggcagagttggagctctccagcccagcgcaaacccctccagctgccctgagtttcatgcctggctcccctcgtccaaatccactatcccttgcccactggctgcccgcctgcccttcccatgggctgtaccatgtcctggctcaacccagcaagtccaagtctccatgcagcagggcagccctggtccctgagggcatcccagcttccaagcacagtgctttcgataggaatgttattgatgataagagaacccgctactcagaaaactgtcgtttgatatttgtgcctctcaactccagcctccttcagcctctgcatcagtcattctttgttttgttttgcttttctagaggcagaatctctcagtcaccaaggctggagtgcagtgacacaatcatagctcactgcagcctcaaactcctaggcccaagcgatcctcctgcctcagcctcccaagtagctgggacaaaggcagtgccaccacgcctagctaattttgtgtcagtcattcttgaagggtagccacctgcattagaatctcccatgctccaccttggaaccaggattttcaggggcagggtctggctgtctgtattttctaagtactcccagacaattgttatacgcaccccaagacaagcgctacctactagagctagattggtggcatttcaagtgtgaaggaagctgggaggccctggatcatcaagaagacccggaagagtcacctctgactccccatctctgacaggccccacctcccattatttctaatctcccttatccctggccctcttcgaatgatttagaaactagctttccacatagaggcattctctgttctcattttctttttttctttttttttgagacggagtcctgcaccattgcccaggctggagtgcagtggcacaatcttggctcactgcaagctctgcctcctgggttcacaccattctcctgcctcagcctcccgagtagctgggactacaggcgcccaccaccacgctcagctaattttttgtactttcagtagagacggggttttaccgtgttagccgggatggtctcaatctcctgacctcgtgatccgaccgcctcggcctcccaaagtgctgggattacaggcgtgagccgtgcccggcctctcattttcgtaacagagcattgctggagtgtgtgtgtgtgtgtgtgtgtgtgtgtgtatggtatgcatgtgcacatgtgtgtatgcagtgcgtgtgtgtgcatgtgcctatttatatgtgtgtgcgtattgtgtgtgtccatgcatgtgcgtggtgtgtgtgcatgcatatttgtggatatgtgtgtgtggtatgtgtacatgcatatgtatgtgtgggggagtgtcctggggcgggagagaggaagccaggtatttgccctgagccctttttttttttcttttgagatgaagcctcgctctgtcgcccaggctggagtgcggtggcgccatctcagctcactgcaacctccaccttctgggttcaaacaattctcctgcctcagcctcctgtgtagctgggattacaggtgtgcactactatgtgcagctaatttttgtatttttagtagagatgaggtttcaccatgttggccaggctggtctcgatctcctcacctcaggtgatcctcccgccttggcctcccaaagtgctgggattacaggcgtgggcacggtgcttggccaagtctttgagaggaagaatctgcagcactgcatatatatatatatatatatacacacacacacacacacacacacacacacacacacacacacacacacacatatattggccccatggatctgggagcgccataattccttgaaggcaagtctgatgaattcacaagccagcaccatcctagagaggagtgttacttcccgccccagacgggagtgtttatagcccaagccatgtgtctgaggtcttatgaccaggaacctcagaggcaggatttatttttcgagttctgagttgtgcttgacttttcttttttctgatttttgttgttgttgttgttagatatggggtctcactctttcacccaggctggagtgtggtggcactgtcatagctcactgcagcctcaaattcctgggctcaagcaatcctccagcctcagccttccaagtagctgggaccacaggtatgaaccactgcacctggctacttgacttttctttccacaaccccatgttgtgtttttgttttgttttgttttgttttgttttgtttgagatggagtctcactctgtcgccaggctggagtacagtggtgcgatctcagctcactgcaacctctgcctcctgggtgcaggcgattctcctgcctttgcctccggagtagctgggactacaggtacccactacctgtagtggctggctaattgttgtatttttagtagagacggggtttcaccatgttggccaggatggtctcgatctcctgacctcgtgatctgcccgcctcggcctccccaaagtgctgggattacagatgtgagccaccatgtccagcccatgctgtctttttggggaagtttttccaattgtgataagtgatccctttggacaaggaatctctagtactgtaaaagcaacggaaaactcttgcaagcttgggaccagataaagagtttctgaatctgcaaagggggtgatcagacactggactgtggtaacacctcagaggggtgggctccagacgcagcctggccctacctggcaccctcccttgcatctgtagtgcctcctgtcctgacttagggttccctgagtcactgggccacttggactggggacaggagatcatgggtttaagttccaggccccgtgtacacaggggagcacataaaggtaaatatgaggccgggcatgatgtctcacacctttaattccagcactttgggaggctgaggcgggtggatcacttgaggtcaggagttcaagcccagcccgggcaacatggtaaaaccccgtctctactaaaactacaaatattagccaagcttggtggctggtgactgtaatcccagctacttgggaggctgaggcaggaaaatcgcttgaacccgggaagcagaggttgcagtgagctgagattgcacccctgcactccagcctgggcaacagggtgagactctgtctcaaacaaacaaaaacttaaataagaaggaatccttggccaggtgtggtggctcacatctgtaatcccagcactctgggaggccgaggcaggtggattgcatgagcccaggagctcgagaccagcctaggcaacatggcgaaacaccgtctctacaaaaaatacgaaaattagctgggcgtgttggtgcttgcctgtaatgccagctatttgggaggctgagatgggaggatcacttgagcctgggagttcgaggctgcagtgagctatgatcacaccactgtaccacagcctgggtgacagagtgagaccctgtcttgaggggtagggaggcagaaggaaaaaaaagagagagagagaccctggtgctcaggcctggtggctctggctggactgatcagggctgaagacttcagagaccaaaaaggtcaaggtgtggccgggtgcggtggctcacacctgtgatcccagcatttttgggagacccaggtgggcatatcacctgaggccaggagctcaggaccagcctggctaacacggtgaaaccccgtctctactaaaaatacaaaaattagccaggcatggtggcaggcacctgtaatcccagctacttgggaggctgaggcaggagaatcactggaacccaggaggcagaggttgcagtgagccgagatagcaccattgcactccagcctgggtgacagagcgagactctgtctcaaaaagaaaagaaaaaaaaagtcaaggtgtgcggctgggtcttcataacatctttcaccttgcccaggctggctcagaggtgactgccttagtggataggatcccttccaccgtgggctagcagcctaccctggtcactgacaccacaccatgtaggaaagaatcgccaccaccaagaaggggcctctcacctctgtataggctgtgtgctggctgatgacgtggttgccctgtcctgtctgctgctgccactgagctggacatctccaggctccatctcttgaaccatggatcccagcgttgttagcaatgagtattatgatgttgcccatggagcaaaagatccagtggtccccacttccctgcaggacatcactgctgtcctgggtacagaagcatatactgaggaagacaaatcaatggtgtcccatgcacagaaaagccagcattcttgtctcagccattccaggtggctgaggtctccacaggtcacagggggaagctgggacctccgaataaggccatccaaggactccagcagtttccgccaggtgaatccagctgcctcccagaacaggccttctatggggtgggatggtaagttgctggaaggacgtgcatggggcatcattgtagcaaactcagtccccctcctccatctctccctctcctcgctctgaatccagggagctctagttttctgtgtagcctgtgtgacagccttggttgaaacccttgtgttccgtctgaagaatatttaaggtttccagtcaagtgtacatccctcaaagaaacaaagtgggcttggcatggtgactcacacctgtaatcccagctctttgagaggccaaggcagaaggaccacttgaagcctggagttccagaccagcctcggcaacacagcgaggccccaaactctctctatatctatacataaaatttaaaaaacaaagtgtagggacagggtgggcactcggtaaatgttggcaggaccctccttgcccctcacccatggcagctccttgaagagagggtcagcctcctctcacccctagcctcctgctgcaaggaggtggtggcctggggcgtcatctgtgctacttgcactttctggggctggggtcccagcactccaccagtagactctgagcgggcagctccgtctccagtcccactgtgccacccagggtgcctagccaaaccatgggactttcaggcttgcagggtcaggatgtggccaccagggggcagcagggcctgcgctgtgagtatccgagggggggttgggatggggagttccaggctctgatgtgagatctaactcccagagctgggaagctccctatatttcctgccatattttctgctgcattcccagaggacaggccatgggaggtgattccaggggggcctgagctctcctcccgagaccgtccacggggcatccatgtcccgggtacctgcttgtgggctgctctggtcactcttcctctagggcaggagagccagtctggcctcttctgagtgcacaccagcaacggctgttgtttatttgccagggattgatattcttgagggatggtccatttcaccagggccagggaaacaacagcttgcaggactgtggtttcccagcaccggctgcaggcagcctcgtccggctgctcccagaggatgccccaccctgtgcacggctgcctgccatcctgcccctgggggtagcctccacctcccccaccatggccactgcaggactgaccctgtgcacctggtcccctgagcctcttgggatcatagccctgtctgtggcagccttaccactcctacctggcacgacttccccaactcctcacagaggtgccctactctcttccctttcagtctggatgctcatagagtcagcaccctgagtccttctgcctgtccccaaagtcctcagccccaggtttgaccccagctgaacacaggccagctcacagagtgccccggggcacgaggcagccccccagaacccccatcctgccatcctgcctcttctcctcacttcctgctcccccaggcatagacatacctgtgaaccccatgccaccctcagctcgtctctcctgaagctgaagcccctgcccagcccgaccccttcccctgcctgtgcgccttagagcaccctggtttgctccaccagcatctactctagctctttccccggtgcctccgcccaccagttccttcctcctccttcccccgccccgccccctgcactaacaggctcagtgtctgcgtaaggatcctggggcaaacaaccacttggagagccaaggggtgagaggtacagctggcgatgctgacagggagctgcggggaccctcagaaaaagccacaggtgacccaggactcaggcgcccagagcatggggcttgagggacgagagacaggtaaggcatcttgaagtggggtgtgctgggggcaataaggtggaaaggcaggagggaacaggaggcaggttagggacctagagggtggagtaggggccaaagctgagagtgagtgagcagtgaccccccggcctcagcaggaaacgaaaagctggagttcagcctgaaagagacgcgcagtgtggcttcaggggaacaggggccagagtggacggtgcttatcctagaccagccaccttacccctgtggactgagtttccccatctgtggacttgggccattccagctttagtggtgctcacctttgaagagggtatctttagtttagaaaagagggggccctaccaacagcctctccttagagggggacagctgttgagtggagctgtgcagacctggggcctccactgtggacctcctagagaggtccctgtgtgtggctggcatcacccgggtcggaatcacccaggttgctgattacaagcacggctgctgcaaccccgcttcagaccctctggcccggaggcggcccaggagcctgcacctcgacaagtgccccctgtttcagagcccctgctaggccgggtgagggcccatggggaggacccatggggagcaatggtctctatggcagcaggccgtgctgccagggacttcccatcagtgggggagccgggccactgagggagtggggtgacatggggtgggggtgagggtggtcttggcaagaattctcacagcaacagacagtgcactcagctgggtctgactagagggtctgcacagagcagggtgactagaaagaccccaggtcagggcggggctgcgcccagccaggttagaaatagaccagaggctctgactctgcccatccgcaccttctagctggccagccacgagtgaccctgctgcccacgccccacgtcagcgggctgagccaggagtttgaaagccactggccagagatcgcagagaggtccccgtgtgtggctggcgtcatccctgtcatctactacagtgtcctgctgggcttggggctgcctggtgagtggggagctggggtctggggacttgggcttggccagaaatggggatcctccttcaatgggtgccagtcctctgtgtttgacccctgaggccctggatcatagacccctggtctttccttgccattgtcagggtgttctgggtcactggaggggaatacaagtaaggggctaggattgggggtgctcacagctaaacccaagttttccccagcagtgagcgcactcttaggataacaaaattcacataggaactggctcagctcagtacaaagctccccgtgctgcccatgccttcagagagcagagcttggggcagaggtgggtgtgtggatatgggaaggacgggtggtctcggccctggggatttccccaagtctgatagctaaacccatgcctgtgtctagggacgcctccattctggaggacacagaaaacctaaaaaggacttggaggacaatgccataggacaggtagctttttttttttttttgagatggagtctcactctgtcacccaggctggagtgcagtggcatgatctcggctcattgcagcctccacttcccaggttcaagcaattctcctgcctcagcctcccaagtagctgggattacaggcatgcaccaccgtgcctggctaatttgtatatttttttaacagagacggggtttctccatgttggtcaggctggtcttgaactcctgacctcaggtgatctgctcgccttggcctcccaaagtgctggattacaggcgtgagccaccacacctggccaggacaggtggctgctgaggacccttccatgtgcacttacctgtgcataaccggggtacagccagtggcctgcagtggatggacagggcagagctggcctgggtggccttctgggcaaagtggggtttcagaaggatctggaaggagaaaaaagagaagccagcgcagcctctgcacatgcagatggggaggtgcgatggcgacaccttggaaagcagagtctgagctctcttctgatgcctctcccctccctcacctcggctgccctcagtcagcctcctgaccgcagtggccctggcgcgccttgccaccaggaccaggaggccctcctactactaccttctggcgctcacagcctcggatatcatcatccaggtggtcatcgtgttcgcgggcttcctcctgcagggagcagtgctggcccgccaggtgccccaggctgtggtgcgcacggccaacatcctggagtttgctgccaaccacgcctcagtctggatcgccatcctgctcacggttgaccgctacactgccctgtgccaccccctgcaccatcgggccgcctcgtccccaggccggacccgccgggccattgctgctgtcctgagtgctgccctgttgaccggcatccccttctactggtggctggacatgtggagagacaccgactcacccagaacactggacgaggtcctcaagtgggctcactgtctcactgtctatttcatcccttgtggcgtgttcctggtcaccaactcggccatcatccaccggctacggaggaggggccggagtgggctgcagccccgggtgggcaagagcacagccatcctcctgggcatcaccacactgttcaccctcctgtgggcgccccgggtcttcgtcatgctctaccacatgtacgtggcccctgtccaccgggactggagggtccacctggccttggatgtggccaatatggtggccatgctccacacggcagccaacttcggcctctactgctttgtcagcaagactttccgggccactgtccgacaggtcatccacgatgcctacctgccctgcactttggcatcacagccagagggcatggcggcgaagcctgtgatggagcctccgggactccccacaggggcagaagtgtagaggagggggcccagctagggagctcagggtggctcatggccacatgtactggggcctttgaggttgtacccaaaacacgtttatcaacagcttgctttccttgggtgggggtggaggctcctcctttgggtgtggctcccaggtagagaggaggacaacttagccagctcttatgtttgcttcaccagcaatccctatttcctgggaagatgaaagggcactgccaggcacaggctaatagcatcagtgctgtgggcattcctttgcggggggcattttgcctggctcatcgtgaatgccagattaatgttggttgaatggatagaaaaacggacagatggaggccgggtgcggtggctcacgcctgtaatcccagcacgttgggaggctgaggcaggcggatcacgaggtcaggagatcgagaccacagtgaaaccctgtctctactaaaaatacaaaaaattagctggacgcagtggcgggcgcctgtagtcccagctactcgggaggctgaggcaggagaatggcgtgaacccggaaggcggagcttgcggtgagccgagatcccgccactgcactccagcctgggcgacagagtgagactccgtctcaaaaaaacaaaaacaaaaacaaaaacaaaaaaggacagatggatggatggatggatagatggatggatggatggatggatggatgtgaattgtctccagcccacccccctttcctggtgcctgcttctcattccctgaatggatcacctctccagctcctagtggcaatgccagagtttgaaaaggaagatatcttcaggacttaaggcatttcttaggctggaggaaacaaagaaattgagctgagcaatgggagggggctgcttgggggataaaagcccccagggccagtcagaaaggggtgatcttaaatcagatgtgaggagcccaggcctgtgtctgtccagccacaggagacacagccccttaggtctcaaacaccctggttggattccacattactccctgccctaaaccagtacaggttcatgggcccagaaccagcactggggctatagtttttgttgttgccaatgaggagaaagaaaatggtctcttaacccagggtactaggagaacaggaaaggaggacctagctggagatgaccctgagcttctgctgagccccccgagctcacgccccttggggaaaggtcttttcctccaccactgggaggcgggagttggcagagtccatcagagccatgaggagctctgctccccaccctcagcctctccagggaggctctccagggcccctctctcctctcagcaccaccatcccggagaggcagctgggagagatcagcagatggaactcccagctgctccaggctgtgggtaaacacattagcagctgagctaggaccactttctgcttcctggtcaggctgagctgacctttgtcctgaatgggaggttcagacctgcccccaccctcttagtgggatgacatcagtcaaagagctgtttgtgcacccagcacacagtcaatgcagaatcaatgcttggctttccactttgcctctctgcttctccccagagcagggatgtccagacagggaggttcagctaacccagaaagaggataatgtgggtctccaatgcatttgccatgattctcaactccaaaaaactctgaaaaccaaaacatgtttccgaaatgtgccacaaacacgtttagcggcacagcgtgacccggtgtgaggtgatttctggtcccgaagttgtcctgtgattgtgagtcctgccagccccaccagggactgttagtggagtgatcatgtactgctgtccacaccccacggaatcgtgatcgaacgcgcaccactacatgcacacagcaccttcctctgctctgacgtattctgaattccaagacatgtggtgccgagttcagagaaaggactgaagacctgtaagcccaacacttctgctccggggtggtctacactgaccctgagcaggtgttaaggatggaggaccccctcacccgcccacacctccatgtgcacacacagatgtatccccaggcagggttgatgcacctgcgctttattctttgcttaaggaggagggggatgcaaatgcaggtacccggggagggagaaggtccaccggaggaccagataatgtcggccccagcccagcctgagcctgccctacagaagcgggcacgggaagaaagcacaaagttccatggatgaagaactaaatggaacaacctgcagggaccctgcaggagagaacccagtatcagggaagagcatctgtgtctccatggatggcaacagcagctgggtctaggccagaggcaggatgccttcctcagctggctggggggctgtctttcaggaggccagctgcaatattagctcaactgtctctgagcaccagtgaaaccaggaacttccagaaactgttggggaggctctttcaagacacagttttgttttgttttgttttgttttgttgacatggagtctcgctctgttgcccagtcgctc

SEQ ID NO: 910 - protein, 1464 aa, Homo sapiens [sequence omitted]

SEQ ID NO: 911 - DNA, 1541 bp, Homo sapiens
  source
  (1)..(1541)
  CDS (201)..(1006)
  CDS (1044)..(1341)
catttcactttcagcacgtgctctctacggttaatgtcatccttgggaagcccgtcttgaacacctggaaggttttacaacagcaatggaccaatcagagttcacagctactacattcagtggaaagattttcccaagcactacaattaggaaatagccctcctttgtccttctcccaaactaatgtgcagatgagcagcatggtaatcatgtccagccacccaaaaacctatcaacagaggtttgttttcccatactttgacctctggggcaatgtggtcattgacaagagctatctagaaaacttgccatcagattcacctattgtcaccatggctttcccaactctccaagccatccttgcccagggtatccaggaaaataattttgcagagagcttagtgatgacgaccactgtcagccacaatgtgactatgccattcaagatttcaatgacttttaagaacaacagcccttcaggcggcgaaacaacatgtgtcttctggaacttcaggctttccaacaacacgggggggtgggacagcagtgggtgctatgttgaagaaggtgatggggacaatgtcacctgtatctgtgaccacctaacatcattctccattctcatgtcccctgactccccaaatcctggttctctcctgggaatactactggatattatttcttacgttggggtgggcttttccatcttcagcttggcggcctgtctagttgtggaaactgtggtgtggaaatcagtgaccaagaaccagacttcctatatgcaccacacctgcatagtgaatattgctgcctcccttctggtcgccaacacctggttcattgtggttgctgccatccaggacaatcactacgtactctgcaagacagcctgtgtggctgccaccttcttcatccacttcttctacctcagcatcttcttctggatgctgacactgggcctcatgttgttctatcgcctgcttttcattctgcacgaaacaagcaggtccactcagaaagctattgccttctgtcttggctacggctgccctaccggccatctctgtcatcgtgctgggagccacccagccctgggaagtctatatgaggaagaatgtctgttggctcaactgggaggacaccaaggccctgctggcttttgccatcccagcaatgatcattgtggtggtgaacataaccatcactattgtggtcatcaccaagatcctgaggccttccattggagacaagccatgcaagcaggagaagagcagcctgtttcagatcagcaagagcactggggtcctcacgccactctgggggcctcacttgggattttgatctcaccactgtgttcccagggaccaaccttgtgttccatatcgtatttgccatcctcaatgtcttccaggtgagttttacagtgcgggactttcaggaagattttattcctgtaggacaaattaatgatagaaacacaaacaagagtaggaatggggaaggatttcagcccagaggaagcctcagctctaaagattagt

SEQ ID NO: 912 - protein, 367 aa, Homo sapiens
MVIMSSHPKTYQQRFVFPYFDLWGNVVIDKSYLENLPSDSPIVTMAFPTLQAILAQGIQENNFAESLVMTTTVSHNVTMPFKISMTFKNNSPSGGETTCVFWNFRLSNNTGGWDSSGCYVEEGDGDNVTCICDHLTSFSILMSPDSPNPGSLLGILLDIISYVGVGFSIFSLAACLVVETVVWKSVTKNQTSYMHHTCIVNIAASLLVANTWFIVVAAIQDNHYVLCKTACVAATFFIHFFYLSIFFWMLTLGLMLFYRLLFILHETSRAALPAISVIVLGATQPWEVYMRKNVCWLNWEDTKALLAFAIPAMIIVVVNITITIVVITKILRPSIGDKPCKQEKSSLFQISKSTGVLTPLWGPHLGF

SEQ ID NO: 913 - DNA, 33137 bp, Homo sapiens
  source
  (1)..(33137)
  CDS (201)..(270)
  CDS (6054)..(6267)
  CDS (13007)..(13116)
  CDS (16777)..(16791)
  CDS (20404)..(21204)
  CDS (22184)..(22498)
  CDS (23114)..(23217)
  CDS (23513)..(23698)
  CDS (24037)..(24075)
  CDS (24226)..(24409)
  CDS (24595)..(24720)
  CDS (25258)..(25472)
  CDS (25758)..(25928)
  CDS (26350)..(26559)
  CDS (26665)..(26885)
  CDS (27086)..(27152)
  CDS (27609)..(27700)
  CDS (28283)..(28451)
  CDS (30898)..(31026)
  CDS (31197)..(31293)
  CDS (31373)..(31501)
  CDS (31660)..(31677)
  CDS (32195)..(32937)
gacgtgctggacctcagcctctcagagctactcagccaccagcaggaggagaggggagcggcctggaggccctatccccacctcagtctccctgtcctcccccaggctggtggtccaggccgtggtgcctgccaggtgatgtggggcaaagccccccgcacaggccactgagagctccggacacgcacccggctgccaccatggcccgcctagccgcagtgctctggaatctgtgtgtcaccgccgtcctggtcacctcggccacccaaggtaggtgctgctggggccggggaggggccgcggctcccaaacccttctgggggggcagataaaatgttgaaaaccctcctgatcactcagtaaagaattacagccccctgccccgccccagacctcagctggagcaggccagtggaagactcaggggtaacacacaccccagtgccaccaagaggcccctggaccatcctcttacctccaacaagtcggctgggccaggttggtaggggccatcccgctgtggcccctgggaccaggacaggccttcttggtgagccgatgctcctctctctgtctctctctcgctctctctctctctctctctgtgattacatcttcgaggctctcactgggaagaaggcttaattaaagcatgcccgctgacgtttatttaaaaacaactaattacccggctcggccctatgccggccctaggatcctgcacacgccactattagtgccccaagcctgcccgcccaccctcaccgattactcaattactggccccgtgaccagcccaggccgggggcaagggcgggataaggtgagaggccaagagaagaggccagtaggcccggcccctcactctgggatgtgccccctgcccaccccgacatccctgtatgaagggcattggcgggtgactctgctccctctggccctgccctctggaaagctccaaaggttgaagggacacggttcagctgggccccagggccttggcactgccccgctggccagcaacctcactcctctgctgctacgttctctgcccatccaggtcctgccccatagccccagctgggccgggagggctgcctccacccccagacccatctgagccagccttccacccccggccctccctcccaagcccgggaaggctaaaattagatgaggaggcagatggtgctggaggaacacatgtgaaatgttccccccgctgggactcaactcaccccaaaaaaccccaagggcctccctgccatacccctggggtacccacccagatctctggaaaggctcagctctgtcaccgtcccgcacgagtgccctcccgaaacctcgtacagcaggtggtcacttccttcacctacaagcgacggtccccacattggggcatctgggtccctggctgaatccctgctgccctccagcaccccgcagggcctggctggaaccagcgtcacagaaggtgctgccccggccagcatggaccctgccaggcaccctctgttgtgcagacaaaccgccttaataatattcataataacaataattagcattcatatcatctcactgcgctctgcacacattaacaccctggagccatcacaacagtcctgtgagatgggaattgtcctctctgcccctcaggggagggacagaggcacagaggcggtcagtgacttggatgaggctgcagccagggagtggccgggctggaattccaaccccagccatctgtctggctcctacattctagttctccatccccgtgtggtacaaggtgatgaccaacatggggcaacgcaatccccccagggagctcagcctgctcagaacatgtcccttccttgtcacagtgaaatccttggaggttcaccagatgatactgatcaggcaccctccgtgtgcagggtgccatgctcagtgctttccttcaagagcattttctaaggcacaggatccctgcaggatgacccggggctgtaggtgctcattttacagattgggaaactgaggcttggggaaagaagaacggtggctgttcaaactttttaaatgtttttattttgagatggagttttgctcttgtcgcccaggctggagtgcagtggtgtgatctcggctcactgcaacctctgcctcccgggttcaagcgattctcctgcctcagcctcccgagtagctgggattacagccgcctgccaccatgcccggctaattttttgtatttttagtagagacagggtttcaccatgttggccaggctagtctcgaattcctgacctctggtgatccacccacctcggccttccaaagtgctgggattacaggcgtgaaccaccgcgcccagccactgttcgaacttgagcatgcatcaccatcacctggttggcacatagccctgcaggctcctggcctcacccctgggattttgatccagcaggccgagtatggggcccgaatctgcattctgaaccagacttcacatctgccctgtcagcggcaaagccagtctctatggtttcttctagaaacatgagttcattcccatgttttctctgctcctcgcatggggtggggtgaagttagggaagtccccaagccaagcctcacttctgacaccaatgacaagtttgggggtcccccagagaacactcaggtatgatcattcactagaaggacttggaactaactagatgttatgctcacagtttatttattttttatttatttattttttcgagatggagtctcgctctgtcgcccaggctggagtgcagtggtgtgatctcggctcactgcaagctctacctcccaggttcacaccattctcctgcctcagcctcctgagtagctgggactataggtgcctgccaccacgcccggctaatttgctcacagtttattacatcaaaaggatacagattaaaatcagggccaggtgcactggctcactcctgtaatcccaacactttgggaagccaaggtgggaggattgcttgagctcaagagtttgagaccagcctgggcaacatagcaagtacccccatcactacaaaaaataaaaaaaaattagccaggcatggtggtatgtgcctgtagtcccagctactcgggaggctgaggcaggaggatcccctgagcccaggagtttgaggctgcagtgagctatgatcacaccactgtgctctaaccttggtgacagggtgagaccctgtctgaaaaaacaaacaggccaggcgtggtggctcatgcctgtaatcccagcactttgggaggctcaggcgggcggatcacctgaggtcaggagtttgagaccagcctggccaacatggcaaaaccccgtctctactaaaaatacaaaaattagtggggtgtggtggcaggcgcctgtaatcccagctacttgggaggctgaggcaggagaatcgcttgaacctgggaggcagaggttgcagtgagctgagatcgcgccattccactccagcctgggtgacagagcgagactctgtctcaaaacaaatagaagtcaggcaagggaagaggtgcatagggcagagtccaagaaagttccatgcatggagtttccagttactcccttcagtggagtcctggacagtgttaactctcccggcaacaatgtgtgacaacacacatggtgtactgccaaccatagaggctcccccaagccttgttatccagggtttgtattggagctcagttctgtactctgtagccctgatagaccacctacagggctgagctgaatctctagcatctctagaagtcagctgagactatgtgacccaaagctcctgccccaagtcctgttagcatattcattaactagggccgccctaacaaagtaccagagaccatgtgtctttgtttgtcgcccaggctggagtacagtggcatgatctctgcatgccatcactgcaacctccgcctcctgggttcaagcaattgtcctgcctcgcctcccaagtagctgggattacaggtgcctgccaccacacccggctaatttttgtagttttttaagtagagatgggggtttcaccatgttggccaggctggtctcaaactcctgacctcaggtgattcgcccacctcgacctcccaaagtcctgggattacaggtgtgagccaccgagcccggcctagaccatgtgtcttaagcaacagacattgattgtctcacagttgcagaggccagaagtctgaggtcaaggtatcagccagggttggttccttctgaggcctctctccttggcatttatttgtttgtttgtttgatggagtctcgctctgtcgcccaggctgtagtgcagtggtgcaatctcagctcactgcaagccctgcctcctgggttcaggccattctccttcctcagcctcccaagtagctgggactacaggtgcccgccaccatgcccagctaattttttgtatttttggtagagatggggtttcaccgttttagccaggatggtctcaatcacctcacctcatgatctgcccaccctggcctctcaaagtgctgggattataggcgtgagccaccgtgcctgacctattttttttttattttttatttatttttgagatggaatgtcactctgtcacccaggctggagtgcagtggcacgatctgggctcactgcaatctctgcctccccagctcaagtgattctcctgcctcagcctctcaagtcgctgggattacaggcacatgccaccacgtccagctgatttttgtatttttagtagagatggggtttcaccacgttggccaggctggtctcaaactcctgacctcaggtgatccacccgcctcagcctcccaaagtgcggggattacaggtgtgagccaccgcgcctggcctctccttggcttatagatagatggccgcctgctcctgtgtcttcacattgtcttccccctgtacacttctgtgcccaaatttctccttttagccaggtgcgaggactcaggcccataatcctagcactttgagaggccaaggcaggaggattgcttgagaccagactagcttgggcaacatagaaaagggacccatttctatgaaacaatgtaaaaaattagccggacatggtggcgtgaatctgtagttccagctacttgggaggttgaggcaggatcacctgagcccaggaggttgagacttgcagtgagccatgatcgcaccactgcactccagcctgggtgacagaggaagatcctatcttaacaacaacgccccaccccctctttttttattgagatagggtctcgctctgttgcccaggctagagtgcaatggcacaatcatggcttactggagcctcaacctcctgggctgaggtgatcctcccacctcagcctccccagtagctgggactacaggtgtgtgccaccacgtctggctaatttgtgtatttttggtagagacagggtttcactatattgctcaggctggtctcaaactcctgggttcaggcgatttgcccacctctgtctcccaaaatgctggggttacaagtgtgtgcctctgtgcctggccaaaattgcccgtttttataaggaccacagtcatattggattggggcctaccctaatagcctcatttgaatttatctctataaagaccttatctccaaataatgtcacattttcaggtcctgggggttaggacttcagcatatgaattttcaggggaacacagttcaatccataacagcatatctggtgtagcccgaggaccccaggaaaacagtcactcttatcaagcagagcattccaaaggctcagacgtcacttcctaggagctgagagtccaggcactctctgggccaggttaatgtcctcactacacaagtgggcacactgagaggcccattctacagctgaatcaactgaggctgcctcagctggcttccaggacacagccgagccagaggtggtgttttcttggcagtgggtagggtcttcccttcctggcccaggcccaggagtgacaccatccccaaccctccctgcaggcctgagccgggccgggctcccgttcgggctgatgcgccgggagctggcgtgtgaaggctaccccatcgagctgcggtgccccggcagcgacgtcatcatggtggagaatgccaactacgggcgcacggacgacaagatttgcgatgctgaccctttccagatggagaatgtgcagtgctacctgccggacgccttcaagatcatgtcacagaggtgagtgggctctcgtggcagttcctggatgaagtgcccgcctaaaagcactgcacacctgccagcacacccgttcaccttacatcttttttttatgcattcaacacatgtttactgagcacttaataggtgctgggccccatgcagacgagaataagacccagtacatctccccacagccagcctgtgcccccgacagaggcctatacccatacatacactgggaagtccctccccccaccagcctcttgcttccataacttccatcccaagattagccagggcagtttgtttgtttgtttttgagatggagtcttactctgttaccaggctggagcgtggtggcatctcagctcactgcaacctccacctcctgggtttaggcgattcttctgcctcagcctcccaagtagctggggattataggcgcacgccaccacgcctgactaatttttttgtatttttagtagagacagggttttgtaattggccaggcaggtctcgaactcctgacctcaggtgatctgcccacctcgacctcccaaagtgctggcattacaggcatgagatgagccatcacacccagccttagccagggcagtttggagcttgtaaaatataaagaacagcaggacagagcgaaggtgtcatgggaggacttttcccttcatcccagactctttttttttttttgaagatagggtctcactgttgcctaggctggagcacagtggcacaatcacagctcactgcagctgtgacctctcaggttcaagcaatccccctgcctcagcctcctgagtagctgggactacaggcgcctgccaccatgcctggctaattttattttattttttgtagaggcagggtcttgctatgttgcccaggctggtcttaaactcctggcctcaagcaatcctcctgcctcggcctctcaaagcgctgggatgacaggcatgagccaccgcacccacccatcccagatttgagagctcatcaggctactccaaggaggagacacctgagcacagatgatagaagcacaggcctgtgtgagtgattgtgtgtggggtgaatgcttgagcatgcaagactgtaacttggagtgtgtctgtgtgattgcatgcatctatgagtatgacggtgtatttgttttattttatttagttatttaatttttgagacagagtctcagtctgtcacccaggctggagtgcagtggtgcgatcttggctcactgccacctccgcttcctgggttcaagcgattctcctgcctcagcctcccgagtagctaggactacaggcgcgcaccaccacgccaagctaatttttttgtatttttaatagagacggggtgtcaccatcttggccaggatggtctcgatctcttgacctcatgatccgcccacttggcctcccaaagtgctgggactacaggtgtaagccactgcgcccggcctgttttgtttatttttgagacagaatcttgctctgtcgcccaggctgcagtgcagtggtgtgatctcagctcattgcaacctccacctccagggttcaagcaattctcccgcctcagcctcccgagtagctgggattacaggcacgcaccatcatgcccagcttatttttgtatttttgtacagacagggttttaccatgttggccaggttggtcttgaactcctgacctcaggtgattcacctgcctgccttggcccccttaagtgctgggattacaggcgtgagccactgcgcctggcctgtgtgtgtatttgagtgtgagtatgtgtgcatttttgagtgtgtgactaaatgtgtgtgattgtgactaagtgtgtctgtgtgtctaagtgtatgtgaacaggtgtaggtgtgtgcagatgtgtgtgactaaacatgtctttgagtgtgtctgagtgtgtctgtatgagtgtgtattggagtgtgtatctgggtgggtggatgtgtgtgtgaatgtgggtgtttgtgggtgaatatgtggttatatgagtgtatttgggtgtgtttaagtgtacgtgagcgggtgtgggtgtgagcatgtgtgtgagcgggtgtggctgactgaggtgtgtgttttcatatctgtgagtggtgaggtggatgggtgcacgtgtgtgggggtgggtgggtgtggctgtgtctttgtgtatttaactgtgtctgtgggcagatgtgtgtatgtggatgagggtttgtgtgtggttgactgagagtgtatttgtatttctttgagttgtttgtgattgtgtgagcgtggaggggttgccccaggctgaggcaccacgtgtgcaaatctgcacaagcctctctcacacccacagtcagtccatgtagagctgatcagcctttccttcaaattacacccaggctggacgcggtggctcacgcctgtaatcacagaactttgggaggctgaggcagggggatcgctttaggtcaggagttcgagaccagactgggcaacatagcaagaccctgtctctactagaaactaaaaaataaattagccagtcatggtgtgtgcctgtggtcccagctactcagatgaccgatgcaggaggatcacttgggcccgggagtttgaggcttcaatgagctatgatcccaccactgcactccagcctgggtgactgagcaagaccctgtctctaaaaaaaaaaaaaaaaaaaaacagaccaggtgcagtgtttcacgcctgtaatcccagcactttgggaggccatggcgggtggatcacttgaggtcaggagttcgagaccaacctggccaacatggtgaaaccctgtctctaccaaaaatacaaaaattagcctgatacggtggtgtgagcctgtagtcccagatacttgggaggctgaggcaggagaatcgcttgaaccttggaggcagaggttgcagtgaaccaagataacaccactgcactccagcctaggtgacagagtgagactctgtctcaaaaaaaaaaaaaaaaaatgtgtgttaccaggggaggagcgggtcactgagagccccaggagagcaggagaggtttgggcaggggatgacagtgttcaggtggctgagatagctgggctgggctgggctggaggcacctcatcatctcctcctctctgcctctctctcaaactgccattcccctccagcaatcttgcctctcttccccgcttcctgtcccctgacacccctgccgagggtgccctgcataggcattcccagtccaggctctagcctttgcttaggctgtgggccccctccctgggagcccccttcctcccacctctccaaattctccctgctgacttcattcaacaccagctttgggggactgcattcttctccattatctctctagcacctagtacagcatctggcccagttcccatgtccgtggggaatgctgtgcagaatagttaccggggctgagggagtgtgatgaggcctctggagtcacatccagaaggacttgtagggggccttagtcctgcttcctctccgctgagtccccaacccccactgctccacaaccaagcctggagactctttttttttttttttttttttttttgagacggagtcttgctctcccccaggctggagtgcagtggcatgatctcggctcactgcaacctccgctttccggttcaaacagtcctcctgcttcagcctcgcaagtggctgggactacaagcatgcaccaccacgcccggctaatttttgtatttttagtaaagacgacgtttcaccatgttggccaggctggtctcaaacttctgacctcaattgatctgccagtcttggcctcccaaagtgctgggattatagccatgagccactgcgcccagcctagctgttcatttgttggtggatgtttgggctgcctccacgtttgtggtgattgtgaataatgcagctgtgaacgtgcgtgtacaacgatttgcttaaacacttgttttaaattcttttgggtacagtaatccccacttacccactggggaaacgctccaagaaccccagtggatgcctaaactgcagagagctactgaaccttgtatataccatgttttctcctatacagctctaattataataaagtttaatttacaaattaggcacagctagatgcggtggctcatgcctgtaatcccagcacttcgggaagtcgagactacaatgagccatgatcacaccgctgctctccgtcctgggcaatagagtaagaccctgtctaaaaaataataaaataaaataggctgggtgtgatggctcatgattgtaatcccagcactttgggaggtcgagacgggtagattgtttgaacccaggagtttgagaccagcctaggcaacacggcaaaaccccatctctactaaaaatacaaaaaattagcagggcatggtggcacatacctgtagtcccagctccttgggaggcagaggctggaggatcacttgagcctgggaggccgaggctgcagtgagccaagattgtaccactgcactccagcctcggtgacagagcgggaccctgtctcaaaacataataataataaaatacgttaggcacagtgagagactaacaacaacaataataatttttagtagtaaaatattgttacataaactaagggctacttgaacataagcactgtgaaaccgtgacagttgatggataactgagatgaccactagtgactaacagacagggagcaaatacagcatggacacgccccatacagcatgagatttcatcaggctactcacaacagcacacaacttaaaatgtatgaattgtctacttctggagtacagcggtgcgatctcggctcactgcaacctctgcctcctgggttctagcgattcttgggcctcagcctcccgagtagctgggattaccggtgcgccccaccacgcctggctaatttttgtttatttagtagagatggggttttaccatgttggccaggctgctctcaagctcctggcttcaagtgatccatccaccacggcctcccaaagttctgggattacaggtgtgagccactgcaccctgccccagtgttctattttttgttttcttttgttttgtttgagacggagtcttactctgtcacccaggctggagtgcagtggctcagtcttggctcactgcaacctccgcctcctgggttcaagtgattcttctgccttagcctcctgtgtagctgggattacagacatgcaccaccacgcctggctagtttttgtatttttagtagagacagggtttcactatgttggtcaggctggtttcaaacttctgacatcaggtgatccacccgccttggcctcccaaagtgctgggattacaggcgtgagccaccacgcccagccagtgttctatttttaaagaagaggatgaggtggatggatacagacagatcttcccacaccccatcctgccccccatttttctctctccctgctagatccttagtcccttctcaagtgtctgcctgtgtttagtacccttggttaagagcaggattgaaggggagacacagggcctcttctgccccatacctgtcgggaagcctctcaaactatgtcctgcatgcccgtgtcctgcctggcctagccccagcctgctgcaagggacagagaccctgacagtggggacagacagcagatgagacacacctttttgttaaataggttcccccttacatgctagccagccccctgggaagttgacagtgacttggaggagttgcctcttgggaaccgagaatggctttcccctggggatgctctctcctggctgccctggctataagtctgcacagcagcactgcccaaagggtgggatgtgtccacgagatggtgtgaagtggacacagctggacactgaacatttcattgatcgtaagtttgcagagacaccacctcacgtgcatggcttcacatgtattactctccagtgaacagcgcaggggctttaaagtccatttaaagaaaaatgccaaggatataatagtgtcagctacactcacaatgaaagagatgaggggtggccaggaaagcactgtttagcgggtgactcctccttcttagccctgaggatgatgctgtgctggggctgaaaatagaagaaccctggtgggaaagagagagcaggcaggaaacaaaaagtgcccacacaagtcctctgggcttggtgtgttagttcgttcttatactggtataaagaaatacctgagattgggtagtttataaagaaaagacatttaattggctcatagttctgcaggctgtacaggaagcatagtagcttctgcttctggggaggcctcaggaaacttacaatcacagcagaaggtgaaggggaagcaggcacgccgtacatggctggagtaggaggaaaagagaacaggggaggtgctacacacttttaaacaaccagatctcaacagcacggaggggatggtgataaaccattcattagaaactgcccccatgatccaatcacctcccaccaggccccacctccaacactggagatcacaattcaacatgagatttgggtatggacacagatccaaactatatcacttggtttccagctccactgccccttcccaatttgggggtgtctatgacaccatgaccctggagcatgcacccccacccccgccaccccgtctatgtgtttctttcccaatgccctgtttctcctctgaaggtgtaacaaccgcacccagtgcgtggtggtcgccggctcggatgcctttcctgacccctgtcctgggacctacaagtacctggaggtgcagtacgactgtgtcccctacagtgagtcatcttgttccttgtgcggatgcgggcccttctcgcatgagtgagtgaggaggagacaccttgacccatcacacatgtgcacacatgcatggggcctgggcacagtggggacagccgggcctgctctctccaacacacattctctaatcccagacaccagtgtccacactcagtgcctgctcccccgcctcacagactctgtcccctcctgtggggacaccttctccagctctccttaccccagcccactcaccctgcttcttcatgcaccctatactcatttccacactgccaggccatggtcccgtgctctgcctggcacacttacgtctctctcttctcccttggcctctatgcttttctcccccatctgcctccctcgccttctcacatcccttccttttctgactcttctgaccttttctgacccttctcatctaccttctcttccctctcacttaccccactgcccctctcaacaccgttctctcagcaccctcactccccacacacttcttcccaatcatggaagctggactctacacccatagagtgggataccatcctctgaggcctggtggcagattcagggtgaagggctggggggcattttcaacagattcatagctcctcactggtctccccattaccatgtggcacttcctgtctgcaaaggaaatgccgccatgttggactgagggtggcctccaggcagcctgaagaaagtgatttggggagccaggagcctggccatcttgcacctggccaaagggatcagacaaagacaaggtctctcctcctcagcaccccacccttgacatcacctttttcctgccctctctcctccctccctccttcccattatcccttcccttctcctcccacaatgggttccatgtagtcaacctggtggtagggcctccgggaagagtggggagaaggcagggccatcagggtgtctgagtgtggcgggccgggtttggggactaagaggccctgtaactctccctcctctcccctcccaccccaaccttccctgccagcctttgatttctcctcacaggtgactcgatgctggggaaacaggatcccttctgtgcttccgtaattttcttcttttactcttcgtcctttcctttcagcgcttgaggccttcagccaccaccgagggggatgcccatctgctccttgaagcctccccacagcactggggacacggctgactcccgcggctgggacagcggggaaggggggtgggaggcagcgagctcagcacaggggggcagtcagatgggtgtaggttcaaggctcgactgggctcttgagttttctggctctgaaaccttgagcaaatgatttaatttctctgggccactacggaaggaggtgtgagtccatgagatgacatgtgagaagcgcttggcccagggccggccacaaagtcgctcctggtggcagggttttgagtgccgagtgtaaacttcccaagggcagaggcttcgtcttcacccgccgccccagcgcccagacccatgcctggttcaggatgtgctcagtaatattaccaatgccctttaagccagctgagcctgtttattcatctgtgatggggtggagaggggtcaaaagccttccctgggaagccacaaggagtagcgacaacgcatgtcaagcttgtcaagcttgtgtgcacccgagctgtagatgcaaaggaaatggtgcctgctttcgccagccatgtggcctcacttcagtgtgcctcagttttcccatctgtagacagggttctcaaaagacggccagtgaggtgcgtagcatagttgctggcccctcgtgagtgctggacacttggtagtcgttgcttttgttgcagctccttgtaatgcctcttgtcaattacgattattgctgtggtaatcaaaattaaaataacaacggataatgacccaacttctcccgaggcaggtgagataaagggcaggaaaaattcctcggtccaggtggaagccaaagcaagtagacgagaggctcaggtcaagccgcaggaaagaagctaggggaggagaggagctgagaaacctcctggagccgaggccctgagcgtggtccaggggctacaaccgacagagaccaggcaggctccagggacagagggcaggacagttcagaggatgagtggctgcctgtctgatggaagagagatagcctgagcccttggggagacaggagacacacgcacacacacacacgcgcagacatgtgtgcacacatacggggtggatgttgggggcagagctaactcctgatgctccagaggaaggaggctggagttaaagcggggacaggaggtagctagaggacagggaggccaggcactcacttgtccccaaaatgttcactgagcatctcctgagtgccaggccctgggtgaggcgctgggaagggaggcagaggctgcccctgcggagctccctgctggaaccttcagagaggggccaggagagccagtccctccagtcagaagttcctgaggggccagggatgcagagggggagcggcctgggcagccacctggcccagggcttcagaggctgggggtgaccccagtgctggtgagggtgggtcaggggtgggtggcagggggcacgtgatgtgtgggaaccctcccacacagtggacaagcccgactaatgctggatttgctttgcagctgagcacagtctaaccgcgccccttcctcccctaggtgccgcccgtccgcagggcagcgggcagggcggagctcccagctcctgggcccccgggccctgggtgggttgagcagagaagccgagcctcagacttgcccctggggagcctgggagcgtgtctgtgcccccacttgctgtcccacccagtctgtgtcccccacccccgccacctctctgcctccgtctccccaaccctggctctctctggggcccgggtgcaactgcccgtctgcctgtcgttctgtgtctggctctgccaccttctctctgtgtttgcttcttctgggttgtgagggcttgggggaagtcagctggacctgggtgaggccagcataaaggggaaggagttcagcctgtttcttggctgagggtgggcccaggccctgggagacactgaaatccttcccctggggcccctggttctagcaggagggcagcaggcagggtgggaagggagccgagtggcttatccaccccaccactccctggtgccccctctgaccggagcccacctcccagctggggctccctactccctgcccccgccttgcaccaagggtgccccctcccacctgagggctctgtctgcctgcctgtacccccctaccacccctgtgtctttctgtgtcttctccctcctgtgtgtgtccccctcgtccctctgactgtctccccagcaccctctcaccccacctgaccacccccagaggaagggacctgggggcgggggcccgagctgatgctacggaaggggttggggaagcaggagcgaggaaggaaaggaaaagggggcgtgttgccagaaaagaaacgaaagcaatttaatctctttttttttctctttttttcttgcacattttttttttcaatttgttttctctctctcttccgatgcttaaagtagaagtggagcagaaaggtaaacgcactgttaccaatgctaacccctaactcacactttgttctacctgtaccatacttatgtgacctgccctcccccggccccttcttctctccccaacccacacttggtccggtcggtatcccccaccctgggttgtcctcccagtgggaccagccctggtgcggccacgggcatctccaccctccagatacccacggaagctcctctctgagcttgggcaggattttctctctctcgctgtttctgtctctctctgtccctccttcctggtccctggccctttcgggggacctggccttttctcatacttcttttgcctccttcaggagaagtgtataagcatccagggcgggtggggagggagggactcccttccccggctcccccactggggcaccgggtgagctgtctctctctctctctctctttctctctctctctctctctgtctctcccctctctcttcctccttcccctgtaccttttataacatgtttctggttcatgggaggcgggctggaggggacaccattgttttccttttggggagcagattctcctatgtctcgggctcctggtggcttaagttccttctggtttgatgtttccaaggcccagagctgttttggagcatggagcaccagtcctccccacccccaacctgatccccatctctgaccagctgggggcccagccctggggaggggtgtcagctgtccccagccctgggagggggcagcctgccaaaaaatgaaaaaatgagggcgagggggcgggggcgggcctcgtggttgggggagcgaagggtgggggagcgtgttctctgtttctttcacacttgcaaagctgcagtcagggtttcttctgggctgttgtggttagaggaccagggagatgggcggcgggcggcgggggcacagtctggggacttccacagactccgtaatttctagcagagaactccctagtggatggggctggccattactggctgttattggggggagcggaggtgctgctgctgaggggcttctagggtgagatgttagggatgaccatttcctctccagaaagttttgggaaatttacccatctgaggccggcagcagcagcaggcagggctggaggacatggcctttagggatcccttttgccttgaaattacagtggtctgtggagcatcccttccgaaggaggtggggcagggtccctctgagctgctcccctccccgtcttcccctctcccccatctcagagaggcctgggctgctggccccaggtccgccccctcaccacacccctccagtctcctctctttctcctggagtctctctccctcccagcaccagccactcttcttgcaggcccactggtttggatgcggcaccactggagattttctcttcgagggccagggcagggcgggtggggtgacggggcaagggagggaagaggagggattgggagtttggtgctggtgaagggtccttgctgtccaaggccccagacagacccttcctcatcttctcccccttcccctgggttgacctctaaccacatttttcccccctgacaccctctgagcaggttaggctctgaggcctcccaccgtccccttcacacaaacacgtcccctcagatgccacacacctggtgggggtggggaccggcttgggcagaggccagtgtgctggacagagtgggcaggccgacccctcagggcatcagggacagggggatggccagtccccagggcccaagccagggtcgttttggctcctgcccagctctatgtcccaggctcctctccctctacaaaaactacatcctggctgctttgtgccagggggcccctgagccacattgttcccatgctgtgaagggagtgctgcctgtccccctccctcccaagcctgctggaggtggggaatgaggactagcccaagcccctcttgccactggggctgccccccaagccggtgccaggtcccagccccccgatcccctcggggccagctgctttggtgacatgccaagcaagagcagagaattcactgcaaaccctccaccctcgccctgtgccctcgccctggcctatgtgtgggttctgccagccaggaggtgagggaggcccggccatcctggatggaggggcgcactctgggaggaggtggggtgtctggccacactgacccccggatcagtcaaggggaggttaggagtaggtggtgctgggacgtgactgggcaagggtgggccggccagcagtggccaacgagatgcagttgaggttttcctccttttcagggattgggggggtggggcggggccccccacctttctgacatcagcgctgccttggtccctcttcccgagccggggatggtcgcaggtaaatcggggtccgggccaggggaggtggggggcctggctggggcgggctgggtctttatcctagcgcctggttccctcccctgccccctccgagctggacctgggactgcccccctgagggaccctcagtcgggcctgggccttggagtgaattctctgctcacccctctctcctccgccagcactaaccctttcttcccaggtggtttgcagcgcagcctcccacggagccaggacctcgccaagccccatacgcccttgtctctcttccctctgcacagctctcctctccctccccaactctcccgggagccctgtccctctccatgtccccacccccacccctgtgcacagtgccactgtctgctgctgagccagaccccatgagagaccctgccggctgggggcagggctgggcgccctccaggaggggccagactctttcattccccgtcctagcctgggagctgcctctgggaatcccttcctcggctactgacttcgtgggtactgggtggggggtggggagcaggctgcatcaggaacctggggagagagttgaaacccctatcctggaatagggagacactcctgacacccacagtgggtatggaaacaccactctaccttgcaatttttgcaggaggaagaaagaggagttaaaaaaaaaaacactgtccgggtgtggttggtgaaggatgggatcctggaccctagctcttccctaagtggcagagaagagggagaaggggccgggtgctgagtccctggaccgtcaaagtcaggagtgactgtagcggggagattctgcccccacttaaatcacacaggaccacctctgggagggctcttgccaaactcctccccagcctgtggggtctctagcagccagggaagggaagaggggcaccacttcccctcactaaccccgctcttaatggccttcagggttcacatttccagggagaggggcagctgggcagggcgtggggagggggtcgggtcccagcccggaaacccccttcccatcaccagccataccaagcaaccgtgactgcagcagcaggaggggacaacctggctccccaccagcagcgtgaccaacttgcctctctcccccctctctctctctctctctctctctctctctctcctccctctcgcctctgccccttctctcctacctcctcccctcccgcccactctgcccagtcttcgtgtgcccagggaccctgcagaaggtgctggagcccacctcgacacacgagtcagagcaccagtctggcgcatggtgcaaggacccgctgcaggcgggtgaccgcatctacgtgatgccctggatcccctaccgcacggacacactgactgagtatgcctcgtgggaggactacgtggccgcccgccacaccaccacctaccgcctgcccaaccgcgtggatggcacaggctttgtggtctacgatggtgccgtcttctacaacaaggagcgcacgcgcaacatcgtcaagtatgacctacggacgcgcatcaagagcggggagacggtcatcaataccgccaactaccatgacacctcgccctaccgctggggcggaaagaccgacattgacctggcggtggacgagaacgggctgtgggtcatctacgccactgagggcaacaacgggcggctggtggtgagccagctgaacccctacacactgcgctttgagggcacgtgggagacgggttacgacaagcgctcggcatccaacgccttcatggtgtgtggggtcctgtacgtcctgcgttccgtgtacgtggatgatgacagcgaggcggctggcaaccgcgtggactatgccttcaacaccaatgccaaccgcgaggagcctgtcagcctcaccttccccaacccctaccagttcatctcctccgttgactacaaccctcgcgacaaccagctgtacgtctggaacaactatttcgtggtgcgctacagcctggagttcgggccgcccgaccccagtgctggtgaggacgactcacttccaggcatggagcctgcttgcctttgtcccctccacccccacccacccctgggtcccagagtggggagccccatcctgtgagctcttggggatcgggaggtaaaggaaattcacagcatgtgacagacgctgttctaagcacttcacagtcattaactcgtctcctcacggtctatgacacagggatccttactgccctgttttacagatgacactgaggctctgtgtgggtaggggattaagttatttgaggatttgaacccagcctcccaaccactgaactgcagtgcctctcccaggggcctgggcacctttactccaggaacccttggatccaccaaaatcctgggtggaagtccagtatccacaaaagagctgagctgctgatgctgaccgggctgagggcaactctgcagtcttcttttgccccgcctagctgccctgctagctctgtgccaccccagggctccagggagcccgatctaaccccatcttgtttgcaaaagggggagttgaggcccccagaaggaaggagcatagccaggttacataagccaaagtcagctagaacgaggatggggggcggtggtattcagcccccacctggtggcggggctgacctggattggggagggctcctgccctcgggctcaacctgggaggattcctgtcccccagacacctctgtccctgcctctcccctgaccgttctctcagaccttatggtacacatcgtggatttttaccactctttgctactttatatgggcccatgggcataagggactttggtgggcacagagcggccaggggagatcaactcatagacccagtggggcccggcacgtgtttccacttcagtagatgaggaagatgctaagatggcctgggaccccctgcccaagcacactgtggcatggccctgagcatggggatgaccctgtctcgtatcccctctccaggcccagccacttccccacccctcagcacgaccaccacagccaggcccacgcccctcaccagcacagcctcgcccgcagccaccaccccgctccgccgggcacccctcaccacgcacccagtgggtgccatcaaccagctgggacctgatctgcctccagccacagccccagtccccagcacccggcggcccccagccccgaatctacacgtgtcccctgagctcttctgcgagccccgagaggtacggcgggtccagtggccggccacccagcagggcatgctggtggagaggccctgccccaaggggactcgaggtgagtacagaggctgcagccaggggagggatgggggccatgcccccagcagcttagcacagatgcatgtgtgggtgggggtctctactgcggagcagaggttttctgagggcaggggtcatccccagtgaccagcagagctctcagggcacaggagccactcagtgcccctggccccacctgcagaacctgcagggagtccgcaggaggtgacctggctcccggcctcaggctgacctgccacagccccaggcacagtcagcttcacatggatggccagctgaagtgcaaaaagggcagggccgtgtgtcctggagatctgaggggagggttggcaggtgcttcgtggagagggggcgttcaagatgggccttgctggaaggttctaactctggaggcaaagacagaagggggcaggagggagagctcaggggaagtgagtggcgcctctttcgactgtccagcccgcttcatgtctgtttctccgtgtttccctcacctccctcttcgcccgctcgtcccccactctctgtcatctcctttccccctctctgtcccatccttctcttcttccctttggctcccttgtctgttcctgtctgtctgtccctgcaggaattgcctccttccagtgtctaccagccttggggctctggaacccccggggccctgacctcagcaactgcacctccccctgggtcaaccaggtggcccagaaggtaccagccaccacccctcgcaggcaggcacatgtgctcgggcccagggcccagggcccagcgggggtcgtggagcagctggggagacatgggctggcaggtctggaaggcaggactgtggggtcacctccctggcctacaaagggagcagggacagatggggtgggaaggggcagatggcgatggggaagtggagagagagataggagaggctgcacaggccagggaagccggggagggcaggatggtccctgacagtcctgggattcccccttcccgcccccacctcatgcagatcaagagtggggagaacgcggccaacatcgccagcgagctggcccgacacacccggggctccatctacgcgggggacgtctcctcctctgtgaagctgatggagcagctgctggacatcctggatgcccagctgcaggccctgcggcccatcgagcgcgagtcagccggcaagaactacaacaaggtggggcctggcggtggcgctgacctggtatggggagggcgcctgcccccaggggcttgggaagtacctgacctggtacctcccagccaggctgccacctccactcctttcctcagagaggaaggacccccccctctccgccaaggactgccgggtctcactcctgtgctgccccggatggtcctgggggttggggatccctgaggaatgtcttgctgatagcccagccctgggtcagtggtaaccgcagacgagagagctatccagatgtgacagtattagggtgagggaaccggcacccagaggcctggcctgacatcacctccatctctttctagatgcacaagcgagagagaacttgtaaggattatatcaaggtgagacccagggggtcccagtgtaaggaccgtgggctccagctgatggggggattaggggtggaggttgagaagagggcatgcagagcccacccccaggaattagagggtgttggggggctcacagcaccatgccctctgcctgtgcaggccgtggtggagacagtggacaatctgctccggccagaagctctggagtcctggaaggacatgaatgccacggagcaggtgcacacggccaccatgctcctcgacgtcctggaggagggcgccttcctgctggccgacaatgtcagggagcctgcccgcttcctggctgccaaggagaacgtgggtgagtgccacagtcacccagggcaaactcagatacgaaccttaaaccacggggttctggcctggaggccacaggggggctatccgacccttgggcatcttgccagagtctcgttctgcagcctgagcccctggactgggaacagaccccaactgtgtatgccttgccttcccctgtccccacagtcctggaggtcacagtcctgaacacagagggccaggtgcaggagctggtgttcccccaggaggagtacccgagaaagaactccatccagctgtctgccaaaaccatcaagcagaacagccgcaatggtcagtgtccccggcggggcctcgggtggggaagcagccccacccccaccccccagctctgtgccagcgtctctgtgccatttgtagagggcagcggtgctgaccttttctcatgctagtgtaaaatttgaggggattcatgggccctgaagtgctgcagagccctaagggtgagccttacagttgcaaagctggctcctgggcctcacagctcagagaggatggggccattgagatgaaggctcagagaggtcaggggcttgcccaaggtcacacagtgagaatgggtgggtcggaggcccagcttgtgtgtcctggcacactgccctgctgtttagaactgccttcagctgagcagtggtcttgtggacagggctccctgacccccacctgcctgggctatggactggcttcagaggtcccagtggccagcgtggccaagggctgaggagctggctgagctgggaagccaggggcctggatggaggtgcgccagctgaggatgctgacacatccaaacgtgcctgttctcaccaggggtggtcaaagttgtcttcatcctctacaacaacctgggcctcttcctgtccacggagaatgccacagtgaagctggccggcgaagcaggcccgggtggccctgggggcgcctctctagtggtgaactcacaggtcatcgcagcatccatcaacaaggagtccagccgcgtcttcctcatggaccctgtcatcttcaccgtggcccacctggaggtgagctgagccgtccccctccctccatgggggtccctgtaccctctgtgttcccaggctgtgtacctgcccctccatgtgctcacctccagaacaagttatgggttcttccactttagagcttgggccatttgtccccagagctctcagaatgtcaactggagccccagaccccaggcacttctttgatacttggtaccatccctgttgccaggtgtggggggtcggaatgggactccccggttctgactctagttatgacaccctggtgccaccacacaacaggacaagaaccacttcaatgctaactgctccttctggaactactcggagcgttccatgctgggctactggtcgacccaaggctgccgcctggtggagtccaacaagacccataccacgtgtgcctgcagccacctcaccaacttcgctgtgctcatggctcaccgtgagatcgtaagctggctggtgctctgctcctccaggcaggcccgattgctggcctggctttgcatggcatcctagagagatcacgggcagtaccaggggaggctagccccatgggtgtggggggcccctggtcttgcctggggcatgaggccatgcgtctggtcctctatggccatgatcccaccgtctcccaaggcactctggagaagcaagttggtgttacgttggtcatctctccacaagccttccagagcatgaggaagtgagcgcattgctgcgtgcagaggggtgagggctgccaggttggcggcaccagaggtcctcacggcccatggccttgcccagggccctgtctgtggctggcacctggctgagcccagcgtgcaaaaccaaaggccctgagcgtgccccctgttcctgtccccagtaccagggccgcatcaacgagctgctgctgtcggtcatcacctgggtgggcattgtgatctccctggtctgcttggccatctgcatctccaccttctgcttcctgcgggggctgcagaccgaccgcaacaccatccacaagaacctgtgcatcaacctcttcctggctgagctgctcttcctggtcgggatcgacaagactcagtatgaggtgggctgggactctagggcaggtgacggccagcgcctgggggccgggagaagaagggggacacctgtccaggcagcagcccctcaccctcagtgctccccgcagattgcctgccccatcttcgccggcctgctgcactatttcttcctggctgccttctcctggctgtgcctggagggcgtgcacctctacctgctactagtggaggtgtttgagagcgagtattcccgcaccaagtactactacctgggtggctactgcttcccggccctggtggtgggcatcgcggctgccattgactaccgcagctacggcaccgagaaggcgtgagtttccacctcccagccctgcaccctcccacctggttccctgctgggcggcaccccttggaccaggaccctcagggcggtagtcccttcctcctcctgatcccagaggctgcagcctgcagagtcctaggccttcatgagtcgctgggaatggctcctcggcttctctctataccccggccctgtttcctttacagctgctggctccgagtggacaattacttcatctggagtttcatcgggccagtctccttcgttatcgtggtgagttgggaggtgacacccctagcaccacatcttccttcatccaggctggccttgaccccagcccctgcccccgccccccaccccccccacacacacacacactctctctctctccacacatcggaactgagccaccggctgagaggatgaaagtgtgctgggtccatggagctccagtgctgagggctgctcgcctggggggctgtgatttgagcccctagtgtgtgtcaggccatgggccttgtcctcccagcagccaggagtggcattaaattgccggtcatgccaatcagctcaccgctgcacagcgggcacctcaggggcaggtacggggttctcccagcagaggcgagggccacagctgagatttcgccaggctgggccctagcctcagtgctcactgagggaggcagggccactctcagcccagcctgccccttgtcccgcccccaggtcaacctggtgttcctcatggtgaccctgcacaagatgatccgaagctcatctgtgctcaagcccgactccagccgcctggacaacattaagtgagcctcgcccctgcctgccccctgccccatcacccacccccgccccacgctgggcccacctcttccagggtgtcctaaaaggtagtgctgtcacctctggtgacacacattgcaattttaagtaccaacaggggtgttctattgtgttcactatgtacctacttaatgggtcttagatagcgtatcattagcacgtccaacctgtggttttaggggcatcggtatgtaggctgaggctaaattcaaaaggtgagtctgtttaagggcaacttaaagagaaataggcagcaaatatagcctaagtggtctggaaatttagcagaaacaatgaagttggcagaggaataactgatgttcacaataccccgacccctgacccagtacctttccctcaggcccaggctccggtggaggtgtcctgggcaggccactgcccccaaggcccactcggcccgctcagggctttgcagacagtgcccaggcccacccaagggcccccgttgtaggctgcaggggaggcctgggctgaggccgtcccctccggcgggtactttgactcccctgtcgccccactcccagatcctgggcgctgggggccatcgcgctgctgttcctgctgggcctcacctgggctttcggcctcctcttcatcaacaaggagtcggtggtcatggcctatctcttcaccaccttcaacgccttccagggggtcttcatcttcgtctttcactgcgccttacagaagaaggtgaggtcgaggcggggtcctgggtcacagcctcccttggagacgtttcctgggtacccaggagaaggcggcgagggtggaggggactcaggggctccctcaagcccccagtgagtgctgcagggcttctgtggtcaggtctgcgtccaccgggaggggagcacgagctcagggttagggagggtttaaccacgggtgaagagggttctggaaaacaagatacagcaacttagaggagtgagagcagaacagatttggtaatggggaaccctcaccaccatgagggccacgagtcaggcctgggagagggaggactttgggagccaccctgagggagcactgcctacattcatagttctggaaagaattgtgaattttgtggtgatagaaaggatctttttaaaataaatgtgttaaaatctgaatcttaaaaaaacatacagtccggacacggtggctcacgcctgtaatcccagcactttaggaggctgaggcgggcggatcacctgaggtcaggagttccagaccagcctggccaacatggtgaaaccccgtctctacttaaaaaatataaaaattagcctggtgtggtggtgggcgcctgtagtcccagctacttgggaggctgaggggctgaggcaggagaattgcttgaaccccaaaggcagaggttgcagtgagccaagattgcgccactgcactccagtctgggcaacagagcaaaactctgtctccaaaacaaacaaacaaaaaaaccacacatacaaagggctgggtgcagtggctcatgcctgtaatcccagcactttgggaggctgaggcaggaggattgcttaagcccagaaattcaagaccagcctgggcaacagagaccccgtctctatttaaaaaaaccaaaggggacaacagtagctggggaacatgggcagggaatggggatactggcagcaccctcaggactgaagctggggagacggagctgaggcatttgtagagtcagtcctggcagcagtgcaggccatggagactgctgttggacttggggagtggtgaggcaggtaaggcttaaggcaggggatggcagaggcagtgatcatgagaatcctggttgcaagggaggaggtggcctgtgtccctgctctgtccaacattgtcctggcccctccttggacacacggtcaaaggcagtgttttcacagcccccacctcacacgcagtggcagcaatgtcctttcaggggaccccaggcccctatggtctgatctgggcccctcggctcccctccctccaacctctgctctcagacacctagatgtggaccctcagggtgcagcccccgttcttaccttggcttaaatgaggcctcctctgatctatttatttttttaggttttttttttattatcattattatttttgagacagagtctcgttctgtccccaggctagagtgcaatggcgcgatctcggctcactgcaacctccacccccccagcttcaagcaattctcctgccaactagctgggattacagacgcccactgccacgaccagctaatttttgtatttttagtagaggtggggtttcaccatgttgcccaggctggtctcgaactcctgacctcaggtgatccacccacctctgccttccaaagtgctgggattacaggtgtgagccaccatgcctggcctcctctgatctatttaaaatcacaaccagtctggccaacatggtgaaaccccgtctctactaaaaatacaaaaaaaaaaaaaaaaattagccaggtgtggtggtgtgcgcctgtaatcccagctactcaggaggctgtggcaggagaatcgtgtgaaccagggaggtggaggttgcagtgagccaagattgcaccattgcactccagcccgagtgacagtgcaagattccatctcaaaaaaaaaaaaaaaaaaaaaatcacaacctgctcccaagtcagcactgcctaaccccctttctggccatagttttctccgcagcacctaacagcatccaacagcttgcatatttatattttcatctatgttctgtctctgtctactgaaatataagctctcagaggtagggatttgtgtctgttgtgttccataccttccctgaggcctaaattgtgcctggcacatagcggatgctcaataatgctctgttgattttatgaatgaatgaaaaactgtcagaggaggtggagaagaggatgggcctgagtaagaagagagtgaaacctgatcggctggctgttgggggacaggggacatcaaggcttccgtggcctgcaagtcgctgaacaggggaacacagtcattggaagctcggtctccggcctcccaaggctgcctgtcttgtgaccagccctgtgggagactggatcacagaggaggccagtgtcccagccagctgactgtcctccacctcccaggtgcacaaggagtacagcaagtgcctgcgtcactcctactgctgcatccgctccccacccgggggcactcacggatccctcaagacctcagccatgcgaagcaacacccgctactacacagggacccaggtatcgggccagacaggactccctggggctgagtgttggaacctggagcctgagaggtggggagtggcttggcctaggtttctgatcgtgatgatcaggtgagcagtctcagaaagacgccagagggtgggtggcccaaggatcccctcacatttgggttgtgttcccagagccgaattcggaggatgtggaatgacactgtgaggaaacagacggagtcctccttcatggcgggtgacatcaacagcacccccaccctgaaccgaggtgagaaggcatccttctgcctctggcttcagtctctggaggctcccggctgccttgtgacctctgatcctttggccaggtaccatggggaaccacctgctgaccaaccccgtgctgcagccccgtgggggcaccagtccctacaacaccctcatcgccgagtcagtgggcttcaatccctcctcgccccctgtcttcaactccccaggtgagagcacgggggaaacatcccaggttgggaaatggagggtttgtgtcccaagggacctctgcatgggatgttctgtgccccagaactggagcctggacttgcatttcgagctcatccttgccttttctcttctctcttctggctgccacctgcagggagctaccgggaacccagtaagtgtgactcttccctggggatgtttctgaggctgggagagggacagacagtggccttctcagacggcctcacttaaggaggagaactcgggatgcctccccatgcccacatttccccaccccccgacacacagcctctggcagccgaatggaggataatggatggtgttcattgagtttgggctgttaagtgctgagggtctgagcacaggaaagcgatcctgttgcccaggcctcctcacactgctgagattctgaacctccagctggggatgagatcctgggggaactggtccttgtcccccacctttcatcaatacgctgctgggctggtgtgtctagtgccagtgagggagaaagggaatgtgagatcagagatccagggggcagggggaagcctacggaaaaccagcaggaatcaagcccacttctccacatggaccgcaccccctcactgtcccctagtgcatccagggcccctcttcaacctgaccagcccctttctgccctgcagagcaccccttgggaggccgggaagcctgtggcatggacaccctgcccctgaacggcaacttcaataacagttactccttgcgaagtggggatttccctcccggggatgggggccctgagccgccccgaggccggaacctagccgatgcggcggcctttgagaagatgatcatctcagagctggtgcacaacaacctgcgggggagcagcagcgcggccaagggccctccaccgcctgagccccctgtgccacctgtgccagggggcgggggcgaggaagaggcgggcgggcccgggggtgctgaccgggccgagattgaacttctctataaggccctggaggagcctctgctgctgccccgggcccagtcggtgctgtaccagagcgatctggacgagtcggagagctgcacggccgaggacggcgccaccagccggcccctctcctcccctcctggccgggactccctctatgccagcggggccaacctgcgggactcaccctcctacccggacagcagccctgaggggcccagtgaggccctgcccccaccccctcccgcaccccccggcccccccgaaatctactacacctcgcgcccgccagccctggtggcccggaatcccctgcagggctactaccaggtgcggcgtcctagccacgagggctacctggcagccccaggccttgaggggccagggcccgatggggacgggcagatgcagctggtcaccagtctctgagggcacctcatggaccaggggctggtggcccaggccagggagggaaccctgggcagggctctggtgggagagggagacagatggaggcagtggctggtgggccactctctccaggtgcccctcagccatgggccctacagtcccctcaggggactctaacctgggggcctgaggtgccagggttcacagacagggtttcc

SEQ ID NO: 914 - protein, 1474 aa, Homo sapiens
MARLAAVLWNLCVTAVLVTSATQGLSRAGLPFGLMRRELACEGYPIELRCPGSDVIMVENANYGRTDDKICDADPFQMENVQCYLPDAFKIMSQRCNNRTQCVVVAGSDAFPDPCPGTYKYLEVQYDCVPYKVEQKVFVCPGTLQKVLEPTSTHESEHQSGAWCKDPLQAGDRIYVMPWIPYRTDTLTEYASWEDYVAARHTTTYRLPNRVDGTGFVVYDGAVFYNKERTRNIVKYDLRTRIKSGETVINTANYHDTSPYRWGGKTDIDLAVDENGLWVIYATEGNNGRLVVSQLNPYTLRFEGTWETGYDKRSASNAFMVCGVLYVLRSVYVDDDSEAAGNRVDYAFNTNANREEPVSLTFPNPYQFISSVDYNPRDNQLYVWNNYFVVRYSLEFGPPDPSAGPATSPPLSTTTTARPTPLTSTASPAATTPLRRAPLTTHPVGAINQLGPDLPPATAPVPSTRRPPAPNLHVSPELFCEPREVRRVQWPATQQGMLVERPCPKGTRGIASFQCLPALGLWNPRGPDLSNCTSPWVNQVAQKIKSGENAANIASELARHTRGSIYAGDVSSSVKLMEQLLDILDAQLQALRPIERESAGKNYNKMHKRERTCKDYIKAVVETVDNLLRPEALESWKDMNATEQVHTATMLLDVLEEGAFLLADNVREPARFLAAKENVVLEVTVLNTEGQVQELVFPQEEYPRKNSIQLSAKTIKQNSRNGVVKVVFILYNNLGLFLSTENATVKLAGEAGPGGPGGASLVVNSQVIAASINKESSRVFLMDPVIFTVAHLEDKNHFNANCSFWNYSERSMLGYWSTQGCRLVESNKTHTTCACSHLTNFAVLMAHREIYQGRINELLLSVITWVGIVISLVCLAICISTFCFLRGLQTDRNTIHKNLCINLFLAELLFLVGIDKTQYEIACPIFAGLLHYFFLAAFSWLCLEGVHLYLLLVEVFESEYSRTKYYYLGGYCFPALVVGIAAAIDYRSYGTEKACWLRVDNYFIWSFIGPVSFVIVVNLVFLMVTLHKMIRSSSVLKPDSSRLDNIKSWALGAIALLFLLGLTWAFGLLFINKESVVMAYLFTTFNAFQGVFIFVFHCALQKKVHKEYSKCLRHSYCCIRSPPGGTHGSLKTSAMRSNTRYYTGTQSRIRRMWNDTVRKQTESSFMAGDINSTPTLNRGTMGNHLLTNPVLQPRGGTSPYNTLIAESVGFNPSSPPVFNSPGSYREPKHPLGGREACGMDTLPLNGNFNNSYSLRSGDFPPGDGGPEPPRGRNLADAAAFEKMIISELVHNNLRGSSSAAKGPPPPEPPVPPVPGGGGEEEAGGPGGADRAEIELLYKALEEPLLLPRAQSVLYQSDLDESESCTAEDGATSRPLSSPPGRDSLYASGANLRDSPSYPDSSPEGPSEALPPPPPAPPGPPEIYYTSRPPALVARNPLQGYYQVRRPSHEGYLAAPGLEGPGPDGDGQMQLVTSL

SEQ ID NO: 915 - DNA, 1003 bp, Homo sapiens
  source
  (1)..(1003)
  CDS (201)..(803)
ggtgagagctctgggcaatggaatcttaccaaacgtgcagtgctctgttttggagacagtgacaccctttttgtttatttcagatataaaacaatgcaggctttgtcctgaatatcattatccaaacaagaaaagggaacataccttctcaaataggagaccttcctggcctatgatgaaactttgggcctgactctggcatgcacagccttgttctactctgtcctctctgttctgatccttgtggagtttgtgtggcaccaaaacactcccatagtcaaggccagcaaccagactctgagctacaccctccttgtctccctcacactctgctttctctcttcctcgctcttcatcggccgccccagccctgccacctgcctcctctcacagaccacctttgcagctgtgttcacagtggctgtgttttctgcagggccttccaggctataaggccagaaagcaggatccgaaagtggatgggtccccaaaaaacaaattctgttgtcttcctttgctcctttacccaagtgaccctctgtggaatctggctggggacagagcctcccttcgtaaacaaggaccctcagttcatgcctggctacatcattatccagtgtaatgagggctccgtcactgccttctactctgtcttgggctacttgggcttcttggttttagggtcccttgctgtagcctttctggcaaggaacctgcctgatgctttcaacgaagccaagttcctgaccttcagcatgctggtgtcctgcagtgtctgggtggccttcctcccgagttactaaagcacccagggcaaggccagagtggccgtgagatcttctccatcgtgggctccagcactgggttacttggctgcatctttgctcccaagtgctatgtgatcctccttcatctagaaaggaacactattcaatgtttaaagaagcctagtccaggcatggtggctcacacctgtaatcccagcactctggaggccaaggcg

SEQ ID NO: 916 - protein, 200 aa, Homo sapiens
MHSLVLLCPLCSDPCGVCVAPKHSHSQGQQPDSELHPPCLPHTLLSLFLALHRPPQPCHLPPLTDHLCSCVHSGCVFCRAFQAIRPESRIRKWMGPQKTNSVVFLCSFTQVTLCGIWLGTEPPFVNKDPQFMPGYIIIQCNEGSVTAFYSVLGYLGFLVLGSLAVAFLARNLPDAFNEAKFLTFSMLVSCSVWVAFLPSY

SEQ ID NO: 917 - DNA, 1441 bp, Homo sapiens
  source
  (1)..(1441)
  CDS (201)..(1241)
ggcccctggggtctgggaacatgtctggagcctggagaactcctggcggtacaggaggtggctccagcttcctgccttggccgagctcgagctgtctctgagaggcggtccttgggttttcattctctcccccttcaccattgggcagtctcaccctgtgttgtgtgattgtatcgtatgtgtgtgagtgtgtgtcgtgtatgtatgtgttgtgtgactgtgtgtcatgtgtgtctgtatctgtgtgtctgtatctgtatgtgtgtgtctgtatctgtgtatctgtgtgtgtctgtatctgtgtatctgtgtgtgtctgtatctgtgtgtgtgtgtctgtgtttgtgtgtgtctgtatctgtgtctgtgtctgtgtgtgtgtgtctatgtgtgtgtctatctctgtgtgtgtatatctgtgtttgtgtgtgtgtgtgtctgtgtgtgtctatgtatctgtgtgtatgtatctgtgtgtctttctctgtgtctgtgtgtatgtgtctgtctctgtgtgtctgtgtgtgtatctgcatatctccgtgtatctctgtgtgtatgtctgtatctgtgtctgtgtatctgtgtctttgtgtgtatctgtgtgtgcgtgtctgtctttgtgtgtctgtatccgtgtatctgtgtgtctgtctctgcgtgtctgtgtatgtgtctgtctctgtgtgtctgtatatgtgtgtgtgtcttcgtacctctgtgtgtatctctgtgtgtgtatgtatgtgtgtgagtgtgtgtgtgtctctgtctctctctctgacccccctgctttggtccctgtctccggggctttttctccccaactctgtgcctcctctctgattctcctcctcccttcctcgtggtgtttccttctcctctggcctctctcctctgtttctaactctgccttccccaccccgcgccctcttatttccctctctgcctcctctcatttcctctccctgtctctgtttttatctccctcccttcctgtctgtcttttcttccctttccctccctttccgtgtcttcttctcccttctctcctcctgcccctcctttattttctctcaccgtccctcctctctgctgtctctggaagcttctatctgggccccatccctctctccccgctgccttacaccggtgcttttcacccacatccagttttctccttccaacctcggggccacctggaaattggcgagaaactcgacatcatccgtcagaagtgagcccctcccctggctccccacgcccctctcccagctgcctgcaccccgacagctggctcctgcctcattggcctcagcgtgagatgtggaaatgccatgaatctttgatgccccagccccacccagcagccgggcctcttcccccgggtgttttcatccccacattccctgccagcctggcccatgtgcacccgcctgtc

SEQ ID NO: 918 - protein, 346 aa, Homo sapiens
MYVLCDCVSCVSVSVCLYLYVCVCICVSVCVCICVSVCVCICVCVSVFVCVCICVCVCVCVSMCVSISVCVYLCLCVCVSVCVYVSVCMYLCVFLCVCVYVSVSVCLCVYLHISVYLCVYVCICVCVSVSLCVSVCACLSLCVCIRVSVCLSLRVCVCVCLCVSVYVCVSSYLCVYLCVCMYVCECVCVSVSLSDPPALVPVSGAFSPQLCASSLILLLPSSWCFLLLWPLSSVSNSAFPTPRPLISLSASSHFLSLSLFLSPSLPVCLFFPFPPFPCLLLPSLLLPLLYFLSPSLLSAVSGSFYLGPIPLSPLPYTGAFHPHPVFSFQPRGHLEIGEKLDIIRQK

SEQ ID NO: 919 - DNA, 1000 bp, Homo sapiens
  source
  (1)..(1000)
  CDS (201)..(800)
ctgctgaaagtgccgtttactcatctgttctgttcgcctcttcagggtgtgcccactggcgtggcggggccctgctctgctcttctgtgagggccttgcccaccaaggaggcgctggctaagctggtgggaaatggcagatgaggaggcctggctctcccgagaagcagccagggctccctgggggtcaggagcgagggcatgtctgggaaacgcccctctgctgcagtgcagggctggtttgggagagcaaggctagagctgggtggggagacaagggtttctcacatgctacaggcccaggagccagcaccatcctggggacgcggggctgcagagaggacggcagagctggtgaggatgaacggcaggcctgtggctgagggaggagggcctgccagcctaggggtgggtggatctgcaatggtggagagggaatccaggaagaaggcaggcagacacaggggaaaggttatatgtccaaagggtccctatgccgtcaggtgcctggggtttttggcagtgcttccatccacttgtgcaggtgagactgcccaaggagcacagggactggaacgggagactgcccggtccatgctggacttgctgatctcagctgaggtcgagggtattcagagcccgtcgtggtgttttatacggtcctgtacttcctgttatccttggtccattttcttctacactatcttccctccagtttcacacacttggacagaagggagtggttgtttttcactgaccgccaggaaccacaacaggcttctgtgtgttccagtgaaataagccctatctgtctctcgggaatggagcagtgttaagctttttttaaaagcacaatctgaagacactggggtctggaaacccattttttcttgttctgaagcctgtggggcctccgcggttgggccttgctgaataatttggggttttaggttgggtacatcaagggtaaagggcttctgtttggatcaaacaggaggtgg

SEQ ID NO: 920 - protein, 199 aa, Homo sapiens
MSGKRPSAAVQGWFGRARLELGGETRVSHMLQAQEPAPSWGRGAAERTAELVRMNGRPVAEGGGPASLGVGGSAMVERESRKKAGRHRGKVICPKGPYAVRCLGFLAVLPSTCAGETAQGAQGLERETARSMLDLLISAEVEGIQSPSWCFIRSCTSCYPWSIFFYTIFPPVSHTWTEGSGCFSLTARNHNRLLCVPVK

SEQ ID NO: 921 - DNA, 1411 bp, Homo sapiens
  source
  (1)..(1411)
  CDS (201)..(1211)
aatcgtgattagaaaaggtaagaagccatctatactttcccgttccatccaatacatttttgttactattttatttaattcaatgtttttcttttttaaaaactattcagcttaaatactgtaccaaaaataattttaatattaaatatctgcaattctattctagctcctgtgacaaaattcaagaaaacctgacataaatgaacaacaatacaacatgtattcaaccatctatgatctcttccatggctttaccaatcatttacatcctcctttgtattgttggtgtttttggaaacactctctctcaatggatatttttaacaaaaataggtaaaaaaacatcaacgcacatctacctgtcacaccttgtgactgcaaacttacttgtgtgcagtgccatgcctttcatgagtatctatttcctgaaaggtttccaatgggaatatcaatctgctcaatgcagagtggtcaattttctgggaactctatccatgcatgcaagtatgtttgtcagtctcttaattttaagttggattgccataagccgctatgctaccttaatgcaaaaggattcctcgcaagagactacttcatgctatgagaaaatattttatggccatttactgaaaaaatttcgccagcccaactttgctagaaaactatgcatttacatatggggagttgtactgggcataatcattccagttaccgtatactactcagtcatagaggctacagaaggagaagagagcctatgctacaatcggcagatggaactaggagccatgatctctcagattgcaggtctcattggaaccacatttattggattttcctttttagtagtactaacatcatactactcttttgtaagccatctgagaaaaataagaacctgtacgtccattatggagaaagatttgacttacagttctgtgaaaagacatcttttggtcatccagattctactaatagtttgcttccttccttatagtatttttaaacccattttttatgttctacaccaaagagataactgtcagcaattgaattatttaatagaaacaaaaaacattctcacctgtcttgcttcggccagaagtagcacagaccccattatatttcttttattagataaaacattcaagaagacactatataatctctttacaaagtctaattcagcacatatgcaatcatatggttgacttttgaatggaaaaccccacaatattaagaaaagcattcatgtgactttattagggacactaaactacatcattaacatgtcacagcttggttgacaataatcaccaagaaaatctctttggtttttaaaaataaataaacatatattcataaaactcaaaaaacagttatactgaacgttgagatggcagaaactttc

SEQ ID NO: 922 - protein, 336 aa, Homo sapiens
MNNNTTCIQPSMISSMALPIIYILLCIVGVFGNTLSQWIFLTKIGKKTSTHIYLSHLVTANLLVCSAMPFMSIYFLKGFQWEYQSAQCRVVNFLGTLSMHASMFVSLLILSWIAISRYATLMQKDSSQETTSCYEKIFYGHLLKKFRQPNFARKLCIYIWGVVLGIIIPVTVYYSVIEATEGEESLCYNRQMELGAMISQIAGLIGTTFIGFSFLVVLTSYYSFVSHLRKIRTCTSIMEKDLTYSSVKRHLLVIQILLIVCFLPYSIFKPIFYVLHQRDNCQQLNYLIETKNILTCLASARSSTDPIIFLLLDKTFKKTLYNLFTKSNSAHMQSYG

SEQ ID NO: 923 - DNA, 1405 bp, Homo sapiens
  source
  (1)..(1405)
  CDS (201)..(1205)
gctgaggactgaaaagagagggtgagtaattcttcatgacctgtaggatcccaaagatggcgacctgccagcctggactgccagcgaaggccagaatcgtgctgtagctctgaacccacagctcctctgcccctggcccatgagaatttcagctggagagatagcatgccctggtaagtgaagtcctgccacttcgagacatggaatcatctttctcatttggagtgatccttgctgtcctggcctccctcatcattgctactaacacactagtggctgtggctgtgctgctgttgatccacaagaatgatggtgtcagtctctgcttcaccttgaatctggctgtggctgacaccttgattggtgtggccatctctggcctactcacagaccagctctccagcccttctcggcccacacagaagaccctgtgcagcctgcggatggcatttgtcacttcctccgcagctgcctctgtcctcacggtcatgctgatcacctttgacaggtaccttgccatcaagcagcccttccgctacttgaagatcatgagtgggttcgtggccggggcctgcattgccgggctgtggttagtgtcttacctcattggcttcctcccactcggaatccccatgttccagcagactgcctacaaagggcagtgcagcttctttgctgtatttcaccctcacttcgtgctgaccctctcctgcgttggcttcttcccagccatgctcctctttgtcttcttctactgcgacatgctcaagattgcctccatgcacagccagcagattcgaaagatggaacatgcaggagccatggctggaggttatcgatccccacggactcccagcgacttcaaagctctccgtactgtgtctgttctcattgggagctttgctctatcctggacccccttccttatcactggcattgtgcaggtggcctgccaggagtgtcacctctacctagtgctggaacggtacctgtggctgctcggcgtgggcaactccctgctcaacccactcatctatgcctattggcagaaggaggtgcgactgcagctctaccacatggccctaggagtgaagaaggtgctcacctcattcctcctctttctctcggccaggaattgtggcccagagaggcccagggaaagttcctgtcacatcgtcactatctccagctcagagtttgatggctaagacggtaagggcagagaagtttcaaagtgcctttctcctccccactctggagccccaactagatcagcaggagctagggggatgagagcacttgcttcaggcaattgacccctgtcccagcatcccccacccccagactgacaggtaactgaggcagagtcctgactttcttctataatcagtttccccattttcaa

SEQ ID NO: 924 - protein, 335 aa, Homo sapiens
MESSFSFGVILAVLASLIIATNTLVAVAVLLLIHKNDGVSLCFTLNLAVADTLIGVAISGLLTDQLSSPSRPTQKTLCSLRMAFVTSSAAASVLTVMLITFDRYLAIKQPFRYLKIMSGFVAGACIAGLWLVSYLIGFLPLGIPMFQQTAYKGQCSFFAVFHPHFVLTLSCVGFFPAMLLFVFFYCDMLKIASMHSQQIRKMEHAGAMAGGYRSPRTPSDFKALRTVSVLIGSFALSWTPFLITGIVQVACQECHLYLVLERYLWLLGVGNSLLNPLIYAYWQKEVRLQLYHMALGVKKVLTSFLLFLSARNCGPERPRESSCHIVTISSSEFDG

SEQ ID NO: 925 - DNA, 1858 bp, Homo sapiens
  source
  (1)..(1858)
  CDS (201)..(1658)
gggtgactaactctgcctgcgtgtttcttttgtcaccagcataggcactgagtgcggtctgtgcacccctttgccacccaccggtgccggcactgagcctgcaacctgtctcacgccctctggctgttgccatgacgtccacctgcaccaacagcacgcgcgagagtaacagcagccacacgtgcatgcccctctccaaaatgcccatcagcctggcccacggcatcatccgctcaaccgtgctggttatcttcctcgccgcctctttcgtcggcaacatagtgctggcgctagtgttgcagcgcaagccgcagctgctgcaggtgaccaaccgttttatctttaacctcctcgtcaccgacctgctgcagatttcgctcgtggccccctgggtggtggccacctctgtgcctctcttctggcccctcaacagccacttctgcacggccctggttagcctcacccacctgttcgccttcgccagcgtcaacaccattgtcgtggtgtcagtggatcgctacttgtccatcatccaccctctctcctacccgtccaagatgacccagcgccgcggttacctgctcctctatggcacctggattgtggccatcctgcagagcactcctccactctacggctggggccaggctgcctttgatgagcgcaatgctctctgctccatgatctggggggccagccccagctacactattctcagcgtggtgtccttcatcgtcattccactgattgtcatgattgcctgctactccgtggtgttctgtgcagcccggaggcagcatgctctgctgtacaatgtcaagagacacagcttggaagtgcgagtcaaggactgtgtggagaatgaggatgaagagggagcagagaagaaggaggagttccaggatgagagtgagtttcgccgccagcatgaaggtgaggtcaaggccaaggagggcagaatggaagccaaggacggcagcctgaaggccaaggaaggaagcacggggaccagtgagagtagtgtagaggccaggggcagcgaggaggtcagagagagcagcacggtggccagcgacggcagcatggagggtaaggaaggcagcaccaaagttgaggagaacagcatgaaggcagacaagggtcgcacagaggtcaaccagtgcagcattgacttgggtgaagatgacatggagtttggtgaagacgacatcaatttcagtgaggatgacgtcgaggcagtgaacatcccggagagcctcccacccagtcgtcgtaacagcaacagcaaccctcctctgcccaggtgctaccagtgcaaagctgctaaagtgatcttcatcatcattttctcctatgtgctatccctggggccctactgctttttagcagtcctggccgtgtgggtggatgtcgaaacccaggtaccccagtgggtgatcaccataatcatctggcttttcttcctgcagtgctgcatccacccctatgtctatggctacatgcacaagaccattaagaaggaaatccaggacatgctgaagaagttcttctgcaaggaaaagcccccgaaagaagatagccacccagacctgcccggaacagagggtgggactgaaggcaagattgtcccttcctacgattctgctacttttccttgaagttagttctaaggcaaaccttgaactgtccataacacgagaaacaagaggagatttcttttcaatggacccacaattcattaatgccaaaccataccatttcaggcaaaggtgttgcacacacatgctcttcaccacaaggtagataaatatatagaagaggcaggaactggggtctttccgtaaaagcatggacttga

SEQ ID NO: 926 - protein, 485 aa, Homo sapiens
MPISLAHGIIRSTVLVIFLAASFVGNIVLALVLQRKPQLLQVTNRFIFNLLVTDLLQISLVAPWVVATSVPLFWPLNSHFCTALVSLTHLFAFASVNTIVVVSVDRYLSIIHPLSYPSKMTQRRGYLLLYGTWIVAILQSTPPLYGWGQAAFDERNALCSMIWGASPSYTILSVVSFIVIPLIVMIACYSVVFCAARRQHALLYNVKRHSLEVRVKDCVENEDEEGAEKKEEFQDESEFRRQHEGEVKAKEGRMEAKDGSLKAKEGSTGTSESSVEARGSEEVRESSTVASDGSMEGKEGSTKVEENSMKADKGRTEVNQCSIDLGEDDMEFGEDDINFSEDDVEAVNIPESLPPSRRNSNSNPPLPRCYQCKAAKVIFIIIFSYVLSLGPYCFLAVLAVWVDVETQVPQWVITIIIWLFFLQCCIHPYVYGYMHKTIKKEIQDMLKKFFCKEKPPKEDSHPDLPGTEGGTEGKIVPSYDSATFP

SEQ ID NO: 927 - DNA, 1327 bp, Homo sapiens
  source
  (1)..(1327)
  CDS (201)..(1127)
gatatctagctttgcctctgttcccattatagatatctattccatttgtgtcccattcttctgaaaaggacaaagataatgatcctgcacaccctaattctttccacctttctcacaccctccatctttattcccattctttcaggtaacactaagtagccaattggcatccatttaatgaatagtggcaagagggaaagatggccatggacaatgtcacagcagtgtttcagtttctccttattggcatttctaactatcctcaatggagagacacgtttttcacattagtgctgataatttacctcagcacattgttggggaatggatttatgatctttcttattcactttgaccccaacctccacactccaatctacttcttccttagtaacctgtctttcttagacctttgttatggaacagcttccatgccccaggctttggtgcattgtttctctacccatccctacctctcttatccccgatgtttggctcaaacgagtgtctccttggctttggccacagcagagtgcctcctactggctgccatggcctatgaccgtgtggttgctatcagcaatcccctgcgttattcagtggttatgaatggcccagtatgtgtctgcttggttgctacctcatgggggacatcacttgtgctcactgccatgctcatcctatccctgaggcttcacttctgtggggctaatgtcatcaaccattttgcctgtgagattctctccctcattaagctgacctgttctgataccagcctcaatgaatttatgatcctcatcaccagtatcttcaccctgctgctaccatttgggtttgttctcctctcctacatacgaattgctatggctatcataaggattcgctcactccagggcaggctcaaggcctttaccacatgtggctctcacctgaccgtggtgacaatcttctatgggtcagccatctccatgtatatgaaaactcagtccaagtcctaccctgaccaggacaagtttatctcagtgttttatggagctttgacacccatgttgaaccccctgatatatagcctgagaaaaaaagatgttaaacgggcaataaggaaagttatgttgaaaaggacatgagccttctttgcttctaaacgtctaaaataacacaacgtccctgatggagaaaatggtttaaaggatctgactttatctttggaagtgattgacatatgagaagcttcaggaagtgctcccaccccaaatattattcctactgagacttgaattgccattagaggtattatttttgctctttctttacatagaatattgtt

SEQ ID NO: 928 - protein, 308 aa, Homo sapiens
MAMDNVTAVFQFLLIGISNYPQWRDTFFTLVLIIYLSTLLGNGFMIFLIHFDPNLHTPIYFFLSNLSFLDLCYGTASMPQALVHCFSTHPYLSYPRCLAQTSVSLALATAECLLLAAMAYDRVVAISNPLRYSVVMNGPVCVCLVATSWGTSLVLTAMLILSLRLHFCGANVINHFACEILSLIKLTCSDTSLNEFMILITSIFTLLLPFGFVLLSYIRIAMAIIRIRSLQGRLKAFTTCGSHLTVVTIFYGSAISMYMKTQSKSYPDQDKFISVFYGALTPMLNPLIYSLRKKDVKRAIRKVMLKRT

SEQ ID NO: 929 - DNA, 1006 bp, Homo sapiens
  source
  (1)..(1006)
  CDS (201)..(806)
  modified_base (543)..(642): a, t, c, g, unknown or other
agtggttgtacaattttacatttccatcagcagcatatgagagttcaaggtcctccacatggtatggtcagtcttttaaattttagccactctcatgggtgtgttgtgatatctcatcgtgtttaattctcattttttaatgaataatatttaaaatcatcttgtgtgctgtttgccatctgtatatcttctcttgtgaaatgtctgttcatatcttatgctcaataagatttttggattcactgagttttgagtgttctttatgtattctagaggcaagatatagatgtcctttactagccatattttttgaaaacttttttctcctaatgtgtggcttctcttatcattctatttatgtatttaagttttgggatacatgtgcagatgtgcaggtttgttacataggtatacgtgtgccatggtggtttgctgctcctattgacctgtcctctaacttccatcccctcaccctcctactccccaacaggcctattgtgtgttgtttccatccctgtgtccataggttctcattgttcaatnnnnnnnnnnnnnnnnnnnnnnnnnnnnnnnnnnnnnnnnnnnnnnnnnnnnnnnnnnnnnnnnnnnnnnnnnnnnnnnnnnnnnnnnnnnnnnnnnnnnaatgcaaaaaaaaattgctggagaaaactaagaattatattgtcattataacttacaaaatggattttgaacattttcctgtagagaagccttctttgtcctggtgtttcttatcactctctggtaataaaagtaaaagcttattagttgttccaaaccattaggacaggacagcttgtcccttttaaaataccattctcagggtggttttttcttcaaggttagttttataagataacagataaatgtaactgttagtccaaatttctttgcttttgatgatagtaaatcttgatcttcactctttagattttcttcaagtggccaattttcaaacatttaagcctgggcacccaaacccact

SEQ ID NO: 930 - protein, 201 aa, Homo sapiens
  MOD_RES (115)..(148): Variable amino acid
MSVHILCSIRFLDSLSFECSLCILEARYRCPLLAIFFENFFLLMCGFSYHSIYVFKFWDTCADVQVCYIGIRVPWWFAAPIDLSSNFHPLTLLLPNRPIVCCFHPCVHRFSLFNXXXXXXXXXXXXXXXXXXXXXXXXXXXXXXXXXXCKKKLLEKTKNYIVIITYKMDFEHFPVEKPSLSWCFLSLSGNKSKSLLVVPNH

SEQ ID NO: 931 - DNA, 24370 bp, Homo sapiens
  source
  (1)..(24370)
  CDS (201)..(3510)
  CDS (8553)..(9200)
  CDS (11163)..(11385)
  CDS (11634)..(11749)
  CDS (11929)..(12017)
  CDS (12408)..(12565)
  CDS (12927)..(13090)
  CDS (13263)..(13388)
  CDS (13732)..(13898)
  CDS (14199)..(14486)
  CDS (14575)..(14749)
  CDS (14989)..(15130)
  CDS (15312)..(15432)
  CDS (15856)..(16039)
  CDS (16226)..(16327)
  CDS (17669)..(17763)
  CDS (17972)..(18181)
  CDS (18702)..(18885)
  CDS (19001)..(19129)
  CDS (19231)..(19411)
  CDS (19545)..(19712)
  CDS (19815)..(19941)
  CDS (20054)..(20254)
  CDS (20547)..(20721)
  CDS (21048)..(21160)
  CDS (21338)..(21417)
  CDS (21507)..(21633)
  CDS (21721)..(21843)
  CDS (22399)..(22526)
  CDS (22761)..(22849)
  CDS (22954)..(23148)
  CDS (23287)..(23457)
  CDS (23557)..(23791)
  CDS (24143)..(24170)
ggggcagtgggagcccgggctcgtcggagggtgcagcgcggggtcccgccgagccatccagacgcaggccccgcggggcgcacgggaggcccccggggactggcgccctggcccgggcatgaggcgcggcggggccggcaggagccggaggaggagccgccgccgccgttgacccggccgccggccgggagctgggagagatgcggagcccggccaccggcgtccccctcccaacgccgccgccgccgctgctgctgctgttgctgctgctgctgccgccgccactattgggagaccaagtggggccctgtcgttccttggggtccaggggacgaggctcttcgggggcctgcgcccccatgggctggctctgtccatcctcagcgtcgaacctctggctctacaccagccgctgcagggatgcgggcactgagctgactggccacctggtaccccaccacgatggcctgagggtttggtgtccagaatccgaggcccatattcccctaccaccagctcctgaaggctgcccctggagctgtcgcctcctgggcattggaggccacctttccccacagggcaagctcacactgcccgaggagcacccgtgcttaaaggctccacggctcagatgccagtcctgcaagctggcacaggcccccgggctcagggcaggggaaaggtcaccagaagagtccctgggtgggcgtcggaaaaggaatgtaaatacagccccccagttccagccccccagctaccaggccacagtgccggagaaccagccagcaggcacccctgttgcatccctgagggccatcgacccggacgagggtgaggcaggtcgactggagtacaccatggatgccctctttgatagccgctccaaccagttcttctccctggacccagtcactggtgcagtaaccacagccgaggagctggatcgtgagaccaagagcacccacgtcttcagggtcacggcgcaggaccacggcatgccccgacgaagtgccctggctacactcaccatcttggttactgacaccaatgaccatgaccctgtgttcgagcagcaggagtacaaggagagcctcagggagaacctggaggttggctatgaggtgctcactgtcagggccacggatggtgatgcccctcccaatgccaatattctgtaccgcctgctggaggggtctgggggcagcccctctgaagtctttgagatcgaccctcgctctggggtgatccgaacccgtggccctgtggatcgggaagaggtggaatcctaccagctgacggtagaggcaagtgaccagggtcgggacccgggtcctcggagtaccacagccgctgttttcctttctgtggaggatgacaatgataatgccccccagtttagtgagaagcgctatgtggtccaggtgagggaggatgtgactccaggggccccagtactccgagtcacagcctcggatcgagacaaggggagcaatgccgtggtgcactatagcatcatgagtggcaatgctcggggacagttttatctggatgcccagactggagctctggatgtggtgagccctcttgactatgagacgaccaaggagtacaccctacgggtgcgagcacaggatggtggccgtcccccactctctaatgtctctggcttggtgacagtacaggtcctggatatcaacgacaatgcccccatcttcgtcagcacccctttccaggctactgtcctggagagtgtccccttaggctacctggttctccatgtccaggctatcgacgctgatgctggtgacaatgcccgcctggaataccgccttgctggggtgggacatgacttccccttcaccatcaacaatggcacaggctggatctctgtggctgctgaactggaccgggaggaagttgatttctacagctttggggtagaagctcgagaccatggcactccagcactcactgcctcggccagtgtcagcgtgactgtcctggatgtcaacgacaacaatccaacctttacccaaccagagtacacagtgcggctcaatgaggatgcagctgtgggcaccagcgtggtgacggtgtcagctgtggaccgtgatgctcatagtgtcatcacctaccagatcaccagtggcaatactcgaaaccgcttctccatcaccagccaaagtggtggtgggctggtatcccttgccctgccactggactacaaacttgagcggcagtatgtgttggctgttaccgcctccgatggcactcggcaggacacggcacagattgtggtgaatgtcaccgacgccaacacccatcgtcctgtctttcagagctcccactatacagtgaatgttaatgaggaccggccggcaggcaccacggtggtgctgatcagcgccacggatgaggacacaggtgagaatgcccgcatcacctacttcatggaggacagcatcccccagttccgcatcgatgcagacacgggggctgtcaccacccaggctgagctggactatgaagaccaagtgtcttacaccctggccattactgctcgggacaatggcattccccagaagtccgacaccacctacctggagatcctggtgaacgacgtgaatgacaatgcccctcagttcctgcgagactcctaccagggcagtgtctatgaggatgtgccacccttcactagcgtcctgcagatctcagccactgatcgtgattctggacttaatggcagggtcttctacaccttccaaggaggcgacgatggagacggtgactttattgttgagtccacgtcaggcatcgtgcgaacgctacggaggctggatcgagagaacgtggcccagtatgtcttgcgggcatatgcagtggacaaggggatgcccccagcccgcacacctatggaagtgacagtcactgtgttggatgtgaatgacaatccccctgtctttgagcaggatgagtttgatgtgtttgtggaagagaacagccccattgggctagccgtggcccgggtcacagccactgaccccgatgaaggcaccaatgcccagattatgtaccagattgtggagggcaacatccctgaggtctttcagctggacatcttctccggggagctgacagccctggtagacttagactacgaggaccggcctgagtacgtcctggtcatccaggccacgtcagctcctctggtgagccgggctacagtccacgtccgcctccttgaccgcaatgacaacccaccagtgctgggcaactttgagatccttttcaacaactatgtcaccaatcgctcaagcagcttccctgggggtgccattggccgagtacctgcccatgaccctgatatctcagatagtctgacttacagctttgagcggggaaatgaactcagcctggtcctgctcaatgcctccacgggtgagctgaagctaagccgcgcactggacaacaaccggcctctggaggccatcatgagcgtgctggtgtcaggtaaggaagggcccaggtggcgctggggtgggggtagctcgcggggatggtctgggcagccactggaggtagggtgcgatccaggaagcagctacagatccacctccctgcccagtgcctggcacagagcaggaggggcaagagccagcttgggaagaagccccaggaaccctggcggctggtgcaggccccaccttctgctgggctgggctgggctgcttcggttggctgcccccactgtctaccagcctgtgacgtggtcggggaagtgttgtgaggctgccccggctatggctgccaagaattgtgaaaaaaggcgcgtggaagcctggggggccaggagagctgggggaagggcagagaggactgtggcgcaggagaggaggcgaggccagggccccttcacccccatcaagatattcctgcagtctcacacagcctttggcagagctggggaccacgggagcacagggctgccgccacccaggggtcaggaccctgtagtcctcttctggccccttttgcctcctggctgagctgcagaatcggctgacagggactttgtctagcgcattcttttccctccaggcagaaagagcctggcctggctcccccttcagagctcccacaggaagtgaggccagagctcattgtctgtccaaacagaccccactttcagagtccgtggttcgggtctggcttggaggaggggctgcaatgaagctggggggcaggctgaggcctcgtgggccccccttgccacctcatgggctgttcttagggtgccaggccttcctttcctgctagctgtgaccagcccaagctccaggaatggagtgtagggaccaggacaggccagtggactggtgagctttgagggcagagaccccaaggcaccttatctgaggagagaacagagtcccagggcgtgggagcctggccggaacccaggctggggcattcctgctgcttggccaagcactcagcctacagactccctggacagcagggctgggggaggagagttggagggggttggtgacagtattctgtctttttttatcagctgtggggagccagaggtagcagcagggagaagaccacacccaagttgctgagtgccttccccaagcctgggaacaactgagaccctcatgaggggatgctgttagctgcaccccaggggtggatcaggtcacatcccctctaggcagccttcaaatccatcagggaagggaggaaaagaagaggctggcaggcccctactcccaccccagggagtgtggcctgaaggggaaggaggggtatgccagagtcagggcgtggcctcactcagggtccttgctggacagatgcctccctgccccacccttcaaagtagccacaggaaccaggaagcaggagcttttcagggactgtggctgaggttctgagcctcctgagacttcagtttcccctccaggaggcggaagagggaggctggagctcctgtgtcctcaactgtgcctgggcacttgagacaagtgggaaggaggtgggaaggagggcctctccctctggtcctccacacccagcctgcctttggtgagcgtggccaggcactggcagagaagcgcccccattaagccttcggtctcccaccagggcagagccctagaccttggttccctagtctagagaaggctcggggcaacatccaggacggctcctcctggcccggcagctctggccccaccctctcccttcggccctgacccttggaggcagtcaccacggcaaccccaaagttcagggaggccggggtgagggggagctgactcccactgcccctttgttttcctcctcttgttctttgtctcttctttctttcccgcccctgcccatgcggagccctgcagcactgcctctctccggtgccctctccctgctcctgcggctctccggctctcccacttgcccattgctggctcctctcctgaggctttgtcttcccctgtttggtctccgtgtttgtgcctccactctcttccctatggctgcagctgccccagcctgggccgatggctcccctggaggctgaattctcctcgcctctttcttcctctgctcagacacgcagcagctcctgtccatggtctgggcagctcccagaacagcagagccctcttggcctccagtctccgctggcacatctgccaggggaagagaggctgggaggctgaccgggacctggcacttttccaggtgtgcctggctaagcttgggacacaggtggcatttcctggggtcagaggccatcccagctgttccttttctgtccaggaagacagctcaggcaacgtactccccacccctgttcccatcctgcctttgcacctgaggggtgacctaggtcaaggcaggggagggtgatatagaaaggagagagcagtgggttgactgttggggatgggggacaacagcagagggggcaggtggccacagatggtggaccagatgggaagcaacagagacatgctgggagaggggcccaggcggggcctaagacgatggcggtgggggacacagggagaagtgtttgttcccagggctgaggggtggcaaagtttctcccgctccatggccttggttgccccctctcctctcttaatcagttatgggcactgtgtgtggagtcttgggctgctttctgcctggagggaatatcccgtcaaggaatcattaggcagatataccaggtatacaagagctctgtgccagctgagcatcctggtgcggggaagtctgaaacggagaggaaagtagagcctgatgacataaatctgggcaggcttcctggagcaggtgagctagggcaggttagaagactcagaggactgtgggctggtgtctgggtgggaaggaacagcctgtgcagcagctttgagacgagagcaggaggaacagaagtgggtgatgacaagcaggcttgctggtgagagctagtgagaataagcaagtgatgaggctggagggtaggtgggcagtcggctgaggacatggctgagatgggggtctgctttcagccttcccggcttcagctgagccaccgctggtacagtcagccaccgcaagtaggtacaacacagatgcagaatttgttcccatgtcccttgcctactcccaccccaccccagaaacatgggctcctgccccgttactgctagggtaagcatttgctttttatatctagttgggctccccctgctatgtggttttgtttgtttgtttgggacagagtctcactctgtcacccaggctggagtacaatggcgcgatctcggctcactgcaacctctgcctcctgggttcaagcaattctcctgcctcagcctcctgagtatctgggacctcctgagtagctgagattacaggcacccaccaccacgcccaactaatttttgtatttttagtagagacggggtttcaccatgttggtcagtctgatctcgaactcctgacctcgtgatccacccgcctcagcctcccaaagttctgggactacaggcgtgagccactgcgcccggccccctgctatgttttaaagtccgtttattctttgtggagactgaatagattgtcatccacatctcagtgttttctgaacacctactatgtgtaaggcattgtaataaatacaaatatgaatatgccagtagctcatgcctgtaatcccagtgctctagaaggctgagatggaggatcacttgaggccaggaatttgagaccagcctggacaacacagcaagaccccatctctacacacaaacaaaaattagccaggcatagttgtgagcacctgtggtctcagctatttgggaggttgaggtgggaggatcgcttgagcccaggagttcgaggctacagtgagctatgatcgtgccactgctctccagtgtaggcgacagagagtctgtctcttaaaaaaaaaaaaaaaaagactatcccttcttgccctgtaaagccatttcctccttctccaggccccagctttcattttttagctaaataaaattcattcccatgtgtatgtgcattcaggtgtgtatggtatttctgggcttagggtgtgtgggtggaatgagacaccagcaagtgtgttttagtgcttagctgtttataagtgagtgtgttgcctgggggcatagcaggcatttgggtgtaatggttgagccaagtgggtgatgagtagctagaggccctaggaccagagaagagactgactcagtggggctctggggtctcagagtggagagctgcccaggcccttctatctctgccttccggtcccccaccccgactcaccctgtctccagcatggggcagtgggtgatgatgtcactggttaacgtggctcagctggatttcctggggtggggccccccaggctacccacagcagcccagagagttgggcgggaagaatgctttgtgttggatgttgccatggggatagcaggtctgcgcgcccaagcagccatggggctcagtgggagggggactaggtggcccactgacccagtttacccactcccccccacccccgccaactccctgctgctgtgggggagtggggaacacagccatggttgcgattatcgtggtgttgaggtgtagaggctgagggggcagggggatgatttttgtgggtctcaggatgctctgggccctgtagaaaagtatgaaaaagacaacatagggttcccgcgcaggcagcacagactctgggggaagggagcaggagcggtggcttgggcagggaaaggtgcacaaacattaagaggtgtgccgtgcatcagcgacagaaggttttgggaaaggatgcaaagagaactgcaaatctcatcccctgagccctgaaggagtgattggcccacacgtgacatacctggctcagcacccttatgccagttggaaaggagagcctttcttggtgggtggtgcaggaatatgcaggctgaattgcagccccaggctgggtcctgactgtgtccctctccacagacggcgtacacagcgtgaccgcccagtgcgcgctgcgtgtgaccatcatcaccgatgagatgctcacccacagcatcacgctgcgcctggaggacatgtcacccgagcgcttcctgtcaccactgctaggcctcttcatccaggcggtggccgccacgctggccacgccaccggaccacgtggtggtcttcaacgtacagcgggacaccgacgcccccgggggccacatcctcaacgtgagcctgtcggtgggccagccgccagggcccgggggcgggccgcccttcctgccctctgaggacctgcaggagcgcctatacctcaaccgcagcctgctgacggccatctcggcacagcgcgtgctgcccttcgacgacaacatctgcctgcgggagccctgcgagaactacatgcgctgcgtgtcggtgctgcgcttcgactcctccgcgcccttcatcgcctcctcctccgtgctcttccggcccatccaccccgtcggagggctgcgctgccgctgcccgcccggcttcacgggtgactactgcgagaccgaggtggacctctgctactcgcggccctgtggcccccacgggcgctgccgcagccgcgagggcggctacacctgcctctgtcgtgatggctacacgggtgagccaagggaggggactcatgggccagccctggaaggctgactgtgtggtgcaggcacaaatcaggacaaatgctggcggctgcctcattctcttcccgagtgaggtgcagctacactgagaggtcataaatccggcctgctccctgacagcaccccactgaggaaggcagtgcaaggagtgcttctccctgctgtgcacaggacacacaggcagtgccattgtgggcagagctggctccagagccagtcggcctgtgttcgtgtatcagctttgccgctagtagctgtgtgaccttgaacaagttacttaacctttctggccctcggttatttgaaatggagataatgaccgtacttaggtcataagttggttgtgaggattaatgtaattaatttgatacttggaaacagctggtggcatggaaggtgttggccttgatttaagggaacgctgagattgggtgacttgctcctggtctcatcacacccggtttagaggtgaggctgggcctagaacctggtctctcccccactgagcgagttccttttctgagctgcagcaagtacttttctccccaggcattaaggggaagacacagaagagctgggggaactggagggggttgagttctgagatggggtgctccagaaaaccattgcacctgtatgggcctgggcagaatggctccgcctccgcccagctgctggtaaaagaggatcctggctaggcggcttccctgttggcctgtcagccaaggtctttacacatcctgctccctgggatgctcactgtctctgctctatgctcctgacccctcccttcaggctcctgtgtcttctcaggacaccccctgctccccttccctgtgggcctttccttcctagatgcccaggccctgctccttgtcctccagggccatgcccactggctctgccagcagccataggcaggccccactccttccccgctgcatcttcctgcccagaacttgccagacttgacttctctctgctgctgctaggggtggggggaaggggagggacgggcttgggggaggggagagaagtctttgtccaggaggatggtggggggggttgggagggggggggttagagcaggcgaacaacagtttccatggaaacaagagccagtcactaggcacaggagctgagaacctatctctagaatctgggaatggggagggagagaagggtggattttcccatctgatgttggagttttcagctcctctgttgaattcttgtctgctctcagggctcagtttcccactctcagcatgtcccaggtgcacagaggtccttagtctggaccgcagggctcaaggtgggagtcctctgccccattcctgggggctccccagcttctctctcatactcttccataacccagacaaatctaagtggaagcctggtcccatccccagggagggaaactgatctcagtgcctgagagggacaaaagcaccagtgggaaggagggaggagggaggctcccagccctcccgctgtcctgcaggcccatctgcttgtgcacatttaccctcttgggggccaggacacccccaggtgtgcttggtagtgtgacatcgaaggctcccgggatccgggccttacaaccaagtgtcccagcaggcctgtgcttatgaaacccaaatggggtagggaaggtgctggggactccgaggaacttgcaggggagcagtgcgtggagctgtggcgagagcggctcagtgagccaaacagggtgcccatgaagggctggggaccataggtctcagagaagatggcacacgagaggaagtggggatgcctgggaggtttggggagtattacgagggtcacgggaggccatgggagctatcactgggttgtggggggtctcagttcccctcctgtcctcaggtacttggtactcacctgcctttcctcttgtccaggtgagcactgtgaggtgagtgctcgctcaggccgttgcaccccgggtgtctgcaagaatgggggcacctgtgtcaacctgctggtgggcggtttcaagtgcgattgcccatctggagacttcgagaagccctactgccaggtgaccacgcgcagcttccccgcccactccttcatcacctttcgcggcctgcgccagcgtttccacttcaccctggccctctcgtgagtggctgggcactgggggtggggagtgggcctggtgggcatctgaggtgcctcctgttctgtggttgaagtaagaggtcaggcagtgaaagcgtggagcaggctgccggcagagccaggtctgctcttggagttgcctgtggttctgccagcagatctccctcccctgcgctggttaggtggcgggggtgctggcatccaggtgggtaccccattccctgcccccatccccaactcctgttcaggtttgccacaaaggagcgcgacgggttgctgttgtacaatgggcgtttcaatgagaagcatgactttgtggccctcgaggtgatccaggagcaggtccagctcaccttctctgcaggtgatcacagttgccccccatccttgcccatcttccaaaggccccaagtcttccagcccctgaccccaagccacatactctatcagccaaatctgggcccagccccagccactggcaccccaaaccctgccattcctagccctcgtcaggcattccagctcacctggtcctttccccaggggagtcaaccaccacggtgtccccattcgtgcccggaggagtcagtgatggccagtggcatacggtgcagctgaaatactacaataaggtgggtgtggagggcacagagggttgggggttctgttcttgcctcaggtgcttacccagccctgagtggcattgcctccaggcttgggtgggctggtcagggcatttctggctgagaggaagggagcggctgggaaggtgccaccttgctgggcattcccaccccactgggcactgctcgatgctctctgttccactaggcagccgcaaacttggacactgaggaaggtagttacatgcataaaccacgtgagcacacgtgtgtgtatatgcatgtgtgtacgtgtgtctgggcatgtgggtgcacacagaggcacccagtgtgtgctggccatgaacctagtgggctctgtactcagtgtcccccttctctgctctttcctgtccacagccactgttgggtcagacagggctcccacagggcccatcagagcagaaggtggctgtggtgaccgtggatggctgtgacacaggagtggccttgcgcttcggatctgtcctgggcaactactcctgtgctgcccagggcacccagggtggcagcaagaagtgagcaggggaaagggccagggatggggtgaagtgagggcagggccaggcagggagggaaggtggagagggtgggcttttggggtctctctccctttgcctctcttagcccctgctcagccctggggatggggtcaagactggggaatcagagcaaggccctgtggggcagtctggggagggggctgagtgttcgacaagaacagttccaggtaggggtgacgcccttcctgagcactgctctgcagggcctcttggacacctgcctacgccgttcgtgtctctggcctggcggcagagcgagcggaggaccagaagctcccagccctcccttgtgccgccaccatctttgctcccccaggtctctggatctgacggggcccctgctactaggcggggtgcctgacctgcccgagagcttcccagtccgaatgcggcagttcgtgggctgcatgcggaacctgcaggtggacagccggcacatagacatggctgacttcattgccaacaatggcaccgtgcctggtatgggggcccggggtggagccaggctgggatcccagtgctgagaggaggggctgtgcctggtgtgaggatgccagaatggagggtctcagaggcctctctaactgctgccacaggctttctctttagagccccagctcaggtccactgagctgccttctctccattccaggctgccctgccaagaagaacgtgtgtgacagcaacacttgccacaatgggggcacttgcgtgaaccagtgggacgcgttcagctgcgagtgccccctgggctttgggggcaagagctgcgcccagggtaggaggggcggctgttagaggccacagcctgggtgccatcaacagtctgggaactggcagggttggggcaggcactgggcagggctctgctgagcggggctgtgggtggaaaagcgtgtctgggcagagccctgaaagggcaacacaggagacaaaggggccagtcagaggcaggcctgggcacagcgtggggcggtcccagggcaggtacgcactttggagggcggggctgatgaggggagtgggctctgcctcccgtgcagccgccaccgctgagcatcacagccccagggccctctgaggctccacccgtcacagtctgccttttcctgcctccccagaaatggccaatccacagcacttcctgggcagcagcctggtggcctggcatggcctctcgctgcccatctcccaaccctggtacctcagcctcatgttccgcacgcgccaggccgacggtgtcctgctgcaggccatcaccagggggcgcagcaccatcaccctacaggtgatgcatggaagggcggctggccctggcctggccatagggccctggtagcctctaggcggctggacagaagtggctgggcaggtcctgggcaggggtggggacatatagaggccgctggatccgttgggaaggtcaatgctgccacctgttgggcctgagggaaataaatacgctttcctctctatggcctcagctgggcagcgggatgggtttgatggtccagaaaggggaactgtgagctggagaacagtgattaaggccgtctgctgaccctgttttctttcctcctggtgtcagctacgagagggccacgtgatgctgagcgtggagggcacagggcttcaggcctcctctctccgtctggagccaggccgggccaatgacggtgactggcaccatgcacagctggcactgggagccagcggggggcccggccatgccattctgtccttcgattatgggcagcagagagcagagggcaacctgggcccccggctgcatggtctgcacctgagcaacataacagtgggcggaatacctgggccagccggcggtgtggcccgtggctttcggggctgtttgcaggtgagtgtcctgccctgccctcccatcccctcccccaccacctgcagccccgctccactgagggcaacactgctcctgtccctcccagggtgtgcgggtgagcgatacgccggagggggttaacagcctggatcccagccatggggagagcatcaacgtggagcaaggctgtagcctgcctgacccttgtgactcaaacccgtgtcctgctaacagctattgcagcaacgactgggacagctattcctgcagctgtgatccaggtatgctaaggatccagggcaacgggcaggttatcaggtgcctggggccacatgctggctctgctgtgtgacctggggcatggggcatcacaccacctctctgagtcttagttgcctacacaacaaagccatagccagctgataggatgctatgtggaaagaaacagatgaagggtttgatggaagatggtgccaggggagggtgggggaatgagcctctctggtccttctggtcccaggttactatggtgacaactgtactaatgtgtgtgacctgaacccgtgtgagcaccagtctgtgtgtacccgcaagcccagtgccccccatggctatacctgcgagtgtcccccaaattaccttgggccatactgtgagaccaggtaagcagaccagggcatgtggcagcaggtcccagtggctgctgcttctctctggtgtgtccctcagagccccgaaagcctggctgatccacagccagggtcagaagggccacatagggctcacctaggttaggtgggagtggcagggggagctcatgcctacctgggtccctctctgcaggattgaccagccttgtccccgtggctggtggggacatcccacatgtggcccatgcaactgtgatgtcagcaaaggctttgacccagactgcaacaagacaagcggcgagtgccactgcaaggtgacagccccaagcaagcctccactgtggccacttgggcctctgtccacatctcctgggccctagagggcaggctgtagggatgggtcttcctgtagagctgagggccttgtgcctttgctctcacaggcagggcagttggctgcttaccttcgtgtgtctgaggcgcagggggaccctgggccaatgtgtaacccatgagctctggcctggtgtggtggtggtttgcagcctgttctgattctgtgacatctcgctgatgggctcaactccaaagcattgctagtgttaattattttgaatactgctcctgaggggacctgaggtcgggaccctctccacaggggccacagctgagaaggacccatgagcatcctgggaagagagcctggccagtgacaccgttcttccctcctttctcaggagaaccactaccggcccccaggcagccccacctgcctcttgtgtgactgctaccccacaggctccttgtccagagtctgtgaccctgaggatggccagtgtccatgcaagccaggtgtcatcgggcgtcagtgtgaccgctgtgacaacccttttgctgaggtcaccaccaatggctgtgaaggtggggctcctgggatgggtgggcagccctccttacagtgtgctaggcacctgcaccccaggaaagccaggaaggggctggttgcaggcctggggaggcctggggaggcctagggagggctggggagcctgggcaggacagcagagggagagctgctcctgggtgaccatgtgctcttccccgcagtgaattatgacagctgcccacgagcgattgaggctgggatctggtggccccgtacccgcttcgggctgcctgctgctgctccctgtcccaaaggctcctttggtaggtgttggaggccccgatgtgatgtcgaggacatggcctctgctgttagtgggatgagggcaggaagctcctggctgaagatccggggaccccactttctggcctccaggtcctgggatttcatttcccatcttccttggttcacattcccccttccccatgttgcccaggtgtgcctacatcttggactgttttgttttgttttggtttggttttttttctgggacagagtctgtcactgtcacccaggctggtgtgcagtggcgtgatctccgctcgctgcaacctctgcctcccaggttcaagcaattttcctgcctaagcctctggccgccaccacacctggctaatttttttttttttttttttttttttgtatttttagtagagacagggtttcaccatgttggccagtctggtctcgaactcctgacctcatgatccgcctgcctcggcctcccaaagtgctgggattacaggcgtgagccactgcaccccaccacattttggactttttttttttttttttgagacggagtctcgctctgtcatcaggctacaatgcagtggcatgatctcggctctctgcaacctccacctcacaggttcaagcgattctcctacctcagccttccgagtagctggtactacaggcgtgtgctaccatgcccagctaattttttatatttttttagtagagacagggtttcaccatgttggccaggatggtctcgatctcttgaccttgtgatcagcccgcctcggcctcccaaagtgccgagattacaggcgtgagccaccgtgcccagcccacatcttggactcttaacaaaaatgctgaaaaacctgcactgtgcttggcatagggctgtgctagagattcaaagatgaatcatgcagggttccaatcgtcagctcaccaccgagtcctggagttacgccaccacaaaggcagacagtctggggagtagggggtgttggctgctgacccaggacacccagcccaggatgggggctggcgctggtcctggactggcaatgagcaggttcataggcaggaagtggcggagagcacaaagtggtggctggagacaggcaggatgggggctcaaggaggtcgtatgccctgttcccctagagcccatgtgtggactgatcttgcggagatttttggccctggtgttctacatacctgtcttcctgtttcaccagggcccttgtttgctagttactgtccccggcccatgaggtgctggcctccagcagaacctctcagccagtctcaggggcttcctgtgtgtctccctgaggccggcccttttggcttccttcccccagggactgctgtgcgccactgtgatgagcacagggggtggctccccccaaacctcttcaactgcacgtccatcaccttctcagaactgaagggcttcgtaagtgaaccccctcatctccatcttttccctgtccttcgtcctgagtctcacttgcccccactcccatctttgagaacggggcttctggaattccagcctgtgtgttcctgggctcccagctggagaggccgtctctcacctcctgaggtccttttgctccagagttcctgccctcactcctgctcctccgctccgtcctgtctaggctgagcggctacagcggaatgagtcaggcctagactcagggcgctcccagcagctagccctgctcctgcgcaacgccacgcagcacacagctggctacttcggcagcgacgtcaaggtggcctaccagctggccacgcggctgctggcccacgagagcacccagcggggctttgggctgtctgccacacaggacgtgcacttcactgaggtggggcttggaggatgcagggctggctggttagataggggtcatggtgagtgagcctgctcatggcaacctggggggcagagggggccctcccatcccacctacaaggagctccctgctggcaggaggcctccatgaaaccctgtgacccctggcccagccctcttcccaacccttctcatagtaacatatgtgtgttggggcatggtctgacccagagcagaggcctgcctgtggtaccatgggctgggaggaagcagtatctcaggacatgtgtgtgggtccaggcacagggctgggaagctcttatgtagagaatgaggaggagggcttaggggcagagcatccagtgacctgagtgggcagtgcggtccaggagcatttcaggggaggcaacagtgagcacagagggaggggcctggtggggagcagggactggcccgggcacaggccggggctccatggtggggatgtcaggtgtgggttgtgagcacacccaccgtgaccttgcccaccccagaatctgctgcgggtgggcagcgccctcctggacacagccaacaagcggcactgggagctgatccagcagacagagggtggcaccgcctggctgctccagcactatgaggcctacgccagtgccctggcccagaacatgcggcacacctacctaagccccttcaccatcgtcacgcccaacattggtaaggctggtgcctgggttggggaggggtttgtggagggagtccccgacaagagcggctgtgctggggtcctgcctgcctcacaggtccgatctgtgaccatccccttccttagtcatctccgtagtgcgcttggacaaagggaactttgctggggccaagctgccccgctacgaggccctgcgtggggagcagcccccggaccttgagacaacagtcattctgcctgagtctgtcttcagaggtcagtggtggccatggattgagttgggagctggaccccagtgtctgtgcagactccacagagagcagggcccagctaagtgtgacagtgtcccctcccagagacgccccccgtggtcaggcccgcaggccccggagaggcccaggagccagaggagctggcacggcgacagcgacggcacccggagctgagccagggtgaggctgtggccagcgtcatcatctaccgcaccctggccgggctactgcctcataactatgaccctgacaagcgcagcttgaggtcagcagctaggggacaggtgtgggtaggggtatgggtcgggcggtgagtgctgaggcatggagggggtcgggggcgtctccccagtcatgtgactgccgtggtgactgtgcacctgactgccccacatcagagtccccaaacgcccgatcatcaacacacccgtggtgagcatcagcgtccatgatgatgaggagcttctgccccgggccctggacaaacccgtcacggtgcagttccgcctgctggagacagaggagcggaccaagcccatctgtgtcttctggaaccattcaatcctgtgagcctgcactgccctcgccccctcaggcttcgggctgaaagtccaggcccctgcatgcctcaccctccttgtctccctgaccctgccttcctcacacagggtcagtggcacaggtggctggtcggccagaggctgtgaagtcgtcttccgcaatgagagccacgtcagctgccagtgcaaccacatgacgagcttcgctgtgctcatggacgtttctcggcgggaggtcgggcccacaggggcagctgcagagccgtgggtgggcacccagggcacggggctgggtgctcaggtcctgcccttcctaattccctggccccctgccacctactctgcagaatggggagatcctgccactgaagacactgacatacgtggctctaggtgtcaccttggctgcccttctgctcaccttcttcttcctcactctcttgcgtatcctgcgctccaaccaacacggcatccgacgtaacctgacagctgccctgggcctggctcagctggtcttcctcctgggaatcaaccaggctgacctccctgtaagatgctcctactgcccagaaactgtccccaccttctcaggccgcctccccagcccccactggcaacccctgctcctgcaccatgaactctaataaggtgcctagtgcagcacctggcccagggtttcctcttctgtggctcccccgggatcccccagcacctgcctctggcccaggcttccctggaagcagttcccaacacccaggccctcctccatgcctgacccgaagcagagcctgtgctctgggcgggccccggtcgctgacctgccctggcctgggccctcagtttgcctgcacagtcattgccatcctgctgcacttcctgtacctctgcaccttttcctgggctctgctggaggccttgcacctgtaccgggcactcactgaggtgcgcgatgtcaacaccggccccatgcgcttctactacatgctgggctggggcgtgcctgccttcatcacaggtactcccacccattcccagtcttggggtcccacatccctgggtccacctttgtgccatgttctctccacccacatacaggccctgaggccccacatccccatgccccaggccgccttattcacaggtgtccctctggtttaacccagactctgcagccgccacccaggcgtcactcccttatcctggggagatcggtaggggccgatggtgggcagaacccttttccatgcttcatgcctggccctgtgagcccacctgcccgcagccctacttcccaggcccctcatcacccctccactgctcccgtctgtctccatgctccagggctagccgtgggcctggaccccgagggctacgggaaccctgacttctgctggctctccatctatgacacgctcatctggagttttgctggcccggtggcctttgccgtctcggtgagtgctagcaggtgggttgggtgtcacctgtggccctcctttgctgtcctcctgctgctggggccgcgtgtcctcaggactccctttaggaacagctgaggccacggggccctgtgggctgggtggaagctgtttgtccccactgagcaccccatgccctctgcccctgcctagatgagtgtcttcctgtacatcctggcggcccgggcctcctgtgctgcccagcggcagggctttgagaagaaaggtcctgtgtgagtatagggttggggtgcctgggccatgggcaggcaccagcatgggaggtctcatggccggactcatggcctgtccctatccccagctcgggcctgcagccctccttcgccgtcctcctgctgctgagcgccacgtggctgctggcactgctctctgtcaacagcgacaccctcctcttccactacctctttgctacctgcaattgcatccaggtacctggcccagcctgtggagaagggaggcacctgggctgtggatgcctgaatatgcacagaccgttgctgcctcttgcctgccagggccccttcatcttcctctcctatgtggtgcttagcaaggaggtccggaaagcactcaagcttgcctgcagccgcaagcccagccctgaccctgctctgaccaccaagtccaccctgacctcggtgagggagccaggggtctcaggagggcggtgaagggagggagaggcaggaggcccagtgagcctgtacttttggccccactcccctttctcttttctccatcccttcctggaaggtggaaggggaggtgaaatgctgtgttcggcctggggaggagatgttggaaagggtgtgtaggattttgacttgagggagatggggctgagacagataatcaggtaataagtgccttgcacctgagaatctctcatgaattttagtaaattttctgtctcccaaggtgctctcaggagacaatttctggtctcatcttttacagagccattatatagtgagtccaggatccctgggggcatgcaggggtagcacagctgtggcagagctgtgaccactgccaggcctcaatatggggacagcggagaagcagggccctctctttcagacctgagcatgtggaaggtggaacttagggcaagttccctccaccctccttcttcccagcctggggccagccatcccactccccacttactgacctctctgttccctgcctagtcctacaactgccccagcccctacgcagatgggcggctgtaccagccctacggagactcggccggctctctgcacagcaccagtcgctcgggcaagagtcagcccagctacatccccttcttgctgaggtgaatcccggagatgggagggtggaggaggggaggaggggcccacgcatgctggacccaggccagccagctgttgggagttgaggagcacacactgtggctgacgtgggggccagcttggattagaagctgtaagggacccacagcaggaaccaggatcccaggggagaggagagactgggaccctgggcaaggggccaggctgacccctccagcatggtctcatcttcctagggaggagtccgcactgaaccctggccaagggccccctggcctgggggatccaggcagcctgttcctggaaggtcaagaccagcagcatggtgaggacagaacgctctggccacccagcagggcagttggctggcttttactgaaggtgggtggaggtggctgggctggctgtgatctctccctggcctcctagatcctgacacggactccgacagtgacctgtccttagaagacgaccagagtggctcctatgcctctacccactcatcagacagtgaggaggaagaagaggaggaggaagaggaggccgccttccctggagagcagggctgggatagcctgctggggcctggagcagagagactgcccctgcacagtactcccaagggtgggccagcactggggctgtggcctttggggccagtgggaggacagtgggcctggggttcttgggaagcaggactggggtggtggcctcctggctatctgccctctgtgggcctcatctacttcctttccccaccagatgggggcccagggcctggcaaggccccctggccaggagactttgggaccacagcaaaagagagtagtggcaacggggcccctgaggagcggctgcgggagaatggagatgccctgtctcgagaggggtccctaggcccccttccaggctcttctgcccagcctcacaaaggtgagtggggcacccccagctgccgagctcccctagtcagcagcctcatacctcacattctcctgtggccgcacctcacagccccgccccggcccacaggcatccttaagaagaagtgtctgcccaccatcagcgagaagagcagcctcctgcggctccccctggagcaatgcacagggtcttcccggggctcctccgctagtgagggcagccggggaggcccccctccccgcccaccgccccggcagagcctccaggagcagctgaacggggtcatgcccatcgccatgagcatcaaggcaggcacggtggatgaggactcgtcaggctccgagtgagtgtggccgggtgggcgggacggggtgcagcccctcggaggcctcacctgggcccagagctgcctccgggcctccccaggtgactctggatggcatttggaggacaaatgggcagaactggcccagctcccttactatgccgtgcccacaaaccatggtgccttgcggggagggccacccctcctaggctctacgcggcgcagcccagcctagggcagagtgcgggaggatggggagctgggggtgctttcctgtttccttcgtctggtgaaagctttcactctctcctctgtttcaactaaccctctgtctgccttttctgccactttcctttcctgcctctccagatttctcttctttaacttcctgcattaaccctgggccgtggttcctacgcccgaggctcccttcccttccccagccgcactcatgccctgctcctgtcttgtgctttatcctgccccgctccccatcgcctgcccgcagcagcgacgaaacgtccatctgaggagcctgggccttgccgggaggggtactcaccccacctaaggccatctagtgccaactcccccccc

SEQ ID NO: 932 - protein, 2923 aa, Homo sapiens
MRSPATGVPLPTPPPPLLLLLLLLLPPPLLGDQVGPCRSLGSRGRGSSGACAPMGWLCPSSASNLWLYTSRCRDAGTELTGHLVPHHDGLRVWCPESEAHIPLPPAPEGCPWSCRLLGIGGHLSPQGKLTLPEEHPCLKAPRLRCQSCKLAQAPGLRAGERSPEESLGGRRKRNVNTAPQFQPPSYQATVPENQPAGTPVASLRAIDPDEGEAGRLEYTMDALFDSRSNQFFSLDPVTGAVTTAEELDRETKSTHVFRVTAQDHGMPRRSALATLTILVTDTNDHDPVFEQQEYKESLRENLEVGYEVLTVRATDGDAPPNANILYRLLEGSGGSPSEVFEIDPRSGVIRTRGPVDREEVESYQLTVEASDQGRDPGPRSTTAAVFLSVEDDNDNAPQFSEKRYVVQVREDVTPGAPVLRVTASDRDKGSNAVVHYSIMSGNARGQFYLDAQTGALDVVSPLDYETTKEYTLRVRAQDGGRPPLSNVSGLVTVQVLDINDNAPIFVSTPFQATVLESVPLGYLVLHVQAIDADAGDNARLEYRLAGVGHDFPFTINNGTGWISVAAELDREEVDFYSFGVEARDHGTPALTASASVSVTVLDVNDNNPTFTQPEYTVRLNEDAAVGTSVVTVSAVDRDAHSVITYQITSGNTRNRFSITSQSGGGLVSLALPLDYKLERQYVLAVTASDGTRQDTAQIVVNVTDANTHRPVFQSSHYTVNVNEDRPAGTTVVLISATDEDTGENARITYFMEDSIPQFRIDADTGAVTTQAELDYEDQVSYTLAITARDNGIPQKSDTTYLEILVNDVNDNAPQFLRDSYQGSVYEDVPPFTSVLQISATDRDSGLNGRVFYTFQGGDDGDGDFIVESTSGIVRTLRRLDRENVAQYVLRAYAVDKGMPPARTPMEVTVTVLDVNDNPPVFEQDEFDVFVEENSPIGLAVARVTATDPDEGTNAQIMYQIVEGNIPEVFQLDIFSGELTALVDLDYEDRPEYVLVIQATSAPLVSRATVHVRLLDRNDNPPVLGNFEILFNNYVTNRSSSFPGGAIGRVPAHDPDISDSLTYSFERGNELSLVLLNASTGELKLSRALDNNRPLEAIMSVLVSDGVHSVTAQCALRVTIITDEMLTHSITLRLEDMSPERFLSPLLGLFIQAVAATLATPPDHVVVFNVQRDTDAPGGHILNVSLSVGQPPGPGGGPPFLPSEDLQERLYLNRSLLTAISAQRVLPFDDNICLREPCENYMRCVSVLRFDSSAPFIASSSVLFRPIHPVGGLRCRCPPGFTGDYCETEVDLCYSRPCGPHGRCRSREGGYTCLCRDGYTGEHCEVSARSGRCTPGVCKNGGTCVNLLVGGFKCDCPSGDFEKPYCQVTTRSFPAHSFITFRGLRQRFHFTLALSFATKERDGLLLYNGRFNEKHDFVALEVIQEQVQLTFSAGESTTTVSPFVPGGVSDGQWHTVQLKYYNKPLLGQTGLPQGPSEQKVAVVTVDGCDTGVALRFGSVLGNYSCAAQGTQGGSKKSLDLTGPLLLGGVPDLPESFPVRMRQFVGCMRNLQVDSRHIDMADFIANNGTVPGCPAKKNVCDSNTCHNGGTCVNQWDAFSCECPLGFGGKSCAQEMANPQHFLGSSLVAWHGLSLPISQPWYLSLMFRTRQADGVLLQAITRGRSTITLQLREGHVMLSVEGTGLQASSLRLEPGRANDGDWHHAQLALGASGGPGHAILSFDYGQQRAEGNLGPRLHGLHLSNITVGGIPGPAGGVARGFRGCLQGVRVSDTPEGVNSLDPSHGESINVEQGCSLPDPCDSNPCPANSYCSNDWDSYSCSCDPGYYGDNCTNVCDLNPCEHQSVCTRKPSAPHGYTCECPPNYLGPYCETRIDQPCPRGWWGHPTCGPCNCDVSKGFDPDCNKTSGECHCKENHYRPPGSPTCLLCDCYPTGSLSRVCDPEDGQCPCKPGVIGRQCDRCDNPFAEVTTNGCEVNYDSCPRAIEAGIWWPRTRFGLPAAAPCPKGSFGTAVRHCDEHRGWLPPNLFNCTSITFSELKGFAERLQRNESGLDSGRSQQLALLLRNATQHTAGYFGSDVKVAYQLATRLLAHESTQRGFGLSATQDVHFTENLLRVGSALLDTANKRHWELIQQTEGGTAWLLQHYEAYASALAQNMRHTYLSPFTIVTPNIVISVVRLDKGNFAGAKLPRYEALRGEQPPDLETTVILPESVFRETPPVVRPAGPGEAQEPEELARRQRRHPELSQGEAVASVIIYRTLAGLLPHNYDPDKRSLRVPKRPIINTPVVSISVHDDEELLPRALDKPVTVQFRLLETEERTKPICVFWNHSILVSGTGGWSARGCEVVFRNESHVSCQCNHMTSFAVLMDVSRRENGEILPLKTLTYVALGVTLAALLLTFFFLTLLRILRSNQHGIRRNLTAALGLAQLVFLLGINQADLPFACTVIAILLHFLYLCTFSWALLEALHLYRALTEVRDVNTGPMRFYYMLGWGVPAFITGLAVGLDPEGYGNPDFCWLSIYDTLIWSFAGPVAFAVSMSVFLYILAARASCAAQRQGFEKKGPVSGLQPSFAVLLLLSATWLLALLSVNSDTLLFHYLFATCNCIQGPFIFLSYVVLSKEVRKALKLACSRKPSPDPALTTKSTLTSSYNCPSPYADGRLYQPYGDSAGSLHSTSRSGKSQPSYIPFLLREESALNPGQGPPGLGDPGSLFLEGQDQQHDPDTDSDSDLSLEDDQSGSYASTHSSDSEEEEEEEEEEAAFPGEQGWDSLLGPGAERLPLHSTPKDGGPGPGKAPWPGDFGTTAKESSGNGAPEERLRENGDALSREGSLGPLPGSSAQPHKGILKKKCLPTISEKSSLLRLPLEQCTGSSRGSSASEGSRGGPPPRPPPRQSLQEQLNGVMPIAMSIKAGTVDEDSSGSEFLFFNFLH

SEQ ID NO: 933 - DNA, 12374 bp, Homo sapiens
  source
  (1)..(12374)
  CDS (201)..(705)
  CDS (849)..(918)
  CDS (1346)..(1412)
  CDS (1574)..(1659)
  CDS (1958)..(2080)
  CDS (4096)..(4489)
  CDS (4627)..(4722)
  CDS (5085)..(5124)
  CDS (5727)..(6439)
  CDS (12085)..(12174)
  modified_base (7154)..(7154): a, t, c, g, unknown or other
  modified_base (7165)..(7264): a, t, c, g, unknown or other
agtgaggaacttctgtgaacatcagtaaatgtgtgtgtgagctgagcgctgggtgtgtgttgggcaggtggcattgggcctccttgtgtctgtgagcgtgtggaagcctgagtgaggcctccttttgccacctacctgtggacgacctgtgcagactcttccctatgcccccttggccttctctgcacagtgccagcaccatgcatgccaggcacagggcctgcccagctgtgacgtggcaggtgctcatgtctgtccccctccctgccagccccgtctgtgcgtgggcagcctgcccacccgcctccctggatgccgagtgctgtgtgtgtgtcaccaggcccgtgtcgtgctgtgtgtgggtgcaggaaggcgggggtgcctggcagggctctgtggggggcggggctcaggtgggcggctgtggcagcgcccagcagcgggcgtgggaagcccggcgcctcctgccctggcggctgctcagggccactccctcccattccctctccctgcagggcgtgtgcaccatgacggctgccttcctgcacttcttctttctctcctccttttgctgggtgcttaccgaggcctggcagtcctacctggctgtcattgggcggatgcgcacccgcctcgttcgcaagcgcttcctctgcctgggctggggtgagcagggccagtgctggactctgctgctgggccttggtgggcaggggcagcaagagaggttcagctttggccctggcccagctctctgggcacaggggtcagctgggatgggagtctgggagaacaaggggtccctgaagaccagcaaccatctcactctggcacccctgctcccccaggtctgcctgccctggtggtggccgtgtctgttggctttacccgaacgaaaggatacggtacatccagctagtacgtgggcctcccgtggtgggtggtagcgggtagtggatctgttagggaatcggactgggcagctggctgaaatcctagcccatgcctgttttgggtctttgggcaagttcctccccatttctgagcttcagtttccctgactgagggaatgtgctaggactgggtaatccctaagggactgtttagctcaggagtcagccttgcttcatccccatgggagcactgggggatgagcctaatgttctggacctttgttggaggggaaaccgaggctcagcaggagccagtggctcactctcaccgtctggggctcagactgcactggtgatgcgggcatggcagcctgggaggactgagggatggtgtttgagggtggggagggaggctgctgggtgtctgacacccttcttctcccccaccccagctgctggctctccctggagggcggcctgctctacgcctttgtgggccctgcagccgtcattgtcctggtatgtgcccgttcagcatcttggaaggggcatggccccagagggtcatcctgtttctccctctacctcctccctgcgctccagctcccacatggggatttccctgccaggagggcacctggtgatcctgtctcccccactccactctactgggcccccaggtgaacatgctcatcggaatcatcgtcttcaacaagctcatggcacgtgatggcatctccgacaaatccaagaagcagagggccgggtaaggggggggcctctgagacttggcctttctggaaatggtgcagggagggagggacatgggtgctcttggagactcagggctcgatgatgcgaccggggctccccaaccttggtgcatcaaggttgcaggcaaggtgggcacccggagtgctcagccgcagcccctcacccaccctaacccagctctctctctctcgtctgccctcccctcccaccccactcggggctcattctgccccatctcccggcttcccatgtgtttcccctccttctcccatgtctgtgccgcccccgaggtcggagcggtgcccctgggccagcctgctcctcccctgctcagcgtgtggagcggtccccagccccctgctcagctcagcctcggccaggaacgccatgttagtcgtgccccctggggggcggtgggggtgggtggggcaaaggaattggggggggcagtgcccatggtggggggaggaggagggatatcagcccagtgccctggaaagcttgccctttcctgccagccaccacacactctcaagggctcggcaagaggtggccaaggcgatgaggagtggatgtctgtgcctcccacaggtgcccggttccttcgcccacccttggatcccgcccctgccctcactcccagctaatgttctatcctgcaccgccccacacccccaacctacagaggctcagacaatcttaagccttagaatttttgagctatagaaccttagaattagaatgatagaatcttagaataagacaatcagaagctaagaatgttagaatgagtgaatcatccagtcttatcatctgtcatagaatctgagacttagcatttcagaggcattgaatctcacactcaattggagacagagaatcacagaggtagagaattatttcactgagacccccgccctagcatctgagaatcttaaaatcccagctatgcaagggtaaaacaaatccacaaagaccttaggctcaacctcccacccaggtctggaaatccacccaagcctccatgcccagtgaggtccagctttatcttgcacacctgcagggtcagggagctcagggcctctggaggcagctggcaccgtcaccacgaagctccctctgtcttgggctgccgtctgcctccctcaccccgtctgcactagctgtttcaatgcttgggctttggagtcggtcaagctgtgtttgtatcccaactgtgcctctccctgcccagctgggctcactccagtttcctcatctgtaaattgggataataatcccatgcctgttaattggagttgttttgatcatgatttgaagtaatatatgtaaagtgttcagtgtagggcctggtagagaattggtggttaatcagcgtagctcttattactgtgattagaccctctcttagtcttggctacacctccggggacttcagagtccattgtgcctgccccctgccaggctgaacagccctgaactgcacttcctagggcaggtcttggccccctgcccatctctctgctttggcctcccccggctgtctctgcggaatggtgccaccctctgccatgcctagagctgtgcctgactctcccactgggggtgtttgcgaaggagagtgggctgagtgtggcacctggcccgggagggtatggtggcctggctgtccctcatgtgctatagcaggttagggaggggtgggaatggcttggatgccaggccccatctgctttttttctgccctcccctggcagggaggccagggaggtgtaggcctggcccgaccccagcttttagccccagctctgagccttctgcccaaggctctgagcagtccgtgggagcctggcgtcttctctgtgtgtggggggagttctgcttcactggtcctggccccctgtcttctccctgaggattcgtgctctggatgtcccccgcgtgctctgcctgtttaatctttctgtctgggtgtctctgtcgcatgcgttctctcactgtggttgttgttgctttgtccctcttccagtccccctccccagcctacccagttaggctctggggatgccgtcccggccccgtgcatttttaaaaagctcctcaggtgattctgtgcatctgtctgcctcctcttctctctccccgtccctttccactgtctgtggctcggtcccactgtgtctgcgtgtccttccccaccttcctggtccctgctctgaccccgtagttcgctgctttcggtctctgttctgtttctctggctctggctcctcagcccctctctgcttggggacattactgaggccctggggtttggggccctcccagtcttgggcagctgaagagctccagctgagtggaggcctaggctcaagccatcctgtcccccggagtgtcactctgatgggctctgccactgtcccctcagggcctcactctggagctcctgcgtggtgctgcccctgctggcgctcacctggatgtctgccgtcctggctatgacagaccgccgttccgtcctcttccaggccctctttgctgtcttcaactccgcgcagggctttgtcatcactgctgtgcactgcttcctgcgccgagaggtggggctgggcctctcccgcctgtgtgtgcccaccacacctgccaggcccttggcttctcctcactgtgcagaccgggaggatcgaggccccgaccagggtgccccaggccccatctgggcagcccttactgtggaagctgatagcccggggtacccgcaactgtcccttatgcttatccttggcctcctgggtctcctcctcccgttgcaccctgcccaggtgtcatcaccttccccaaggttggatgtgttgccttccttctacacttgcctgggcatctggggtgggaagcacagccatctgtggtcgggggccctgcagtggcctcaggcccagcaggcgccctctgtccccaggtccaggatgtggtgaagtgccagatgggggtgtgccgggctgatgagagcgaagactcccctgactcgtgtaagaacgggcagctgcagatcctggtgagttaggggcctgggcagggcctgggcagattctgggcaccccccaccccaatcctcctgccctagaccatttaccttccccatccatggcagggttgggacagggattgggtttgattcaggctcagccactaacacctgggtggcattgggcaagtccttcccccactcagttttcctagccatcaggtgggctggggtaggccatgcctgggctctgctgggccatgggctatgggccatgggcagccctaaggcaggcagactgggcaaagctggctggggagggcctgagcctcctcccaccctgatacattaatcctccctctgcccacctgcccctccctttctgcctatagtcagactttgaaaaggatgtggatctggcttgtcaaacaggtgagtgtgccgtggcagaactgagaatggtcctggggttggagaagaaggggaggccttgagccccatcatgggaggccctgatggagttctggctgctggagtccagcttcgaagttagacagccctgagctggacgcaaggctgcgaatgtcccttactgtatgaccctgggcaaacaacctgcctctctaagcctcagttaacacacctgtaaaggagagaatactgtcctcccagggcaggtggggggcttaggggcatgcatgaattcggggacatcgagttcttagcaggacccatggcacagagtgttacgttattatatcatttccagattcttaccagaatctttccatttctgtctcctggggagctgatgcacagggaggtgggaagacaaagccctttgacagccgtggggctgtggggtcaaagtcgggacctgcaccaggacactgggagctgggccttgcctttgtttcttgccctgtctcaatgtggggactttggagccgttgtcttcttaacccctcttatatgtgagagattaccaaccacccagccatctctccaggacccagtttcctttcctgtccaagcgcagaagcttggtacctccccagcctgggcaatggcatctggaggttccttctcctcaggactcaccccctccctcccactcctgcccccagtgctgttcaaggaggtcaacacttgcaacccgtccaccatcacgggcacactatcccgcctgtccctggatgaggatgaggagcccaagtcctgcctcgtgggccctgagggcagcctcagcttctcaccactgcctgggaatatcctggtgcccatggcagcctcaccagggctgggggagcctccgcccccacaggaggccaaccctgtttacatgtgtggggagggtggcctgcggcagctggacctcacatggctgcggcccactgagccaggctctgagggagactacatggtgctgccccggcggactttgagcctgcagcctggcggtgggggtggaggtggtgaggatgcccccagggcccggccggaggggaccccccggcgagctgccaagacagtggcccacactgaaggctaccccagcttcctgtccgtggaccactcgggcctggggctgggccctgcctatggatctctccagaatccctatggaatgaccttccaaccgccaccgccgacacccagcgcccgccaagtgcccgagccaggggagcgcagccggaccatgcctcgcaccgtgcccggctctaccatgaagatgggctccctggaggtgaggggctgtagggaatggggtgtgtgtctgagactgtgtcaatcacaggctgcagccaggaggggacagcctcatcctccccagagcggcctctcgtaaaagtcactgggagtggatacactgagcatttctctgtttctgctcatggcagctccgtggtgtctgtgaatccttcagacaggctgggacttcacacagtagaattgtacttctcgactcgttcacacttgctttagggcctactttggggtgactggttaggatgagtcctcatttcaggagactgtggctcaggcaatgtgtgagcctgggcctctgcgtcatgcaggtctgagttccagtctggactctgattggcagtgagatcagtgagccttcattttctcgtgtgtaaagtggggataccgtagcagtctctttgtggagtcgttttgaggattgagtgatgtaaaacatttatgtggagcaagtagaaagtgctagataattggggattgctgctgttagcacccctgaaatcagctgcagatgctgcccacaggcctgtggtaactgaccctctcttccggagaaaagcaaacccctccgggtccctgcctgtgtgtgttctgtgaatccttcaccttcacgctggcctcctcaggtctgctccctgcagaggatcactgagaacagacagtagtggcctgctgggaatcaatagggagatctnaccgcaaagcnnnnnnnnnnnnnnnnnnnnnnnnnnnnnnnnnnnnnnnnnnnnnnnnnnnnnnnnnnnnnnnnnnnnnnnnnnnnnnnnnnnnnnnnnnnnnnnnnnnnctaatcagttcatccatttttcccccagtgctagatggcagggcttgcccaaccatcccctcaatgacatggtcttggcttctgcactctggataacgaggaggaccaagggtgccgttgtggcccaggcctaattgacagcaagcagccctacaggtaggaagaaggcagtagcactgtcagcaggttttgggagctgctcattgtgagaactctgggaaataaccctccttggaccatcaagcttgctcctgcccatccctgaccctctaaaaacagtaccaagtgaccaaggtccaagaggtctctcagaggaggtatctaaggctcagagaggttacttaacttgtccaaggtcactcagcaagttggagatggagttgcagttgggacccaagcctggcccctgaagcagactggaggcattccctccctgggtgagccgggctggggaagaatgctgaggggcccctatctggatccacagaactgatgagaacaaactggaagttggacccagccaagcctttaaatggggtctgcccttaccccagcccctctttcgctacccagctgagccctaaacctctaagctcaatgctccctcagcctcctctctgggtcctagagatggaccacatctcaggtcccccatgtgacttccacagcatcacacagacacagaactgggcacccaggaaggatccagaagccgagtctcaaatttgctctcacttctctcccagtggcctatgtcacaggtgctagccctccttcactcagtcaacccccaaccacacctgctctatgtatggccccagaagggaattagactcaatgtgggggcctgggagaaaagttgacctcccctccccacttcactgacctccccagggatggcacttaggaaactcagacaaagcagctcagtgattctcaggggattggaagctgggtggttgaggggagcacctccacatgcaggccagttttcccaggccaagtccaggctgagctctgcctctactaggctgcaccccaccccacccccagtgagtgggaagtgacaaatgagcctgaggaaggaggagggagctggcgatcgatggcattaacatggtgcccaaattaaatattgactttcttggttgactctagggacacttggattgatggctgaggctttgccatgccaccacaggggataggcacataacagcctggagcaggtccatagggaagctgaggcctggagaggaggggctcacctttgcttccacctgctcaggaggagtagaagtgagggcttcagggagcccggagcaccgtgcctgcttctccaccttccccatggagtccagagtcccatccgtcccgaaggtcttggagtccaggccttgttgagtgtccccccaaccccattcccacctccaggaactgtggctaacctgaagtgcaacaaatgagcagaatcaatctctgtgatgataaccattactgggtctcaggacccggcctcccaaggcggtagggctggttatttctgatcattatgtaggatcttggagaggaggtagggacagcctctctgttcatggaaatctcccatcatcctctccagctaactcaccttcagagactacagtaagccctgagctttctctccctcttttctcttttttttcacctgtcctgaacaaagggagtctccctcttttcaaagctccactttaagaactgtctctagtcccttgatttattcacctcccaccctactctacaacccacctcagtgctggttcctcccatagtaatgactccagcccagcccctcattctgagttccagccctgtgtgttcaactacctactttccacttgacatctccccttgaccatctcaaagttgacatgcctgctatggtttgaatgtgtcccccaaaaagcatgtgttggaaacttaatccccagtgcaacagtgttgggagatggggtcaatggggggtgtgtgtttagatcatgagggcaccgccctcatgaatggattaacactgattataaaagagcttgagtctttgaattcaatctcttgctctctctctcacccttctgccttctgccataagatgatgcagcaaaaaagaccttgccagatgacagccccacaaccttggacttcccagcctccagaactgcaatgaatgaatctctgttctttataaatgacccagtctcaggtattgttatagcagcacaaaatggactaagacaatgcccaaggccaaattaatgactgtctcccccaaagctggtcctcttcctgtacctctatgccaatgacacggtcatccatccaggtgtgtaagacagaagcccaggtgtcatccttggctcctctctgatacccaatccacaccaggagctgagtgctgacaattctacccactacatatatagaaactccattcctcctccatagcaccctctaaagtctccttcatgcagatcatctccttgctggtctctctctccaccctcactcttcagtgtccctgcccccaccaatccattttccatccactcaagagaaatcgtgttgatatagaaatctgatcatgccagtactctgctcaacactcttccttagcttcccactctccttaaaggccaaaaccctcagtggagtctcctctgccttagacacttagcatgtgttttgagggcctgagagggtggaagtcttcccagagtcagtggccttggaggagtggagggaggaatatgatgggtactggggactggattagaaaagccccaactgggggaccccatgaggtgccagggtgggcatgaagaagcctgaagggaaatgagtcctgagaagcagaagtcagcagcatcccgcacccaggtcctccctcaggccacctaatttccttttaattggtgcctaatggaagtgatttaagcccaattaagttttaacgtgtctgttccagtctagcctcaacttgcttcccttctcccagagtctagggctgcaggggtaagggtaagggtgagggtaagggtgaccccttcccctagtgctgctgagggaggcctgataccagtccacaggtctcctcaggaccttcccctacttccccaacacctcctccctacccaccagtatccccaggatatgtggagcccaggaaccctggctttggacctcccttgtgcgggcactgtgctggcaactttccctccatcacctcctcaagccctctccatggccccatgaggcaggctgtgcggaagtacctccttttcacagagggcactgagttcacttgctcaaggtcactgcctttgttctgcctagagctgtgctgtccgacatggtagcctcacgggagtactgagcagtcagaaggtggtgagactgacttgagatgcactgtagcactgtatgtataaaacacacacgagatttccaagactccgtataaaaaaagaatgttaaatatctcagtcattttttatattgattatatgttgaaatgatcgttttttaatatattgaatgagatatattattaaaatgaatttcaccttttcaaacttttaaagaatggttactagaaaattctaaattacatatgtcgtttacattgtatttttattagacatctcccagggtctgttctcatgaaggtagggatggtctgctcatccttgaccctgccagtctggaaagcaagaaaaggctgcagctgagcttgtgcgggcgggcctctcagtcttgtctcctcatcctttgggtgaagacaagtccctttcagcaccctggacagcagccagggctggcttcccacttggggttgaggaaggaataactgtgggaggagtagattaacacctataaaatgcttcccatgaatcatcttaagtcatgctccggatatccagtgaggaagactgggtaggagttgtcattatcccaattttgcagatgaggaaatcaatgttcagggagatttgtgtattccacccttcacccgctaaagattcactgatgcctgcttcatgtgggcctctgagtgcacaaaccacagcaaggccaacacagatgacagcagttctgtgtgatcagtgcagtagtgacagtgcatgccaaggcctgtgggggtccagcgagtgctgactgctgggccagggagttcagggacagcatcacacagggggctacttgggctgggtctggaaggctgaaggagagtttcccctctgtgaggaggagggagtttcaggcagaaggagtggtgcatgcacaggcatggaggtcagagagatgggccagaggagggaggcaagggccacatcaccaagggccttgaactctaggctaattccaggatccacagaaggcatctgagcagtggcctggccagatctgcattttggaaagatcacttgggccatgtggatgaagggctggagactggaggcagagaaaatgagggcaatgatgtgagaaatttgagtccaggaaagaaatgacaggttgttagatattagctcaaatggaagggagatcgagccaactcattttacagatagggaaacccatgtcagacagggtccagtggcctgtccaaggtcacgcagcaagtcagtgcctgggggagcagggactgagggcaagggagggacaaagcccccaccccaggaaagctaagtggctggtctcaaagccagcagaggcctctgcaggtagctgtggtttgtgtttgagcagaatcaacaaggtaaatactaaacttcctcttcaaccagatgcaaagcaagaatggacaggagggcagggacgtgcacatcacacctcagccccagagggccccagaggtggtgaccagcggagcctaagaccaggaaggagggaggtgcgagcacaggacaaggcattaagagggcctttaggtgatggtcagaggaaggaatgtggagtaggatctgctggtacatggtcgggctttgtttgtgcaaacccccttttaggaacaggcccccctttctcagagacctgctccctctcctccctctccctctcccccatggttcctgat

SEQ ID NO: 934 - protein, 727 aa, Homo sapiens
MHARHRACPAVTWQVLMSVPLPASPVCAWAACPPASLDAECCVCVTRPVSCCVWVQEGGGAWQGSVGGGAQVGGCGSAQQRAWEARRLLPWRLLRATPSHSLSLQGVCTMTAAFLHFFFLSSFCWVLTEAWQSYLAVIGRMRTRLVRKRFLCLGWGEQGQCWTLLLGLGLPALVVAVSVGFTRTKGYGTSSYCWLSLEGGLLYAFVGPAAVIVLVNMLIGIIVFNKLMARDGISDKSKKQRAGSERCPWASLLLPCSACGAVPSPLLSSASARNAMLVVPPGGRASLWSSCVVLPLLALTWMSAVLAMTDRRSVLFQALFAVFNSAQGFVITAVHCFLRREVGLGLSRLCVPTTPARPLASPHCADREDRGPDQGAPGPIWAALTVEADSPGYPQLSLMLILGLLGLLLPLHPAQVQDVVKCQMGVCRADESEDSPDSCKNGQLQILSDFEKDVDLACQTAQKLGTSPAWAMASGGSFSSGLTPSLPLLPPVLFKEVNTCNPSTITGTLSRLSLDEDEEPKSCLVGPEGSLSFSPLPGNILVPMAASPGLGEPPPPQEANPVYMCGEGGLRQLDLTWLRPTEPGSEGDYMVLPRRTLSLQPGGGGGGGEDAPRARPEGTPRRAAKTVAHTEGYPSFLSVDHSGLGLGPAYGSLQNPYGMTFQPPPPTPSARQVPEPGERSRTMPRTVPGSTMKMGSLEMQSKNGQEGRDVHITPQPQRAPEVVTSGA

SEQ ID NO: 935 - DNA, 18512 bp, Homo sapiens
  source
  (1)..(18512)
  CDS (201)..(303)
  CDS (1275)..(1390)
  CDS (2698)..(2801)
  CDS (3065)..(3167)
  CDS (3496)..(3649)
  CDS (4199)..(4332)
  CDS (4409)..(4524)
  CDS (5384)..(5591)
  CDS (6730)..(6967)
  CDS (10261)..(10410)
  CDS (12717)..(13346)
  CDS (17340)..(17959)
  CDS (18034)..(18312)
gctgcttagcttgttcccagtttttccaccttccacaccatgctggaatgacagcctgcactctcctccctctgcctcccctctgccccttcacctgtgacgcatggtgggcaatcccctggtccctaaaatgcagagtccttggcgtccctccatcctcctggtctctctcctttcccatccacactcacaactgccccatgcccctcaatccacgctcatgcacctgccctgtctctgtctcctgcctccagaccttccgtcataagctggtggagcctgtctgtgctttctggaactacagtatcagatgagtttccatttccaggttcttttttttttttttgagatggagtcttgctctgttgcctaggctggagttcaatagcacaatcttggctcaatacaacctccatctcccgggttcaagcaattctcctgtctcagcctcccgagtagctgagattacaggcgcccgccatcacgcccaactaatttttgtatttttagtagagacagggttttgccatgatggccaggctggtctcgaactcctgacctcaggtgatccacccacctcagcctcccaaagtgctaggattacaggtgtgaaccaccaaacccagccgttaagatgatttttttaaaaatatgtccactctgcttggggatgaggcaagacttacacatggttttgacctctgttcaccatctgcctttcagggtgactccaggctcctcccagctctaagacaagctgcagcgggaggatgtgttacccagggggtagtgagctccttgtcataggagtatgtgaaggaggaagcactcactctgtgaggtgcctaggaagagaatcatctgtcaaattggcgttgaacttgatctatctgaggccggggcccttggactcttgaaggagcagagcaggctccagggattatcctggctccctgccctggatctttagctgaggtagggaaccttggtcccagtggctcagtaattaattaagttgataaatgacagtcactgggatcagccctgccctcctaccatcctaagaatgtcaagcacattttacaggtgaaaaactgagacccaggaaggggcggtgactcgccaaggtcacctagctggttagaggcagggcagtgacaggccccaggctctggggaaagcctttcccctgcttgcttctggcccctcacccccttgtccaccttatctcaagagccccctgttccctccccatcccccaagcccatatacagggggtgcctgggccaccacaggctgctccgtggctgccctgtacctggactccaccgcctgcttctgcaaccacagcaccagctttgccatcctgctgcaaatctatgaagtacaggtgagtgcacggtgggaggggggtgtcaggagggggcttcttagctggaggtgaagagaagagccaataggtagccagaagaagcatctgagggatgccagctttcatagattgtcggggacagggctgcatgcagtagttcatgcctgttgtcccagcactttgggcggctgatcacttgagcccaggagttcaagaccagcctgggcaacatggcaaaaccccgtctctaccaaaaatgcaaaaattagccaggtgtggtggctcgtgcctatagtcccaactattcaggaggctgaggcaggaggattgcttgagcccaggaagtcgaggctgcagtgagccaaggtcacaccactgcactccagcctgggtgacagagcaaaaacctgtctaaaaataaatgagtaaataataaattgtaaaaaaaattgttgggggaaaactctaagaggatgtcaggaggggtcggattcactggagctggaaagggccccggagtggttacttgctgagaagtcaggtgagatgggacgtgagcctcaggaacgctggggtcactacaaggaacaccttgtagtgttgaggggcacactacaaaaacatgttaccaaatgcatttttcctgtagagtcagggccaggcacggtggctcccacctgtaatccgaccactttgggaggccaaggcaggcggatcatttgaggtcaggacttggagaccatcctggccaacatggtgaaaccccatctctactaaaaatacaaacattagccgggcatggtggcccgtgcctgtggtcccagctactcgggaggctgaggcacaagaatcacttgaacccaggaggcggaggttgcagtgagctgtgagctgagattgcgccacttgctctccagcctgggtgacagactgtcttgaagcaacaaaaaaaaaaaaaaaaaaaaaaaagtcagagcgtggacacttttccacatcatgagtatcatccgcagccccattctgatgatactccatggtccccgggatccctccccgtgggcacgtttgtcagcactcttagtaattgtccagttggtagaatccgggccagttggggtcagtctagggagagccagcaggagagaaggacatgctcacacctgcttattaaatgcctactgtgtgcaggcctgggtcctgctggctgctgctgcactgtggaggcgaatgcggcgtggggggccttagagtcaccaggtggggcgagttctggcctgggttgggtctgggtggtgccaggggggtttctctgtccctccacacagagaggccctgaggaggagtcgctgctgaggactctgtcatttgtgggctgtggcgtgtccttctgcgccctcaccaccaccttcttgctcttcctggtggccgggtgaggagagttcaccactgtagcctggtggcctgggccctcccgcctcgctcaggcctccatgtccccattggtcgggtgtccatccttggtcccagcagaaccttggtctgagcctctccttaggatgtgctgggtcccctgtggagctgctctctttccctccatctgcccaggcacaggggatcgggcaggacagggccctacggggtgtggggaccagcagtggtgttcttgttaactgactcctctgtcctctccagggtccccaagtcagagcgaaccacagtccacaagaacctcaccttctccctggcctctgccgagggcttcctcatgaccagcgagtgggccaaggccaatgaggtgggcagccagtgggtgggctggaagcccggggaagcctgggaaagtgcctgtgggcttttctagggtgaccccctgcccccaactattttcacatggctccacttccctggggaggagcagggcccggggaggagcagggccccgggaggaaagggccctgggaggaaaggccccgaatggtggagcggggcccaggctgctacccagaggcctcacccactgagacttctttgggttggcaaggccgggctgggcatgggccgcggggctggcctgcacctgcgtctgacctcggacctgggtggggatcctgaccctcccacaggtggcatgtgtggctgtcacagtcgcaatgcacttcctctttctggtggcattctcctggatgctggtggaggggctgctgctgtggaggaaggtggtagctgtgagcatgcacccgggcccaggcatgcggctctaccacgccacaggctggggtgaggcctgctctgcacccacactctcttctcctcagctgtaccttgcacggccgaccctgccatctaacatggccccacacccagcactcagcacccagcaccactcagcatccggcatttagcgtcacccagaacccagcaccacccagccagtcccatctctgacatgacctcaatttcctcagttctattaacctccaatttacccatccccattcctcataatccttctccactttacagcctcccctctccatccgcagtgctatctccccaaatctgtagccagccagttgcccagcctccgtctccagagacgcccagctgtagcctccaaagcagcctcagctctcccgactcccaaactactgtggctccaatgccaccccaacagcatcagagcccccagccctgctccttggacctccccagtgcccccagtacaacctccagtaggggacagctgcggcttggggggcggatcctgggtcctggagaggaaaaagcaggtgacccagccttgaggcccccttctccctctcccaggcgtgcctgtgggcatcgtggcggtcaccctggccatgctcccccatgactacgtggcccccggacattgctggctcaatgtgcacacaaatgccatctgggccttcgtggggcctgtgctcttcgtgctgactgtgagctggggacctgcaggggaggggcgtgttggggatggggaagtcctcttgcccactgaccccaggtctccaggccaacacctgcatcctggcccgtgtggtaatgatcaccgtgtccagtgcccgccgccgtgcccgcatgttgagcccacagccctgcctgcagcagcagatctggacccagatatggtgaggccccagaatggggggccagcaggaagcaggaagtgcacagtcagccggcgccaggcgtgaggctcactgggcgagagcacgtgcgagtctgtgtccagagcgtgaccgtgtggctatgcccaagtctgtattgagtatgtgggtacacacgtgtccctgcatctgtgtcacacatgcttgggcatgtcaacatgtgtcaacatgcacccatgcgtgtcacatgtggggatggtcactgatccgtttgagggagctgtggacactggccactgttcaaggagtgcactgtctgcggcaggtactgatagcctgcaggagacaaagtaggggagaccctcaaatcagggttagccccagaagttcagggttagctccagaagttcaggttcagggtaaggacctgggtccctgttcctgccaaagacccgcatcgccctctggggtcacactctgggagagagagggaccccaccggcctttcccagccctgcctccttgctggctttccccttccccacccatcctccaccaagcacaggccagcctaagctgggagggggtccctgaaaagccagggaaccccagggcccttggagagggagaagggagtccttctaaccccatccctgctggtcccactgctcaggcctcagcccccactctggacaactaccaccccattccttccagccaggttgggggctgggaccccatctcccaagtgccgctaccctacttcatgccacctctgtctctgagaacagggggggcaacaaagtccagtcaaaggttctggctccctctaagtcctgctgagccatggtcccggccctcagctcccaccccgctccaggcacgtacaggtgctgctctccctggagccctgcggggagctccccaggcctcccaacccccgtcagccctgcctgccctcctacagggccacggtgaagcccgtgctggtcctgctgcccgtcctaggcctgacctggctggcaggcatcctggtgcacctgagccccgcctgggcctacgctgccgtgggcctcaactccatccaggtacctccagccccaaccttctgggactaggccctgacatgcacgaaagctcagaggggacgactagggtgtcagggcctgggagggtgagctctccatcatgggagacattcaacagcaactgggacatcctatctaagaaggggttttgagggtggcagtgggaacaggcaacctccaatcaaccagcggttcgtgcaggaggctcacggggcccctctgccagctgggaaggctgagacccagaaagagggtgttaaggctcactgtgcttggacactcagggtccggcagaaattccagccccttggccagtgccagagccacttagttcttgccagaaagctggggaggggacacagggcatcagtcacctcccccttggggtctgcggcctgctgggatagcagtttagaagagggtttggtgaggaggccagttcatgaggccacaggaaagggcccgggcttcccgggtctcttggggcctgtgtgctagaaccacagggagagggccaactaggtccctctcgggggattggcaggtctgtggggggccagaacattaactgaagtgacagccagggggctgggtgctgggagtcagggaggcccttcctggcccctcgttttccctcgacctccctggaccaccccccaggcacctctccctgtcacctgcacctcctgctccctgcttgcccagcccgggtccctctcagggccaaaaggtgggtgggcaagggcccaggctggactgtgccaggctcaggaagtcaggtgcgaactccacccagggtccatgtgtcctccaagctggggaccctccatcttttccttgaagaaggagagccaaggtggtaacagccactcacagtgcctgggtgctccctctgagccccaggccaggctcctatttgtatctcccaataagccttgtaagtggggaaactgagacctcatgaggtcacttgcccaaggccccccaggaggcagcagcagcgggggcaccactccagagtctgcgttctcagccacagggcatccagctatgaccacagatgggtcctggctggtccctgggagcatgcttggacccagttactcattcatccatgtgctcttcatggctcgcccagtgtgtgccaggcactgtgctgggtgccaggccgcagcagcagaagaggcagcaaaaagcccctgtatttgtggagctgcccttggtagagcaggcagaccatggccacgatgaagaaatgaagtgttcagtgaggggacgaggcaggaagccctcttccaagccccacgccccccagggcttcatggctgggttcagtctggctgggcccctggcgaggcttctccacctgtcacacggtggggcaggtggtggcatcttgttgccatggcgattcctccagctctttgccaggtgcccctctccacatcatagggggttggattcctgatgctctccatcctcacctgtgcccctcgggtgggcagagacacagccatggggcaatgccaccgtcagccatggggcaatgccaccgtcagccatggggcaatgccaccgtcgcaccgtctcagatccctcccttcagttctcattctttcctctctgtcccaatcttcatctctgaatcttctctggttctgtctctcaggctccccctctgtcactgtccccctctccctgtgcccttctcaccctctggccatggatgttttttctggcactgaccccacctggctcttcctgggcatgtcttcatgtttctccacttctctcctcagtctctctgacactggtttgtttttttgtttgtttgtttgtttgttttttgtttgttttttgtttttgttttgtttttgtttttgttttgttttgttttgttttgttttttggagatggagtctcgctctgtcgcccaggctggagtgcagtggcatgatcttggctcactgtaacctctgactcccaggttcaagcgattctcctgcctcagcctcctgagtagctgggattacaggcacctgccaccacgcctggataattttcttatttttagtggagacgggggtctcaccatgttgcccaggttggtcttgaactcctaacctcaagtgatcctcccgcctcggcctcccaaagtgctgggattacaggcatgagccaccgcacccagccctctgacaccagtctttttatctctgcctctccatctccctgtgcatgacactctcttgtctctgcctaaagcagcctcagattacccttgggacggtcacccggtgaaggcaaggagaggctgccttaggcaggagctcaaaaggcaggagtggggtctgggccccgccgctgacagtcacatgaccctcttaggctcagagccctgttctctcagtcagtccctctccccaggcccggcctttcccttcacctctcctttggtctctccctgtctctctgtgtccaccaaggtctctctgtgttttcccctcacactccacctccatccctgtccctctctcactctccgtcagtcttgggcataagctaggtacatcccacttttaggagggtgaccaagtgaccagggaggaggcctgggactcagggatgagactctgcccaacctcattcactctctaggagtaatttgtgtccttctggccactgtgccgggttgtgtcaagggagagcaaagcctcacttctataaccagccgtagctcacacttgccctggtggacagagccttgttgtgaggcctggagaagtggcaccaggcctccgtttctacgtctaaccaaaggggatcagattcccaccctcctcatgggatcatcgtggagttcagctgacgtaacatttgccaaggctacgcacaatccctggcacgtgctaggagccccacgagtgtgagctcatttgttttgttcagttgttcaacacgcactcccctagcacctccccatgccagggctggcctgcacgctgggggacatggagatgcccagggccaaagaattctgtgacattctcagcctgagggagagacagacatcaaagccacacaaccacagtgtgtcatgactgaggccgagagacaaggggccttggtcaaggcagtgtggggacagaggaacaactcatcggaggcagaatgggccacctggagagggtcactctcagccaagacctgacggctgtatggagaggcggaaaagaatgttttaaaccaggggagggggcatggtggggtcaaatggtggggagacatgaggggtaaggctggcgagaaatggggcaggagggagtgtggggggcagacagagtggggtcctcaaagctgttgtaaagagctcagacttggccaggtgtggtggctcacgcctgtaatcccagcactttgggaggccgaggcgggtggattacctaaggtcaggagttcgagaccagcctgaccaatatggtgaaaccctgtctctactaaatacaaaaaattagctgggtgtggtggcacatgcctgtagtcccagctacttgggaggctgaggaaggagaatcgcttgaacccaggagttggaggttgcagtgagccgaaattgtgccattgcactccagcctgggcaataagagtgaaaactctgtctcaaaaaaaaaaaaaaaaaaaaaagagctcagattttgtcccaggggtagttgggagccatgcagggcgtcaggcaggtgctggtgttcttgggttcgcatttggaaagatgcctttgggtggtaaggagtgggtagaaggaaatgggatggagaaggcagtgcagaggctacagagaaagatcaggctgggcctggagacctgggaggctttggggtctgtcttggagaatgggggtggtggtatcatctcagttggtgcctggacaccagggggaccagtcaggctcttggactccagctttcagccctgggaggctggaaggccccaaggaattccaggcccccacctgtgtcctcccgcctgggccgcagcacagaagcagctgcctgtgacactgcctaggagggatcccaggacagcctcagggctgggccacactggagcttaggatccattcctctgccccccacccacagctcctggtccctctccatcaaatggggagaatgaatccacccccaccacagacctgctgttagggtcaagtgagagaccaaatgtgatggtgcagggagggtggtgaggccctcttggtcccacggtgtggggagagagagccagctcctccccagccacggtgtgagtccctcacaggcagcacctcccatcccctcagaacccaagtcccggcctcatctcccctttccagatgaaaagacagaggctcagggaggtgaaggccactcagctagaggcacagtgagaaggcactcacagggctgttgtcccaggacctgacttggccttggagcctcaggaaggtgtgcccctcccaaccccaccacatagcatggcgaggcggtgaggatgggacaggcccagcgtggggcacagaggactggagtcagaggctgcctggtgagcagaagctgaaggctggggttgcactgggcaaagccccttctggtcccctggcctgctaaatgccacagctactcctccgcaggcgggcacgagggcagggccgacttcgtgcccatcagcctgtctctgggtatctctgcaagtgtctctgccactgggaggcgccgggaccccaggcaaggccaggctgtgggggatggggtaggaggctccgggctgaggcactcgctgggtctgtcctcaggggctgtacatcttcctggtttatgctgcctgcaatgaggaggtgagtctgggggtgccggctgcagggagaggggtccaaggggtagggagggtccccagcctgacctccaagtattcccccaggtgcggagcgccctgcagaggatggctgagaagaaggtggccgaggtgctcagggcactgggggtgtgggtgggggcgggaggcccccagagccaggtcccagcccccatatcctctcctttaagtcccgtgccagccctgccagctgggggaccagcctgaggcccccaggcccctgggaggcagcccgagggagccccatagccttggctccaccccggagacacgtggctctcagaggtactcgcagcacccaggtgggagtgccgcccagtgcctcagtttccccagcactcaggcagagctgggaggacaaaagcagatccttttagcccatctgaaaaaaggaaaccagggcccaggaaactctgcagccctgcggcttgagcaatgtcctgtcactcattccccactgccaggaaacccgggcttctggggcctggcccacgcatggggcttctccagggtgaccttccctggggttccatgcagaagggtttgggggactcctgcagatggtgagtaaatggggtcggggctctgaggcagggcatgggttgaatgacttcgaggtcaggccaggggttccaatcctagctcccagccacctcctgtgtgcccctgggcaagttcccttccctctctgggcctcattactaatctgtgaggtaaaccttggagtggattcttagcgtatttgatcctgagggccccactcccaggatgggggagcagagagagggcttcctgccttcgtctctcaaaaatttgccttttcctccctagggacctatggccctagaactccctcagcattctcctccattgcaaacccggagagacaggtgaggctgggacagggtgggccgcacagggctctgccagggggctggcaaagccagcaggcaaagtcgggaagccacagggcctgggtagggccggggtgggggcttcccggggatctgtttctctgttcttgggctgaagggcccagggagggggagctgctggcggcaagctggcagaggcccctatagccaagggtccccagggcaaggggcagcagaaggagtgggggccacccccgtgacagcccctctgtcctcaggctgtggaactgacagcgttcaaagcttcaggtacagtccccacctcacggggtcccctcttttctttttgggcctggacaccccctaagccccccgtaccaggatggaagtgatttcaaattaatacgcccaacctcccgcaattgcagaggccctcccctcactccacaggtcccctgggagcactgggggcctggcggggaccaggcagtaccccttgggaggacttcattagagagtaggtcatggaaccctattctgagcgggcgctgccaagagcacaacctgcctccctctgtcctcccctctctctgcccaggggggcgctgccaaggagcacagcctgcctttctctgtcctccccctctttctgccccctaagcccagcaccccccgtcaccctctgaaggccccggcctgatgccctaggatccagagccttccaaacccgctgagggagaagtgctttcctccaaggctgcgggtcaccagctggacagctgatgggggcatgacgggggctgagcagtggcagggtgggtactgtgggagggtgaggacaccccagctccggctcagggagaggactgaagcctggggagctcagccgggcccaggggagccatgcggaccctgaccgctggccgcctccctgagggagcactccatctgaaacccacacgcctcagcctccgccaggtgactgtttccagcgaaggcaagagcgctgttcaccaggcccctcccaggggcaggttcagtgctcagcccaggcacccagtgattctgattcagagagggggagggggaggtgcctttctccacccattgcgcggatgaggaagttgaggcacagaaaggcgcagccgctagccagagcccgcacagagccagagccaggtccccactggcgcagatgggggactgcaggcacagcagtagccacgcgggtgtaaacgtagagccgcgtgaacccgggttgtgggatcccaggccccgaccagcccccatccccggctggcatctcggtcccggggagtctcagcttccctttctgcagaatgggctggaggcgccccccacaggcccgcccaggcgccccccggggccagcgcccctcccccacctgccccgcccccacccgcgggcgccgcggctgcaggaacaagagagcggcggcgcctctgcgctcaagtgacggcgcctttgtctccgctgaatgggtgcgttgctagggccgctcgtagcaacagagcagcttccacctgggccccaccctccggaccccccacccggcccggctctccggacgcccccgcttccagccccgaccccaccccgcgggccactcagcggcccgagctggaagcgcggggcagcggaggctgccgggctgtgtccttcgcggggccgccaccgcccctcctgaaaggccgcggagccctcagggcatgcggatgttccgaggatggagaagctgagactcacagcgaggacgggccagggtctccccaagcctcagttcccagagcccttccatccccgggttctccaccaggatcctctgccagcccagccccaagggcgcactttcccaccaggtttctagagagtggctgggaaactcgtcgccaaaccctgcccagctcagctctgctgggaccccagaccccagaacggcgcagcgggagtccctgagccccaacagcggccccagctcccgtggcctcagcctctggctttccctaaaggactgtgggcctcagccccctgttcccctagcccaccaggtccccaggctctttcccccagtctttgcctatctgtgatctgctccttcccccatgctccgaagttccaacgggctctgccgtgtctggtaataaataggactgttgggctctcctgtcctctgggagtcgtcctggcctgggcagagggaggggacgccaggccctctgggaggagggaggaaaccagagaagctgccacttggctttgggactccagggcctcagcctcatcatcagggtaggcgcagccagcatttatgagcgcttgctgtatccctggacggtgctgagccctttaccaccttagagtcatggatcctcaccgcagtcctgagccgccatcactcctgctgtgcagaggaggacacaggctcataccactcaggcctggggtctcccaggccctgtagcacagggggcaggggtgacggttggtgtgagtgggggccacccaggcagacagctcacaggtaagttgtgagtctggatacctccaagtcacaccatggaaccaggacctgctgccacagttgtgtggctgtgggcaaggtcgttctgaatcttggtctcttctcagtagaatgggtttcggagcagggaggggagcaaggatgtgagggctctgcaccaggcctggtgccagggtggaccccaaggctggcggcagggaaatgagggcccagactctgggagtgggggcacccaggcagccaacactgtcctgccgatgccagcctggctcacatcttgctggggccaggtgacaggtgacacagcatagccaggacctccaagcagctcccgggaggtggggcagggctgagtgagaagcagccgagacccagtgaggcacgcacagctcccagaggcctccagcttccacgctggaccctgcctgggttgagtccgggacaaaatctgtccagggtgctggccccacccacacaggtacagggcccaggtgcttcttgctgaggatggctgcgtagcctcacgatgccccatccgtcttctgtcgaatgggggacatcatactcacccagcgggtcatgtgaggggtccgcgcagtcctgcacttggttcctggcacggccctcagcaagcactcagagtgtcagctgtggcccgagacagatgttcggggctgtgggggccagagcctgtgccccagaggacgttcaaggccttgaaggcgccaggctggggaggcagtccagagagaagacagcatggctccgtggggccagcagagcccctgccctgtgctgggaacgctgggccaagtgcggcactctatcctcagcggggacaggaggggcgggacgctgaaggggcagcaaggaggcaggcagggcacttggtggccccccgaccacctacatctcagcatcttcaccttcaacaggctcctgtctcctcaaaaacccatcatatgggctgtggggaaggggacaaaggtgggaccaaggggtcctttcccatcccccacctccctccattccatatccctcttgtcccctatacacaccctctctttactctccagccagagtaacttctcctagatccccagacacggtggctgatacccctccatccttctgctcacactgttccctctgcctgaactgtccccagctcctatctagctggtgaactcctgggcatccttcaaaacccaatttggatgacacctctgctaaaaagtattcctgttccccagacccatctctcccaggagcagggtcaatcacttcctcaccttgtctgtctcaggcatatatgcagtatcacatcagactacagtctggtttaagatagtctccgcctacaagactggacattgcccagggcaggaactaaggcatctgcaggtgccaagaagaagagggacacctttttctttgcataaaagccactgccaaactgtgtgcctagggctgcatcacctgagagggaacacgtttttctaatttgcatgaagcatctggaggccgggggtgaccctggagaagaactagtcaagttagtcaaaatggatcaggacgatggagctttgtaccatggctgtgccgcttttagctgtgtgacctttggcaagctgcttgggccctctgtgcctcagtttcctcatctgtaacctacagaagtggcttcaaagagcagtcagtgtgcccagatgaggcgggaagcactaagcagggggcctggagtggaggaagcctcagatggcggcggtgctcactgccgccaccacgtggggctggggaggaacctgtgagggacgtggtggggcagacaggaaagggcagggctctgaggggtctggtctcccaggtctgtggctcatgggcccttggcaagtgccttcccctcctagagtataacccctgcctcacagggctgctgcggggacagtgagatgagggtggcacacagtaggtgccccttaaatggctgctccttctgccccaagatgggggctgagctggcatggccagcatgcaacaggcagagaggctacagcatccccctggcctcccagtgcctcagggtcccagggatgaggtgggtcccaaaccccaacagtgcctggtgtccccccacccggccccgccacccacctgcctcctcagagttttgaagcaaagagggtctgcgtgccacctccatccaagtcagagcgctgccccaacctagaccacccggaatccacccgggccgttctgctttggccccagaacgtacacaggcaaaggtagctggaaactaattgcgaaatttattccagggctgtgggggctggggtgatccttaagggcacttctcgtttcagggctgtgggtctccggccttggcaggggcacatgtttcagggggcggggaggggaggtactgagacagggtggcgggaggcgggaggcaggaggcaggggtgcccagtctcctccaactgggcaggctcagcacaagctgcaacagtaacatgaaagcgggacggacagcaggcaccccgccggggacaggagacagccgaggcctctccctggtgcttcaccctgcagagtgtccttcatgacctaggacagggggtcagggagctgagggccagcttcatgggtttgcagcaagggacccaacgggttggagccacagagaggggatcaacagcgctatccctgatctacaggcccgtgccccctcccaagttcacttgcattcccacccacagagacctgaagcccccaacagggcatcctgctgttcacctagtgggtggagggcgggcaacagcgcttctctggattggggctggggctcagaagtaatgacccagcaccaccccaagggtacttagtaggcgagtgtccggggagaaaccgtcagctgtacttagtggcaatccccaagccccagcttcagtcctcaaatctgtccccttccctccatcacacacacatttcaaggagtgtctagaagcttaaaaacaaaaagcggggagaaaaacctcttgactacaaccttgcagataaataccagcctgggagggccacctctgggtggggctaggatgtcgattgtaccaaacgttctccttgggtgggagagggaatcagtgatgcctggagcaaagttttttcccgatgatgtatcaatgccccctcttgcagaggtcaggtggggtagaagggctagggagaaggtctttttgtcctaaccagtctcctagtgtcctctagggcccaatagcccctctcaatttagcaaactcggttatccttagtttacaaaacagaggctctccctcctggtctctatggggggaacactggagaccctctctcctcccctagttgatacctgctcaacttctccctgtctgtttccaggagaggaggaagggatgacctctgatccaagggacgtcgaggcccaccagggaatcccgaacctcctccccggacctgcaggcttcagactccaggagagagagctgggagcagggagggggcggggcgggtggttaacagccacctccttggggcactccaagcagcaggcaagtgccagtggccactccacctccgccaggccctgcccagcctcacccaccttcccaaacacacagtgtcagaactcaggggcagcggcctctgggacggggctggggctcctcggtgggcatcagaaaatgaaccatgcggagccagcggtgtggctgcggccccgcccaggccccgcccccagtcccgcccccagtcccggccccgcccccggcccaggctcaagtctgcttggcttgcagcatttcgatgagcaggttgttgcggggcatctcgttgcccaggtgcttgtggtacaggtactccttggcctgcatgctcagggcccgcacctccaccaggcacagcagcagctgctggaatttgtccccgcagtgcgggtagtggcacagggtgtagtcaagcagggcggcgttggccttctcctgagcgtctttcaccaggatgtggttattcaggaacttcaaatctgcaaagggaggttctcggtcaccatcgcgtcaccatccatgcccatcagggctgggccaacaccgtcaccagcatcaccaataccaccttccctatgaccatcaaagacatgggcattgctgccaccaaccatgcaacatggtctccccgttggcaccgtgtcgccatcaccattgctgtcaccctggttgacaaacaccaccatcgtcaccaatacccacatgcctgtgtttttcatgaacatggccaccgccaccatcaaccacccaaccacagtcacctgtcaccatcatcactgccatcatcatcaccacagtggtcacaatgaacaagaattatgaagcccatcaccagcctccctcggggaggatccctgggcagttattgaacctctcggtcccccatctgtaaaatgggcgtgacgacagtaccaacttcacaaccttgtcctgagaatttagggagccgctgtgtggaaagtgctctgaagaacagtgtctggcacgtgagaagctcggtgggttgggt

SEQ ID NO: 936 - protein, 984 aa, Homo sapiens [sequence omitted]

SEQ ID NO: 937 - DNA, 1099 bp, Homo sapiens
  source
  (1)..(1099)
  CDS (201)..(899)
ctttctctgggaactaaatttcaattataatttaaaatatcctataacttctttctgtgtccatttaagtcttgctctgaaggtattatcactatgaaaattattgcattgttcactgaaagtacatacaatgtgctaggtatagtaatgtagatgacgtagttttttcattaggatgaacccaactatgtattttattaatgagtttggttgaggcagcacaaaggtcacaaagaaagatttttaactttgtcctcatttataaatttaatcttgttactttttatttccttgtagattccttttgcaataaaaacaacaccaggtgcctctcaaattcttgccaaaacaattctacatgcaaagatttttcaaaagacaatgattgttcttgttcagacacagccaataatttggacaaagactgtgacaacatgaaagacccttgcttctccaatccctgtcaaggaagtgccacttgtgtgaacaccccaggagaaaggagctttctgtgcaaatgtcctcctgggtacagtgggacaatctgtgaaactaccattggttcctgtggcaagaactcctgccaacatggaggtatttgccatcaggaccctatttatcctgtctgcatctgccctgctggatatgctggaagattctgtgagatagatcacgatgagtgtgcttccagcccttgccaaaatggggccgtgtgccaggatggaattgatggttactcctgcttctgtgtcccaggatatcaaggcagacactgcgacttggaagtggatgaatgtgcttcagatccctgcaagaacgaggctacatgcctcaatgaaataggaagatatacttgtatctgtccccacaattattctggtaagtgtgatcatatctgaatcacagatggtgtagttagctctttctaagtggcagaagcagaggtgacattttatttttcacacaatcatttatgaaaatggccaagttcttgacaggaatcaatcactagatagaaactccctaaactgctgaaaatccactgaatgcactgaattctaagtggttgcctgctgtcactgttgctgttttaaatgga

SEQ ID NO: 938 - protein, 232 aa, Homo sapiens [sequence omitted]

SEQ ID NO: 939 - DNA, 913 bp, Homo sapiens
  source
  (1)..(913)
  CDS (201)..(713)
taccaaggatgactatatatatttattttgtttgtttgttttttaagatactgccaaagtattttctggagtgtcggtaccattttacattcctgtcagcggtgtaagagaaatccattttctccacattcttgccagtatctggtattgtcactatttttattttagcaattttaatagacgtgtggtgatacatcatcatgatcttaatttgcatttcccaaatggctagtgataatacacatcttttcatatcatcatttgctgtctatatatcctggtcagtaaaatgtctctttataccttttgcctattttctaattgaattttgtgtgtgtgtgtgtgtgtgtgtgtgtatacatatacatatatatatatatataatttttttttttgagacagaatttcactcttgttgcccaggctggagagcaatggtgcaatctcggctcactgcaacctctgcctcccgggttcaagcgattctcctgcctcagcctcccgaatcgctgggattacaggtgcctgccaccacacccagctacttttttatatttttagtagagacggggtttcactgtgttggccaggctgttctcgaactcctgacctcaggtgatccacccgcctcagcctcccaaagtgctgggatttcaggcgtgagccactgcgcccggcccttgaattgtatattttttattactgggttttgataattttttgtagatcacaggtgcagcttctttgtatggtttgcacatattttctcccaatctgttgcttgtctttccatcctttttgtttgtttgcttgtttttattttggttgtttttttttttttttgagatggattctcactttgtcacccaggctggagtgtagtagcacgatcctggctcactgcaacctccac

SEQ ID NO: 940 - protein, 170 aa, Homo sapiens
MILICISQMASDNTHLFISSFAVYISWSVKCLFIPFAYFLIEFCVCVCVCVCIHIHIYIYIIFFFETEFHSCCPGWRAMVQSRLTATSASRVQAILLPQPPESLGLQVPATTPSYFFIFLVETGFHCVGQAVLELLTSGDPPASASQSAGISGVSHCARPLNCIFFITGF

SEQ ID NO: 941 - DNA, 862 bp, Homo sapiens
  source
  (1)..(862)
  CDS (201)..(662)
ccccagtaggacagagatcctgaggtaggaggggaccccttgccttgctgcttcttttggcaccgctgacccgggcccaggactcctcgctcctcctggaaggcctgggtcgtgtagcccacagaggtggccacgtgggcatctcccccactgctcctcatagaaccggaggcattatcctgccgggcccactcttacccatgaaagaaacttgggaaatgctcccggggaagccggggatctgggcgctcgaccacttcggtgtgaatcttccgtccgctcatccttccttcggagggtcttggggagaggagaaatgctcaaggacgatgcgctttgcagcgtctcaagggaaactagatctcaacggataccagaagtctggagcgtcttcctggaggaaggcggcccgaggcctgcggttgcagggaggcttgcggagcacagcgccctctctcagcctgagctatccagtggcttccagcatcccagctggccgactccacttcctctctcttcctcctactgcgggtcttcttcttctctttggggaccgaatctcgctctgtcgcccaggctggagtgcagtggcgcgatctcggcttactgcaacctccgcctcccgggttgaagcgattctcctgcctcagcctcccgaatagctgggactacaggcgcgtgccaccacgcccggctaattttttgtatttttagttgagacggggtttcaccctgttagccaggatggtctcgatctcctggcctcttgatccgcccgcctcggcctcccaaagtgctgggattacaggcgtgagcctccgcgcccggcctactgcggctcttctatcctggtgttctttga

SEQ ID NO: 942 - protein, 153 aa, Homo sapiens
MKETWEMLPGKPGIWALDHFGVNLPSAHPSFGGSWGEEKCSRTMRFAASQGKLDLNGYQKSGASSWRKAARGLRLQGGLRSTAPSLSLSYPVASSIPAGRLHFLSLPPTAGLLLLFGDRISLCRPGWSAVARSRLTATSASRVEAILLPQPPE

SEQ ID NO: 943 - DNA, 922 bp, Homo sapiens
  source
  (1)..(922)
  CDS (201)..(722)
aaccagtgccaaaacttgcataccacggatgcctggctaatgcctcaggcaacttgctgggtttctgaactaggtttgcgccattggtccaggaagctggggagagatgtggctggctcattaatcctcacagatcagagagatcctgctggagccatacaaagtgcagatgtcttttgtgatctgtaaaacaagtcctcatggggaaggtaacttggatgcctgtgaaggctgggtccacgtcttcagaatctcacaggtgcaggtgggttcctgaagatcaccacctgtgtcagaaaaaaactctatccaaactgcatttttcctctactctcacaccacaacagtcaacacagaagaagacttctgtgaccaaatgtgtgggggtggacaccagctgggtgtcctgcaattcaatttcaacactatctacctggagatggcatcacatcccagggcttgagaactcagtctgcaagactatctcccccaatgctagtcacaagtctgagcctctggaacttctgagtcactggcttcaatttggggttcccatgaccccctctttgggtttgtttttttgtttgtttgctttttgtttttttgtttttgacggagtctcactctgtctcccaggctggagtgcagttgcgggatctcggctcactgcaacctccgcctcccgggttcaagcgattctcctgcctcagcctcctgagtagctgggattacaggtgtgagtcaccatgtccggctaatttttgtatttttagtagagacggggtttcaccatgttggccaggctggtctcgaacacctgacctcaagtaatccacccgccttggcctgccaaagtgctagaattacaggtatgaggcacgatgcccagcctgggtttgattaatatgttggaatggctcac

SEQ ID NO: 944 - protein, 173 aa, Homo sapiens [sequence omitted]

SEQ ID NO: 945 - DNA, 1171 bp, Homo sapiens
  source
  (1)..(1171)
  CDS (201)..(971)
caagctgggcggcagggcattgagcctcgcgtttcaatttctgttcagttctcctgtaatggaaaattgctttgcacaaagctaaagtgttacagttctttccagagcccctcccccgccccacccccccaccggcagccttcggatcagaggacagagcccgcaggaaggtgaaaggagggtggttgtggcttcttactatgtcccttgcttcaggccctggccctgggtggttactcttttcctttggaatggggctggtatcagggtcaaagtgtccaaataattgtctgtgtcaagcccaagaagtaatctgcacagggaagcagttaaccgaatacccccttgacatacccctgaacacccggaggctgttcctgaacgagaacagaatcactagtttgccagcaatgcatctaggactcctcagtgaccttgtttatttggactgtcagaacaaccggattcgagaggtgatggattataccttcatcggggtcttcaaactcatctaccttgacctcagctccaacaacctaacctcgatctccccattcactttctcggtgctcagcaacctggtgcagctgaacattgccaacaaccctcacctgttatcgcttcacaagttcacctttgccaacaccacctctttgaggtacctggacctcagaaataccggcttgcagaccctggacagtgctgccttataccacctcactactctggagaccctgtttctgagtggaaacccctggaagtgcaactgctctttcctggacttcgccatcttcttaatagtgttccatatggacccctcaggtgagggcttgattgggtgtggggaagaggatgtgattgaagtggctccagaaaaggtgaactcaaaagatggtcagaatgggagaaaaagttgggtgaagctgattgaatgcattcttattactctgcagggcccacccttgggttgactggagtagcagtaagaaaaagttctgaaataggaattcaaagagctgagttctggtcccaaactcagcacttaccagttggctacccttgaaaatgtcaccatttctctgagcctcagttttctaatccataaagtggggacaataatattacctaaggcacagagttgcatcaaatatatgatgtgtgtagaaatgat

SEQ ID NO: 946 - protein, 256 aa, Homo sapiens [sequence omitted]

SEQ ID NO: 947 - DNA, 862 bp, Homo sapiens
  source
  (1)..(862)
  CDS (201)..(662)
tatatgtctaactagcaatactgttagcttatccaacagaataattgacaacataagttattataattactaaatttgacaggataactttatatgttgcaaaatgactcacatagtatattttatttaaccagcctaatttcaaggctgtttagttgcttgaaaagaaggtttttatttgttctttgcatgtacttagaatgttgactgtgttttatgagccaacaagtgaaaccgctgaaaatatggatccagagaatcagacaatggtgactgagttttatttctctgattttcctcaatctaagaatggcagcctcttattcttcattcctatgctctttatttatatattcattcttgttggaaatttcatgattttctttgctgtccaaccggacccccatctccataatcctatgtacagttttatcagtgtcttctccttcctggagatttggtacaccaccgtgactatccccaagatgctctccaaccttctcagtgaacagaaaaccatctctttcataggttgcctcctgcagatgtacttcttccactcactcggggtcacagaagccctagtcctcacagtgatggccattgacaggtgtgtagccatctgcaacccccttcgctatgcaatcactatgtccccttgactgtgcatccagctctccactggctcttgcatttttggcttcctcatgttactgccagagattgtgtgcatttccactcttccattctgtggcgccaaccaaattcatcaactcttttgtgactttgaacctgtgctgcagttggcctgcacagatacgtaaataattctggttgaagatgtgatccgtgctatttccat

SEQ ID NO: 948 - protein, 153 aa, Homo sapiens [sequence omitted]

SEQ ID NO: 949 - DNA, 922 bp, Homo sapiens
  source
  (1)..(922)
  CDS (201)..(722)
tggtcattgtacccaaaatgcttaccaacctgctatccgcaattccaactatttctttctctggatgtgtggtccagctctatttatttgtgggcttggcttgtaccaactgttttctcattgctgtgatgggctacgatcgctatgttgccatctgcaacccccttaactacacactcattgtcagctgagccacctgcatgcagctggttctagcctccagcttttgtggcttcctgacttctgtgattgtcaatatcctggtgttcagtgtgctcctctgtgcctccaatcggatcaaccactttttctgtgacatttcccctgtcataaaactgggctgcacagacaccaacctgaaggagatggtcatctttttcctcagcattctggtattgctggttccccttgtgttgatattcatctcctacatcttcatagtttccaccatcctcaagatctcctcagtggaaggacagtgcaaagccttcgccacctgtgcttcccacctcacagtggtcgtcgtccactatggctgtgcttcctttatctacttgaggcccacatccctgtactcttcagataaggaccggctcgtggcagtgacttatactgtgattactccactactcaacccccttgtctatacactgagaaataaagaagtaaagatggctctgagaaaggttctgggtagatgcttaaattccaaaactgtatgagtgggctgataaggcagtaaattacattcatgaaagtttcctaggtagcacttcagatctataaacagattcgtccttttcttaagactccttgacaaaaaaaaaaaaaaaaaagagagagagagagaaaagaaaagaaataaggactttaggtgaccttgattgtttatatcaaaaaatttttttcatgttagcctgta

SEQ ID NO: 950 - protein, 173 aa, Homo sapiens [sequence omitted]

SEQ ID NO: 951 - DNA, 910 bp, Homo sapiens
  source
  (1)..(910)
  CDS (201)..(710)
gactctcagaggatccagaactgcagccactcctcactttgctgtccctgtccctgtccatgtatctggtcacggtgctgaggaacctgctcagcatcctggctgtcagctctgactcccccctccacacccccatgtacttcttcctctccaacctgtgctgggctgacatcggtttcacctaggccacagtccccaagatgattgtggacatgcagtcgcatagcagagtcatctctcatgcggtctgcctgatacagatgtctttattagtcctttttgcatgtatagaaggcatgctcctgactgtgatggcctatgactgctttgtagccatctgttgccctctgcactacccagtcatcgtgaatcctcacctctgtgtcttcttcgttttggtgtcctttctccttagcttgttggattcccagctgcacagttggattgtgttacaattcaccatcatcaagaatgtggaaatctctaattctgtctgtgacccctctcatcttctcaaacttgcttgttctgacagcgtcatcaatagcatattcatatatttcgatagtactatgtttggttttcttcccatttcagggatcctatggtcttactataaaatcgtcccctccattctcaggatttcatcgtcagatgggaagtataaagccttctccacctgtgcctctcacctagcagttgtttgctgattttatggaacaggcattggcatgtacctgacttcagctgtgtcaccaccccccaggaatggtgtggtggcgtcagtgatgtacgctgtggtcacccccatgctgaaccttttcatctacagcctgagaaacagggacatacaaagtgccctgcggaggctacgcagcagaacagtcgaatctcatgatctgttccatcg

SEQ ID NO: 952 - protein, 169 aa, Homo sapiens
MIVDMQSHSRVISHAVCLIQMSLLVLFACIEGMLLTVMAYDCFVAICCPLHYPVIVNPHLCVFFVLVSFLLSLLDSQLHSWIVLQFTIIKNVEISNSVCDPSHLLKLACSDSVINSIFIYFDSTMFGFLPISGILWSYYKIVPSILRISSSDGKYKAFSTCASHLAVVC

SEQ ID NO: 953 - DNA, 1924 bp, Homo sapiens
  source
  (1)..(1924)
  CDS (201)..(1724)
agcagcaaacatgcaacactgaagaaaataatgctcgaaatgttaatgcattttccttaaatcaactgtcccattcctacactagaggaaatgcccctgttgttggtaaaccgacggtgatttattttaatagcttcacaatgtgcatctgtcttttttttaatatcgtaggtttccatttaattacgcagctgaaaggcatgagtgtggtgctggtgctacttcctacactgctgcttgttatgctcacgggtgctcagagagcttgcccaaagaactgcagatgtgatggcaaaattgtgtactgtgagtctcatgctttcgcagatatccctgagaacatttctggagggtcacaaggcttatcattaaggttcaacagcattcagaagctcaaatccaatcagtttgccggccttaaccagcttatatggctttatcttgaccataattacattagctcagtggatgaagatgcatttcaagggatccgtagactgaaagaattaattctaagctccaacaaaattacttatctgcacaataaaacatttcacccagttcccaatctccgcaatctggacctctcctacaataagcttcagacattgcaatctgaacaatttaaaggccttcggaaactcatcattttgcacttgagatctaactcactaaagactgtgcccataagagtttttcaagactgtcggaatcttgattttttggatttgggttacaatcgtcttcgaagcttgtcccgaaatgcatttgctggcctcttgaagttaaaggagctccacctggagcacaaccagttttccaagatcaactttgctcattttccacgtctcttcaacctccgctcaatttacttacaatggaacaggattcgctccattagccaaggtttgacatggacttggagttccttacacaacttggatttatcagggaatgacatccaaggaattgagccgggcacatttaaatgcctccccaatttacaaaaattgaatttggattccaacaagctcaccaatatctcacaggaaactgtcaatgcgtggatatcattaatatccatcacattgtctggaaatatgtgggaatgcagtcggagcatttgtcctttattttattggcttaagaatttcaaaggaaataaggaaagcaccatgatatgtgcgggacctaagcacatccagggtgaaaaggttagtgatgcagtggaaacatataatatctgttctgaagtccaggtggtcaacacagaaagatcacacctggtgccccaaactccccagaaacctctgattatccctagacctaccatcttcaaacctgacgtcacccaatccacctttgaaacaccaagcccttccccagggtttcagattcctggcgcagagcaagagtatgagcatgtttcatttcacaaaattattgccgggagtgtggctctctttctctcagtggccatgatcctcttggtgatctatgtgtcttggaaacgctacccagccagcatgaaacaactccagcaacactctcttatgaagaggcggcggaaaaaggccagagagtctgaaagacaaatgaattcccctttacaggagtattatgtggactacaagcctacaaactctgagaccatggatatatcggttaatggatctgggccctgcacatataccatctctggctccagggaatgtgaggtatgaaccatgatcctcctaaaagcatttctactgcggggaaggagaggtaaatgtttgaagccctagaggtgtctctaatcactagaaagattaatgacccttttgcttttgggttttgctcagtgtgaaaggttacttaattaaattacaaccaccaggaaattgactgctttttttttttttttaaatggttgaaacttgaa

SEQ ID NO: 954 - protein, 507 aa, Homo sapiens
MSVVLVLLPTLLLVMLTGAQRACPKNCRCDGKIVYCESHAFADIPENISGGSQGLSLRFNSIQKLKSNQFAGLNQLIWLYLDHNYISSVDEDAFQGIRRLKELILSSNKITYLHNKTFHPVPNLRNLDLSYNKLQTLQSEQFKGLRKLIILHLRSNSLKTVPIRVFQDCRNLDFLDLGYNRLRSLSRNAFAGLLKLKELHLEHNQFSKINFAHFPRLFNLRSIYLQWNRIRSISQGLTWTWSSLHNLDLSGNDIQGIEPGTFKCLPNLQKLNLDSNKLTNISQETVNAWISLISITLSGNMWECSRSICPLFYWLKNFKGNKESTMICAGPKHIQGEKVSDAVETYNICSEVQVVNTERSHLVPQTPQKPLIIPRPTIFKPDVTQSTFETPSPSPGFQIPGAEQEYEHVSFHKIIAGSVALFLSVAMILLVIYVSWKRYPASMKQLQQHSLMKRRRKKARESERQMNSPLQEYYVDYKPTNSETMDISVNGSGPCTYTISGSRECEV

SEQ ID NO: 955 - DNA, 979 bp, Homo sapiens
  source
  (1)..(979)
  CDS (201)..(779)
cttgtgaattgcttgcatccaaaatatacacacagcattaagggctggtttttatcttttatttttccaaccttcttttcttcccaaggtgtccaagtcacacagagccacggaatctcacaggagcctgagaactcctcctcctgggactctcagaggatccagaactgcagcccatcctcgctgggctgtccctgtccatgtatctggtcacggtgctgaggaacctcctcatcagcctggctgtcagctctgactcccacctccacaccccaatgtgcttcttcctctccaacctgtgctgggctgacatcggtttcacctcggccacggttcccaagatgattgtggacatgcggtcgcatagcggagtcatctcttatgcggactgcctgacacggatgtctttcttggtcctttttgcatgtgtagaagacatgctcctgactgtgatggcctatgactgttttgtagccatctgtcgccctctgcactacccagtcatcgtgaatcctcacctctgtgtcttcttagtttcggtgtccttttccttagcctgttggattcccagctgcgcagttggattgtgttgcaattcaccttcttcaagaatgtggaaatctctaattttgtctgtgacccatctcaacctctcaagcttgcctgttctgacagcatcatcgatagcatgttcatatatttcgatagtactatgtttggttttcttcccatttcagggatccttttgtcttactataaaattgtcccctccattctaaggatttcatcgtcagatgggtagtataaagccttctccgcctgtggctctcacctgccagttgtttgcttattttatggaacaggcattggcgtgtacctgacttcagctgtggcaccacccctcaggaatggtgtggtggcgtcagtgacgtatgctgtggtcacccccatgctgaaccctttcatctacagcctgaga

SEQ ID NO: 956 - protein, 192 aa, Homo sapiens
MYLVTVLRNLLISLAVSSDSHLHTPMCFFLSNLCWADIGFTSATVPKMIVDMRSHSGVISYADCLTRMSFLVLFACVEDMLLTVMAYDCFVAICRPLHYPVIVNPHLCVFLVSVSFSLACWIPSCAVGLCCNSPSSRMWKSLILSVTHLNLSSLPVLTASSIACSYISIVLCLVFFPFQGSFCLTIKLSPPF

SEQ ID NO: 957 - DNA, 919 bp, Homo sapiens
  source
  (1)..(919)
  CDS (201)..(719)
  modified_base (704)..(704): a, t, c, g, unknown or other
  modified_base (734)..(833): a, t, c, g, unknown or other
ataacttcatcacatactctctccctcttggtttatcagatataaaatgggcaaccaaatgtatcctcgtgtaatctgttagtgacagggaacgtatgacaattttgaaagcagtgatataactctaggtaaatgctatgtctactaattatagtttcttaattttcatagctatattatgaaaagagtaaattgaagaaatggaaactgcaaattacaccaaggtgacagaatttgttctcactggcctatcccagactccagaggtccaactagtcctatttgttatatttctatccttctatttgttcatcctaccaggaaatatccttatcatttgcaccatcagtctagaccctcatctgacctctcctatgtatttcctgttggctaatctggccttccttgatatttggtactcttccattacagcccctgaaatgctcatagacttctttgtggagaggaagataatttcttttgatggatgcattgcacagctcttcttcttacactttgctggggcttcggagatgttcttgctcacagtgatggcctttgacctctacactgctatctgccgacccctccactatgctaccatcatgaatcaacgtctctgctgtatcctggtggctctctcctggagggggggcttcattcattctatcatacaggtggctctcattgttcgacttcctttnctgtgggcccaatgagttagacagttactnnnnnnnnnnnnnnnnnnnnnnnnnnnnnnnnnnnnnnnnnnnnnnnnnnnnnnnnnnnnnnnnnnnnnnnnnnnnnnnnnnnnnnnnnnnnnnnnnnnntgggcccaatgagttagacagttacttctgtgacatcacacaggttgtccggattgcctgtgccaacaccttcccagaggagttag

SEQ ID NO: 958 - protein, 172 aa, Homo sapiens
  MOD_RES (168)..(168): Variable amino acid
METANYTKVTEFVLTGLSQTPEVQLVLFVIFLSFYLFILPGNILIICTISLDPHLTSPMYFLLANLAFLDIWYSSITAPEMLIDFFVERKIISFDGCIAQLFFLHFAGASEMFLLTVMAFDLYTAICRPLHYATIMNQRLCCILVALSWRGGFIHSIIQVALIVRLPXLWAQ

SEQ ID NO: 959 - DNA, 1024 bp, Homo sapiens
  source
  (1)..(1024)
  CDS (201)..(824)
cttcacagaaagagagcaaaaatccaaaagtttatacaccaaagtgcatatcttgctttccaccattttgcttcatatcctgcttaccccaaaggatttggaaacatttttacatttatccacataggtgtcttaattttcctaaagaaacatccccactctccagaggtgccaaataaatatttattgaaatccatgtcatgatgaattttctgcctgccaaaaataatcattactttattgcagtaggagtgggatgctttaaatttagagacacgggtttttctggaagaggacttcccatgtggattcagcttgtggattgtacgtcaattgtcttttttcttggaaataaattaatttgctcatttaaaaaaatgatgcaggaagcatacgagtactttttctctgagcaacttggctttttaagtttctgttatgcttcagtcattacatccaaaatgtttggaagtttcttgtacaaacaaaaaaaattaaccttcaatgcacataggctgctctctcaccttcatgaccaccgagtgcttgctctagctttcatggcctgtgatcaatacctggtcatttgtaatcctcctttgtatatggtcaccatgtcccccccgcaaggagtctgcattcagcttatgcctgcctcctatagctatagcttcctgatgacactttcacattatcctcagcctttgtctcccttattgcccctctgtatcattgatgttcaatggaagcctgttccttatgtacttaatgctcagaaaattctcttgacacagacaggatggcctctgtcttctacacagtagtcattcccatgttgagccctttgatctggagcctcaggaacaaggatgtgaaagatgccctgaggaaagtcattgtcaacagaaaccaggcattattttgttcataaaattaagaaacaaacttgaaaaaacaaaggcatacattccttctgatctgttttctccctgttaataaaattcatattgatctttgttgtcaa

SEQ ID NO: 960 - protein, 207 aa, Homo sapiens
MMNFLPAKNNHYFIAVGVGCFKFRDTGFSGRGLPMWIQLVDCTSIVFFLGNKLICSFKKMMQEAYEYFFSEQLGFLSFCYASVITSKMFGSFLYKQKKLTFNAHRLLSHLHDHRVLALAFMACDQYLVICNPPLYMVTMSPPQGVCIQLMPASYSYSFLMTLSHYPQPLSPLLPLCIIDVQWKPVPYVLNAQKILLTQTGWPLSSTQ

SEQ ID NO: 961 - DNA, 1482 bp, Homo sapiens
  source
  (1)..(1482)
  CDS (201)..(207)
  CDS (281)..(623)
  CDS (740)..(978)
  CDS (1047)..(1282)
gatctggctcttggaacgttcttgaagctaatgtctctaaggcaggtgtgtacagcaagacgtgaataacacagcaatggatgttgaaagcattataaggcaattgaccttgtcagaactacaaaatattatggagtgtggattgctcggaaatctgaaaacatgacttgtgtattgcttatatccaaaatgcagacacaatgctgagtattggtttacttgtttccgattttgcaaccatcttttccaggcaaaagagggttgtatccaaacgatacagacccacagagtataacagatgtctctatattcctcctcctcgaactctcagaggatccagaactgcaaccggtcgtcgctgggctgttcctgtccatgtgcctcgtcatggtgctggggaacctgctcatcatcctggacgtcagccctgactcccacctccccacccccatgtacttcttcctctccaacctgtccttgcctgacatcggtttcacctccaccacggtccccaagatgattgtggacatccagtctcacagcaaagtcatctatgcaggctgcctgactgtgatgtctctctttgccatttttggaggcatggaagaaagacatgctcctgagtgtgatggcctatgaccggtttgtagccatctgtcaccctctatatcgctcagccatcttgaacccgtgtttctgtggcttcctaaatttgttgtcttttttttttttccctcagtcttttagactcccagctgcacaacttgattgccttacaaatgacctgcttcaaggatgtggaaattcctaatttcttctgggaaccttctcaactcccccatcttgcatgttgtgacaccttcaccaggaacatcagcatgtatttccctgctgccgtatttggttttctttccatctcggggacccttttctcttactgtaaaatggtttcctccattctgagggtttcatcatcaggtgggaagtataaaccttctccacctgagggtcccacctgtcagttgtttgctgattttatggaacaggcgttggagagtacctcggttcagatgtgtcatcttccccgagaaagggtgcagtggcctcagtgatgtacacggtggtcacccccatgctgaaccccttcatctacagcctgagaaacggggatattaaaagtgtcctgcggcggccgcaaggcagcacagtctcatctcaataccttcttatctgttccattccttttgtagggtgggttaacaaagacagcaaggtcaaataagaatgatatcacagggtgaacaccccactgtgacattaagagtaatacctccctaggatataaaaaatactgtcacagagtacacacacatggggtacacccacggtgatattagaagcactatctcccttaaatattatgaaaaatatcacagggtgtgcacactgtgtgatatgaggagtcatatttaccctggatat

SEQ ID NO: 962 - protein, 274 aa, Homo sapiens
MLNPQSITDVSIFLLLELSEDPELQPVVAGLFLSMCLVMVLGNLLIILDVSPDSHLPTPMYFFLSNLSLPDIGFTSTTVPKMIVDIQSHSKVIYAGCLTVMSLFAIFGGMEERHAPDLLDSQLHNLIALQMTCFKDVEIPNFFWEPSQLPHLACCDTFTRNISMYFPAAVFGFLSISGTLFSYCKMVSSILRVSSSGVGEYLGSDVSSSPRKGAVASVMYTVVTPMLNPFIYSLRNGDIKSVLRRPQGSTVSSQYLLICSIPFVGWVNKDSKVK

SEQ ID NO: 963 - DNA, 904 bp, Homo sapiens
  source
  (1)..(904)
  CDS (201)..(704)
  modified_base (468)..(469): a, t, c, g, unknown or other
  modified_base (594)..(594): a, t, c, g, unknown or other
  modified_base (650)..(650): a, t, c, g, unknown or other
  modified_base (691)..(691): a, t, c, g, unknown or other
  modified_base (699)..(699): a, t, c, g, unknown or other
  modified_base (797)..(896): a, t, c, g, unknown or other
tattgttgggttgattttatggccagacccagttttgaagttagcattgtgaagaatcatccattgggaattgggatgctccctcaaagactgaaaggtgcttaagtgctcactctggagtggaacagatgctgcttttccttaccctttctttcatcctgtatacagtgaacagcatagttgataaatgagaccaaggcatgctcagaaagccacctccacaacagcctggaggctcactcagcacctcttcactcactcactcactcattcaccatgttcttggttctctccaggtcagttatgcctcctccagcagactcctcagcaacaagaatcaattcaagtctttcctccgaaccatccccaatgatgagcaccaggccactgccatggcagacatcatcgagtatttccgctggaactgggtgggcacaattgcagctgatgacgactatgggcggccgnngattgagaaattccgagaggaagctgaggaaagggatatctgcatcgacttcagtgaactcatctcccagtactctgatgaggaagagatccagcatgtggtagaggtgattcaaaattcacggncaagtcatcgtggtttctccagtggcccagatctgagccctcatcaggagattgtnccgcgcatatcacggcaagatctgctggcagcgaggctggncagctctncctgacgcatgcctagacttcacgggttggcgaccattgaattgtttgagctggcagaccagctccggattctgaaagtcttcaggagcgtccatggnnnnnnnnnnnnnnnnnnnnnnnnnnnnnnnnnnnnnnnnnnnnnnnnnnnnnnnnnnnnnnnnnnnnnnnnnnnnnnnnnnnnnnnnnnnnnnnnnnnnccactttc

SEQ ID NO: 964 - protein, 167 aa, Homo sapiens
  MOD_RES (90)..(90): Variable amino acid
  MOD_RES (132)..(132): Variable amino acid
  MOD_RES (164)..(164): Variable amino acid
  MOD_RES (167)..(167): Variable amino acid
MLRKPPPQQPGGSLSTSSLTHSLIHHVLGSLQVSYASSSRLLSNKNQFKSFLRTIPNDEHQATAMADIIEYFRWNWVGTIAADDDYGRPXIEKFREEAEERDICIDFSELISQYSDEEEIQHVVEVIQNSRXSHRGFSSGPDLSPHQEIVPRISRQDLLAARLXSSX

SEQ ID NO: 965 - DNA, 862 bp, Homo sapiens
  source
  (1)..(862)
  CDS (201)..(662)
gtgtggaaggtatgggtgtggaaggtacgagtgtggtaggtatggctgcagaaagtcgtcccggtgctgcatggggagtggatccccgaagcatttggggtggctgaaaatgagaagaagggtagcaaaaagtgcggccggcatgcggggaatcctgtaggcaacgggagccagggaggactcagttttgcattgtacaaatggcatttaacaagtggtgcctggagcggtccgatttgcaggcagtgaggaggccaggagagcctgcgggtttccaagcaggaccaggggagggcgccaaggagtcggcagctgcgagaaatatttgggacaaggtttctcacactggagcccgagggcctctagggagtcctaggttaaattggaggagtcttcaagtttatctggagaaaggccgtcttaggaaacaagtctcattccctgaaaagggctttgcagttactcatcttcattgcgctggacttttgtctatttttttttttttttttttgagatggagttttcgctcttgttgcccaggctggagtgcagtggcgcgatctcagctcactggaacctcagcctcccgggttcaagcaattctcctgcctcagcctcccgagtggctgggattacaggcatgcgccaccacacccggctaatttttgtattttaagtagagacagggcttctccatgttggtcaggctggtctcgaactcctgacctcgtgatcctcccgcctcagcctcccaaagtgctgggattacaggcgtgagccaccgcacccagcatagacttttgtcttttaaccctgaaaaggattgagactaagagattgagaatcgtttgctggtattctg

SEQ ID NO: 966 - protein, 153 aa, Homo sapiens
MAFNKWCLERSDLQAVRRPGEPAGFQAGPGEGAKESAAARNIWDKVSHTGARGPLGSPRLNWRSLQVYLEKGRLRKQVSFPEKGFAVTHLHCAGLLSIFFFFFLRWSFRSCCPGWSAVARSQLTGTSASRVQAILLPQPPEWLGLQACATTPG

SEQ ID NO: 967 - DNA, 1003 bp, Homo sapiens
  source
  (1)..(1003)
  CDS (201)..(803)
  modified_base (675)..(774): a, t, c, g, unknown or other
taggagctcagtttcaagtattaaatatgtatattcttttttcaaatttgctgttttctaaattttgttgtggaagaatcaacttatgtacatcaacctgctcccccccttacatcaataaacacactatcctgtgatttcttgtagtaaaattgcatttataatagtgaaaataagtttgagagtattttcctaactaaatgaatatcacactttattcatttctttatgtcctcagattaaatgaagggaatagtactggaagaaatatagatgaaagaaagaaaatgcaaggagaaaacttcaccatttggagcatttttttcttggagggattttcccagtacccagggttagaagtggttctcttcgtcttcagccttgtaatgtatctgacaacgctcttgggcaacagcactcttattttgatcactatcctagattcacgccttaaaacccccatgtacttattccttggaaatctctctttcatggatatttgttacacatctgcctctgttcctactttgctggtgaacttgctgtcatcccagaaaaccattatcttttctgggtgtgctgtacagatgtatctgtcccttgccatgggctccacagagtgtgtgctcctggccgtgatggcatatgaccgttatgtggccatttgtaacccgnnnnnnnnnnnnnnnnnnnnnnnnnnnnnnnnnnnnnnnnnnnnnnnnnnnnnnnnnnnnnnnnnnnnnnnnnnnnnnnnnnnnnnnnnnnnnnnnnnnngagttattcagtccaaatgtgaacagtaacactttgtcttagacctttatttcaggttcaggggtacatgtgcaggtttgctatataggtaaattccatgtcacaggggtttggtgtacaaattattttgtcacccaggtaataagaataatacccgataggtagtattttgatcctcaccctcctcccaccctccttcctcaggtaagccccagtgtctgttgctccc

SEQ ID NO: 968 - protein, 200 aa, Homo sapiens
  MOD_RES (159)..(192): Variable amino acid
MNITLYSFLYVLRLNEGNSTGRNIDERKKMQGENFTIWSIFFLEGFSQYPGLEVVLFVFSLVMYLTTLLGNSTLILITILDSRLKTPMYLFLGNLSFMDICYTSASVPTLLVNLLSSQKTIIFSGCAVQMYLSLAMGSTECVLLAVMAYDRYVAICNPXXXXXXXXXXXXXXXXXXXXXXXXXXXXXXXXXXVIQSKCEQ

SEQ ID NO: 969 - DNA, 922 bp, Homo sapiens
  source
  (1)..(922)
  CDS (201)..(722)
tcctcctcctgggactctcagaggatccagaactgcagccggtcctcgctttgctgtccctgtccctgtccatgtatatggtcacggtgctgaggaacctgctcagcatcctggctgtcagctctgactccccgctccacacccccatgtgcttcttcctctccaaactgtgctgagctgacatcggtttcaccttggccatggttcccaagatgattgtgaacatgcagtcgcatagcagagtcatctcttatgagggctgcctgacacggatgtctttctttgtcctttttgcatgtatggaagacatgctcctgactgtgatggcctatgactgctttgtagccatctgtcgccctctgcactacccagtcatcgtgaatcctcacctctgtgtcttcttcgtcttggtgtcctttttccttagcccgttggattcccagctgcacagttggattgtgttactattcaccatcatcaagaatgtggaaatcactaattttgtctgtgaaccctctcaacttctcaaccttgcttgttctgacagcgtcatcaataacatattcatatatttcgatagtactatgtttggttttcttcccatttcagggatccttttgtcttactataaaattgtcccctccattctaaggatgtcatcgtcagatgggaagtataaaggcttctccacctgtggctcttacctggcagttgtttgctgatttgatggaacaggcattggcatgtacctgacttcagctgtgtcaccaccccccaggaatggtgtggtggcgtcagtgatgtatgctgtggtcacccccatgctgaaccttttcatctacagcctaggaaagagggatatacaaagtgtcctgcggaggctgtgcagcagaacagtcgaatctcatgatatgttccatcc

SEQ ID NO: 970 - protein, 173 aa, Homo sapiens
MVPKMIVNMQSHSRVISYEGCLTRMSFFVLFACMEDMLLTVMAYDCFVAICRPLHYPVIVNPHLCVFFVLVSFFLSPLDSQLHSWIVLLFTIIKNVEITNFVCEPSQLLNLACSDSVINNIFIYFDSTMFGFLPISGILLSYYKIVPSILRMSSSDGKYKGFSTCGSYLAVVC

SEQ ID NO: 971 - DNA, 1436 bp, Homo sapiens
  source
  (1)..(1436)
  CDS (201)..(637)
  CDS (763)..(1001)
  CDS (1070)..(1236)
tgttatatatgatgatctggttttggaacgttcttgaatctagtgtctctaaggcaggtgtgtacagcaagacgtgaataacacagcaatcaatgttgaaagcattataaggcaattgagtttgtcagaactacaaatattactgagtgtgggttgctctgaaatctgaaaacattacttgtgaattgcttctatccaaaatgcagacacaatgctgggtattggtttacttgtttccgatttttcaaccctcttttccaggcaaaagagggttgtatccaaacgatacagacccacagagtctaacagatgtctctatattcctcctcctcgaactctcagaggatccagaactgcagccggtcctcgctgggctgttcctgtccatgtgcctggtcacggtgctcaggaacctgctcatcatcctggccatcagccctgactcccacctccacacccccatgtacttcttcctctccaacctgtcctttcctgacagtcgtttcacctccaccacagtccccaagatgattgtggacatccagtctcacagcagagtcatctcctatgcaggctgcctgactcagatgtctctctttgccatttttggagacatggaagagagacatgttcctgagtgtggtggcctatgaccggtttgtagccatctgtcaccctttatatcgttcagccatcttaaacccctgtttctgtggcttcctagattcgttgtccttgtttttttttttttttttttctcagtcttttagactcccagctgcacaacttgattgccttacaaatgacctgcttcaaggatgtggaaattcctaatttcttctgggaaccttctcaactcccccatcttgcatgttgtgacatcttcaccaggaacatcaacctgtatttccctgctgccatatttggttttcttcccatctcggggacgcttttctcttactataaaattgtttccttcattctgagggtttcatcatcaggtgggaagtataaaccttctccgcctgtgggtctcatctgtcagttgtttactgagtttatggaacaggctttggagggtacctcagttcagatgtgtcatcttccccgagaaagggtgcagtggcctcagtgatgtacacggtggtcacccccatgctgaaccccttcatctacagcctgagaaacggggatattaaaagtgtcctgcggcagccgcacggcagcacagtctaatctcaatatcttcttatctgttccattccttttgtagtgtgggttaaaaaaggcagcaaggtcaaataagaatgatatcacagggtgagcacccactgtgacattacgagtaatacctccctaggatataaaaaatactgtcacagagtacacacacatggggtacacccacggtgatattagaagcactatcttcctta

SEQ ID NO: 972 - protein, 280 aa, Homo sapiens
MQTQCWVLVYLFPIFQPSFPGKRGLYPNDTDPQSLTDVSIFLLLELSEDPELQPVLAGLFLSMCLVTVLRNLLIILAISPDSHLHTPMYFFLSNLSFPDSRFTSTTVPKMIVDIQSHSRVISYAGCLTQMSLFAIFGDMEERHVPDLLDSQLHNLIALQMTCFKDVEIPNFFWEPSQLPHLACCDIFTRNINLYFPAAIFGFLPISGTLFSYYKIVSFILRVSSSGFGGYLSSDVSSSPRKGAVASVMYTVVTPMLNPFIYSLRNGDIKSVLRQPHGSTV

SEQ ID NO: 973 - DNA, 904 bp, Homo sapiens
  source
  (1)..(904)
  CDS (201)..(704)
gttgcacacgcgtaaattgtgggccgccgctgccgggctgattgagaggacagctcccgcaatctgcggtcgtatccgttccgtcaatgttttatttctgcttgtttttcaatgttgttgcacaaataacgacacctgaaaacaaaaccaggtatacttattattaaaaagtgttcgtcctgtgaatccgcaacattgggatgctcaatttatttgcctttataaggaccaaaacacgaagctattttttatttttatttatttattattttttgaaatggagtctcgctctgtcgcccaggctggagtgcagtggagcgatctcggctcactgcaacctccgtctcccgggttcaagcgattctcctgcctcggcctcccaaatagctgggattacaggcaagggtcaccacgcccgggtaatttttgtatttttagtagagacggggtttcaccacgttggccaggctggtctcgaactgctgacctcaggtgatccacccgcctcggcctcccaaagtgctgggattacaggcgtgagccacgcgcccggccggaagctcctttctgtttttgttttgttttgtttttttgagacaggctcgctctgtcgcccaggctggagtgcagtggcgcgatctcggctcactgcaacctccgcctcccgcgttcaagccattctcctgcctcagcctcccgagtagctgggactacaggcgcccgccaccacgcctggctaattttttgtatttttagcagagatgggggtttcaccgtgtaagccaggatggtctcgatctcctgacctcatgatccgcccgcctcggcctcccaaattgctgggattacaggcgtgagccaccgcgcccgaccccggaagctcctttttaagtgtgatttatta

SEQ ID NO: 974 - protein, 167 aa, Homo sapiens [sequence omitted]

SEQ ID NO: 975 - DNA, 883 bp, Homo sapiens
  source
  (1)..(883)
  CDS (201)..(683)
agacattgtatgagttacatcttgctgctgtaactaattaccaaaaccttagtggcttaaaacaacacaaatttacgttgttatcatggaggagatcaaaagtcaataattggttccactgggataaaatcaaggagttggtcaggctccatcatttctggaagctccagggaagaacaattgccttttccagcttctagatgccacttacattccttggctggtggccattgcctttgccatcaaagcagcatcataacatcttacagttctcttgttttttttttttcccgagatggagtctcactctgtcaccaggctggagtgcagtggtgcgatctcggctcaccgccacctcttcctcccgagttcaagcaattctcctgcctcagcctcccgagtatctgagactacaggcgcaggcaccaggcccagctaatttttgtatttttggtagagatagggtgtcaccatattgtcgggatggtctggatctcttgacctcgcaaaacgcccacctgggcctcccaaagtgcggggattataggcatgagccaccgcgcccggcccttacagttctcttgactttgaccactgcgcctcccttttctccatgtaatgtaattgtctcttcaaataaaatacgcccacctggaaagtccaagataatctctttattttaaagtcaactgattagcaatctgaatttcatctctaatcttaattgcccttttccaggtaacataatgtattcacaggttctggacactagcgcatgcacattttgggaagaatgttaacctgtgcaccgtacacattttctaaaaacgtaaactgaaagttacctacagagtttgactatggaaaaagtggtgaatatcca

SEQ ID NO: 976 - protein, 160 aa, Homo sapiens
MPLTFLGWWPLPLPSKQHHNILQFSCFFFFPRWSLTLSPGWSAVVRSRLTATSSSRVQAILLPQPPEYLRLQAQAPGPANFCIFGRDRVSPYCRDGLDLLTSQNAHLGLPKCGDYRHEPPRPALTVLLTLTTAPPFSPCNVIVSSNKIRPPGKSKIISLF

SEQ ID NO: 977 - DNA, 877 bp, Homo sapiens
  source
  (1)..(877)
  CDS (201)..(677)
attagaaacaaatttaattttataattggatttaagaaccacaaacccaaaacagtttggagctccttaatacaagttaaaaataccctagtggtattgaaagtagcacagaatacaatttatgttataatgatgttcctggtttattctaaaatttgaccatatttaatatttctgtttaaccacgagagaaacggtcaatgctaatgattcataccctgagaatcagtcacctattgatggaaatagccaacttgggagagagacagactagattttactttaaagtcagctatattttatatcagtgccctccaataaataatttatttttcttttccctgccttccccgccttctctgccttccctgccttccctttcttccttttctttctttccttctttttcttttctttttctttctttctttctctttctttctctctccccttccttccttccttccttccttccttccttccttccttccttccttccttcctttctttctttcttccttccttccttctctttctttctttttctttctttcaactgggtctctttctgtcacccagcctggactgcagtggcacaatctcagctcactgcaacctccagctccagggttcaagcaattctcacgtgtcagcctcccaagcagctgggattataggcacctgccaccatgctgggctaatttttgtatttttagtagagacagggtttcaccatattgcctaggctagtcttggactcccggcctaagtgatcttcccacatcggcctcccaaagtgccaggattacaggtgtgagccaccatgcctggccatatacgtaatttataatagacacattaagtaaaatgaagtaag

SEQ ID NO: 978 - protein, 158 aa, Homo sapiens
MLMIHTLRISHLLMEIANLGERQTRFYFKVSYILYQCPPINNLFFFSLPSPPSLPSLPSLSSFSFFPSFSFLFLSFFLFLSLSPSFLPSFLPSFLPSFLPSFLSFFLPSFSFFLFLSFNWVSFCHPAWTAVAQSQLTATSSSRVQAILTCQPPKQLGL

SEQ ID NO: 979 - DNA, 1039 bp, Homo sapiens
  source
  (1)..(1039)
  CDS (201)..(839)
  modified_base (270)..(270): a, t, c, g, unknown or other
  modified_base (294)..(393): a, t, c, g, unknown or other
tgaaaatgttccttgtgaattgcatccagcattaagggctggtttttatcttttatttttccaatcatctttccttcttaagttgtccaagagacacagagccacggaatctcacagatgtctgagaattcgtcctcctgggactctcagaggatccagaactgcagccggtcctcgctttgctgtccctgtccctgtccatgtatctggtcacggtgctgaggaacctgctcagcatcctggctgtccgctctgactccctcttcacancctcatgtacttctccttctcaannnnnnnnnnnnnnnnnnnnnnnnnnnnnnnnnnnnnnnnnnnnnnnnnnnnnnnnnnnnnnnnnnnnnnnnnnnnnnnnnnnnnnnnnnnnnnnnnnnnctttcttggtcctttttgcatgtatagaagacatgttcctgactgtgatggcctatgactgctttatagccatctgtcatcctctgcactacccagtcatcgtgaatcctcacctctgtgtcttcttcattttggtgtcctttttccttagcctgttggattcccagctgcatagctggattgtgttacaattcaccatcatcaagaatgtggaagtctctaattttgtctgtgacccctctcaacttctcaaacttgcctgttctgacagcgtcatcaatagcatattcatatatttcgataatactatgtttggttttcttcccatttcagggatcctttggtcttactataaaatcgtcccctacattctcaggatttcatcgtcagatgggaagtataaagccttcgccacctgtggctctcacctggcagttgcttgctgattttatggaacaggcattggcatgtacctgacttcagctgtgtcaccaccccccaggaatggtgtggtggcatcagtgatgtacgctgtggtcacccccatgctgaacctttttatctacagcctgagaaacagggacatacaaagtgccctgcggaggctgcgccccagaacagtcgaatctcatgatctgttccatcc

SEQ ID NO: 980 - protein, 212 aa, Homo sapiens
  MOD_RES (24)..(24): Variable amino acid
  MOD_RES (32)..(65): Variable amino acid
MYLVTVLRNLLSILAVRSDSLFTXSCTSPSQXXXXXXXXXXXXXXXXXXXXXXXXXXXXXXXXXXFLVLFACIEDMFLTVMAYDCFIAICHPLHYPVIVNPHLCVFFILVSFFLSLLDSQLHSWIVLQFTIIKNVEVSNFVCDPSQLLKLACSDSVINSIFIYFDNTMFGFLPISGILWSYYKIVPYILRISSSDGKYKAFATCGSHLAVAC

SEQ ID NO: 981 - DNA, 898 bp, Homo sapiens
  source
  (1)..(898)
  CDS (201)..(698)
gatccagaactgcagccggtcctcgctttgctgtccctgtccctgtccatgtatctggtcacggtgctgaggaacctgctcagcatcctggctgtccgctctgactcccccctccacaaccccatgtacttcttcctctccaacctgtgctgggctgacatcggtttcacctcggccacggttgccaagatgattgtggaatgcagtcgcatagcagagtcatctctcatgcgggctgcctgacgcagatgtctttcttggtcctttttgcatgtatagaaggcatgctcctgactgtgatggcctatgactgctttgtagccatctgtcgtcctctgcactacccagtcatcgtgaatcctcacctctgtgtcttcttcgttttggtgtcctttttccttagcctgttggattcccagctgcacagttcgattgtgttacaattcaccatcatcaagaatgtggaaatctctcattttgtctgtgacccctctcatcttctcaaacttgcctgttctgacagcgtcatcaatagcatattcatatatttcgatagtactatgtttggttttcttcccatttcagggatcctttggtcttactataaaatcgtcccctccattctaaggatttcatcatcagatgggaagtataaagccttcgccacctgtggctctcacctagcagttgtttgctgatttgatggaacaggcattggtatgtacctgacttcagctgtggcaccaccccctaggaatggagtggtggcatcagtgatgtaggctgtggtcacccccatgctgaaccttttcatctacagcctgagaaacagggacatacaaagtgccctgcggaggctgctcagcagaacagtcgaatttcatgatctgtttcattc

SEQ ID NO: 982 - protein, 165 aa, Homo sapiens
MQSHSRVISHAGCLTQMSFLVLFACIEGMLLTVMAYDCFVAICRPLHYPVIVNPHLCVFFVLVSFFLSLLDSQLHSSIVLQFTIIKNVEISHFVCDPSHLLKLACSDSVINSIFIYFDSTMFGFLPISGILWSYYKIVPSILRISSSDGKYKAFATCGSHLAVVC

SEQ ID NO: 983 - DNA, 141912 bp, Homo sapiens
  source
  (1)..(141912)
  CDS (201)..(540)
  CDS (48433)..(48591)
  CDS (52175)..(52200)
  CDS (55987)..(56222)
  CDS (58520)..(58617)
  CDS (59329)..(59607)
  CDS (96283)..(96400)
  CDS (141517)..(141712)
  modified_base (31544)..(31643): a, t, c, g, unknown or other
  modified_base (36449)..(36548): a, t, c, g, unknown or other
tttatcgtgggtttgatccctgagctgctctcctttcccgaacctcccggggtgcagcctagagccctcccgcgcggctgactccagagtagaggaagggaggcggcctccggctggtcccccgaagccctcgctgccccgcagatgcggatggccagccagtagcgggcggtggccccgcgtcccgggagcgcacagcaatgcaggcgcttaacattaccccggagcagttctctcggctgctgcgggaccacaacctgacgcgggagcagttcatcgctctgtaccggctgcgaccgctcgtctacaccccagagctgccgggacgcgccaagctggccctcgtgctcaccggcgtgctcatcttcgccctggcgctctttggcaatgctctggtgttctacgtggtgacccgcagcaaggccatgcgcaccgtcaccaacatctttatctgctccttggcgctcagtgacctgctcatcaccttcttctgcattcccgtcaccatgctccagaacatttccgacaactggctggggggtaagagtcgcgccccgctccttcgctccttctctcttaaccctctgcctttcaggggatctctctctctctctctctctctctctctctctctctctctctctctctctctctctctctcctctctcgtctgtctgtctctctctcgtctgtctcttccttacacttctctgtcaaatgaatccggtgctctttcttagaacttcgccacctgtgttcacctggacataagttcttttggccgcctctgattcccctccagtgcttcctccttgtggcttagagacataggttggggaaaagcttcggaaaggtcccgagcagtgaggcaggaagtcgcacccctcgccacttatttcagctccctttcccgtcattaccaggtttttctcccctagttttcttactaaaagtgagataaaaatatttcaaataattaaaccaaagttaaaaatctcatttcctcattcccccaccctccagcctcacttcccagttgcttgcagacagcttcttgtacctatgagcataaaacaaatataattcatgtgcagaaaaaatatattgaactagtccttttaaaaactgtattaagtgtcatgcaggaagaaggaacacagaaaactgatgccctcctattataaaagaagagataacattctcctccttccgtataatgggggaaaaaaaatgacagaggagaggtggagtcactgagttgggagcagtgtgtggaggttggaaaaaaagatatatttcttgagatgatccagcttttccaagaacacagctggagaatgccctggtgtaaacccaggagcagtagtgtgttgtattctcaccagtgcttaaggtgcaccatgggcctcccctttttcacggttgggtgtattcttgtggccacatcaaaatggttagaaatgtaagagaaatagatcattatgccttcaatctctgctatttctatcccattactaattctcttaaactcatggagggtgtttcatcctaccattaccaatttgagatcgtgagcattgctttttttctcattagcttaaactgagtttgctgttagtcagtcagaatgttaaagtccttgattcttatcaatctataatgtaaatattttcaaaaaagcattaaacattgagtacagagcattgacttgaaagtaatacacaatgtggaaagtaagaccttgatttatggattagagactttcttatgcactctgatgcagtaattgtatttgggcattttaaagttgctcagtgcaactaactccataaaattaatggggtattttttgatcatcatacggaacttggtttttggggaaaagcacatgagttttcatttctaaatgtttgtgaaagcagatttatgaggcttctttgtgctggggatgattatagctccatttgtaaaggtgaaaataattatgcaaagtgggattttatggtggggatcaaaagaactggattactattttggctgtaatacatgttaatttagtatgtctgggtctcaatttttcagtaaaatattagggattagagaagtttgaaagtgcagtgagtctggccaggcgtggtggctcacgcctgtaatcccaacactttgggaggccgaggcgggcggatcacgaggtcatgagatcgagaccattctggctaacacggtgaaaccccgtctctactaaaaatacaaacaacaacaaaaaattagccgggcatcgtggcacgcacctatagtcccagctgctcaggaggttgaggcaggagacttggcttgaccccgggaggcagaggttgtagtgagccgagatcacgctactgcactccaacctgggtgacagagcaagactccgtctcaaaaaaaaaaaaaaaaaaaaaaagtgcagtgagccagatctttagctccagttcatgttggggaatcatggccaagaaaggccatatggtgcatcttccatcctcagggcttatttgggcactgccaaggtttttctcaagttttcttttctccctgcttcttacttcatggagaacatttcactttagcttctaaatactgaaggagagtaatatattgctcatttattttatagggttagtgtgagaataaagtgtgttagtaaaagtgctttgaaaaatattggtcatgccatgaaagtataaggtattaattctattaaggggtgtttaattggaggtggcctatgtttatctgggaccagatttatagaataaataatgatcttataaattgagtaaataataccaaaattgaagtgcgagggagaggtgagagcatgcagaggggctagagatcaatatgaaaatagaattaacttgcgcattataggacaggataatcatggcaaaatttccttgataaattaaccaaagttcaagagaatgtaatctaagagccaaaaattaattcataatttattattttacaaagctattgaggatctcctatctggaaaagtgttctaccttgagagtacaaaagtgagtaaagtctatctgtgcccttcaggacctcagagaataggagatggccccaaaatgagcaaaaacaggatttgatagaaaaaggatccactttgctctacgagcacagaagagtcaggaaggcttcctgaaggatgtgatgttcaagctgggtctggaagaataattcagagaataatttagactctttccagcagaggatggagtgtgttctaggaataggggtcagtgccaagttggagggaagaaagaagatggtgtgttccaagaataccgtgcaaggcattgcaagaatgcacaggttatatgtggggaatggcaggaaatgagacagaaaagtagtgcaactggggaggaaaaaaaaaaaaatatatatatatatagttatgtaaaaacctaaaatatgaatacccctcaaattccttcaggggtgaggtaggaaacacaaacaaagcaatgaagatcaccaggaagcaacggcgacaaaaggaagactgtctcctctaaagggggcaggattgcagcatgctggagtggtgcccaggattgtcacatcttcttttgttgttgttcttgcttccccacctctccttctgaaaagctgggaatacagatttttatgatgctgacttctaagtcaaatacaaaaagtaaaatgcaatcaggtaaaagaaaacatctctatggcttggtcagaaataattcatggacttccagtttgtcacatctctacattgcctgtctctcaaatatttctgacaatgctaagactgtgaatgactgttttattcttctttcagtccattcctctttcttgctggggaccagcagcacctattgagtcaaaacctgctttttaacaaggttctcaattgtttcacgtgcacattaaagtttgataagcactagagaagtcagctcaggtctttataaggaaaaaaaaaagtttgttaagtactacttgaagtagtaatggctcttagacctggctacacagagaatctcctgaagggcttttgaaaatggcctgcgccagccccagcccaaaccagttacacttgtctctttggagccagccacactgccttacagagcccagtgtgcacaactctactcaggtcccctttcagggacatcatgttgttatcttaaaactggttgtggtgggagtattcacatcatggaaatcagcacttactagttaggcctgttttttaaaaaagtgaaaaaaaaaaaaaacaaacccagaaatcaaacagttgctttcccagcacaccactgagcaaagacattgagttttcttttgtacactgctgggaccatgaataataggtgaggcaaagtgtagccacaaacatgtttttacatgaattacactaaagttggaaagagatacagctgatccacagcatctaagtgtgcccagcatggaggcaagctgacattcaattcctttcatccaccttaccatcattgccttattggcttacctttgatctaccagttgactcactctctactccccaggactccttccaacatggagctagcagaagtggcgattctctgcacccaaatattataaatggcacatgtttatgagttttttgttactcatatgagggtggagttgctctgccatggccctttcctttaggaaagttttgtctctgttctcttctctgatttactgggctagactgcagaagtggatttgtccattgcctccttagggccaccaaatttacctgtccttatctgcagcctgttcctcctcattttgttttgttttttcctcctttttatctttttcttcacaatgtccaaatgctcctccaaattcactcactgaacatgttctgtttcttccagctaaatacagaactgattttgcttgtgaccagtgctgcagaacaccactctcttctctaagtttccatgaactagtctttttttgcctctttgtttcctttatgtccctatctctgtattttctgccttttgagagttctcaatctttctcttattttgcgagtaagtgtccactgaagcttagcatgcaacctcttttctttcatcatcaatttctgcatagaggctatagtcatgactctcacttctttgctgatggttctgaaatagtatctaatcaatatcataagccatggtctttcacctgatctgaagacttggcacttacacatgaatatattaccagcatctctcattctctcatggtatcttgttcctctgcccaaagtctaaagtattattaatggcactatgagtcattcctgtattcagcatttcttgggtatttcctgtgtgcactgggatattgcaggtattgagaaagctgtgtttctgtggaaaagccaagtttccattagactaagaagggggaggaagcattcaaagaagtaatggagaatgcagggcattttgtagatgtcagggttccagagcacacagtgcaagtattgaggagtagggagcttgaatcagattaggggatgttcacagtctgatgggtttgagtccaaagttgagggataggctgggagagaatgggactcgtggtagctgaggtaaatgaaaacttaaggcataggaatgttaattctgaacacttcccaggaggagacagaaaatcagttctaatgctagcctgctttatgactctaagcattaagaagatgaaatggggagtgtttggggtgtgcctggagtagtggccttgctaggatcctgctgggttctgtatccactttcatcctgctgtggattccggcacagccagagggaggatggtctcctcaggtgcacacacagctctgcagcactcccccaaatcctgccgtgggcagtgaaaagaattttctagcagtggctggcaaattgactaaaagcaattccaaaaaaaaggagtttgaaatatattctaagtaatggcagcatcgttgggggaagtacacattcatgcacttttactatctttgaagagtattagggtaagaaaacacagaaaattaattttctcagcagctgatatgagaattcctcttagagtggtaatgctcaatcttggcaacatgtagtaaatcatctgggagttttttaaaacacagatgcctggttcctacccctggagattctgatttaattggtctgattataattggtatggagttttcaaaagttcccaaagttagaaaagttataatttgcagccaaagttgaaagccactgatgtagtgtaaatgctgacagcaccaggagttccccaagttagaaaagttataatttgcagccaagatttaaaatcattgatgtagtgtaaatgctgacagctccaggactcaggctgatatgaagattaaaagaaataatagatgtaaacactttttaaaaaagtatagtgcctaccccatgtaccagctcaatatagctattatatatttaaaaaatagcaatggcagtcagaatgcttagaaaatgcaaaagtagattatattaactggagtccaacaaggagctcagaggcaattcttccgttttctgcagcctattgcgtctttactaaagcccttaacgtttttagagtctttcaagatgaatttggaaaggattcaaaaatggtgaaaagattggaatataagacatacaaagaaatataagaagaattattctcttgcctggagaatagaactttagttataaattagcacacctcaccacaaaggtttttcagtctattttgcccagggccacagcggatgtgggcgggtaacagaatggtagtaggcgaagctccaagcttcattataacagctcctgtctctctttttaagaattagaattttgcatgactttatatgaaaaatgaaaggatttaactggaaggaaaggagggagagaaagaaagcactcactgtacacaacatgaaatgttagggtgtgtttttagagattgagagctgatacattgtgaaatgaattaaaggaggttgttgaacttcatttagtgaaaagatcttaattttgagggccaattcagaacagagagcttaacctggaacttcttcggtcccattttattattcaatcagtgactagaaaacatcagttacatgtgttatataatttttttctatgatatttcagaaattttagagttcttggggaaatttacatatggtaagattggtgtaaaatcaacagtattgtggggcttaaaaagtcaacagaaatgataaaagctattgatgaagaatagtctttttaaaataaggaagtattaaaaaagatgtaaattaaacagaggtccaacagcaacagtagtttggaaataaagtcaggaattatgctgtggacagcctctggttgatctttcctagaatcaattacgtgcacactttgagaagaaaagatgctgtaggtcactaaatttttttggtaggtgagagagtggcagtaacagcaacagcatttatgtaaaagattctctctacttaggacaagaacagtttacatttaaaataatgacaaggatttagcagtaagaaagttttaaatatttcactgtgcacttaggaggcataaaatgaattcccttttagtttgcttttctaaaacataactattctttgataagttgttgatttattaggattcttgtttgtgggaagagaagcccaacttaaattaccttaagaaaaaaaagggaatattctacctctgcaactgaaaaggtcagagttagggctggttttaggcataactggattaaggtcttcaacagtgatcatcctccccctcggcggccagctccacttccctctgtgttgtggtttcattctagagctgtcttttgcccaagtgtgaaagatgaccccaggagctataagcttacattttctttaaaactccctgtctcaaaccaagtgtccatcgatggacaaatggatatacaaaatatgctgtgtatacacacagtggaatatcactcaggcatgaaagggaatgaagttctgatacttactacaacatggatgaactttgaaagcattatgctcagttaaataagccagacacaagaggacaaatgttgtgtgattctacttacatgaactatttagaataagcaaagtcatagagacagaaaaggtactaatgttaccaggggctatggggagggcagagtggggagttattgcttaatgcttagatttctgtttggggttatgaaaaagtttttgaaacagatagtggtgttcattgcacgacactgtgaatgtgattaatgccactgaatcatacacttaaaaatggctaaaatcataaattttatgttagatatattctaccacaataaaaaattctagaacaaaaaataaaactttttatctcaggaaatgagagagaatacttcccggtagttgcagaaaattctggaaggattctagccagtttggccttgctgtcttacccatagaactaatcacgcacctcagggagcgccatcgtcactcctattcaaacacccagagataccccctacagcaggaagaaaagcctattgaggagccactgtgaggcagtttcttatccctgtcttgtgggagactgaccttctcttatctatctcccgtttggtttccgttgagtgtaagacttccctcctttctccccaccttgctcccacttaaggttcagctacagtcttttgtgtaagtctgtacaatttcttggccgtggtttaagggttgctcctccccagcagggcaacccattgcccatactgtcagtcatcttgctcttcaaggctcagtgtcttcctgtgttgatcttgcctttggcatctgtgcaagtaataaacttcctgaatccattgatgctcattgtctccttactaactgaatcaatggaagtgtgacaagctaacaactgtagtagtgacacttgggaccctgttagccactaagccccttggaaaggcttgactgcttagcatgaagttcttccataggaaggtactcagggtagatatgtttagcagagttggccatttatgtctagtggagtgagtcaacttacagggactaaagctccccgatcatatgtcttcccataaggccaagccctgcactaggtttctcaggaccaagctgaaccagagttctgagtggctcttccttgtctgcctttcctggtctgggatggagtgctgggatctccctctgctgctcccatctcatttattgatatatactccccagtggaccaacttccaggctgccaattccttctagtagtggacatatgccttctccctctgctaaggaattattgaaaggtcagtgaacggggttctagaagttgatattggcagttccctctcagtctgtgcctttaagaaaaattcagcagaagctatactatttgtttcattttatgccttaaaactaaagattcttaaggatgaattccgaagtaattaagtaagtgcttattgtttttatctgtctttgcaaaactaaattagtcctacctgtagcttggttttggagaaacacatttactgtcatatcagagagattgtaggctattcagggtaatagaaatcttaaaagacagcatgttcctacatcctgggagaaatagaaggatagagaaacagttagatgctgtgaaaacaaacatggattgtggaatcaaacaatattgggttctaatcctgttccatcctttattagtgtttgtattaactagattataagttacatggcctggcattaaagcttcccctattagaagaccaaggagagaagttataaaataatgtttgatgctgccccccagtggttgatgtggtggcagaaaatatgacaaagatacaggttttagatcaagctttattttcacaaaaatattaatgcatataatgcatatctagttcttcttacttcccatttgatttctctatgaagcatatagtatttacatattttcatttatgcaatctcattttaaagtcccctttaatacatgtatgaaaatatgttaacgttttaaaaaaatttcctgtgggattgagatgcatttaaaatctgtaaacgtcgggtagtgttgcctagtgagtcctggagacctttgaagtcactgccactctcaccatggcttgggtccagatgcgccacagcctcttggggatgtaggcccttggaatctttttagtgccggactcccggccacaggcagtcccgcggcagcaggatagcagaacctctggatggactcttcctgggaagttttgctaatttgcagcagctggaccatgttcctcattaacatccatctgtcagcttagtcgtcacatcatttcaccgtggtggcagggattctatatagaaaaaacacctggatctcagcctttcaatggcttcaagacaaccagaagtgcctgctcttgaggctagtgggcctctaggcaagatgtccctgcccttcaggatataccgccgggcactcagctatgatgataccctcaaggaccctgcacccatgactcctcctccatcagacatgggcagcatcccttggaagccagtgatttcagagcacaagtatcagcacctcaccaaggtggaggaaggagaggccagtctaccctcccctgccagtccctgtcatcggccattgacagtgtggacaagctcccagtggtgaaggctaaagctacccatgtcgtcatgaattatgtgatcacaaaacagacccaggaaagctttcagcattttgggcaacaggcagggctgagagatcctggctacacacccacaagggtgtcaccactcagaagaccaagtaccttagagtagcagaagcactccacaaactaaagctgcagagtggagagataacaaaagaagagaggccacctgcatcagccctgtccaccccaagcaccacttctcacttttcacctaagcagagacccaggggctggttcacttctggttcttccacagccttacctggcccaaatcctagcaccatggactctggaagtggggataaggacagaaacttgtcagataagtggggcctctttggactgagatcccttcagaagtatgattctggaagttttgccacccaggcctaccgaggagcccagaagccctctccaatggaactgatccgtgcccaggccaaccgaatggctgaagatccagcagccttgaagccacccaagatggacttcccagtgacggaagggaggaaacagccaccacgggcacataatctcaaaccccgtgacttgaatgtgctcacacccactggcttctagagccctttctttccagggattctggtaaagaaggtttcttgcactccactgcccttttatcttggctttgacataggaaaggtatatttaaaaacttaatcagctgggcacagtggctcacgcctgtaatcccaacactttgggaggccaagttaggtggatcacctgaggtcaggagttaaagaccagcctggccaacacaatgaaaccctgtctctactaaaaatacaaaaattagccgggcatggtggtgggtgcctatagtcccagctacttgggaggctgaggcaggagaattgcctgaacccaagaggcagaggttgcagtgagccgagatcacgccattacactccagcctgggcgacagagtgagactccgtctctaaataaataaataaataaagtaaaaaacctgttaaattgaggctagagctggagatacaattggtttttgagaaatattgatacaaagcttgcccctgttgtgtggaagaagccattttgtactgctttaaagttagactaaatattctcagcagtggtgtatggggacctcattacctattttttcatcatttaccctaggtaagaacttcaatcactgcttactaggtaaagaatgtttgtgctgttccaaaacccaggcttcttgattccttaccactatccatgtgagcattgacaaatcatggcgtagaggtgctcactgactggctgagacgactctggccctgttgatggctggtgctgtgctccagccttatcagtaaggggacccaagatttgtttgggacctgggtataggtaaaaccagacttggcagggacccctgtttctaggctgaaccttgagtccccctgctttttggtagacctaatggatcactgtcctgcaaccagttcttcatgtggggcctcttaggccagtgccaggggaggcatgcttctctttctatgccacagaacaaacactagtctagcagagcctttcttgcactttaaagtgagattaatttagctgcaatttggttaaaagcttcctaagagagaaaattcagtctactgacttggtataggtaaatggacttaaacttttttaaagtaaaggagatggtaggtacagttagattatagtcttgaggtttatgtggagccagtggtgttaccttattttgatttccttgttcaggtcagggcctggaacgtctgtgggaggaggagaatgaattcaaaattttctgtatgaaagcatttttcaccaaaatgagcctcatccctttatgcaatacataaccttactgagggagggaaatagggaaaccacttttttatttctcctcactgtgtacaagttcagtttttgtcttgaatactgtctcaaatacccaattttttgttttggatagtaccttgtctgtgtaagaagctggcctttccatagagaggccctggagtctaaaattataagaattaatttatttgtgtcttctattgtgatctcttgttttgacaataaaaatccttactactttctccaaaaaaaaaaaatctgcaaatgttgtaggttggcaaagataatgtttgactgtggtattaatttctctttgctttggtgtcctaatatgtaaacttaggaaaacttattcccaccttacagtgttgctgtgacaatgaatgaccccaggtgtcaaaaggaccaggcacctagagggtatccaaagaaaggaaactataattgttgttcacatattcgaagttctgctacttaaagtgttagctacatttgtgtgtagaataattttagagacaataaggacattagagaactttttaaaaacttgttgcactgttagtaatatctcaaatatatttggtgtgtacttttacaaagcaactgtaaaaaccaggtccattatagtttatttatgataaaatacaatgaagtagttatttcacataaatacaatttacatgaaaagaattacttttatgctcaaactatgaggattcaaactaatcatttgtactcagaaaacagaaaagggtgctgctttcatttatttcagaagcaataatacatctctagaggaggataaagtggtgttaaaaaaaatttgttgggactgaagctgattttgtagttcctttcaaggctcatgtgtctttccaggccacccagactgtgggcacaatgttgcaacaccaatgttcctaggaagcggtcccactgtcccctgcctctgtctcgtaatttaagacaacttttctcaacccctgtgtgcctgactccctatcccaccccagcggaacctcccttgataatggacatgtgcagccagttatcttgttgacattcttgctgtttagttcatagcctaaagaggtacatgacggcacctcaatttggacaccagggtgagagtgaccgtgaaacaatgatgtcaggtgtatgaatattgtcctttgactttcctgtgatgctggtgcagacttgctgagatctgggcaatcctgggcactagagccttgctatgcactgcagagaagtggaaataataatatgaaaatggataccaaagtcttaacatagagcttactatgtgccaaatataatattatcctcattttacagatgagaaaatggaggctcagagaggtgttagtgtattaattagctattctgcacagcaaatcacaaaaaatttaggtgattaaagaatcattcatgattctacaggtcagcaatttcaggttggctcatctggatggttcttctgctagtctcactttgttcactctcagtgctacatctatctggtgacctcataggggctcattgttttaactggtgacctcagcaagggccaggccatccctgtcccacatggtttcctctttcggttggatacccagaattctttgtgtggaggcaccatattctgaaagagagagagagaatagaagcaccagaatctttcaagacctaggattgaatgtcacacaaatgttacttctgtgataaagcaagtcacatcactggcccagattcaaagaatagggaaacagattcctccacttgatgtgacaagtggcaaaatcatgttttagagagctcacagaaagtaatggaatttgtagcctttaaaaaaaaatcttaattttttatagtaagtaaaatgcccaagctcatatagactggaaatactggtgccaggctttgacccaaccagtctgcttcagtgttgggtttttaaccacactggttatactgacggggaagaatttcactttctgcagtgaattatgcttcaccacctgctttggccctgtttgtgcaggggtgccttcagcagttccacccctcgaactcaggtactagtttgagacctggaagacaaatttttgtagtgaaagtctgccatgatcttttcctcatagatctttgtgaaaattgactcttgcacactgactataagtaacccagcccgcaagtctactaatgcagaggcccctaatatatatacatattcatagaagtctgtattggctcaagtgtaaaagtaaccatgaagctattctacagataaaactacatgcttggttttaaaaaaattctttactgtaatgtctacaaacaataaaggatttattcttattacgatgaattttactggatcaaaatctaagtgtcaatatgaacctgatccaaacagtgatttctgggaaagagatgacactagttttatatatatatataatatatattatatatataatatatataatatataatatataaaatatatatataatatatataatatataatatataaaatatatatataatatatataatatatataatatattatatattatatataatatatataatatattatatattatatataatatatataatataatataatatataatatatatattatatatattatatatattatatatatataatttaattaattaatttatttatttattattatttttgagatggagtctcgctctgttgcccaggctggagtgcggtggcgtgatctcggctcactaaaagctctgcctcccaggttcacaccattctcctgcctcagcctcccgagtagctgggactacaggcgcctgccaccatgcttagccaatttttttgtatttttagcagagacgaggtttcactgtgttagccaggatagtctcgatctcctgacctcatgatccgcccacagctttttaggaatcagttatattccttttttgtgttgtgtataaggatgagattgtatttatcttttgtgaatattgtagttttgcaagaaaaaagattcaacttacttaaaataattagaattatgggaaggctattttgtagcaatgatgaagagagggatctcttttaaatttaaagacagtaactagtaggtctcatggagacttaaatggaaccccaaaaaacagctgtatggagctcagcataaagaattcctgaatctccagggctgggccatgaatgtgactctacttctctccagtagtaaacaaagacctgcttattaaatcgaattgctttttactgctatggtggttaatcttttggtttattctatgtttttactatctcatatcctctacctttccctttactcttgtaggctgaatacatcctagtactccagaaagaccaggctaggtacagtgtcaaactcaaagaaatttagtccagtgaccagcactaacgtaaaataattttaatctttaattacatatttcaaaaagttttctttttcttttttcttttctttttttttttaagatggagtctcgctctgtggcccaggctggagtgcagtggcgcaatctcggctcacagcaagctccgcctcccaggttcacaccattctcctgcctcagcttccagagtagctgggactataggcacccgccaccatgcctggctaattttgtttttgtatttttagtagagacaggggttcaccatgttagctaagatagtctcgatctcctgaccttgtgatccacccgcctcggcctcccaaagtgctgggattacaggcgtgagccaccatgcccagccaaaagtttttagacatttcaattaacatgccttagaacccctttctctcattccattcaagttttttctgttacattcggtaacattccacaaaactctttcatgctttgcaaggctcatgctttgaaagacatgcccaattgtagagtgtttttccaggccaccctggactgtaggcatgatgttaccacacccgtattcatacagagccatcctactgattcctgcccttgtaacgcaggacctcaagctccctcaacccttttgtggcaagttcccagtctgaccccagctgaatgttccttgacttgattatgacttgattatgaaaatgataacttcagccagttatcatttagactttctcgctgtctggttgcttttctccactccagtgcaggcttttctttttcccttcttcaccattccctttatttctgttctgcctctctctctttctccttcaattcagtcttattcatgcaactatcccatcctgatattccccacaatctggataattaaatggccagtacagggaaatattcagcaaggctttctcttagtgaaagagtgaagggtggaagagagaaagaagctaggaaaactcatacattaataaattttagccctgttatactaacttgtcttcaggttttctactttctcatagtccctgtggcccctcactcttactcttaccatatggcttttctatatatccttttaaattcatttcctaactctaccttcattgtatttccttattctttttccaaagagaaagaaggaaccttgttggcctagatttggggtccagtatggttcaattggaaaagggctgggggaacctaaaataattagaattatggcaaggctattttgtagcaatgatggttcatgtgatgcacatgagacctctgcttcagcagggttggtaaggaagggcagtgctttaggccagcatgattgacatgtgaagggttatatagttttggttccttctttctttatttatttattatgagatggaggaagtctcactctgttgcccaggctggagtgcaatggcgcgacctctgctcactgcaacctccatctcccaggttcaagtgattctcctgcctcagcctcctgagtagttgtgattacaggtgtgcgccaccacgcccaactaattttttgtatctttagtagagacggggtttcaccatgttggccaggttggtcttgaacattgtgatctgcccaccttggcctcccaaagggctgggattacaggcatgagccactctgcccggcctagttttggctccttctttaagaaatctctggaggatgcaaaatgtgctaggcttgcatggactccagagaggttaaattgtttcttttacatttatctatgaaagcctgaagtttttgaaagaacagctctgcatgatatatttacaagtttatttcaataacaataatgggtatttcatgtcagataagtatggttagttatctaaattggatttgcttttatcctaggcagacttctttttaagtggtctttctcgtagtgtctagattcttttatttttcctgtggaagtccagttgtttcagtgccatttgttgaaaaggctatcttttctccattttcttgtcttgctcctttgtcaaagattagtttattatatttatgtgattgctgagctctctattctattctattgatctattcatctgttctttccccaataccacactatcttgattaacgtagctttaaaataagtctgaatttgggtagtgtcagccttccaactttatttttctttttcaattttgtgttagttattcctggtcttttgcctctccatataaactttagaatcagtttgttgatgtccagaaaataacttgctgggattttgcctttcttacgtcaacatgccaaagaaagactttatagtgaaagcagctgcatacattgtctcctctccccactttttcccctcttcctggataaaggtacatagaaaaaaaaatgcttttaaaaaagaaagagaactaaaagaaaaccagccatattgttctattatggtcagaaaatcttgatttacagatgttactgacagatgggaagctgactctgtgagaatgggatttccttatctttcattaaaaaaccttaagaaaatctctaacaaaaatcattaggtgagaggctgatgagccagaattatatactgagctgtgtgggctctgcatggctttcacacatctttcaacatgttttagctctgggtagcagcaatatagaatattgcagacaattgcagttattgtttttaaaaagttccttatatggaggtaaataaaaagtggttgcttcactggcaactggaagatatcttattttagaataaatagtactggttctttgtaatttgaaaagggaacaggagcagtgttgggagtgggcaaaggaaggaagaggccgttccttttattaaattgttttgcttccagcactacatgtcattaggtcaagttgtcatactacaaacttgcggcctagttacctcgtgaaaaaaatattttagtctgggaaatattgttccttaggagcaacaggaattcttcaatctattgtgaacttttcgtgctgtttaaagcctggtccatggacacgcagcatcagcatcacctggaactttttcagaatcgtctcaggcctcatcacatacctactgaatcaaaatctgcattttaacaaaattccctaagtggtccatatgttcaataaagtttgagacctagtggcctaaaatatatcattgctgtgttccacttttgcttctgaggaacacgggatagattattttggccagtagtggtaggccaccactgagcactttttattagcaaatagaccatggctgcgtatctctctctgattatctataatatcatagaagtagttgctacagtaatcaggactctatgctagtaaagcttaacttccacatcatcattataccaaggagggtgcagaatgtaatacactatcacttttacttgtctgctttatctattgaagactggatccatctgattcaaattgaatgagtgaaattttcctcaaagtaaatatggtctttgtgaaactatttatcctggtttccagaaattacaaatttctctaattataattagggaaattgagtgctttttctcgtttctgtagcgtgtggctggattttcagagttaaatctgtgagatattattgtaacagtacattcttctgaatagattttcatagcatttttgtcatttgttcatttcctcattcacttgctcatttaactaacatttattaaatgcctaacacatgctaggcactatgttgaactagggatgcaagggcgaacagcacacagtgtatgttgtggaaggtgcttggggagagacaacaagctttttggaaaatgtgaatagttctgtatgcctggagtttggcattcagaggggatgtggtgagaaatgaagttggaaagaaagggaagatgcagattctgaagaactttctagtgctgtgttaaggagtttgagcttcattttgcagcagaggcaacactactgaggcagtgaatttcaaagtaagagttgcaacccatgaatgagtcatgaagtcatttggtgagtcaatattagcagttttacaaaatggaaatacagtggaatagaaaatatcaaagagcattactgtagtaaaaattttggatacgtgtgtgtgtgagatgatcatggtcaaaaccactactatcaggggagtcaggctacccaggggaaccaggcaagcacagttgacctaaaaaaaaattaaacccatcagaactcagcagtatcataatcctggtccatcgaagtgataatgctttgttctagccagctctcagaattgggatactaaactggaagaatcggtgtttgcaatttataaggaacacaactaaatgaaaaaatgatttacctgtggttagcttctaagaaagtactaagtttttatccatcttgtaatgtctgtatgtaggtgagcctatgacaaaggcaaaccattttacattagattacactgaaaggtgtaagtggtgacagagcagaatcactatcatcttatatatgatttctgcctagggctacatagctctctgactgtttttgttactgtagtaaacacagttactgaaagcaaatttgtcgtgtactcattgtacacaataaattttaattttggactgtgttatgtgcagagattactaactcataatagaggaactctgttgctcaaaaaatgtttgagaaatgttaccccaataagatctgaaaaaaataatagtgtttagaaaaacgaggtgggaaaggagcagggtcacatgcaagttacagagatgagatatagaaaagaaggaaaatggtgataataagccgtattagtcagggttccctagaggaacagaactaataggagagagatatatatatacacacacacacatacacacacacatatacacacacacactcctatatatatatatacactcccatatatacacacaaatatatatatacacacacatatatacacacacacacatacacacatatatacacacatatatacacacacatatatatatatacacatatatatacacacacacacatatatatatgagtttactaagtattaacttacacaatcacaaggtctcacaataggctgtctgcaagcttgaggagcaaggagagccagtccgagtctcaaaactgaaggacttggagtctgatgttcaaaggcaggaagcttccagcatgggagaaagatgcaggctgggagactgggccagtctcgccttttcaagttttttctgcctgctttatattcactggcagctgattagattgtgcccaccagattaaaggtgggtctgccttttccagtccactgactcaaatgttaatcccttttggcaacaccctcacaaagacacccagggagagtactttgcatccttcaatccaatcaagttgacagtattaaccatcacatcagctgtcttccaaacctaaacatatgtataggtagagaatagagttctattaatctggcaggtaatgaagcaatttaaaagaggtcatattggtgcttccaaaccattgaaacaccttgaatacttacttcctttgtaaggcctattctctacactaattgtggaaaacctgggatttgggggatgcatttccatagtggttacaaacacagactctggagccagactatttgtcttcatcccttactggatatacacatgaccctggacaagttactttattcctcatttatccctcatacaagcagaaataataatatcacctatcttttagtgttgtcaagacagtctatgagttgatggtgttaatgcttattagatcagtacctagcacatggtaactgctcaagaaatgttcctacagtggaaattagttttataacttagaacattgtgatcagtgtggctcagccatgatcaaggacatttctggcaagcttatgtcataaataaggacaaaagaagagatagagcaggaaagagtaaagaggcaatttcatgctgttgcaaaacaccacaagtttatgagagcagtgcagggaaagagatgaaagatgagtcatctataaaacacaaacttcccttcccccaactattctgttaagaataaagaaaatgattcagaaacaaagaaataatagaagagaaaacaaaacaaaaattaataaataaaatatgtatggaagttggaattcttttcagttatcatttatttgaacattatcagatagccaatggtatgcttgtgctagtttgtaccagcccatgagagctgattgtgtacatctcttctgaactccacattcattgatattgtgttggtagttttgaaattggctctgtcaggagtatttacatcagaaaaattagctaacattacaaagcaaggtctttttaacttggagagctgcttgttaacatttaccagtctaccagtgtaggtatctcttataatgttgacaataagcaataaacaacattctaggtattacctgctattattactttaaggcatggttttcttttgtcatctcacaatcaactttaacccagatttttgcttttttaaaaagtattttgactatattcaaaaagaattgctttgaatactactttgtaattttatggttatttgtgagatattgtttcatgtctagtctccttctaggaagaggaggtgggagagtatatatgttgcacagcctgtatttaaagagcctggagtagtgtatgacccataggtgagtgaatgaacaaatatgtgaatgaaagagaagatagaatataaaataaatctgagtgaaagacaaagaatatcctctccccctgaagccccttaacctcttcagttggaagcagtgttagaaacgtagaccttgaagtgagggctctctctcaaatccattctctggcctatttggttcttaagctttgctgcctatttaaatcacctgggaactttaaaaagcttaagtccccaagcatgccctaaaattcacaatctttcagagtggatctaaatatcaatttcttttaaagctcccaggttattccaacatatagctaagtcaagaaccagtgctttctaggacctggaatctggcgctacgtcttagaattcccagtgtaggggaagggagttgaattgggagggaatctgaatatctgcctttgagcgactgctgaaaatgtaactggtagttactgtttggatcagcagatagggagtggtctgaattcctggttacggctttaaatttttttttattttaccttatctctgttgcagaaatattcgactgccttctttctttctctcctttccaccccctacgttcttgactattcttgctttcatgctctctcttaggatctcaggtccatggcatttaattaataatatgctatcattatcatatgggcaatgatcctctcttgtctgccaaggaatgcagacaacctctagaaactagaaaaggcaaggaaatgaattctcccctagagcctctagaaagaacacagccctgttgacccatttcaaatttctgacctccataattgtaacatatagattagtgttgttttaagtcactaagattgtggtactttgttacagcaccagtaggaaactaatacaaacaccctgtgcattagtatagagtaactctttatttaggttttgtttgatattattctttgctaacggaaacctggtatgatcaaggtattgtgtgggcatattcttcaagaaagaatagaccccctctcagccctagtggagccaagcagtaggattcagagaccctggacaagacccaggactatgctggcttcaggtgtgacccagcatagtgccagctatggaggccatgagagtgcttgcatcacttctcccctagttccaggcagcccataatggagaatatccttctgattaggggaaagagagagagaggagagctggagactttgtctggtagctcagggattcttccttatcttacccaagtccatcagagcagtgtacctaggagtctgcagtactcttaggctgccccctagtactgataagactgcagtgaccacaggcttagatcatgacactcaatctcttttgaatacgtggaaagccctttcaagaatgataggtacaaacaagcccagactgtgaagactggaataaatactgaactcttcaatgcccaggattgacaaatgttcacaaacatcaagaaaatatgacttcaccaaatgaactaaataaggcaccagtgaccagtcctggagtgacagagatttgtgacctttcagacagggaattcaaaataactgttctgaggaagctcaaagaagctcaagataacacagagaaggaattcagaattgtatcagagaaatttaacaaagagattgaaataattttttaaaaattaagcaacattggaacacccagatacataaaacaaatgttattagagctaaagacagagatagatagactgcaatacagtaatagctgggtacttcaacacctcactttcaacactggagagatcatctaaacagaaaatcaaccaaaaaaatgtcagacttggtctgcactatagatcaagtggatctaatatatatttacagaacatttcattcaacagctgcagctacacattcttctcttcagtaatggaacactctctaggctatgacatatgttgggccacaacacaagtctcaaaatttttttgaaaaatgaaattatatcaagtatcttctctgaccaccatggaataaaactagaaatcaataacaagaggaacattagaaactataaaaacacgtggaaattaaacagtatgcccctcaatgaccaatgcatcaataaagaaatttttaagttttttttaaaatttcttaaaacaaataaaaatggaaacacaacataccaaaacctacgggatatatcaaaagtagtgttaagggagaaatttaaagtaataaaatcctacatcagaaaagcagaaaaccttcaaataaacaatctaataatgtatctcaaagaactagaaagacaagaacaaaccaaaccccaaattagtagaaggtaggaataataaagatcagagcagaaaagaatgaaattaagacttttaaaaaacacaaaagatcaatgaaaggaaaagttgttttcttgaacagataaacaaagtcaactaacctttaatctgactgaaaaaaggagagtgactcaaataaaacaagagacaaaaagggagacattacaactgataccacagaaattcagatgatcattagagactgttatgagaaactgtatgacaatacattagaagtcctagaagaaatggataaattcctagacacctataacctatcaagatagaaccatgaagaaatccaaaagccgaatagaccagcaacaaataatgagacaaaagcagtaataaaagtctttcatcaaagaaaagtctaggacctgatggctttactgctgaattctaccaaacacttaaagaagaactaataccaattctactcaaattgttacaaaaaaatcaaagcggaaggaatacttccagactcataccacaaagtcagtataaccccaaaacaaaaaccaggcaaagacacaacgaaaaaagaaaaactacaggccaatatccttgattagcatagatgcaaaaacctctaacaaaatactagaaaaccaaattcaacaacacattaaaaagatgatttattatgatcaagtgggatttatttctgggatgcaaggatagttcaacctatgcgaatcaatcagtgtggtacatcatatcaacactatggaagacaaaaaccatatgatcatttcatatcatatgaaattttttcatagataccaaaaaagcatttgataaaatgcaatatctttcatgataaaatctctcaaacaattgggtatagaaggaacatattcaacatgatagaaaccatgtatgacaaactcacaactagtatcatactgaatggggaaactgaaagcctttcctctaagatctgaaacaagaaaaagatgctcattttcacctctttttttcaacatagaactagaagtcctagacagagcaattagacaggagaaagaaataaatgacatccaaattgaaaaggaaaaagtcaaattatccttgtttgcagatgatatgatctgaaatttaaaaaatatctaaagactccaccaaaaaactatcagaaccaaagaagtgaaagatttctacaatgaaaactataaaaagttggtgaaagaaactgaagaggacacacataaaaaaatggaaaatatgccatgttcatgggttggaagaatcaatactattaagtgttcatactgcccaaagcaatatacaaattaaatacaatccttctcacaatatcaatggcattcttcacagaaatagaaaaaacaatcctaaaattcatatggaaccacaaaagatccagaatagccaaagccatcccgagcaaaaagaacaaaggtggaaaaaccgcacgatctgacttcgaattatactgcaaaactataggaatcaaaacagcaaggtgttagcatgaaaaagagacacatagaccaattgaactgaataaagaacccgggaataaattcatgcatttgcagtcacttatttttgacaaaggtaccaagaacatatactagggaaaggacagtctcttcaataagtgatgctggaaaactggttatcaatatgcagaagaatgaaactagacccctatctcttgccattatacatcaatcaaaaatggattaaaaatgtaaatctaagacctaaaactgtaaaataactagaataaaacactgggtaaacagtccagaacattgatctgggcaaagatttcttgagtaaaacctcaaaagcacaggcaaccaaagcaagaatggacaaatgggatcacatcaagctaaaaagcttgtgcacagcaaaggaaacggtcaacaaagtgaaaacgtaacccacaaatgggaggaaatatttgcaaaatacccatctgacaaaggattagaaactagaatatagaaggagctcaaacagtttaataggagataaacaatctgatttaaaatgggcaaaagatctgaatagatatttctcaaaagaagacatgcaagtggccaacagttatatgaaaaaaatgctcaacatcactaacattggagaaccacaaatgaaaaccacaatgtgatagaatcttaccccagttaagatggctttcatccaaaagagaggcaataataaatgctggccaggatggggagagagcagaaacctcatacactgttggtggaaatgtaaattaatatagctactatggaaaacagtatggaggttcttcacaaaactgacaataaaactaccatacaatccagcagtcccactgctgagtatacatccaaaagaaaggaaatcaatatattgaagagatagctgcattcccatgtttatttcagcactcttcacaatagccaagatatggaatcaacctaaatatccaccaatggatgaattgataaagaatatgtggtacatgcacacaatggaatattattcagccataaaaagaaatgaagttctgttattcagaacagcatagatggaactggaggacgttatgttgagtgaaatgtggcaggcacagaaagacaaatgtcacgtgttctcactcatatgtgggaacgaaagaaaaaaaatgaacttttggagatagagtagaatgatagttaccagagaaagggtagtgtgaaagggtagtgaagaggggatggttaaaggatacaaaaacacaaatagaatgaataaaatgtagtatttggtagcacaatagggtgactatgtttaacaataatttattgtatattttaaaataacgaaaagagtggaattggaatgttcctaacacaaagaaatgataaatgcttgatgtgacgaataccccagtgaccatgatttgatcattacatattgtatgcctgtatcaaaacatcacatgtacctggtaaatatgtataaccattatgtattcattataattaaaaataacttttaaaaaattaggccagtgttttaacttcaattccccttgccagtgatgattttttaaatgagcatgtagtacattcttgccataaagtctgaggttttccttacttttatgaagggcttgagaaagtacatacttcgttttctgcttttggtctttgaatcttttttgagatgcagtgcttggagatactgcagtcatcttatttgccaaagtgacaatcataagtacaaagcaaaccacactgaggaggataaagaaatccagtggaaagaactcagaactgtagtgaagtcattcagctgtggcatttatgactctgttactgccctacctctgaaattatttttatgttagataatacatttcccttgttgtttaaaccagttgaattgaatttttaactcataatccaaaacattctaatgaatgtatagaacaaatacatgtaaagaaaacaaaaaatatttattccaaccgccagagagaattatgatgatcacatcagtgcattaaatttagtgtatttaagtttttcccacatacatttgtagcaaaatagaaacctcttagtgtttgtctatgtctgtacatgaatatattatttgtttactgtttaatttcattttttggttgcattgttaaatatcttttgaaatattattaatgattgaatgatttgcattatattggcataccccaatttatttaaacattctttttttttttttacattactttatactaactcggagttgtatctttggtgaacaactgagtacataaattacataagtactcctaatattttattaagcatttctgaggaagttcactttatgatgtgctttgttgcctgattaccatcacattcaagaaattctttctaatgcctaaagtttttccatttctttcctggtatacaaaaatattccttccattattacttcatgatgggttattttaacattataaacataatgaaaccccattatttctgatttctgctttactgtcctaatgtttaacccaggctcattttattctattatttgaaaatctaatttttgtcattagtggaaagtttaagcaactcagttacctttctaaagctgtatttgtagctattaaaataatgaaaattagaagaaacataccagtatagacaaaattgtgcactagggaacttgtttttgctgcgaatatacacacaaacagttcttacaaagtaattgaaggaagcactctgaagagaactacagaattcatatgagctgtggctcccacaaagtaaaacctaaaagtctgatatttgtgagactcacaatatcaagacccactcatcctaagtcaaagttttccaggggacagctcctacctgtacacggagcagctagtggtctttcaatctgtcccattctaaaatctgaaaggacaaccaaggattgtcagacagttgaggaaagctgtctttccttctttcttttattgtacatgtgcaggatgtgcaggtttgttacacaggtaaacgtatgccatggtgttttgctgcacagatcaacccatcacctaggtattaagcccaagaataaaggagaacaaaacaaacgaataaatgaaacctggaagaaatggttaatcatagaagggaatttggaaataaactctaattagtatttttatacataaaaacatatccataagaatgtctcctcatttgacattttcccagtggaattagtattggcttataagtctcaaacttctgcaatgaatatatcactcaacagcgaccttttagctgatatttatataagaaaagtttatgtgcccaaactcaataatctaatattataagaaaaatgatatataggaaaagtatcaagctaccttccaaaaataaaataccttccaaatacatcaaaatcacaagtagttgttttgaaaagcatgtccagtgttcacaaagggatgcatgtgccgaatgttgacactaagagaggcatcatatcattttattcaatgtaaaccattctttgtgattgttactcttgcaaagaagacttgttttgaaaagagattgaaaaagatattgatggattctttaaatgtcacgctgagaaatcaagtactaaacttgttcagaatgtcaatctgaaatagttgatcatagtgataacggggagagccttcaatcaaaccaccagacaccgctcgctgaaaataatatggggactaaacaaatacagtgaagaatattatccttgaacttggtggactgtgagtgcctgactcttctaacactgtgccaaaaattctataaacataaacttgaagagagttaagtaaagtttgattttgtagtttttcatcctaaaatgacacctgcatcccctgaagatccattcatcatttacaagtccctacccaatgaaaatgacaaagaatctctgcctgtttcttgcatgaaattgccctttttgtcatccaactcacctgtgatgtcactttccataggccttgacaataactacattttaaccatccttccctttccactttcttcaagtttccagtttgcttttttcttcaggagtaacggatcatcccaggtgattgccctattttcattgtaaattttacctgcatttttctattgcatgtataaattgctgtatgctgattgctatgccttattggagaaaaatatttatgacgtaccatgaaaaatgggcatgttattgatacagagtagcatgcgtatgaacaatttgataaccattctaattgttttgtaatcaggggccaatattttaggattttatattttaaatgctggctttcctatgttttagttatacttaatgaaatctggtagatgtttaatttggccttttaaacaataggaaatcggtgacgagggcacatttccacatagaatatctcattttcaggaaggggtttatgatattaaatggggggtatgtgtctggatttaagatgagactgacttcataaatcaagaacaagcttctctgaaaagaaattattttaggagcaagaaaagcttttgaaaataaaaatattgctgaaattatatataaattagaagagttggaagacaaaaacaagaacatctccataatgtggagcaaataggcaaatctgtatctatatctatatctgtatataaaaggtataaacataggaggatcaatccaggaattcnnnnnnnnnnnnnnnnnnnnnnnnnnnnnnnnnnnnnnnnnnnnnnnnnnnnnnnnnnnnnnnnnnnnnnnnnnnnnnnnnnnnnnnnnnnnnnnnnnnnatttcctcttcccaaagcacatacaacttcgacctaatttaaattgctttgtccggacgattaaaaaatacaaaatctcgcaaatctactttatcaccacttttagccatctggcttgccaaaaaatgccttattcagaagcgcatttaccccatattgcaaaactccaggagtcaagtgacgactcacctcacactaggccaacatctgtgacatctgacgcttacaaccaaaattatgtcgcgatcaagaacgcgtaccttaatggcgaacatattctacgttgcgcctctaataaaaatgtctaagcgagttggccccaataatccttatacaacgcttcgttactcctttcaaacctagggtgaaaccatgtttagcccttttcacactcctcgggagaaaaccgtttcaatcatcctataaatgccaagtcccacaatgtcatctaacaattgtcgctttttgaggcacttatgactttatagaagccctagtccaaaggaattcattgccctcgttcaaccagacgtacaccccatgcagaaacaacgaaataacgaagaggagcaatattgccaaacccaataccatgagccttttcccctgtgttctcctagtagctttacagtttcatgtcttacactgaagtctgttatccattatgagttgaggtatgtatacagtgtcagataagggaacaatgtcattcttctgcatgtggatattcagtttttccaacaccatttattaaagagatcgtctttatccttataatgtgttcttggcacatttgttgaaaatcaattgacagtaaatatgtcaattatctgtgctttctatcctattacattggttgatgtttttatttttatgccagtaccatgctgttttgattacggtagtttattatatactttgaaattagggagtgtgatgcctgcagctttgttctttttgcttaagattactttgggtattctgagttttttctgagtccatacaaattttaggattgtgttttgtatttctgtggaaaatgacattggctttttgaaagaaattgtattgaatcttcagattctataaaatcttactaacgtgtttaggtgttgttgatctttttgctcctttggtactctgtaagaactcttagtctgagatttctgatttttatttttggaaagtttttaccatttattcaaatattttcttccctctaattattttatttttctttctggaatttttattaaacaggcttgatatttctttccattttacttagtttttcatttttttttaactttttaaatgtttttctgggaaagtttcttcttttattttattacatttttgttttattttgtgtttgcatgtatgtgtatagatacatgaaatcaaaaaagctggagaattttaattttctctcttctgggagaattttgaaatataatattcttgctcagtaatttgtttattttgtatccactctgtcttttcatcccaattcataattgtttcatttcaaattttgtattatttatataaaaaccatccggttttttgatataacttccatttcctcttcatgtcaccagaatcctccttaaaatttcttggaggatatttattatgtttcttttaaaattttataagataattaacactaggaagcaaaggataagtgtaaataagagttataaatatttccatgaatacttagagaagatcctggaacagtcaagaagacaataaggaaatggtaaatttgaaggatttagaccagttgtggagttggaatgatctgtagaagaaagaacattccggtaaggagaatagtgaaaaaagatttctggaggtagtagggagtattttatagaaattcaaataagattgttttaagcaacatcatctactgtgagtaaggatagtatttagaaagctagcttgtgtagaaatggtccacaacagtcaactatgggaaatgtgtaaataaaggatgattgagagagtttctgaatggacagttgggccagattaaagtaagatttcacaagttagtggtcaaccaaggtatgtgatcttaataacattttctaacaataccaaagagtaaatgggcttgtctgggaaatatagtcagcagagaaggcgaacaccaaaagaacactgaaataaaaggtgctgtccagaaaatgtgacagttgttctgtttttaataataggaaaatgatgagaaaacaggaggagatagtggggaagatgagagcgaatatggacaggaatgagtaaatatgatgggttaatctatgttgtaaggcacagataatagggctggacacagtaggaggtaagtatgagatgtagcacagaacacattggtagacgtttgcaaatagaggagattaaggggcatctgatataactgtcccagttgaaaatttggtgtggctgggcctctagacaccaccttaccctcatcacccctgacagaggagaggaagatgttttttactcttgggactccgggccttgctggtaataaggtcctctgagaatgtaaactcactggggctttcaaaatacaggaggagaaatgttagatcctaagattgctcaagaactgattaaagctttgtgtttccatggctatagatagcatccttgtcctcagtacatctttcataaatacatgactatgtcaaaagaggggtagggtaaaaatatatagctgaatcacttcaagatgttactatttattggagagaaaaaagcaagtaaaaatacatatttttatgtttcctacgtcatattcctatgtgaaggacacaacaatattgcctgcatttcttcctgaagagcttggcctgaattgacttctcaccaaagtcctaaggctctttttactgattagtcctgctctgtcttctgttgttgtcttagaccttgatagtttttgtgtcctcctacagcatgtgtatatacagacagatttctgttaaaatgagtggtggatgggctactgacctttatgttgcctactctggataccagaatctgaataaccataaatatatgaatatatgagtatatgtggtagcattttttagaaattcatcatattttcatttgtcgatggtaaccttatccactgtgggtaaagaaacaagattctgtgctgtgcattgttgctgctggttcattgtcttgtccactgaagcttcctattctgaattctgaggccctttttaagtaggtcttgggctttgttttaccctttttattctaaatattgagttctatattttaataccttgtcttaacactgccacctggaccactgaaggctattggatatgctacagttcatttctcttatctgactgcactatttctgcaagcttttctgtagatatcagacctttaatgcctttcagcaataattaaaaggcattaaaggtctgtagtgggcaattgtggtttgttattttgttacatactgataatgtctatcctttttacggtaaaaaatttccttctgaatatcaccccttgcccaacttagaccatagtgtttgactagaagtgtccctgctcccagctccaggaatcttccatgattagtgtaagccatagtgattagtctaaggttaaatacatggcccaattctgaccaatgaaaattagtctcaggatgtttttgccacctttgggatacaaaagtgtttcaccttccttctggactctaggtaagtactgatgcagccatcttatgaatactgtcaactggtgacaacagtaaggcttctgctgacaaagggaggcacaggagggagaaaaagcaagctggtcctagatcaaggttcactacaggagcactgaaattcccaagagatcccaaaaagccaactgactatattgggaaaagcattaaatattatctttaccaaatggcttaggaaaatgctatttaattattttatgctcaatattgagttagttgcatttatgtctaatcttgacaactaatctttgaaggaaaagagtataagtttattcatatacacctgtgtgagacagagatacaaaaaagcacagtgctttgtacaacatagtggtacaacatttgttgacttaaattgacatgtatcctaattttttccacaagggtcactgagtctatccttattctgtatttataaataatgtgagtcatatagctcagtggaaatacagcagctctaaagtccacgcaatacttactaaagctttgttaaagaacgttgtgtaggaaaacaagattgtacatatatataaactgtgatcttgaatcattgcttttgagagctttataataagttctcaacttgtctaacattttatatctctttatcatgaaattcttgcaaattcggatggaaggcctccattaatgaaacatttgtaatagtgagagtgggaaaatggaatagaagattaacaaaaggtctgggttagagtatgaacactattgtccaacatggagtgtgggaaacactggacaatgaagaagccctgattaattaactggttatcaccaagggcttatccagggatgataattatttggggccttattttcaagaaaggcggaacttgcttaatctgggtatggacacctaattggcccaccatgggagttttggggaggcacttgaaccaatggtaggaaagcccctggaataaatttaccttggggtaatcgcccaaggggcgtttattcttggggggtggtaaatttcttttggggggccttttattccnnnnnnnnnnnnnnnnnnnnnnnnnnnnnnnnnnnnnnnnnnnnnnnnnnnnnnnnnnnnnnnnnnnnnnnnnnnnnnnnnnnnnnnnnnnnnnnnnnnncagaagttgtcaaaattcacacatgcatttacctttcctcctctctacttctatctaatgtatacgttctttcacgactcgctctctctcagtaaaacttctctttacaccctttttcgagtcgcaccctaaatacctggcctctttctctcttaaacactctgctccacatacacgtcatcctcgttaactaagatttgttcaattctttatgcacattttctttgcattgattacttttctatctacttcattgcatgttgccttttctttcttcctttgcatttactcattcctgtattcctatggtaaatttcctttcctaaattgtcttaaagattttttcgaacttcctttacaatgggtatcctaaaatacattcctttctaatatttacttcaatgatgggttattttcacattataaacttaattgaaaccccattactcctgatatctgctttaatgtcctaatgtttaacccaggctcattttattctattatttgaaaatctaatttttgtcattagtggaaagtttaagcaactcagttacctttctaaagctgtatttgtagctattaaaataatgaaaattagaagaaacataccagtatagacaaaattgtgcactagggaacttgtttttgctgcgaatatacacacaaacagttcttacaaagtaattgaaggaagcactctgaagagaactacagaattcatatgagctgtggctcccacaaagtaaaacctaaaagtctgatatttgtgagactcacaatatcaagacccactcatcctaagtcaaagttttccaggggacagctcctacctgtacacggagcagctagtggtctttcaatctgtcccattctaaaatctgaaaggacaaccaaggattgtcagacagttgaggaaagctgtctttccttctttcttttattgtacatgtgcaggatgtgcaggtttgttacacaggtaaacgtatgccatggtgttttgctgcacagatcaacccatcacctaggtattaagcccaagaataaaggagaacaaaacaaacgaataaatgaaacctggaagaaatggttaatcatagaagggaatttggaaataaactctaattagtatttttatacataaaaacatagtaattgaaggaagcactctgaagagaactacagaattcatatgagctgtggctcccacaaagtaaaacctaaaagtctgatatttgtgagactcacaatatcaagacccactcatcctaagtcaaagttttccaggggacagctcctacctgtacacggagcagctagtggtctttcaatctgtcccattctaaaatctgaaaggacaaccaaggattgtcagacagttgaggaaagctgtctttccttctttcttttattgtacatgtgcaggatgtgcaggtttgttacacaggtaaacgtatgccatggtgttttgctgcacagatcaacccatcacctaggtattaagcccaagaataaaggagaacaaaacaaacgaataaatgaaacctggaagaaatggttaatcatagaagggaatttggaaataaactctaattagtatttttatacataaaaacatatccataagaatgtctcctcatttgacattttcccagtggaattagtattggcttataagtctcaaacttctgcaatgaatatatcactcaacagcgaccttttagctgatatttatataagaaaagtttatgtgcccaaactcaataatctaatattataagaaaaatgatatataggaaaagtatcaagctaccttccaaaaataaaataccttccaaatacatcaaaatcacaagtagttgttttgaaaagcatgtccagtgttcacaaagggatgcatgtgccgaatgttgacactaagagaggcatcatatcattttattcaatgtaaaccattctttgtgattgttactcttgcaaagaagacttgttttgaaaagagattgaaaaagatattgatggattctttaaatgtcacgctgagaaatcaagtactaaacttgttcagaatgtcaatctgaaatagttgatcatagtgataacggggagagccttcaatcaaaccaccagacaccgctcgctgaaaataatatggggactaaacaaatacagtgaagaatattatccttgaacttggtggactgtgagtgcctgactcttctaacactgtgccaaaaattctataaacataaacttgaagagagttaagtaaagtttgattttgtagtttttcatcctaaaatgacacctgcatcccctgaagatccattcatcatttacaagtccctacccaatgaaaatgacaaagaatctctgcctgtttcttgcatgaaattgccctttttgtcatccaactcacctgtgatgtcactttccataggccttgacaataactacattttaaccatccttccctttccactttcttcaagtttccagtttgcttttttcttcaggagtaacggatcatcccaggtgattgccctattttcattgtaaattttacctgcatttttctattgcatgtataaattgctgtatgctgattgctatgccttattggagaaaaatatttatgacgtaccatgaaaaatgggcatgttattgatacagagtagcatgcgtatgaacaatttgataaccattctaattgttttgtaatcaggggccaatattttaggattttatattttaaatgctggctttcctatgttttagttatacttaatgaaatctggtagatgtttaatttggccttttaaacaataggaaatcggtgacgagggcacatttccacatagaatatctcattttcaggaaggggtttatgatattaaatggggggtatgtgtctggatttaagatgagactgacttcataaatcaagaacaagcttctctgaaaagaaattattttaggagcaagaaaagcttttgaaaataaaaatattgctgaaattatatataaattagaagagttggaagacaaaaacaagaacatctccataatgtggagcaaataggcaaatctgtatctatatctatatctgtatataaaaggtataaacataggaggatcaatccaggaattccaatatctgatcaacaggagttattttttaaaggaacaaattaaaacacagaggtaaaggactgagagttgccaaatgtaaaaggcacacacagggctatggaaaaagagtaaaaaaaaggacacatgtttcaacacatccccataacatttcagatttctaattacaaagagatcaataaaatcttccaaacagtaaccaagataattattttattttattttattttattttactttatttttttgagatggagtcttcttgctctgtcacccaggctggagtgcagtggcgcgatcttggctcactgcaacctctgcctcccgggttcacgccattctcctgcctcagcctcccgagtagctgggactacagtcccctgccaccactcctggctaattttttgtatttttagtagagatgggctttcaccgtgttagccaggatggtctcaatctcctgacctcatgatcagcccgcctcggcctcccaaagtgctgggattataggcatgagccatcgcacccggccgtaaccaggatatttataagggagcaaaaatcaagctgacaatatagacaggttagcaccaacagtggatgctaaaagtcaataaagtaaggtcttcaacattctaaaggcagatgatgttgaatttaagtcaaactacagccattttaagatatataagaatgtaaagagcttactttccttattattttgaagaagttacttgaaaaatattatgcaaaatataggtaaaatacaagaaatgagaagccatgaaattaaagaaaccggagaagaaattgattgaaaatgaatttaatgatgacagctatagagcagtcattaaaaataaaacaaagcaaaacacaaactgcagtcatcaaaattggaagtcagtggtcttctagaaggaagtcttaaaagaacaaacacttgaattgatcccaagcagaatatatgtgatgttaaaagttgatatgtaatagtaaaaatgatgatgatgataataagaatagctaatgcattttcacatagtactagacattggcctaaacacagtaggcttgttttctcattaatccttcaacagtcctatgagggaagtactgttattatcatccacattttatagataagaaaacccaagacacagtgaagtaagataatttgccttaggtcacagttagcaagtgatggacccatgattcaaactcagacagcccaattctagagcctatactctaaactactatactgtggtgaagaagatatatcttcttcttccagctagaaaaaagaaatacaacccaaaattccaggaaaaattaaataaaaatactctataaaaaagttatatccatataaaaagcagattaaaataaggtatgctttagagacataaatatattcacaaggatcttgactataaagtcactgaaagggagatgtatttaaaacatacacattggctttgtagttaatattagtcatggtaaataaaatgctgtttatggttttaatcttttataattaaaaagtaggccaagggaagaatacttaatatcctgtggaacagaatgaaaaactatcagtcttgacagagtaaatgtaaagttatagataaaagacatttggagaaagaagaatgcgaaaataggaggagagaggtacagagatgaggtatcatctcacaagtggggggcaagataaactgttggaagttaatagactaatggagagggcgttaatatattactttaagcgtcaaagtagaagaaactacatgctagagtttaagaaatacatcccctaaaacctttccaaataaattattgaagacagtgttataactgtaagaaaattagaagctgtgggagaagcaacagtgggaaatgacaaaagtgaaccaatagcccatctacccaagaaggtaatctatatctatcatctgaaatcaataaattaaaagaaaagcggtataaggcaatttatttagagatggtagtgcccccagcagtagaattaaaaaaaagtggtttatgggaaataggcaggcacctattcttttttattgtagcccttctgattttaaaccacatgctcataattctttgataaaaacattttttaatgtaagaaataaaaaagttgaatttataattgaaaagctctcaagaaagaaatttccaaacccaggtgatttcactggagaattttgccatttaaaaaagaattaacaccaattttacacaaactcttccagaaaacagaattggaagaaatagttcccaacttactttatgaggccttcattaccctgacacttaaaccagagaaagacagttcaatagaaagaaagttgcaaacgaatagctcttatgaacatgggcacacaaaatatcaatataataccagacagaatccaacaatgtataaaaaggattatacatcatgatgaagtaggatttattccaggtatgcaaggctggctcaaattccaaaatcagtgtaatctaccatatccatcaagctaaagaagaaaaaaatcatatgattacaccaattaagaaaacacttgacaaatttcaacacccatccatgacaaaaattctcagcaagttagtaatacagagatttctgaatttgataagagcattacaagaaacctacagctaacatcatattttacggtgaaagacggaatgtttttcttctaagattgagaacaagtcaaagatatctgcttctcaccactcttatgcaaaattgcactcaaagtaaaaccactaagagaaacaaggacaataagtgaccatatgcagattgtaaaggaagaaatacaagtgtatttgcagatgacattattttctatgtagaaaattccaaagaagctacaaaaacacctagaggtaataagtgagttcagcaaggtcacagcatataagataaagacacaatcacgtttctatatattaatgatacaggaagaggggcagggaagtgctgggaagagaaggacatggtccctggctagagctccacccccaggtctgtgcctatggaccctacaggttgtattgggacaagggcgcatagactgtttgaatatgatttgtttatttggcacatgaaattaaggtaattacatgccagattgttttataatctgttagaccattatttcaaatagtggttgcatcaagtaaactttcctttatgaaactgcaatgtgtctattcacattgtttttcaacaaccttggaacaaattattcacagagtaattattatcattagatactttcatgcaattatacctcattatactattttctaaattaataatgttttaaatcttctctacggttaaagactcaggtttttttcattctgtcctttccattcagatccttttaaaagtccctgttacacactaaagtgaatacgaacactgcccaaactgttttcaattttcaagcatcatgtttagaaataatgtagtcttgtttctctttgaattaagacttgctctgtgtggtggtggctgagtggataggagagtgaacactgttctcagtgagagcaaaaggtccatgttttgggcaatagagttgtataaatgatttaagttgagaatggaaggcagtagatattaaaccaaagcaattgttcctaatccagtaggcaaaataaaataattgtagcttctatcccaagagtcagacatagtagaaatggaagcagcagtggaggcaaactatagtagtaggactggggactgtctaatcttatagttaacagtacacacagagagaacatagcccatagtacactacatttttaaaaaacctaccttccagagaataaggtagcaaaagagaagtatatcaaataagtctacttcgttgcaagcaacagttgacagctaagtaacttaagagaagagaatgtattggaaggatgttgaaggctcacaggatcagcgtgaagctgaagaaatggacctacaacagaaagcgaccaagggagctcagaggtcagcagccataactcagcagtgacctattagcacttatgatctggtgagcacgtgaccacaccatcccaaacctctcttccatctgcattcaacctttcaacactagagaggatctcacctattactgctttgtcctcctaagtaggagttcttacctaacctgcccacagtggggaagagttaatattctaaaaagaaattgtgttgccatttggagaagtgaggtggatgctggaaaatcaaaatatgagaaatacacattccaggccgactttaagaagcacaactgtgatactaacatctaattatcctgtaaggaaaaaagagaaggatatcccaagtaaacagttcctatgcagggaatgtaggattatcccagtttaaaattaccagatttatgggaagaaatgtcacaaaagacacattcttacaaataatttagacccatacaattcacattgggaaagataaagggtagaataagctgactgaagagctaacagagagattaccagaacaagaagctgaaaaagaaagggagagttgatgataggcttaatgaagggcagaggaaaaccagaagtcttcagtgtttattttgttttagtcgtctagaccttgaaaagtgctctctcaattaaaaagggcaaagatggttagagtgaaaataaatatccacgataagtaagtagatagcaaaagagcatgtacctatttttaaaagaactcaaatctacatcctagataaattacatgacagaacattgaagaaactgggaaatgtgatcaaggaaacactctcagtaatttcttagagagctggttggagaaatgtcagaagtaatgaatagggcaaatgctgttctgaatttattaaaacagtaagatgacagattatactatagcttggtgtgaaattcacaggtgggttattaaacagatgatttatgagcaggtagacaagaaaactgccacatagcatgggcacagtaagataagtgagggtgacgtaatggaaggaactggagtctgacaacctggactcattctgtcaataaatagctgtgtggacctgagcacatcatttaacctctttgaactgcagtgtctttctctgggaaataaggttattagattaggtgttctttaatggtcagtttatccacaaagaacatgtcagccccaagtgcatcatatttaccttaattcttttaatagggctgcctaatgatgaaagagctgccatttattaaagaatgtatccagtattagctgtttatgtcactttatgaaatacatcagtcctatgacagatgggtattattaatcccttttttcaaataatgaaattgaggctcagagtggctaagaaatcagataaagcagaatcagagtgtatactgatatcaatgaatcaattgacagataccctgtgctgtaatacacaaactgaatatattcaggatggataacactataatgagataacactaaaatgaatacagcaaaaattttcttttgtttggatagttgtatttaaaatatatttcctttcaaccaaattatttataaaatgttaaaaagtacaaggttcttctcaatagaaaaagttctgattaaatttgcaagaaaagagaaaaaaaacctaggataaatatgcagattaataatttatacccatattcatttattcaagtaccacatccaaaccaggacttgaggtaaactgatttattcacagtatagtaactattcaaacacagtggactttattaacattgaaagtaaattcccaccgttggcatctaaaccatctttctaaataaaagacggccttaagtttgaacaggattttgttttgggaaattgtaacaaggaatagaagtgagtgggattggttcttgggttgccatttggagcccccaaaaaggattgggaagggagtatctagagtgatatctaagtacatttttccccttagggataggataggtgataagggagtcttgggttaacaaaatgtctattaaagtgatccagttcatttcaagttgatttcaagttcaacggaagccagccatttgaaaagtctagcacagaaggctgatgtaaacatcagtttcagttacagaagagggtgttcagacttggggagccgatacagtcccacagtttctgccttggccaagccatatcctgaacattggtgagttcccttctgcctggtgcatggccatggtccatgggcgttcccttctccattcacctttttgaaagttctgaaaagcatagcaaatgagaaacagctgcgacaactaggaaagacaggagtgacatgaaggcttctgtcaaatacatgtggagccactgtttggaaaagatagttggttagttctgagactctgagaacaaagctaggaatgagtggaatttaaaagcactttttccaattagggcctctctaaaatagaatgggatgcctttaggagtgatgagcctcctactcatctgttcttttcaattcaatgaatatttattaatggcctaacgtattgccattcttaaagctgggaatacatcagcgaaaaaaatagacaaaaattattgctctggcatctatattttagtaggggtaaataaataataaaacagtaataaaataataaaaataaaaaacaaattagcagcatatatattatatatcagtatgttaacatgtgaaagagaatgggaaaagagtagaataaaagaaatgaggaatgagaggagatagggaatgggacaggctcagttacaaatatgattgttagagtaggtcagcctcattgagaaggtgactgcattagtcagggttctacagagaaacagaaccaataagatattttagagatatttaggagagattaattatgagggattggctcactcaactgcagacactgggaagttccatgatccactatctgccacctagatgcccaggaaagccagtggtggagatccagttcaagcttgcaggcctgagaacccagggagttgttggtgtaggtcccagtctgagtcagaaggtgtgggaaccaggagcattgatgtcaaagggcaggagaaagtgcaagttccagtttcagcagagagcaaattcacccttcctgtgcctttgtgttctattcgcgccttcagtggattggacgctgcccaaccacactaggaaggaaggatcttctcctgtcttctactgattcaaatgctcatctcttctggaaacaccctcgcaggcatatccagaagtacattttgctagctatctgggtattccttaagccagtccactggacacatagagttaaccatcacagtgacattttagcagacttcagggaaggatgtggggtagtgatctcagggaagagcattccaaggagcagaaaaagccatgagaagacctgaagcggggctgtgaaagcaaggagtattcccatggagtattccgtctctgaaatgcttgagaccagaggtgtttcagatttcagattttttgggatgttggaatatttgtacagacataatgaggtatcttggcaatgagaccgaagtctacacatgaaattcatttatgcttcttatataccttacacacgtagccttaaggtagttatatacaatatattaaatgattttgtgtgttttgactgtgatttgtcacatgagggaagatgcggaattttctacttgtggcatcatatcagcactcaaaaaagctttgggttttagatcatttcagatttcaggttttgggattagaaatgttcaacctgtatttaagcagagcttggcagagcatttcagagagaagttgaagagagaatttctgcttttggtataaactagaactagataacctctgatgagtcttccaacttcacattccctgagtttatgatcctcttgtagctgggaatgatgaatttggtagcagcaagcagcatgggttcaagaccagaggtgccagaccaagactcacaaatccaaatggtaaagaggccagacagatagtataaacattttaaaagattgacaatacattcaaatattttaaactattgtgtaaccaaataaagcatgttttcaggccaaaacttgcctagtggccaccactttgagaccgttgcattagagaaagtaaaatcagtttggtgtgtaatggtgtaatacatatataaagtcttaggcagggagtcaaaggagaataaatgataaaagaagaaatatgggagtctttgatgagaactattctttgttgtgatttgccaggaagccaaaagaaaagagacaatcaaagattactttgtagtgtagagcccaggaggccagtttacaatgactttgctcttccccaagcaaaagtcatattgctttttttccactgtttctatggctagatactgatttgtcctttcattgtcttattatacataattgcatagcatttaggaacataaagttcagttagagggagaaagataaaccaatgcaatgtttttcaattattttgtgtctacagagtaattacaattatcaaactttttggcagaggctcagaatggactgatagtgataattacaaagacacagatgaaacctttattctttttgttttgatgtatgatttgtcctatttccttactgcaggtgctttcatttgcaagatggtgccatttgtccagtctaccgctgttgtgacagaaatcctcactatgacctgcattgctgtggaaaggcaccagggacttgtgcatccttttaaaatgaagtggcaatacaccaaccgaagggctttcacaatgctaggtgaggccactggatgtgccaatggcagtgtgaatgacattcttcattacagaatagagaaccatatttttaaactagaagagtagcttcttatctaacttgtaggcattggaatataatttgagagtttcagtgctttccctgtttgccttcatctccacaccatctctcttttaggctgacctcaaaactgaaaatgtatcattttgggtatactttttcagtttacatcttaaacgtttaagcactatgttcagctaatctaagataacctaccagtggcattgccacattaacactcattagattgagaactatcttttttttttttttttttttttttgagacagagtgtcaactacattgcccaggctggtctcaaaagtctgggctgtgattacaggcatgagccactatgcccagctgggaattatcatcttgagataagaagactccaagccaagctaacaagggcaggtcgatttttttttcttttttagatagggtctcattctgtagcccaggctggagtgcagtggtgtgatcacaactcactgcagcctcagcctcccaagctcaaatgatcctcccacctcagcctcccaagtagctgggaccacatgtgcccaccaccacacccagctaattttttttatttttggtagcaacagggtctctctatgtttctcaggctggtcttgaactcctgggctcaagccattcccccttggcctctccttgtactccttggcctcccaacatgctaggattaccggtgtgagccactgcacctggccaggcaggttgataatgatagggagcaggaaatgtggttttagaaaagtggagaacagggttgctgcccttgtggtgagtacacaagggtagaaagtgacagggtacatgagaacagtgggttctgagtgctggggatgcctggcaaaggcacattccacccacttcatacttttcctttaggcatttctggatcgtcagcttgctgtaattgttcctgagtcagcaagtcacaatgaacacatacctcatgataaatggtaaatttgaagcaatgccctaaagtctaacacagtaaaatggaagcatttctctattcagtaattataattgagccatttaaaaccttagtgtgcttcacagtagtttgaatttaatatagcaaataatcagaggtgtagcaagcaactaatgtgataatcaaataaagcaatttttactaatatctcacttgagaagaatgagtaaacatttatttctgctgtaagaatttagccagtattgggctgtggaattgcagaaagaacccctgcaggctttgcaatgccaaagtcattttaaatagcttgaaaataatagctgaatcattaggggagaaaggtgttagttttagttagttagttttaattttatgtcatatctttcctactaagaattcagagatttctgggcttttaataattgacatctttccaacatcagaactcctgaaaacagcatgtggggatggaaagcaagtaaggaaaggattacatggaggaggggagttatttaaaaggaaagagaagtagcgcgagtgacaacatctcaaagcatagttgataataggcagtcaaggcagttcctactcaaaagagacataggaaacaagaaggttttaaaatcaactagactcatctcgccatgggggcttttgtgaactgtggtctaatgtctcctgtagctttgtcacactgtcattcagccttgtcagtcagtgtttgtcagtcacgccccattcctccttccagctgagattgcctagacctagacaggggatgtcaaatcttttcgcttccctgggccatattggaagaagaagaattgccttgggctacgcataaaatacactaacactaacgattgctgatgacttaaaaaatatatcgcaaaaaaatctcataatattttttaaaagtttacaaatttgtgttgggccacatccgaagccttcctaggccacatgcagattggacaagcttggcctaggtcctctaggctttcttgcccagatgtggtcactgtgtcagtattgttcatccaactctagcccttctatctcagaaccatccagggatccaggaaggtagtcaatgagctatgaaaattagactcaattcctccagaatttgtactaaagcccagaaaaatgattggacataagataactatatgtgattaaaatagaacagatgtgtatggtaatagggaggcagaaaagagaaagagaaagagcgagtgagaaatagagacagccagacagacagacttgtgagtcctacagctgccaggtatcattggatcatgatgaatttttataggcagcaccaaattatgtgtttctttataataaaccccaattatggcttaattgagtcattgaaacccaaagcaataaactgttttcttaatgttccacccaatatagaaagaacaagcagagttcgagctggaaacttttcccccaaatcaaagttggggcccttggttccgtcctcttccatgtctgttaaaacacacgggttgaaattgttcttggtagttaatccctgtttttcttttctaagagtacatcattaaagcaatccctctcaacaagttcgtggaagacaggaaatttggaaagagcattttggtttctgaagttatcagtgtttgttttcttttttttttattattatactttaagttttagggtacatgtgcacaacgtacaggtttgttacatatgtatacatgtgatgcccatgttatggtgcttaagataaatgtacatttgattttaaaaagaggtgacagagagtggtctatgtcatgtttaaaagttattcatccattccaccaacatggatcagctcctacagagggccaggaattttcctaggactcttatttgaggaaacacaaaaataaatggcattgtgtttgctttcaaggagtttggaggaaattgagaagtgagtaagggcaacgaagacactgcactagagggcatgtagagacaacaaggaattagtagtcagtttatttggaaatagtagtgaccttcaaagtttccctagagaaggtgatttctgagtcaagtcctggaaaatgagtccacagatagacactggggatagggtggccagggagtggcgcagtgcattctgggatacggaaactgaaaccagcactgcaggctcctcagtagaggactgcggtgtgaagagcatggacagaaatgaaagaggagagagaggcaattgagatggtagagaacctcatgggccatgctaaggaaactgggttttatcttgtaggcagtgaaacactattaaatgtttaaaacttgttttaggaagtttattccagcagcagttttgaggatggtgaaagagtggaagcatgaaacttgggggagaccatggcactgccctagggcagagaacagctgccctctcatagggaatcttgagggttagataattatgcatggatgtgttttactcaactgagtcatactctcatgactttaacacttttacaggtgtggtctggctggtggcagtcatcgtaggatcacccatgtggcacgtgcaacaacttgaggtagactccagttgagatgtataatcatattgttgaactattttctcacccctcttaattgtaattattttccttcctgcaggagcaatacagcaaatttgtatgacctcagctattccactggaggtcttttaagtggaataaaatgattttttaaggttcattttctctgttttatctagctcttcctgatacattgttaggactctaatgcttaaaatacaatttttcaaaaatacacaggtcagtttctacattttcctgcaagctgagtatgcttttcccagtgtccctaaatgttttcttacattttaagagttgaatgattgctctaggtttttcttttatttttaagtcacgtaaaaaaaattgtaataaattatctacttagttgactctcagaagtcctttcttacctgcctcctattcattgacacattgaaattctaactggaaacatatcaggagatcatcttaatcaacctctctcctttccccacacctttgtcagacaggcccagccatgtgtggggcttcacaggaaggagagtgctgagttggtttcagacagcccagcctgtctgttagggtggactttaacatgtcttgcataggtgatctacccagacaggagttttcaaagacggtagggggttgcttacataccccctaagataagttttaaatgatttatcccgttctaccttttaaagtagagataggcaaatgtgaaactttactgtccatgtcatgtcatcctcaaggataacaaatgagcctaagataagagaacattaaaaaagtaacctgatttttttcatgtaactaatttgttgaatgagctggactccataggtgagagcagaaagtaattttattttatcccttgctacctggaaaaatgcatctaaggacttttttagtcctcttggtgaaatatcatgaatgaaaaaatcttgagcaactcttccagtcagataataaaatttctctggttactttcactcagaagaatagtgtgagttctgttattaaactgtcctgtccagtaatacaattacataaatcatactcttatttaatcaatttataatttttcccttccctcagtgtgaatagttttcaggcctagaaatgtgaaggagttatggtcagtttcttctctgtttcctctccttgtgtttctttttctctcccctgccccactcctctccccgccccaccccccaccccccatacaattggctgcctctctctcatcagaagctgatgaggaaaatggggagaggaagcgggcagatgtcactggaatcaatgccctctaggtgtgacagtattgcctgtgactgattgtttgcttcaggacttctcaaagataacagcactgagacctccagcgggctggcaagggatcatgccagctcctgtctgaggatgctgcccttatctccaatgggaagcccagactggtggagccttttcataatgattcactctagttctaaattgtgtggtccatttctagcccatagaaaacaaacagatgtatccatttttaaataaaacaaaaacattttgttttatttaatatagaaaaagtgtttttatatgtttaaaaaataccctaaatattttttaaatacataattaattgtgtttgtagaaaatgcatgtcatgtcattggcaaagccagtcctcactgtcaaatagatgagtctagtcaaagttgcttcctgtcaggaaaacatctgattaaacaaatgtattaatatgcatcccatggctaccttctcactcctaaattctattaggacaagcaaagacttcctgaggccatgctcagatggttttatggaaaatttcagatcttcactcttcgatttcagattttctattcccaaatgtacgcttctcgaaaattccactgcctaatatcgtcctgagcttgcagtgagtgtgaacttatcacagggatgatacaaagcaccctgccttcagcatttctcactgccgctctctgcttcacttgtactggggtctctctcatgagtgatgtatttatcaattttcaagtgatagaagcaacgagacggttaaaattgtcattgctcctgcctccttactgtatgaaaaatgtgaattcacaacttctcaacacctgtcaaatacctttttttctctgccaggctttaccctgaatagaaatatatttaagagagagaagagcacaaagccctgccatgtgtttatgatgccttgatcaatgtggcttcactgacatcagtcattgaattatgtcttgttttggtgccccgtggtaagattcattatgggtgagagatgtgatttctgtaacttgggaaaagggtgattatgaaacaggaagtgggaatttagacccagcgtgacacttcaaacttggggacgatattaggcagtggaattttagagaagtgtatgtttggaaatagaagatctgaaattgaagatcaaagatctgaaattttccataaaaccatctgagcataccctcaggaagtctttgctgaagtccacagtcaggactttgctgaagtcaggaagtccgtagtccctagggctatgtgaacctgatccaagacttccagttcagcatgctcttagatgtgtcagtccataccccctggtcattggcctttgcatgctttgcttccatggagttggaatgaatttcattttaacatcctatttccagagagtttgaatcttgagattatttttcagtgagtgttattcctagttgcatctgtaagtaacacctaggtcagaacttgaattttcttacctttgatgagtaaccaaaaagttgctgtccctcattcaattcacattgaagactggtgataaaatttcctgggaatgtaggcagaaatatgtctgagacccaagtattcagctccacagtaactaaaataacaatggttttgataaatattctcgtttttattcctattacccaaaaaagtgacttctgaatatgctttaaatatttagtttgttcttgaactagcccttaaagcactctctattatttattattgttgttaataatacttttgagcttataagatgagtctaccagaaatagtacgaataaaccagcaggtacaatctgaatatttgtatattggcaatagtttgaatcccaatttctcattcatctcaggataaaagctgccagttgcctctttaatatctttctaagcaatctgatcattgcaatatatgaagtagcagtaacaaaacgcagctttcagtacttttcaattgaaagatgtctcatgccttgtcaaaaatctgtctcaacaattgaagaagcaaaataatttaatattagactacctagcatgtattgcaaaatatttttcagtatatactttggcaaatatagtgctctttcagtcgattgaaaacttgtgactagtggaaatagaagttgagaaagacaataaatgaaagtaaacaggctatggacctgaattccatttagaatagaaaagctggtataaaactcttaagaacttaagcagtgaagtggaaaaactatgcttcacaacaaaagaacaattaaaaatgtatctcatttgaaatacgtgctggggacaaatttgaaagaacttaaaaaatgttgtgttgcaataatacttggctgatttctgttttttgatgctgactactggttcttttaatgaattattcttattatgaagatcaaatatgacttcctatatgaaaaggaacacatctgctgcttagaagagtggaccagccctgtgcaccagaagatctacaccaccttcatccttgtcatcctcttcctcctgcctcttatggtgatgcttattctgtacagtaaaattggttatgaactttggataaagaaaagagttggggatggttcagtgcttcgaactattcatggaaaagaaatgtccaaaatagccaggtctgtttaatgaaatattcacctctttaaattatttttaattaattgtgctggaagggatggttgccagggctctcagaacctctaggtaatttagtctaagcatcctttgcaattcaaatttagggcatggactgattttaaactcttgaagttttacatgtgtctgaaagaaacaacaagactaccagctcgcaaatcaactgggaagttacagctataggtagaaactgacttggaatttagaacatacatgatgtggtaggaagactgtgggctggtgtcagaaccctgtggtcctatgggtactctctctatcactcaccagccacaagatatacatcagtctcactcccaaggccctgcttcccgcatatgtacaaggagcataataacatccatccttagttaatcccacccaaggataatgctaaaagacatgagattgatctgtatgaaaatcctttggaaaccgaagcatgctatttattttaaattattattattgagttatttttacctaagggctttgctttctgaatttattcattaatagaaattttaaaacatgacttactgctatgatacttgtagtccatatcatttatttaataacctacactgaatgactattagaaacaaagcaaaaaaaagccttaaatggaggagtctggtgatttggtgggattttatcatctctccaagtgtgcagtgatctctagtgctctagtgctcagtttgaataaagaaacccttcttgtcaatgtacaggggctcctagactgtccgcaccttgggacctatcgttaagttggttcctcccacttacttgaaagaaagagctgccatgttgaaataagagataatggaccaggtgcagcggctcacgcctgtaatcatagcaatttggggggccgaggtgggtggatcacttgaggtcaggagttcgagaccagcctgaccgacatggtgaaactctgtctctactaaaaatacaaaaattagccaggcgtggtcgtgggtgcctgtaatcccagctacttgggaggctgaggcaggagaattgcttgaacctgatggactgaggttgcagtgagccgagatcacgccactgcactctagtctgggtgacagagcaagactccatctccataataataacaataataataataataataataataataataataatgagataatgagtatgagtttttataaacttaaagcaccatgcaaatgtgtagagctcttgcagatgtaaatcctctttacagaagtcatggagaaaattagtttgaagccctggttaatcatgtttttaagatatatcaggccgggtgtggtggctcacacctggaatcccagcactttgggaggctgaagttggaagattgcttgagcccaggagtttgaaaccagcctgggcaacaaagtgagaccccgtctctacaaaaaatttaaaaattagctgggtgtagtggcatgcacctgtggtcccagctacgtggaggctgaggtgggaggatcacttattgagcccaggttgaggcttcagtgagccatgattgcaccactcctctacagcctgggcaaccgagtaagaccttgtctcaaaaaaaaaaaaaaaaaaaaaaaaaaacccaagatatatcgtatagatatccatttaaattatatccctggaacttcccatatttcataatttttttttggtagagatgcgtttttgccatgttgcctaggctggtgttgaacttctggactcactaaattctcctgccctgtcctcccaaagagctgggattacaggcgtgagtcactgcacctggcccatattttataaatattgatattttactaccacaggcatgaatgctctttaatataaagtgagtaagagcttcatattgaagtcacagaagttagacttcctaaattcacatccaagatacagcctttactagccatctaacttcgcaaattaattaaccttctgtgtgtctcaatttctgcatctatcaaatgccttattgggtaaattaatgacattatccatgtcatgcatctagcagagtgccagatccataatgagcagacattcaaagaacatttatgatgtgagggtaatatcaataggaaaagatgataatcagcccacgaataacctatcgtgagcttaatttaaaaattatgtttgagtgaactaagctcagactttaatagctttgctatcaagctggcacatttgccaaggagaagttaactaatacaatgtttccttgtgggtttaggaagaagaaacgagctgtcattatgatggtgacagtggtggctctctttgctgtgtgctgggcaccattccatgttgtccatatgatgattgaatacagtgagtgcttgtcattctcatttgatagacattctcattcatttcctgctagaatagacaatgaatctttgaaatgtgtcgctgttcacttggataatcaaatacctaacatttcatatatttctttcatgtcttcaagatcacaaggtcattatgtggtaggtcattgtgtatgactatgactaaatctttaataattacagaagatcaaagctttgagattcctctcccatgttactccttctgttctccctaggctatttaaactttgggaaaggagtgacatcctattagcatttcccatttagaaccctgacttgaacagtcagacctgcagtatattctttctgataacccaggacttaccatggttctcagtatgattttgtttctctaaggcaagtgaacatttgaagggttactgctgcttccagtttacatgaagcttggagttatcaagctgcaatgctataagccccctactatatgctggacaccaggctacgcatgtaaacctagattctctaagtgaagactcatcacaaaggttgtttttattcagatatcagatgcctctcccaaaacgatcttgagaacttttcacaccttcagatacttgtacaagtttaagtctttgacaggtgacaaacagaagttttattttatactccttaaaataaacgtacattctaaaatattactttatttcaggtaattttgaaaaggaatatgatgatgtcacaatcaagatgatttttgctatcgtgcaaattattggattttccaactccatctgtaatcccattgtctatgcatttatgaatgaaaacttcaaaaaaaatgttttgtctgcagtttgttattgcatagtaaataaaaccttctctccagcacaaaggcatggaaattcaggaattacaatgatgcggaagaaagcaaagttttccctcagagagaatccagtggaggaaaccaaaggagaagcattcagtgatggcaacattgaagtcaaattgtgtgaacagacagaggagaagaaaaagctcaaacgacatcttgctctctttaggtctgaactggctgagaattctcctttagacagtgggcattaattataacaatatcttcataattaatgcccttcagattgtaacccaaagagaaaattattttgagcaaaggtcaaatactctttttattcttaagatgatgacaagaagaaaacaaatcatgtttccattaaaaaatgacacgaggctagtccaagtgcagtgatgtttacaaccaattgatcacaatcatttaacagatttctgtgttccttctcattcccactgcttcacttgactagccttaaaaaagcaacatggaaggccaggcacggtggctcatgcctgtaatcccagcactttgggaggcctagacgggcggatcacgaggtcaggagatcaaaaccatcctggctaacacggtgaaaccccatctctgctaaaaatacaaaaattagccgggcgtggtggcgggcacctgtagtcccagctacttgggagcctcaggcgggagaatggtgtgaacccgggaggcggagcttgcagtgatccgagatcatgccactgcactccagcctgggcgaaagagcgagactccccgtctcaaaaaaaatttttttgaaaaattcgtaaaccatacttttaagattatttcagtggatttttaaaaatcttgtacagaaatcagggttcttagctagcagtttttctcccacgcagtcactgtaatgtgactatgtattgctagattgaataagaaaataaaataatatcttcttccttgaaaactaagttaatacttcaatgctgtaatgtgatttttagtgcactgttgaatttaggtaatacagtctcttacacatgaggtctgtgccacaatcataaagtcaaagcaaagggagaagcagccaagtgacggatgaatgagacttagaggaagatgcctgtactggagctttgtatggttctgccagttaccttgctgccttgttgtatgactggcaagtaacgtcgcctttttaagccttcatgttttcctgtgtaaactggaggtgatgccccctccacttcacggagttgctgccagaataaaatgaggcatgagcagacaagccctttgtactctaaagcagcctcaagctctgaggcataagctccccatgtctcacatctcccgtttgtgttctcttttcctttctgagactctccccaacccctgcccaactttcccttcatatctgtgttgtaactggtttctctaatcaaaagaagaaagtttggggagcctcatttctgtgatatatttagacaaaactatcacatagggttatctttttaagccccttattttcactgatgggatttcttatataaaaggaattttctgtgcagttagtagatgagggagtgaatcaactccaagcccatgaaattgtactgtgcccaaggctgaccctcaagagctaggtcaggaagaaaatagagttcctcacccatattccttcccccagcctcccttaagtgcaatccttgtctcttcaatcttctctctggttcccaaatgtcatggatacagaggccaccatcacagcaccctgtcattttcctttcaacagctaagactcccaaagtccagccgcaacctcacagccagtgtttattctgcttccagttttctagcacttactctcccagccaggtaatagaaaggaagagaagcttaagagcctataggacattttacaggtaaagctttaagatttggtaaccaaggaactaactattgggatcttcaagatacagacatttaattttttatatgtcagtgaagcatgcctgaaaaagacaaagatgaagcagtgtgcagtattatgaaaaattgtcaatatgacactgcaaaattcacaaagagaaaagagagagactgattgtttagtttctactgatgtggactatttatgggttatttatataaactgcctgtcaggtctagttaccctatggcaaaacaatgattatcattaaacattaaaccattaaaaatgaattggattcactgattttggttatccttactcagtcggtaaatattcatataatcctttctacatttggtgtatacatgctctaaatatgacttaatgaaaaacagataaatcagcactgttattgaccatgtaattattaaggttagaagtttcttttaattcctaaatatttagatattaggtaataccttaaatatttactgtaaaatttccagacatcttatgaaaggtttttttttttaaaaaaatttgcttacattgcatcaaagctgttttagaaacagaagtagtaatagcacactgtttttgtcctttaaacatataatccctttgctctgttataaagattcaaaaggtaaatgtggtccaatctgttcctgaaaatgtcctactattagccaaagaagctgtgagtctcatctggacgttgagtccatacactgatataacacagcctgtgagtgcatagagagttcaccctggatttgcaaaaggaacctgactactgccttttgttctcttttccctgactttacagtccctgagtcttttactccctttgtcttctactcagccatctgcttttttccccttttgtctctgccacaggctgcctgtcactcattttatccatctggttttcctttacctggtgcttggagtgaaaattgaaaaggttttgttggatccaggaggtagggttgggagtggtacagaaaactagtttttcatctattagcatttaggtaaaacatttgcgaaagcagtaaaaaagtacgtttcaccgctcagacctctaagccttttatttcattatggatcattgtgccaaacagaggtcagtatcttttctccactctataaatagatatgatcttctgagaaatattcacagttcatgtcccttttgattatactatgaagggtagctcctttttttgccatagtttgatatggttcagaacaccagtgttatacatactagtttgattaaagattaattactagtcccaagaccattttaaaaagagaaacccagtttcaggccctatactatgttacttgaaggcttacaataaattaaaatatcaagaaaatgtgtcattggcctaaggatagatatttagctaaatgcaaaataataaagataccagaagaaaaggtgcaaatatataatcaacttattttggctgaggtagcagcataattcaatgggggaaatgataaccttaaaacaaaaggttctggaacaattggatattcaagtaccaaaaataggactttgattcttacactacatacaaaaattaactcataatgcaccatatacttaaacataggagctaaatctataaaacctctacaataaaatatagaagaaaatcctggtaccataaattaggcaaagatttcataagccactaaaagcaggaagcataaaaggaaattaataaaattaactttgtcaaaattattagcttctgctatttgaaaggtaatgctataaaaatgaaagggcaagccacagattataagacaatatgtgcaaaacacatctggtaaagaccacaaatgcattatttataaagaattctcacaactcagtaataaacttggcaaattatttgaacaaacattttacctaagaagaaacacaaatcaataagcatatgaaaagctgctcaacatcaatagtcattacaaatggcaaaacaaaacaacagtaagatggtgctacacaccccctagaatagttaaagttaaaaagtgttggcaaggatgttgagcaactggaattcccatggctggtgggaatataaaatgacacggttatgtgggaaacaattaactgataaattgaacagttattctgcaacccagaaattccattcctggccaagcacaggggcttacacctgtagtcccagcattttgggaggctgaggtgggtggatcacgaggtcaggagatcaagaccatcctggccaacatggtgaaaccctgtctctactaaaaatacaaaaattagccgggcatggtggcggatgcttgtagtcccagctactccagaggctgaggcaggataatcacttgaacttgggaggcagaggttgcagtgagccaagaccgcgccactgcactccagactggtgacagagcgagactccttctcaaagaaaaaaaaagaaaagaaattccattcctggatattttctcaagacgaattaaaacacatgaatgttcatagcagcttaattcataatcactaaaaactggaaacaacccgaaggtctatcagctggtgaatggataaacaaattgtggtaaagcaatccaattgaatatgacttactaacaaaaaagaattaactgttgatacttaggacaacaaggatcaatttcaaaagtattctgctgagtgaaagaagcctgtcaaaaaagactatgtgctctatgattccatttacatgaaattccagagaagacaaagctgtaggaatgaaaaacgggcaggtggttgccatgggctagtagttaagtagccaattgaatgcaagagagtgacttttttggatgatagaaatgtgttatcgcttaattttagtaatggttacttggctttagacatttctccaattgattaaattgcatacattaaaaggctgaatttattgtatacaagttatagtttgattttttaaagtacacttcacgaaggaatttcattttgcaatgtaaaaatgacaactcttcatactggttccttgacccgaagaagagtatccatagtaggaaaagcctagtggaggcttttaaaactgcgctacccaccaccaccagtcaagagagtgaattaaaaataatattttggccccaggtgaacaacagagattggtgctgcactcagaggtttaaatgatactgcatatatacccatcatatcttcattggattcactaatatgattgactcctgcagaacctaaatggatcacaatacatgacgtagactgccacaaacaagtagtagccccaagtgctgtgctgtgctgaatgtggtatctttactggagcagattaccacagcgtctagtatgctctatgcagctattgatctggccattgctttgttttcaatgcctgttaagaaggagaataagcagtaatctacattcacatggaataaacaacaatgtatattctattgtcttaacaaaaattatgtttatctgtctgttactttacaggatagcccaaaggaacatgaagtgtctggatattccacagaagataatattggtcctctatgacattatagtacttgtatctgatactatgaatatatatatatggtgtatatatatgtgtgtgtatgtgtgtgtgtgtgtacacacacacacttgctacatgtatatagcaaggactctgtactattgggaaacatgtaccccagaaagtgggagataacagtgataaaacttacagatttagaggatgccatgttggtgaagtttttagaggtctttcaaagaaaattatggatttttgtaccttgaacttcctaccactaacaaagaagtacaattcttgggaggcctctttgtatttgatactcttttctagagaaccatgttttgatcattttattggtgaaatggtaggctgctagatatgagtgtgtcccagagctagaaagagctctgcagcaggtaaggttgtaatcaaagcaactctgtcatttgaaccatatgaattagagattcaataattcaggttgtagtaggagaaaagtctgttacttggatcatatgatccataaaattccatagtactaaggcatcgatattagataaagatgcaatgtggagcctctgacaggtactagtcaagaagttatagtgcttatcgctgtatttctgaagcaagcccatgctatttgcagcaaataatttatcatcaaaaggtagtgcctgaaatgctactggcccctaaagagaccaagtgagctactatgaagtgactatgtagccaaaacttcttatcgtgtgttgggtactgtcttattgtcttacccaacaagtgttaagcatgggcagtctcagaaataattaattcataatgaaatggaaatggtacatccagaatcccacagatcaggagggcacagatgaactgcacagacaggtagcacatagctccacatcactcctgcacctgtggtcccatgattgcctagattgtcagttactgagagaggtgtgttagagtcttccactatgccttatattggcttatttctccttttaaagataccagcttttgctagtgtgttaaggctatgttatcaggtacatgtacacataggattctcagatcttcctttatgattggccattttatcattatgaattgttctttcttatcttttagcaatggggaagttttcaaagagtgcattatcaaaagtcctctaaatgtattgaataaattgttgaaaactatgtgttctgttgttcataatagaaacaataattcaacaataggaaaaaattctgagtgcctgccagtagaggagtaaccaaataaatgatattacattctcatatgatctatattttcaaagaatgtttatcgccacgtgtggcaggtgaagtcatgctaataaaatgtgaaaactacacattcagaaagttacccctaatgcttaacctggcctactccatatagtctgcaaaaataaaattcctttatttatcactccataaagagttatttttacattctcagcttgccgaagtaggcttatgatgattttctgctttactgccctgaagtttaacctgaagccgtttaattcaattatctgtaagactagcatgctctttaaatacaatatttaaaaagttattgctattagtagagtaaaaaaagcagttcacctacttttcaaatgccatatttgtaggttttatggagagtacaggagtccttcacatgttaaaaaacaaacaccatacccatccattaagaagtgtaaactgacagtatgttgttctcattgacttattcaacagatattttttggagctcctgctctgtgtcagatctagccagtctccttccatctcaagatcaagaaaatcctttctattctgaactagaacagattgaaaagggttggctggcaaaagtcatatagaacaggtgattcatagctttaaaaacagacatggatttcctggcttgaatctcaggcccctttctgcctttgttcacagaaatttttgtgttctagaactgagattatgatgtatctaaaaaagaaaaaaaaataaaagcaaatgaaataagatgacaaaaaatgaccctatttgaatcattagaattaccagagcacagaagtaaatgaattcccgtgttctgagtctcgtggcttctgtcactatgccagaatccttggctgctgccgtgtttacaaaactattaagaaaacttatatataaataaactattttaaaaattaatttttaacgaactggcaaaggtgattttttaatgaaggagtttcaaggaaaaggaacatctgagaagcacccagttatatctcttgtctgtagggaggaggcgtttcaagtgtaacagatgttctctaaactccaacagcctgagtggctcaaaaacaattaaggaatgatttcttacttaaaatagcagactatgtaaacatatttatttctccccctactgagatcctatcaaaatgatattaaaggaacagcaaatgtacagatgcacaaacatgatgaaaaagagaggatagccacagtgaatacaaattttcaataaatatcctgataaaacctagatgttgattaaagcattgaaatcatgaaaaaaaagagagaaagtcacaggctctgcccacagcagaccacagtagtggaagaattaatgatatgtctccagaagagttagacatcactgtctattccatcttctgccataaattgaatggctaccaggaaggtgtttattcctcagtgcttaacattcccatcccaaatatacacatgcatttcttcttgaaggaaattaaaggagtctggggagatattggcagacacctcagtgttctagaatactgtagtgcccaagtgtgatgatcagattcacaataaccctaagtcaaagccagccatttgccaccctcaacctatgtacagagtttttggtcagcttcacatttctgcactcttaaaggatcattgatattttagaaaccctgaaaaatggaagaaaaaaactaagatgaagagatagaaaactaactagaataatcaaataattcaaggtgacaaaaaattagaaaggaattgtttcgtattcttatagagatttaataagaaattccctttataaaaccataaataaagcatgctacaaaaaggaagaattggattaataaggcttttggaagttgagaatagattgtagaagttaaaaatagattatttactcatccttatggcccgtatgtttaatagaagccttcacaaaactttcttcaaaaatgttttctaatgtatgcttacataacaaacctcttgaggctatgtttatcattcagggtgctgtccagaaacagatgacacgttcaaactgagtaatttgaagagagataaataaagggactccttacaaaggcttgagcaggatacagaaaaacaaaaggattagtgtacctagctgctaataacaacaaagcaccctttccacccctgggcctgaaggggaggcaagaagatggaaaagaaagaaaaggaagaggaggaagagaaaaaaaaatgagagagacagggggagagagagagaattgtgtggaaagaactgcctgtaagtgctattgtcctgggtagaaaaatgccaccaacctttgctacccctcatggagagtctcataaacattaatatgctgacctaactccttcctccctctgatctgctagcagtcttcattcctcaagcacaatcaaaagacaaaggtgctccttgattcagacacggagcacagtggtgcagaaagggtggacaaacagaaaatatccagtgcttgtgtgcctgaacatatgttaatcatggttagttatgccctcatatttccatggtggttcagttgcatataaaagtataagttttcagcctgggagacagagctagactctgtctcaaaaaagaaaaagtataagttttaagtttatttccttcaaaacatctaaatctgtgatgttttgtctttttgataccaacatgtctatttagagttctgatgtcagtctgagatatcttctttctctttgatatctttttttttaattatactttaagttctagggtacatgtgcacaacatgcaggtttgttacacatgtatacatgtgccatgttggtgtgctgcacccattaactcgtcatttaacattaggtatatctcctaatgctattcctcccctctccccccaccccacaacaggccctggtgtgtgatgttccccttcctgtgtctatgtgttctcattgttcaattcccacctatgagtgagaacatgcggtgttaggttttttgtccttggatagtttgctgagaatgatggtttccagcttcatccatgtccctacaaaggacatgaactcatcattttttatggctgcatagtattccatggtgtatatgtgccacattttcttcatccagtctatcattgttggacatttgggttggttccaagtctttgctattgtgaatagtgccacaataaacacacgtgtacctgtgtctttatagcagcatgatttataatcctttgggtatatacccagtaatgggatggctgggtcaaatggtatttctagttctatatccctgaggaatcgcgacactgacttccacaatggttgaactagtttgcagtcccaccaacagtgtaaaagtcttcctatttctccacatccactctttgatatcttttaaaacttgctgtttgtcttagattctatattttttctgatttatttatttttaattgataaataacaattgtgtatatttatggggtaaaatgtacactttgtagaaaaattaaagctgattaacatatccatcacctcaccaatttattttttgtggtaagaatgttaaaaatctatttttaaaacaaatttgaaatactacagtcctcccttatccatgggggatacatcccaaggcccccagtggattcctaaaaccacagatagtaccaaaccctatatatatatatcatgctttttcttacatatatatatctatgatgaagtttaatttataaattaagcagagtaagagattaacaactattaataaaataaaacaattataaataaatgtatacatacatttaaatagaacaatttccaacttatgagttcttttcatctggtagttttctttaatattttcagaccacagtaattgaaactggaaagcaaaacaacagacaaggggggattactgtattcagtacattattattaactgtcgtcaccatgcagtgcaatagatcataaaaacttattccttttgtgtaactgagattttctatcctttgattaacattttcctttccgcatcattctccctcttcaccagcctttggtaaccccctttcgctctctgtttctatgacatcaactttttagattccacatataagtaaaatcatgcagtattaatctttctgtgcctggcttatttcactcagcataatgttctccagtcccatctctgttgttgtgaaggacaaattgtcctttttaagggttgtatagtattccattgcacatatacacaccatttttattttatccatttctctgttgatagacacttaggttgcttccatatcttgactattgtgaatataatgctgaaatgaatttggaagtgcagatgtctcatccacatactggacatattccattcccagtagtgagattgctggattatatggtagttcttttaattttcttaggaacctccatactattttccaaaatggctgtactaatttacattcccaccaacagtgtacaagggttcccttttctccacatcctcaccaatgcttttgtcttttgataatagccattctgacattctcactgtagttttcatttgcatttccctgatgattaaagatgttgagaatttttaaatatatctgctgaccatttgtatcctatcttttgaaaaatgtctgttcagattctttgaccatttttaatccagttatttgttttcttactattgagttttatccaatatatatttgtttctagcctcttatcaaatgtatggtttataaatgtattctcccaatctgtgggttgtctcttcactgttaattgtttcctttactctgcagaagcttcttagcttgatgcagtcccatttgtccatatttgcttttgctgcctgtgcttttagagtcctatccaaggaatcattgcctcttcagcagagctaagcccaggaaaaaaaaagaaaaaaagaaaaaagaaatattgcccaaaccaataccatggagcttttcccctgttttcttctagtagctttacagtttcatgtcttacactgaagtcttttatccattttgagttgatttatgtatacagtgtgagataagggaacaatttcattcttctgcatgtggatattcagtttttccaacaccatttattaaagagatcgtcttttccttatcatgtgttcttggcacatttgttgaaaatcaattgacagtaaatatgtcaattatctgtgctttctatcctattacattggttgatgtttttatttttatgccagtaccatgctgttttgattacggtagtttattatatactttgaaattagggagtgtgatgcctgcagctttgttctttttgcttaagattactttgggtattctgagttttttctgagtccatacaaattttaggattgtgttttgtatttctgtggaaaatgacattggctttttgaaagaaattgtattgaatcttcagattctataaaatcttactaacgtgtttaggtgttgttgatctttttgctcctttggtactctgtaagaactcttagtctgagatttctgatttttatttttggaaagtttttaccatttattcaaatattttcttccctctaattattttatttttctttctggaatttttattaaacaggcttgatatttctttccattttacttagtttttcatttttttttaactttttaaatgtttttctgggaaagtttctttttttattttattacatttttgttttattttgtgtttgcatgtatgtgtatagatacatgaaatcaaaaaagctggagaattttaattttctctcttctgggagaattttgaaatataatattcttgctcagtaatttgtttattttgtatccactctgtcttttcatcccaattcataattgtttcatttcaaattttgtattatttatataaaaaccatccggttttttgatataacttccatttcctcttcatgtcaccagaatcctccttaaaatttcttggaggatatttattatgtttcttttaaaattttataagataattaacactaggaagcaaaggataagtgtaaataagagttataaatatttccatgaatacttagagaagatcctggaacagtcaagaagacaataaggaaatggtaaatttgaaggatttagaccagttgtggagttggaatgatctgtagaagaaagaacattccggtaaggagaatagtgaaaaaagatttctggaggtagtagggagtattttatagaaattcaaataagattgttttaagcaacatcatctactgtgagtaaggatagtatttagaaagctagcttgtgtagaaatggtccacaacagtcaactatgggaaatgtgtaaataaaggatgattgagagagtttctgaatggacagttgggccagattaaagtaagatttcacaagttagtggtcaaccaaggtatgtgatcttaataacattttctaacaataccaaagagtaaatgggcttgtctgggaaatatagtcagcagagaaggcgaacaccaaaagaacactgaaataaaaggtgctgtccagaaaatgtgacagttgttctgtttttaataataggaaaatgatgagaaaacaggaggagatagtggggaagatgagagcgaatatggacaggaatgagtaaatatgatgggttaatctatgttgtaaggcacagataatagggctggacacagtaggaggtaagtatgagatgtagcacagaacacattggtagacgtttgcaaatagaggagattaaggggcatctgatataactgtcccagttgaaaatttggtgtggctgggcctctagacaccaccttaccctcatcacccctgacagaggagaggaagatgttttttactcttgggactccgggccttgctggtaataaggtcctctgagaatgtaaactcactggggctttcaaaatacaggaggagaaatgttagatcctaagattgctcaagaactgattaaagctttgtgtttccatggctatagatagcatccttgtcctcagtacatctttcataaatacatgactatgtcaaaagaggggtagggtaaaaatatatagctgaatcacttcaagatgttactatttattggagagaaaaaagcaagtaaaaatacatatttttatgtttcctacgtcatattcctatgtgaaggacacaacaatattgcctgcatttcttcctgaagagcttggcctgaattgacttctcaccaaagtcctaaggctctttttactgattagtcctgctctgtcttctgttgttgtcttagaccttgatagtttttgtgtcctcctacagcatgtgtatatacagacagatttctgttaaaatgagtggtggatgggctactgacctttatgttgcctactctggataccagaatctgaataaccataaatatatgaatatatgagtatatgtggtagcattttttagaaattcatcatattttcatttgtcgatggtaaccttatccactgtgggtaaagaaacaagattctgtgctgtgcattgttgctgctggttcattgtcttgtccactgaagcttcctattctgattctgaggccctttttagtaggtcttgggctttgttttatcttttttattctaaatattgagttctatattttaataccttgtcttaacactgccacctggaccactgaaggctattggatatgctacagttcatttctcttatctgactgcactatttctgcaagcttttctgtagatatcagacctttaatgcctttcagcaataattaaaaggcattaaaggtctgtagtgggcaattgtggtttgttattttgttacatactgataatgtctatcctttttacggtaaaaaatttccttctgaatatcaccccttccccaacttagaccatagtgtttgactagaagtgtccctgctcccagctccaggaatcttccatgattagtgtaagccatagtgattagtctaaggttaaatacatggcccaattctgaccaatgaaaattagtctcaggatgtttttgccacctttgggatacaaaagttttcaccttccttctggactctaggtaagtactgatgcagccatcttatgaatactgtcaactggtgacaacagtaaggcttctgctgacaaagggaggcacaggagggagaaaaagcaagctggtcctagatcaaggttcactacaggagcactgaaattcccaagagatcccaaaaagccaactgactatattggtaaaagcattaaatattttctttaccaaatggcttaggaaaatgctatttaattattttatgctcaatattgagttagttgcatttatgtctaatcttgacaactaatctttgaaggaaaagagtataagtttattcatatacacctgtgtgagacagagatacaaaaaagcacagtgctttgtacaacatagtggtacaacatttgttgacttaaattgacatgtatcctaattttttccacaagggtcactgagtctatccttattctgtatttataaataatgtgagtcatatagctcagtggaaatacagcagctctaaagtccacgcaatacttactaaagctttgttaaagaacgttgtgtaggaaaacaagattgtacatatatataaactgtgatcttgaatcattgcttttgagagctttataataagttctcaacttgtctaacattttatatctctttatcatgaaattcttgcaaattcggatggaaggcctccattaatgaaacatttgtaatagtgagagtgggaaaatggaatagaagattaacaaaaggtctgggttagagtatgaacactattgtccaacatggagtgtgggaagcactgaacaatgaagaagccctgattaattaactggttatcaccaaggctttatccagggatgataattatttgggcacttatttcaagaaggcggaacttgctaatctggtatgaacactattgtccaacatggagtgtgggaagcactgaacaatgaagaagccctgattaattaactggttatcaccaaggctttatccagggatgataattacttgggcacttattccaagaaggtagaacttgctaatctgggtggagggatgttcacaatggcctggaatactttccctgtgcccctcccgttccctgtttggttagtcattcatggagtagtggatataacactggctaaggtcatgtcctcagttcatgttcccacctctgccgcttgtttgctgaattggctagggcaagtcacttcatctatttgaatcttatattttttctgtatagaatgaggttataatataaaggctcaataagatggtggtggttaaatgtttaaaacctaaaacttaaaaaagtaaagcatactatattactttatttgactttaatttaatttaaaaattaataaaagtaaatctaaccatcaagtgcctatcgtgctaggctggtgggaagtttttaaacatggaatcactcattactcctactgccaatatctatttatttatatcttgctgttatgaaaatttataccttgtataggtttaattaaatgtcttcttaattagaactagattttcccaggaacatcaaaaattttttaaaagacaagttagacacacaattatataaagataaaagacacaaattacaaactttcttttgactaaaagaattgaaagttgggctacatttttgtagatttttaagaattctttagaacttcctatatataatatcatgccatctgtggatagttttacttcttcctttccaatctggacggcttttacttatttttcttgcctaattgccctggctagacctctagcacaatgttgaatagaagtggtaaaaatgaacaacttgtcttgtttttgaccttggaggaaagcttttcagtcttttatcactaagtgtcatatttgctgtgggtttttcataaatgtcttttatcaaattggatacattcccttatatttctataatatctattgagatgttcgtgtgttttttgtcctttatttaattaatatgtattacattggttaagtttcatgtgttgtacaaattttgcattcctgggataaatcccacttggtcttgttatacaatccttgtatgctgctggattcagttttctagtattgtgttgaagatgtttgcatctgtattcataaggaatattggtctgtagtttccttttttgtgatatttttgtctggttttgatgcgagagtaatactggcctcataaattgcattatttagtagtattcacccatgatgccatctgggcctgagctttttttttgtggaacttttttgattactaattcagtttattcaataattatatatctattcagaatttttatttcttcttgagctagtttcagtagtttgtgtctttctaggaatttgttaattccatctaagtcatctgatttgttgtatgctatatacaattgtttatagtattccctcattatgctttgtttatttatttatctctgcaaattcagagtaatggccattctactatatagacatataaaactaaatgcagtaatattttcttcagtttctcagcaataggcaagagtctactcagacattcaaagcacatgattgttgattttatattcaagctctgaaaatgggatacaattcttcctcaaacactttttcctctatcatcctgcattagttaggattcagtttgctccaacaggacacatatacccttgcccagtgttttcaagcaaaacagacttttaaaaacattattccagctagttagtatcaaacattgatgggtaggaaattgagagccaatccccactgctggctccaggaccagatcacttctgccatgatccatgccaggagaatggatatcccatgttccactgttcaacactagagaatgaggaagccatccctgggacctctgctacagctgtcatggaaaagccaaatgctttccatgactgtctttttttttttttttttttttttttttttagatgaatctcagtctgctgcctgggccggagtgcagtagggcaatctcagctcactgcaacctccacctccgatttcaagcgattctcctgcctcagtctcccaagtagctgggattgcaggcacccgccaccacactcagctaatttttgcattttcagtagagatggggtttcaccatgttggtcaggctggtcttgaacttctgacctcaagtgatccgcccgcctaggtctcccaaagtgctgagattacaggcatgagcatgtgcccggcctccatgactgtctttaccggcagaatccaggtttttacctgccctagttttattcatttcaagacaatactgctggggcacactcagatttactaattttaaaattagaatttattttagtcactatgacttgagccacttagaaatgtaaacgaactttgagagtaattttctttttttttttttttttgttctttaatttcctcattcatttattcaaaaatatttatcaagtgaaacactattataaaaatataaaaactttgttttaataaatgattttttttttattatactctaagttttagggtacatgtgcacattgtgcaggttagttacatatgtatacatgtgccatgctggtgtgctgcacccactaatgtgtcatctagcattaggtatatctcccaatgctatccctcccccctcccccgaccccaccacagtccccagagtgtgatattccccttcctgtgtccatgtgatctcattgttcaattcccacctatgagtgagaatatgcggtgtttggttttttgttcttgcgatagtttactgagaatgatggtttccaatttcatccatgtccctacaaaggatatgaactcatcattttttatggctgcatagtattccatggtgtatatgtgccacattttcttaatccagtctatcattgttggacatttgggttggttccaagtctttgctattgtgaatagtgccgcaataaacatacgtgtgcatgtgtctttatattagatgaaaacatctgactctgagacatttaaaatatgtttcttatttctttcagcttttatggttttagagactttctattattttcttcttcatacaactcatgtgatatgactgctagtatttgcatgttttgatcttcgacttaaaaatcagttcaaccccctctctacactatcactacatatttctgagataaaaagtacttatgttttccaagcatttgaaagaacacctacatttaaaatgtctgtaactatgatgatattatattataaaaataaatacttacttgaagacaaaaagaaaagaaatacactatacgacgaaggggaaaaaaactataatctttacacaaatcactaggttaaatagccaactgagaaaccttactgaagggtaatttccaacaattgcacatttttctgttttgacttaaatccatttgtattatggcgtaaaataaaaagctcttgggtttaaaaaaaatactctgtgctgagactcccagaacacaactatataaatcttttacttgttctcttcattctacctgaatacctactctacattcattgcccattcttttctggaatatatttgtctctatcttaatccacctcattgtgtcccaggtttatcttaataaaatctctttgcagtttgcattttttactgcaaactttttatgggagtataacatacatagagaaaagtgtacaaattataagcatagaactgaaagaatgaaaggagttttagcatttttttatactgatgccaatgttggctttattatataaactacatcccatattttcacacattatataccattgaaaataattatcaaatagcatatatttaaatgcctcaaaagttgatcatctttgaacttccagagcagccaatgactatattagaacctttgaaaaatgagaaaatacctaccattttattattttcagagtcaccggctgactggagaggcaattttattcttaatttgcagaggtggaggctgaaacttagtgaggataatagaggtgcagcatctaaagtcagacctgtctctaaggcctgccctcttcccatgcccctggatgatcagcagtggcagttgaacatcttataaatattagccttgactgtgatataagaatgactgaagtttggaaaaccctgtatgccagtggttcccaacatttttggcaccagggactggtttctcggaagacaatttttccattgatgatcaggtggtggtagggtgtggaggatggttttgggatgacactgttccatctcaaatcatcaggtattagttggattctcataagaagcacgcatcctaggtccctagcatgcacagttcacaatagagttcgtgctcctatgagaatctaatgctgcagcagacagcagatctggcaggaggtagagctcaggcgataatgctcgcttgcccactgcttacctcctgctgtgcagctcggttcctaacaggccacagacaggtactggtccccagcccgggggttggggacccttgctgtacactaccagctacgcttgctaaaccaactgcctctgaaatgaaaggagagtttagtgaattacagaaagaacttttaggctgaaagcatgtgaggccagtactgaagtctggctctctaccactaagacagccagactggaagctaaagacaacatttcccagatgccttaagagatctggtccaccacaaggacctagcactggcttgagatctaggaggcacactcatcacacctatgttctaatacaggttagctgtcacttttttaatcttttaagaacataaatgaaacttacagaggaggaggcccatcttctgctgcttgtgctgcctctgaaggaaagtgggcccaaggaggcatttggttttctgtggcagctgtagcagaggcccccttgactcatgcctcaattccattagtaatctatttcattaatatgtcatcatatagagtcagggttaggttgaaggcaacaaaatatcctctagtcagttcatgtaaaaagaggttaattagcagttttggggtgactcatcagatttttaaaagggctggagaagtaggctccgggctgaatttgcaggaattaccctcatgagatgtaactgccctgataagaagccacttcctctgccacaatctggaagataaggcatcaaggagctaccaccataattgctggccttaggaccctatatagcttaccatgacccatgtgctacataaattgtgatttgttaattccaaatttgttatcctctctagtttattgttatatctcttctttttcacattttcaaacaaactcttggaagtgaaaaataccaagctgctctttaaatgtaaagatgacattattattctaccaaatgcatttggaaaatagactgtaaagggctatacttcaaaaaatatatgtattattccactcccttctcccaaatttgacctccacctaaccaggtgtcctttttcctaacattgctctgtagatggcgctattgctgcacagtggcaagttggtagcaaaagaaactgacctttaagaggactcagagaacaggttaattttaaagacatctggaactctggcacatggttgggtcagagctaagtattttcaagtttggtttgttgttagatgttggtgagttgcctctaacgtctggaaagcaaagattaaaagatgcttggaatttgcaagccacaaggttggtttggccccaagacaaaaggtacagagctttaaagtttagtggatgttcctgacagcccggtttatatctcgttttgctccttttggggttcacctgggcttgtgtaaaaacgtgacaacctgttcaagagcctgtcttagcctgtgggaaggtggactagaggagctgcctgaaagatgaagtcatgagaataagggaggtgtttttcatttcatgcagactcatggttttacttcctcttgcccagataccctctcttaccttggtaataaaactttgtttgtgtctctttctgacttttgttttgtgcaataaatcatttttctaaaactattcttttggaagacaaattaaagtgaatatgaatgtgaggaataatgcacaaataaagataaattctgagactcattaacttactcagaaaacagacaatgtaactgaagaagaagatcattggctgttttccatttctttccatccatgtctttttgagatcctccagcaaatttgaaaaatatgtggaggaataataaaaatgcctagaaaacctcatcaattcagaaattaatttgactcacctatctgtgaacacaggcaattgcattaacagcatactcctactgataaacagccctgccaatagacatgcttgatagagattcacccaaccacaactctgtgggccaattctatttaggaaatgtcatagcactatgatctgctatgagattcaaagcatatagtttttataggaagaggacattttcagtacctagagggtttttgttttgtacctttaaaaaatagcctgaaagagcggtttctgtatcttaaagacttcctgagccccatccacagagatgatgatgcagttaggtctgtggcaatacttgagatgctatattcctaattgctctataaacttctccaagaactggataagttttggaagcctggttcgtagagaaggaataagatgccaaaaaccggaaagaacctgagagtggctacactctcaagacttgtgatacaattttttaaattgctacataatattttacctatttatgtgatagaggtgagtatttgttacatgggtaagacacagaatgatcaagtcaggatatttgaggtattcatcaccttgagtatttatcatttctatgggtcgggaatattttaggtcctttcttctaactactttgaaatataaaatacattgttgcttactgtagtcaccctactctgttatggaactttagaatttatatcttatggccgggcatggtggctcacgcttgtaatcccagcactttgggaggccgaggtgggcggatcacgaggtcaggagatcaagaccatcctggctaacacggtgaaaacccatctctactaaaaatacaaaaaaattagctgggcgtggtggcaggcgcctgtagtcccagctacttgggaggctgaggcaagagaatggcgtaagtaaacccgggaggcggagcttgcagtgagcctagatcacgccactgcactccagcctgggcaacagagcgagactccgtctcaaaaaaaaaaaaagaggaatttatatcttatatctaatatttgtgcccattaaccaacctctcttcatatgcccctcctacccacacacccttcccagtctctggtgtctaccattctactctctacttccaagagatcaacttttttagttcccacatatgaatgagaacatgcattgtttgtctttctgttcctggcttagtttacttaatgtaatgacctccagttccatccatgttgctgcaaatgacatgattacattatttttatggcagaatattattctattgtgtatatataccacatttgctttatccatttgtcctctgatggacgcttaggctgattccatatctttactactgggaacagtgctgccataaatatgtgagtgcagatatacctttggtatactgatttctcttcctttggataaatacccaggagtgggattgccagatcatatggtagttctatttttagtattttgaaaactctccacactgttctccataatggctctactaacctacattcccatcaacactatataggagttccctttactctgtatccttgccagtatctgttaatttttgtctttttataccagccattctgaggtaagatatctcatggtagttttgattagtatttccctgatgattagtgatgttgagaattttttcatatgtctgatggccatttatatttcttcttgtgaataatgtctatttatgtattttgcccactttttaaagggattatttttttttactgttgagttgtttgagttccttgtatattaaaatcactgcatttacaaaattggaaatgaataaaaggatggacctagggtgagaattggagatttgtattttaaaaccctggaatctagattgctttactgccttctaaaaaaacaaaattgctttctctctcaagttctttttcacatcttaagagtagaataattcttatcttctgatgatatctggtagaggaacaggatatacttttggtgaaaaatactttgagctggcctgacctctggcctctttggctgttggacatgctgcatacttatcttatgtttgttagttttgtaaatttttaactagataaagtgtcaagtgaactgagaaggtgatagaatctagtgcatgccaatgtacaattcaaattgacttacacagagcaatagtcccaagttgtggacttaccagtatgcagtgggaagtgaaatggaaactgcactaaggtaagtgtcgtttctaacagtatattaaaacaacatgaaaaacccaaagtagacactcttagttcaaatagctcaactttgtaagtcaactttgtattttaaaaaaggtcaaagttatacaatccttttactctttactgacttaagatacctacttattttgcattaatcaattacattttattattgaattttatctcatctatcagcttttttattgtatgtttttgtgtcattttagaggttaccctagaaatcacaaaatgcaaccataattttgtctccttttgccatatctcgaacactgcaatgagcagatataacagatatctgtaaaataacagatactggcaaggatacacagtaaagggaactcttatacagtgttgatggaaatgtaagttagtacagccattatggagaacagtgtggagagttctcaaaaaactggaaatagaactaccatatgatctgtcagtcccagtactgggtatttatccaaaggaagacaaatcagtataccaaagggatatctgcactcacttgtttattgcagcactgttcacaatagtcaagctccttgcagtgctttaacttataatagttaaccattcctatccttttttgctgctattgtcacattgttttactcctacataagttataaacttttcttggacttctgtgttatacttctgttctgtacttctgttcttccatctgggaccattatactttgacatgaagaacattcttcagtagttcttgtattgaagatctactagtgacagttctctcagctttggttatatggaaatgtctatttctttgcctttttttttgaaggatactttcattctgtatagaattctaaattggcaggtttgttttttctcttttagttctttaatgatgtcttctagcacagttctggtcagtggatttcttcctgatatttctccagaagcaatatgatctttttcttttaaagatcttctcttattatttctttttagaataaagctgaagttttctttgtatttatcttgcttggggctcactgaatttgtggggtttctttttatgagatttgaaagctattgactattgtttcttcaactttttttatctctcttttctctccttgggattctagctatatgcatgttagactttttaaatcctgttccacgtttcttatctgttttgttttgttctttctattcttttttctatctgtgcttcttgcatattttctattgacttgagtctgtaaatcctatcttctcctatgttcagtctactgttaaacccatcaaaagagttcttaatttcagactgtgtattttgcacttctagaattgtattcaaggtaatccagagggagacagagaaaaaatatatatgtatatacatatatattatatattacacacatatataatctatgttatataatatataattattaatatatataatgaggaattggctcacacaattatggaggatgagaaatttcataatctactgtctgcaagctggagacccaagaaagccagtgattcagtctgggtcccaaggctggagagccatggaagctgggtatgaatcctaatcctaaagctgggaagatgagatgagatgtcccagctaagcagggaggcaggaagtaaaagggacaaattctccttcctttgccttttttttctattcagactctcaatagattggatgatgcccaacaacactgggcagggagtctacttactgagtccatttattcaatgctaatctcatttggaaacatcttcgcagacacacccagaaataatgtttaacctgagctctcctttccagttgacacacaaaattaactatcacaacaatgtttgtttgagctcttaaaataaattctttatttataaatcctctattgtaaccctccatttttttcttcaatgttgtgcatatttcggtctactttctttaacttactaatcatggttattttaaagtctcgtctgctaacttcagcttaatctggatcataactaagcctatttctcttgtctactttatttcatgtccactttgtatccatcattttattttggcttttgaagtgttttgcattctcttccattttctacaccatttagttcttatgaaatctatggatccaccactttattttgggttcttatagtatttcaggatatcttctgtgttctataccatttatttattatgaggtttgtgttggaaggctaacttttttggtaacagtttttaataccagttacagataatccaaagttccctttctttgtaagttactgaaaattcacattttaaaaataacatcttaagaaattgcacttctgtgttctggctcctactacatggacacatgaaatgcaggtatccaagaattgtgctgtttaacatattctgcaaaatgctgattgcagcttattacttaggagcatctttatccatgtcactctttctctctgtgacattatcattgttattggcaaaaaagtatttactgtatgctctcaaaaagtctggaaagaaaatcttccagattttttccaaaatgaaaaagattctctctttctgtcaaaaataatagatcatagagaatgtatgtttttcctcaattcatcagtcccatttcccatgttccaaatattgttactttttattatttaactatttcatagccacaggagctacacaaatataatttatttatttatagactaataccagaatggtttgttcaatggtgaactgaatttcctcctaataagcaaataggttatacgtgttttgtaccagaaaaacatcaatcaaacattatttcagacccacttaattctaggaaagaaagagataaatctgggataatcaagagaatgcaatcatttggcttattttaaaccagcctcatacattttttaaatgacctattttctttgtttcccaacaaattttatgaaacctttactctcaggaatgatccataaaggaatatgtcttcattgtacaggcattctttcttctactcgtgttactatgctctcacagtattcttctgaacttccaggaaagatagctcaaggtttatttgtactttatagcccttttagggcacataaaataacataaatttattttatattatgagcctgatagattattagcaactagaaaccaggtactgaaaaaaaagatgccctttgtgatattagtctttgtgttcaagaaaaggacttgtcaagtcccagcctttaagtagtaaatggcatatgtatatatataatcttcatatgtatattatcctcattatgtcaatgaggcagtgaaaaagtgattcaccatgttttccctgtgaaatcaccacctaggctgaggtggtgaatacgtcctaaaggagtgaaaaacctgggtggttaggaggatgcactttagaataagtacagacctgagatgaaagaaactctcaggccgtgtttgagttttaagtccttcattcgaggatgtgtaagagagcctggctgtggtgggaaatggctatggctcctggcatgtgttaggacctacatttctgaaaagatgaaaatatgtgggagaatggcagtaagtagacagtaaagtcaaattaattttcttataagcttcagatttctcatgtgtaaaatagtaaaaatattttctaattaaatttgaatagaaatttaatctactattaaaatttctctagtttttctccttaactgatgtttacctagaacttagtcaagtaaaaatgaacttactaaagtaaaaatgaactggggcctctgcttttctcagtgactttattacattatttcctccttcctgtcttgtccacttgaacctagagaaccaaaggtataggggaataagaggactatacagccagctgcttttgctttggtgtggaaatgagcctattgccatctttgggttccacaaataagtagacaatagagaaaattttgggaatttcagagtagaaattgtcccctggattctttcaactagaggtgtaactcaaaatatttagccactcaattgtgagttggcatatttaatgtggaaaagcagtagcttagagtatcactttgcatcccaggtgtcagaccctcaggctaggctgagggtcttatccttatatctggctactgtttaattaggaatctgccaaaagtagagatgccttccctttctggtctatgttgacagttgattcttttgattctcctcttatcccttcatcaaatcaaatgccatatgaatgctgctttttgtgctctgaggaagaaaggatcaattttttatatcaatatttctgagccatcagacggcattggtcatttgtcagtgtgaacctagatgggctttttaccccactgcagattgaggtcaatccaatgtggcaaaaactgggggtctgttccttcaaatgactggtggtggtagtcttctgaccctctttactaatttttaccacattgtggacccatggagagatcgaatcacaattttctctttctgccatatctggaccacgtagggaaaaatctttaactttttgataacatatatatgtgtgtttgtgtttgtgtgtgtattatatgtgtatatatatatatataaattacaagtgagcaagatttataaacaaataaattttaagttgatttgcaggaattatttgtttgtcatcttcagaaaatataaaataattggaatgggaaaaatatggatacatttgacacatcttgtttaacaacatataaaagtcacagcctgttgggcccaacttgttcctacattgggtaggggctttttctgaagatttccagtaatacccacccaccttctttaattctagctcccctgccttgacatatgattctcacttaacactacgtacaattttcctctgaatcatatttcagtcatcagatttaaacttacaaaaattttaactagcaacctctctgctatcatctttcagggttaattgaggagagcttacaatatatcatacccattaacactccatctatcttctaatacaaataattaatactcttcatatttactaattcacacccctgtgaatatttcccagcactgaagcagagaatcattagaaattttcactggaaaatttatgacaaaatcattataatttatcattggcaggtagattatgatcctgcaaatatgatcctgcaatatctagctcatcggatgcagcagggctgctttgaaattaaatgatgtgctgcacgtgaagtgcttagtgtggtgccaaacattcaggaaactcaatcaatttcagctgttactgtaattaccagtgttagttgcaagtacgctttccagcataatacatgtccatctctctcaacactggtgtctcccagggtccttttataaataaagcatgggccattattgaaaagccttctttttccaaaggatgagtaaccagcacacaataactcagttttaccagttaagcaaaatctgtagtattctgaatatttgatttaccctttgttgaaacaaacgtttaaaatttttgtttttaactgaacggcttacttttttgacaaaggtggaactggctactaacatttttcatcatgtggaaaaatgttaactgtggatcatgcaaataaaactacagctccttcattgagcataagccatgaagcgctaacagcctgctcaggtctgtgtgtgggtgtgtataaggcagctttggaggatggaaaatacagcaagtcacgtctccattctttttaggcagacttctttctaatttcttctgaacacatggtcataaattgaatagtttattatttttatccaattatgtattgttagaagttctatttttttctaaaggaatcaagacaatttagcaaagctcatttcattaattttctttctatcacaaggctagatgtgctttagaaacatgagtgattatatcatttgttagtttcagtgtaattaagtgggtcgctttacagtagtagcatggaggtaggaggttgaattttagccacatatgtgcaggaaacctattcagtgctgaaactaggtatattgtatgatttattatctaaactggttagtttattatctaaactagttaggtgatgacttttgatgtagctaggggatgacctttgatatttggatgaatacaatctattatatagataataaaccttacagagtagatgaatgaatttaccagcaggattaaaaagaggagagtcatggctgagcatgtttttcaagaactgtgtcagaatgtctacgcctgcctggagttcactttcagccagatgtttccatgatggagcccagctcacatttcccaaatattggactcagattcaggccatctgagcctccatcatcaccagggtaggaaatatgtcttatggggccaaggagaagactgaaggtatagagaatttttgcctgaaagtgaagtagagaaaaaatacagcaggaagagctgctatagatcctgagtttgcagactcaacatccgtgtatacaaaaaaagtttttaaacagaaataaagattctcctttggataccaaatacatccaatgggaaacattgaacttcagagaagcccaggccttggtaggtggtactttgggtttatgagatcaagaaggaagtgaagcagagataggaacttaaatgtctcaggtgggttgaaagaaactctcaggcaatgtttgagatgtaagtccttcattcaaaggtgtgtaagagaacctggctgcagtgggaaatggctatggctcctggcatgtgttaggacctgcatttctgaaaagatgaaaatatggggagaacggcagtaagtagacagtaaaaagtgcctaggcttaaatatgcaatatttccacattctgaaatatctagaaaaaactttatttctctttctcagatctagggagccaacaaccccaaaatattaagggtaacaaaggcacaagtagttctatgtttgtatgtcttgcccaaagcggtgagagaaagagtgacaataaaaacattagcaaagctcttaggacattacttttccagtaaaatccatagaaccatgagatgttagaactagaagggaggtaggagaccaatgattcaggtcccctcacttgacagatgaggcaaatgagacctcatgaggtgagtaagttgtccaaagttgttgcatagctacacagtggcagagctaggattaaaactcagttctccgacccccagtgcagggtagcagaagaaggatgaaggggaagtgcttaggtgaaaaattaatttgggatttaagaaatgagagataatgaggtagattaaaaaaactgatatttaaatatggaaaatggagttacatgaaagattagaaatagaaaaaaatatataagtagaaagtaaagataaggtaacagtggagattaggtgaacaaaattgaggaaaaggtcaacaaacacatgtcacttgtcaccaaaagggtcatgtgtgtttcccagctttattaaggcataattaacaaaaaaatatatatatatttatggtatacaatgtgatgttttgatctatgtatacattgtgaaattattaaataaacctaattaacaaatccatcaccttccatacttatgtttttatggctctactctcttaataatttttaaatatacattattatttaattatactcactatgctgtaccatgctatacaatagatttctagaacttattcatcctaactgaaactttctaccattggcttatatctcccatccccaccctcctgctcccatgcccagcccttggtaaccattttactctgtccttctatgagttggacttttttagatgccacatatgtgacaatattttcctttctgtaccttgcttatttcacttagcaaagtgtcctctaagttcatccacgttgttgcaaatgacaagatttcctttgtctttaagcctgaatagtatgccattacacatattccccattttctttatccatccattcctgttcaacttttgagggatgcttaggttgatcccacatcttgactgctgtgaaagatgttgcaatgatcacagaagcacagatattggttcaacatactgatttcatttcctttggatatatacacagaagtgaaattgcttgattatatagtagttgcatttatattttttatgaaacttcaatacttttctcaataatgtctgtactaatttacattcctgccaacagtgtacgaagtttcctttttctccacatcctcactacaatttatcctttgtgtttttcataatagccattctaacaaatttgaggtgacatttcattgtagttttaatctgcatttccctggcgattagtaatgttgagcagcttttcatatacctgtgggttgtctcttcacttttaattttccctttgctgtttgcagaagtttttcattttgatacattctatttttacttttgttgcctgtggtttttggataatatacaaaaactcacttcccagatcaatgtcaaaaaggttttccctatattttcatccagtagttttacattttcaggccttatatttaaggcttttatccattttgagttgatttttatatgtattgtgagatgagggtccaatttcattcttctgcatgtggatattcaatttgcccaacaccatttattgaagagactattctttcccattgtattttcttggcacctttgttgaagatcgattagccctaaatgcatggatttatttctggaccttctattctgttccattggcctatgccaataccacgctactttgattactatagctttgtagcattttaaaagtaaatttgtatattttgaaatcaggcagtgtcatgctgcagcttttgtttggtgtttgtttttttccctaagactaatttggctattcagggttcttctgtggctccatacaaactttaggattgtttttctgtttctgtgaaaacgtcattaattctaattcaatagggattgcattaaatctgtagatcattttgggtagcatggacattttaataacattaatttttccaatttatgaacaaaggaagtatcgatttatttgtgtctccttcaatctgtttcatcagtgttttataattttcagtgtgcagccctttcacctcctcagttaaatttatttctaagtattttattctttttgatgctattaatgggattgttttcttgatttctttttcagacagattactgttattatacagaaattctttttttttttttttttttttttttttttttgagatggagtctctctccatcgcccaggctggagtatagtggcatgatcttggctcactgaaacctccacctcccgggttcaagcaattttcctgtctcagcctcccaagtagctgggactacaggcgcctgccaccacaccaggctaatttttgtatttttggtagagatggggtttcaccttgttggtcaggctggtcttgaaatcctgacctcaggcctttgtatgttgattttgtatcctgcaacactgctgaatttatttattagctctaacagttttgttttttttttttggtggagtcttctgggttttccgtataggagatcacgttacctgctaacagacaattttacttcttcctttccaatttgagtgtcttttcttttctattctttttttttttttgagatggagtctcgctctgttgcccaggctggagtgcagtagcgcaatcttggctcactgcaacctccgcctcccaggttcaagtgattcacctgcctcagcctcccgagtagctaggactgcaggtgcgtgccaccacacccggctaattttttgtatttttagtaaagacggggtttcaccgtgttagccagggttgtctccatctactgatctcatcatctgcccgcctcagcctcccaaagtgctgggattacaggtgtgagccactgcacccagccttttttttttctttttcttacctaattgttgtagctaagacttacagtactatactgaatagaagtggtgaaagtggacatctttgtcttctttctgatattagagaaaaagctttcagatttttactgctgagtttgacgttagctgtgggcttgttatatatggcatttattaggttgagacacatttttcctatgtctaatttattgagagtttctatcatgaaaagatgttaaatgttgtcaaatactttttctgcatttattgagaagattataaaattattattctttatcctttaaatatgatatattgcatttatttatttgcatgtgttaagccatcttggcattccagggataactctcccttgatcatgttgtatgatccttttaatgtgcagtcagattcagtgtactagtattttgttgtggatttgtgcatctatattcatcaggaatattaacttgtaattttcttttttggtagtgcttttctggctgggtatcagagaaatgctagcctcataaaataagtttgaaagtgttcccctctcaatttttttagaaagagttagagaagaattgatattagttattccttaaatgtttggtagaactcacgagtgaacacatcaggtcctggaattttctttgttgagaggttgtttcttttgtttgtttgtttgtatttttttttttttgacaccaagtctctgttgcccaggatggagtgctgtggtgccaactcaacttactgcaacctccatctcccaggttcaagcgattttcccgcctcagtctcctgattagctgggattacaggcatgtgccactaaaatgcctggctaatttttgtatttttagtgcagacaggttttcaccatgttggccaggctggtctcaaactcctgacctcaagtgatccaaccacctcggcctcccaaagtgtgggattacaggtataagccaccacacccagcctgttgggaggttttggattactgactcaatcttcttactcattattgatctgttcagaatttctatttcttcaggtttcagccttggaagggtgtgaatgtttataagaatttatccatctcttctaggttatccaatgtgttggcatgtaattattaataatcttttataatgcttttgtatctctatagtatcagttttaatgtctcctcttccctttacaattttatttacttgagtcttccctctttttttaagttagtctagctgaaggtttttcaatcttgttaagaaactaagtcctagtttcattgatcttttctattgttttttctagtctctattttatttatttctgctctgatttttattatttcctttcttttactgactacgcttagtttcttctttttctagttctttgatgaaaactttgtgcatttgagatttttttttccatgtaggcatttattgctataactttgcctcttagaaatgtgtttgtccctaagttttgatgttgtgttttcattttcatttgtctcaattttttttttttttgagacaaggtcttgctctgtcacccaggctggagtatagtggcctgatcttggtttactgctcccaggttcaagtgattctcatgcctcagccacacaagtagctgggactacaggtgtgcaccaccatgcctggctaatttttgtatttttagtacagacgggttttgccatgttggccaagctggtcttgaactcctgagctccggtgatcaacccaccttggcctcccaaagagttgggattatagtcataagccactgtgcccggccttgtctctaaattttttaaatttcctttttggtttcttcttttactcattggctgcacaggaatgtgttatttaatttccacatatttgtgaattttccaattcctcccccccaccttttttttttattttgagatggagtttcgctcttgtcgcacaggctggagtgcagtggcatgatctcagctcactgcaacctctgcctcccgggttcaagcgattctcctgcctcagcctcccaggcagctggaattacaggcacctgccaccacgcctggctaattttttgtatttttagtagagacagggtttcaccatgttgtgcaggctggtctcgaaatcctgacctcaggtgatcaacctacctgggcctcccaaagtgctgggattacaggcatgagccaccatgccaggcctccattacgtatttctagtttcataccatcatggtcagaaaaaatacttgatatgattcccatttttcaaattttgttaacacttattttgtggcctaacatataatctgtctcagagaatgtttcgtgtgcaattgagaagaatgtgtactttgctgctgttggatgatatattctgtttatgtctgttaggtacatttggtatgtggtattgttcaagtccactatttccttattgattttctctctggatgatctgtccaatgttaaaaagggggaattgaagtcccttactattattatagtgctatgtatttctactctcagttatgttaatatttgctttatatattaggtgatctaatattgggtgcatacatatttacaattgttttagactcttgatgaattgacctctttatcattatacattgacctttgtctgttgtgggaattttcgacttaaagtctatattgtcttagttatctctgctcttttttggttaccattttcacagaatatcttttttttattttttcactttcagtctatatgtgttcttaaagctaaagtaagtaggcagcatgtagctggatcttgtttttaattcattcagtcgttctatgtcttttgcttgtggaatttaagccatttacatttaaaataattattgctaagtaagaacttactactgccaattggttaattgttttccaactatttcatagttcctttgcttcattcttcttctcttaatgtcttcctttgataattttttgtacttgtatactgatttctttttctttttgcgggatatctactagatgttttttctctgtggttatcatgaagcttattttaaacacttacagaagtctgttttaagctgataacaacttaacttcaacataaaaaactctattctttaacttctccttcttcaacattttatgtcgtcgatgtcacaatttatatcttttatatacagcatttttattgaaaaattatttcagctgtggttatttttaatacttttggcttttaatttttatgctagaggaaaaggtgatttatgcaccaccattaaagtattccttaacagtattctgaatttgatgatattcttacctttatagtgaattttatacattcatatgttttatgttgttaattaatattatttcatttctaattgaaaaactcccttcatcacttcttgtaagtcaggcctaatggtgacatactcctgcagcttttgtttgtctgggaacatccttatctctccttcatttctaaaggacagcgtatagggtataatgttcttggcagttttttcttttagcattttggctaaatatcattccgttctctcctggcctgcatggtttctgctaagaaatctacagatagttttatgaggtttccttgtatatgatgagttgcttttctattgctgttttcaaaattctctctccatctttaacttttgagaaattattataatatgtctcagtggagatatctttatatttaatctatttggcattctttgggctttaaaaatctggatgttcatttttctctccagatttggaaagttttctgtcactactttgcttttttttttggaggggggatttaaactgcactttatttttattttttttattatacttttaagttctcggttacacgtgcagaatgtgcagttttgttacataggtatacacgtgccatggtggtttgctgcacccatcaacccatcacctacattgggtatttctcctaatgttatccctcccctagccccccacccctcataggcccaggtgtgtgatgttccactccctgtgttctcattgttcaactcccacttatgagtgagaacatgtggtgtttggttttctgtccttgcgatagtttgctgagaatgatggtttctagcttcatccctgtcccttcaaaggacatgaactcattcttttttatggctgcatagtattccatggtgtatatgtgccatattttcttaatccagcctatcattgatggacatttgggttggttccaagtctgctatggtgaatagtgccacaataaacatacatgtgcatgtgtctttatcatagaatgatttataatcctttgggtatatgcccagcaataggattgctgggtcaaatggtatttctagttctcgatccttgaggaatcaccacactgtcttccacaatggttgaactaatttacactcccaccaacagtgtaaaacattcttatttttccacaacgtctccagaatctgttgtttcctgactttctaatgattgccattctaactggtgtgagacggtatctcactgtggttttgatttgcatttctctaatgaacagtgataatgagcattttttcatatgtctgttggctgcataaatgtcttcttttgagaagtgtctgttcatatcctttgcccattttttgatgggattgtttgcttttttcttataaatttgttagagttctttgtagattctggatattagccttttgtcaaatggaaagtttggaaaaattttctcccattctgtaggttgcctgttcactctgatgatagtttcttttgctgtgcagatgctctttagtttaattagatcccatttctcggttctggcttttgttaccattgcttttggtgttttacacatgaagtctttgcccatgtgtatgtcctgaatggtattgcacaggttttcttctaggatttttatggtctaggtcttacgtttaagtctctgatccatcttgagtttatttttgtataaggtgtaaacaaggggcccagtttcagttttctgcatatggctagccagttttcccaacatcatttattaaatagggaattttttccccattgcttctgtgcctcaggtttgtcaaagatcagatggtgatagatatgtggtgttatttttgtggcctccgttctgtgccattggtctatatacccgttttggtaacagtactacagtgttttggtgactgtagccttgtagtcaggtagcgtgatgcctctagctttgttcttcttgcccaggattgtcttggctatgcgggcttttttttttttattccatatgaagtttaaagtagtttttccaattctgtgaagaaagtcagttgtagcttgatggggatagcattgaacctgtaaattactttgggtagtaaggccattttcacgatattgattcttcctatccatgagcatagaatgtttttccattcatttgtgtcctcttttatttcgttgaccagtggtttgtagttctccttgaagaggtccttcacatcccttgtaagctgtattcctaggtattttattctcttagtagcaattgtgaataggagttcactcatgatttggctgtttgtctgttactggtgcacagaaatgcttgtgatttttgcacactgattttgtattctgaaactttgctgaagttgcttatcagcttaaggagatttggggctgagatgatggggttttctaactatacaattatgtctgcaaatagacacaatttgacttcctctcttcttatttgaatatgctttattgctttttcttgcttgattgtcctggccagaacttctaaaactatgctgaataggagtggtgagagagggcatccttgtcttgtgctggttttcaaatggaatgcttccagtttttgcccattcagtatggtattggctgtgggtgtgtcataaatagctcttatcattttgagatacattccatcaataccaagtttattgagagtttgtagcatgaaagtctgttgaattttatcgaaggcattttctgcatctattgagataatcatgtggtttttgacattggttctgtttatgtgataaattgcgtttattgatttgcatatgttgaaccagccttgcatccaagggatgaagcagacttgatcatggtggataagctttttgatgtgctgctggattcggtttgccagtattttattgaagattttcacattgatgttcatcagggatattggcctaaaattctcttttttgttgtgtctctgccaggctttggtatcaggatgatgctggcctcataaaatgagttagggaggattccctctttttctattgattggaatagtttcagaaggaatggtaccagctcctctttgtacttctggtagaatttggctgtgaatccatctggtcctggaatttttttggttggtaggctgttaattattgcctgaatctcagaacctgttattggcctattcagagattcagtttcctcctggtttagtcttgggagagtgtatgtgcccaggaatttatccatttcttctagattttctagtttatttgcatagaggtgtttatcgtattctctgatgatagtttgtatttctgtgggatcggtggtgatatcctctttatcattttttattgcgtctatttgattctcctcttttcttctttattagtcttgctagcagtctatctattttgttgatcttttcgaaaaaccagctcctagattcattgatttttggaagggtttttttgtgtctcttatctccttcaattctgctctgatcttagttatttcttgtcttctgctagcttttgaatttgtttgctcttgcttctctagttcttttaattgtgatgttagggtattgattttagatctctcctgctttctcttgtggacatctagtgctataaatttccctctacacactgctttaattgtgtcccagagattctggtacattgtgtctttgttctcatcgatttcaaagaacatctttatttctaccttcatttcgttatttacccagtagtcattcaggagccagttgttcagtttccatgtagttgtgcagttttgagtgagtttcttaaccctgaatcctaatttgattgcactgtggtctgagagactgttcgttgtgatttctgttcttttacatttgctgaggagtgttttacttccaattatgtggtcaattttagaataagtgtgatgtggtgctgagaagaatgtatattctgttgatttggggtggagagttctgtagatgtctattaggtccactaggtccagagctgagttcaagtcctagatatccttgttacttttctgtctcgctgatctatctaatattgacagtggggtgttaaagtctcccattattattgtgtgggagtctaagtctctttgtaggtctctaaaaacttgatttatgaatctgggtgctcctgtattgggtgcatatatatttaggataattagctcttcttgttgcattgatccctttaccattatgtaatggccttctttgtctcttttgatctttgttggtttaaagtctgttttatcagagactagaattgcagcccctgctttttattgctttccatttgcttgacaaatcttcctccaaccatttattttgagcctatttgtgtctctgcatgtgagatgggtctcctgaatacagcacactcatgggtcttgactctttatccaatttgccagtctgtgtcttttaattgtggcatttagcccacttacatttaaggttaatattgttatgtgtgaatttgatcctgtcattatgatgctagctggttatttcacctgttaattgacacagtttcttcatagcattgatggtctttacaatttgacatgtttttgcagtgactggtacttgttgtttctttccatgtttagtgcttccttcaggagctcttgtaagacagggctcatggtgacaaaatctctcatcatttgcttctctgtaaaggattttatttctccttcacttatgaatcttagtttagctggacatgaaaatctgggttgaaaattcttttcttccagaatgttgaatattggcccccattctcttctggcttgtagggtttctgccaagagatccactgttgggcttccctttatgcataacctgacttttctctctggctgcccttaacattttttccttcatttcaatcttggtgaatctgacaattacgtgtcttgggtttactcttctcaaggagtatctttgtggtgttctttgtatttcctgaatttgaatgttggcctgctttgctaggttggggaagttctactggataatatcctgaagagtgttttctaacttatttccattctccccatcactttcaggtacacttgaaatcaaatcaaacatttggtcttttcacatagtcccttatttcttggaggctttgttcatttcttttcactcttttttctctactcttgtcttctcattttatttcattaatttgatcttcaatcactgatatcctttcttccacttgattgaattgactattgaagcttgtttatacttcacaaagttctcatactgtggttttcagctccatcaggtcatttaagctcttctctgcacaagttattctacttagccattcatctaaccttttttcaaggtttttagcttccttgcgatgggttagaacatgctcctttagctcagagaagtttgttattaccgaccttctgaagcctacttctgtcaacttgtcaaactcattctccatccagtttttttcctttgctggggaggagttgtgttcctttggaagagaagaggtgttctggtttttggaatttttagcctttcactctggtttctcccaatctttgtggttttatctacctttggtctttgatattggtgacctatggatgaggtttggtgtggatgaggtttggtgtggtcccttttgttgatgttggtgctattcctttttgtttgttagttttccttctaacagactggcgcctcagctgcaggtctgttggagtttgctagaggtccactccagaccctgtttgccagagtatcaccactggaggctgcagaacagcaaatattgctgcctgatacttcctctggaagcttcgttccagaggggcacctgcctatatgaggtgtctgtcagcccctactgggaggtgtctcccagtcaggttacacgggggtcagcgacccatttgaggaggcagtctgtccactcttggagcttgaactctgtgctgggagaaccactgctctcttcagagctttcaggcagggacatttaagtctggagaagctgtctgctaccttttgttcagatatgccttgcccccagaggtggaatctatagaggcagtaggccttgctgagctgcagtgggctctaccaagttcaagcttccctgttttgtttacactgtgagcatagaaccgcctactgaagcctcaggaatggtggaagcccctcctcccaccaaacttcagcatcccaggttgatctctgactgctgtgctagcagtgagcaaggctctgtgggcgtgggacccacaccctggtctgctggttgcaaaaagtgcagtatttggacaagagtgtactgctcctccaggtacagtcattgatgggttcccttggctaggaaagggaaatcccccacccttgcgcttcccaggtgaggcgatgccccactctgcctcagcttaccctcagtgggctgcacccactgtccaaccagtcccaatgagatgaaccaggtatctcggttggaaatgcagaaatcacccatcttctgcattaatcttgctgggagctgtagaccagagctgttcctattcggccatcttggaagcaacccattactttgtaaagtaagctgtcatccttgttgccttctcctctgtgactctcataatacatacattggctttcttgatggtgactcaaaacttccatggctttcttcactatttcttattcttttcattttttgttcctctgactgggtaattccaaatgacctgtcatttaggtcaatgattctttcttctgattgattcaatctgctgcttaagctctccacgacatttttttcactactgtcattgtgttttttagctccagaaattttgtttgttttattttaatggtttctctttgttaaacctctttttgttcatgaatcacttttctgatttttaaaaaattgtcagtctgtgctctcttttagctcactgatctttaagataattattttgaatttttttttgtcaagcagttcatagatttccaatttgttaagggtcactttattttgttgttgttagtgtcatgtttctctgattatttgtaatccttgtggcttggcattggtttctgtgcatctgaagaggtctcttccattctttacatggaaaagactgaattcttgataagaaaagccctttaccagtcagcctgtcaagaggttttaggcaggctatctggtggagtccatggtggggtctggaattctcttgtgagctggctggtgcctgggtcagcaggtgagcctgtcaactgggtgtataggcctggtacttgggtccactgaggttagcctgtcaactgggtcttcaggggcatggctatggcctcggtctgtggggacaggtataaaatttgtgtccacaggggcaaacctggagcctgagtccaaagaggctgacctactgctgaggtagatcttgagcctgagtcgcaggggccaacctggcactggaattagcttggtgttttggtctatcatgatgagtctaaagcctgaagccacaggggctggccgggagcttgggtctacaggggatggtccagcaccagggtttgctggagtggtcctggaccctgagtccactggagtaggcatggaaccttgaaccatgaggactggcatggagcctttggttggcctggcatacgatgggcctggagcctgggttcaaggggactggcttcatgtctggggcaccatgggaagatacctggagacttactctgttggggccagcttagaagctagctgggtctgtgggtgctggcctggaggctagactggtgaggcctgacctggagccttggggccctggggccctggggcagacctggaaactgggtccacagaggtgggcctggaccctaggtccactggaatgtcatgctccaggtccttgcctggtgcccagggccacaaggactagcctaaagctggagtcagcaggtgctaacctggggctgaggtggtcctgaagcctggggctctggggactggcctggcactggggctaggtcttaagccttaagtggacctagaacatgaggctgcaggggcttgccttgggcctgggcctactggggcctgcctggctttggggtagaccagaagcctgggaccacagatcctggcctgaaacctggatctggagggcctgcctggagcctgagctgtggggcccagtctggtgttgggcagccctagaggataagtctagggtagggagcctgccgggaacctagaactgtgggggccaaactggagcctggtttcacttggctggtgctgggatctatggcaaagtcaggtgcttcaccctcactgccttttcccatatacagggtttctctataaatgcaatactgtgcaagcttggggaaggggtgatgtgggtaatgtgacactgttcattctgccctctttattgcatctcttcttacatctgtgctacatccaggtgctataatctctcacctggactcctcagctcttgtgattgtatagttatgcgtaaatacttgttcaaattgacgtttctgcaagatgagctccgcaaagttcttcctactatattgtagatatcactttcatggatcattcttgccatgcatcatggtcatcttgattatttctttgacaattctatgttaggggaacttccctgaccctctttgatgcctagcgcctacaactttttcttacatgtaatcttaaaatttttatagattaagtcagaattatttgcactagtatccataaaattagaagtttgagttttattgcaggattcagatctagcttctgaacagtgtgcacaagttttcaaaaatgaaaattactggtttatggacatagatggtacttaatgaaggctggtacattacttacaaatgtctcaccatttagttgtaatgagatattcaggatgttcatgattgtttctggaatattctccttattacacaaactgtgaaccttttaaagttggggattaggccgggtgcagtggctcacgcctgtaataccagcactttgggaggtggaggcgagcagatcacgaggtcaggagatcgaaaccatcctggctaacatggtgaaaccccgtctctgctaaaaatacaaaaaattagccgggtgtggtggcaggcgcctgtagtctcagctactcggaaggctgaggcaggagaatggtgtgaacccgggaggctgagcttgcagtgagttgagatggcaccactgcactccagcctgggcaacagagcaagactctgtctcaaaaaaaaataataaaataaaataaagttggggattagttattgttgaccactgcaggtctactatctaccatacgcctagaacatagttactgctcagtaaaaatgtttgagtcaatgaggaatagaaaaatgaataccaatctcaaattacgtaacatagtgatgttgaattgcacatagcgtctgattcaaaagaaaactcattgcttattaatgggacaaggaaaaggagaaaatgacatatcaaattttaacaattttacacacacaagaagacctgaaaagtgtaacaaccaggcaattacttaggcatagccttccttcaatacttttccaaatatgtgagctttcttcatgagtcaactcctctatactttgtaataactatatacagaaatgaggataaaattggtctgtatgtagtctattccctttaccttgtaaatcagccaaggtcaaataaaaactgcccaaaggagtaaaatttttattaaaactttaattttaataaaattttagattgaaatctaaaaagaaagcacagcatggtaatgtaaccagggtggatcagggattctgtatttttttgtttttgtttttgttttttcctgagacagagtcttgctctgttgcccaggctggagtgcagtggtgcgatctcggctagctgcaatctcctcctcccaggttcacgccattctcctgcctcagcctcctgagcagctgggactacaggtgcccaccaccatgcccggctaatttttttttgtatttttagtagagtttcaccgtgttatctagcagcagggagcaggaatacttccctcagcactaaagttgcagatgggctgccgtcagtggacagcacagattgagagcctggaacaatggtcccaccagctccaccaggtttcctccctgccttgtaggatcagcccaaaacatgagagttgtggtatcagttcctaccagaaaagtggccaaagacaatttttaaaagattttggattattttaactaatggagtgaggcaggaaaatagggtctggaggcaggtaacataagactgattcacacttcagttatgagaagaaatatcctctccatagggcatacagcgagtaaatgactttgtaattttacttcattctcttcatttacatagaaactgccttctgggaattttcaaagaaaagtatatcagagatgcagatttattcagatgttcaaacaaaataattatttctctctttttccagaactcatctgatctttctcatcagtcctcatctgagctgtagagagaaaagatttagtccagtttggaaaccccagtttgacctaataatataaaaattgtcttgaataatgctcagtcattcagacattgcctctttcctcaccccagtgctctaaatagactccaacacatacacagatggactccccaacagtatatggttggagcagagagtgtgcatcatcttatagcaacagaggaatgatgagtcttacatatctctgcacgagttcttgcagagtcctcagctccctgtcacacaatgtccctatttgcctggttactgtgctacccattggcatatgaaggtgaatttttcagcaaatgaactcagctttctcagggctccttacttggtcctacttcaacttttgctgggtccatttctcttcctgaggtctggctgcaactcctacctgagcctcagcttgtatgtgcccttggataaggagcattttacctgtgctatagtgacacttttcctttgcctaagctggtcagccaggaccactgactactttctacatttctcctgaggaaactgaagatgttttgagtatgtttatactacatagggttggatggagactctaaaaaattattctgagatccttcactctggccatttggccacccagcatgtgctgtggatccccaaacaagaaagatgcaaaagtccttctttgtgtgtgggtgtgttgctctttgcattgtcttcaagttatttgccatgacttctgcatccagaacctttatgcagagatagaacctttgtgcagagatagtggtgtcttcttgtgtgtctccagtcttcgatgcccatctgcctcccacaatccagcaaaactagaaagggcaaattttcccattcttttcccttacaggtaaggaattctcttacagaaaactgaaagatctgatctgccaggctaagattttgacatgtttagtagttagtatgttagcatatccttttgtattttgataaacactgtgctccagtgctgttgtcctgcagtggttgggagaaagctgccttcaagatgcaaggttggtggaagacctgttcttgaagggatctgctcttttttttcctacagggggtctcagaactcagcctaggaggtgggaggctgccaggaacagggttcataggaggaaatgatatacattagtatattttcttaataatactctccctgttctgggaatgtgaagtgcctgatgaggtctgttttgttccctccttgagtttccagacttaaccttgccatctaacagcccatagaccatcccctcctcttttcttagtttcctcagagtacctggtggcttcccataaaatctgacctcaatgttaatgtgaggagtgaggaggaaagcatgtgaatgggaagaacaaatgattatgtgacaaccagagacaacttcagaaccatctcagctatgactaacagggacaaaggtacatgtacagtattaccatcaaagccttctttctacaagaaagtaaactgctgctttttcttgcatgcaagtgaaaacagaagagtcttttcatacttttcttatctctgtcatgaaaccaggaatgttgtgaactcatttcttacttatgttcagaaattccggtgtgttttgggcagtttaacagcggtgtgtagtacatgaataacaacaacaacagtaataattatagttcttctaagtgaatagagtgattgtggtttggagtctttttttggtgaagaactggactggctctcctagatgaagagctatgtgaggcagaacactcgctttgcatatttcccccacaatagtcatttgtataaatcgtgactaatttaatacccaaaatcaaggcaaaattacattttaacttcacactattaaaactggggcagtccctgccaggttcagcttgcccagaattgtatgcattgcttttcagcatttcatggtccatttctcctggacttttgtgattattgaaatgtaaatgagaaaaagtgtgaaagaatcacaaccattatgcctcttaaatggtggttgttaaaaataacctttagaggaggctcaacaattaccagttaggttactccctccgggatccaccaagccctcttgatcagaacttctttgatggcaggtggcagggagggagggttgaaaatattctgaatggccaagagatgcaccttgcccttggaaggtgtaagccagaatcttttgacttctaagtaattttgtttttgttttttgaaatgtggtcctgccctttggtgtgcataacttagagatggataaatttgaatagtgatgttccccatcctgtgtccaagtgttcttattgttcagttcccacctatgagtgagaacatgcagagaatacttggacacaggttggagaacatcacacacaggggtctgttgtggggtggggggaggcgggagggatagcattaggagatatacctaatgtaaatgatgagttaatgggtgcagcacaccaacatggcacacgtatacatatgtaacaaacctgcacattgtgcacatgtatcctagaacttaaagtataataattaaaaaaaaaatttgaataggaagcccaaaacccttctgggaaggaaagcacagaagttctccactcccccaactctgttcattgcaatttgaagttagggcaacatttcctagtggaataaagcggccctaaccagaacctgagggcagaaaagaacatctttcagtccttaagggaaagtgcaatgacctaatctgatggccccaggctcatggcccagggctgattcttacacaaggcacgttccaaacaggaatcccctctagactcagccagagtaaaatgctggagaataatggctgagcatgtagatctgaccttggagtccaacatggacaccatcatgtcttggatagagatctgagagccagcaggacatccctgtagtgatgtagtagcagccaccagagttcgcaggacctgagtagccatgtggcagacaccacctggtgtttggaagaggagctgcctctattctggaccacataaacccctgaaggcaagtggaaggagccttgattaactgaaaacacagtcaagagatgaaagcatatttgtattctgaatttgtgaacgattacacccaggttacaaatcaaaccataatcacaatttattgaattactatgcaacttgtcctagtctaggtgcttctaggagaataaagaagtttagaccatggtacctgtctgcaggaattactgctgaatattagagaggtatttgtagtcaaagaacaagagaatatattgaaggcatcaattgtgcaaaaatataactatttataattattgtgcaataataattatagtgctctctaagcatcagactgttcttagtgcttaacatctataaactcactgaaccctcagaatagttctgttatctccatttcacatgtgaggacactgaaacattgagaatttaggtaaattgccagaggtcacacagcagcaagaggaggagtcaagacttcagcctgtagtccggttccagagtctatgttcctaaccataaaacgcctcatgcagccactgttcataagaaccacaggagtttagaacagacaatagcaaaagctaggtactgcagacaaatgcacaagagtaatttaacatccagaatcaaggcaaaaattactttaacagagaagcagataaaaagatacaccatgggcagtttagaatacacatggttttggacctgttaggacaattgaaatgatttgtgttctgtaaggttggcctaagagcagatgcattttcaaacggagagaaacaatcagttatctatgaaccgagtgttgtgcatataggaaagcacatctacacattaacccatcagactggtataatctccattttgtttgcagagtttatgcgagatcacagagctaataattaggaagtaggactgaaacacatctgctgggaaagtgcacgatctttatacgaaatcataaagaatgggaaaggggattctaaaacaacaagagtttgcaggaagaaagggtgaggatattccagtatggagaaagacagactgttagaaacttggaagcaagtgtacttggcaggattaaagttggtcttggtgcatggctatatatgaagtgagaggtacttcatatggagagaagggagggtatgggtcagatgcaaagaactcttagagcacaaccatcaagtccacatttggagctgaggtttgatatgtaccgaagtctttactgctttccagggttgcattgcctgacattacaccaagccaccagccagaacgtcttgtgagaacccctttttggttcttcatttgccctagtgaaatcaagggcatttcaggccactgcacaattgcatgtttatcccctaaatagtttcatttttattttttaggatcacctagtgcatggaggtattgatttagtgtcactcaagcaacgaaaataaatactattttgttaaacttcttagaagtaatttagacactggatgactatgatgaattcttcatctactctcaacaagatgacgtttctgggcatctttaataattaagcaatggcagattaattttttaagctagcctttgtaagtggtaagataaataactttatggaagttatatggtctgcttctcaggataaccaaagcaccttaacttcattttcatatacttagctccttatcaatttttaaattctatcctcttgtttgtattcagtcagcaaatacttaacaagcactggagattcaataatgaatgagacaccatccttgcctttaaggtatacatagactaagagtgatgatacacaaataatcaagcaaagtaatcaaaacagtgttaagagtgctatgcatgggggcaaacacagggtgatgggagcccagggtggggagtggcttacttagtggtgggagccagggaagtccagcctgagaaggctacatttcagccaattgaaggaggagtaggatatggaggacaaagaaagcagcacatttgaaatcctggtaagataaattatgatgcatttttggaaattgaagcaatccaatatgtctggagaagctaattttacgtggtaagtggctttggagggcatggaatatgatgagaccagggaggtatttgggttgtatcctgtggtcctttatagcaagttaagacttgttgagtctattgtgaggaccaatggtaactctggaaaggctaagggcagggatataataaaacctttaatatgtcaaagaaaagaaatcctagttgcagagtagccaatggtttggggctgagactggggggtaagccgatcacgtacaaagctacagcgctaagtcaggtgagagatcatgataggctggccttactaatggcagtgaagataaaaagaaagacatagattaactcaggaaatattgaagaagaaaaaccgattaatcaccgattggaagtaatggacaaagggagagaaaggaggatttccacatttctgactcggctggatgtgtggttggtgatatgactgcatgtgttagggaaccaattgaatttgaatttctttaggaaccaccatttacatatgtctggttgactgtgactacactgatctggagttgaggggccaggggtgggaatggggatatggtctcaattgccatgatgaatctggtcattgtcagcaaagaaatgggaacagaagccatgagagaacactgttcttttaagccctgaccccagagagtgcccaaggaggttgttggtgatcctgaggaaagcagacaatggagtgaaggtggcagaaatcagatccacgtgggcaaagaaatgaatgttaaatcaggaagtaaagacaataaaggcaggcaaactcttgctagaaatttaggaatttaggagagaggttgttaagttggtgtctagctagcttttttttttggtagaaacagggtctagctttgtttcccaggctggtcttgaactcttggtctcaaaccatcctcctgcctcagcctcccaaagcactgggtcatgcaggcataaactattgtccccagcacagcttttttattttttatttttaataggaaacatagaaactgaaacccttagaatatggtactttgttaagcaatctgaacccttacttgaggtctttgttggcctctaggggacctaactctgtggagaaaacttagcagctttaaagatggtagggggaaaaaaaatactgaagccctgatgcagagtattacaataaattgcttctcacagctctcatcctcctttcctggacctgggaaacagagtgaaaacaaatcttgtgaagaacaaaggaatgagaagcatggatattttaatctcttgtttcttgttaattaaataatcttgtttcatcttgcacagtcttcttcagcttaataaaacatgataatgattacttagcttttaaaaagcagaaattataatcaatattctcaataaagaacttgagtaaacattggttaaaaaaaaagtgagtacattttctctccatgtatcaagtctttgaaatgatcttgtagaaactgagctgtgagtttgggtaacacttttctcatctattcccaatcctggaatagaataattagctctaggggctagaacccaatggacaattttacctacagaaaaaggaatggagcaagtattgctattacctaaatattttttagaataatattttacaggaaataaagggcagtaaaatgatttaggcatatctttgtctcttattatctgaaatttccatgtcagtggagaaaatgaatcaagatatgctttggtttagatggtgggacatgcaaaaatttggtaaatgcactaaatattgtgttacaatgaatgagtgaatgttgcttcatgtcccaggcaaaataatcttcaagtaagatcataagaagttatcttaagtggattttgatatctttatttttataataatgagaaaaccgagatatatttccttatgacctaaaaatatcaataataagaaattttatgtagcttagagacatatcaagctacaagaaagaatacattttaggaagaagaagaagcaattattgtctaatttataaattagagtcatgtttgcaagtgttcattcaaaaaaaattttttgaaagcgacatagcttttgcctctttgcctctctctctctctttctctctgcttgttcttggcatacattcaacattctatgagaaagccacctgtagaggccacatgtaaagttatactggccacataactacctgtgtgtggtgagcacaatgcgagcttctgatgattcaagccccagccttgaagtcactgagctttgacatgcagtggatcaaatataggaccctgcttgtggtctgtccaaatacaggtgagtaaaatacatgttgttttaagctaaatgttttggagtggtttgtacgaaacaatagaaaatgagaacacactaagtaaccctaaattcaagataataaattactttttcctatttgatagaaaacatatatattttgatagaaaacatatacgtttctgttatcttttcctctctgcatgaaaggatatgtagtcctgtctttctgtctcatacacacacactctttctcttatacacatctgccacatgcacgctcacagagaagttctaagttttgcaactacttaaagcttgggtcaaaacaaaccctgagatcaaccacaaaataactacctgaatataacttgttccagtaacaggtagcccaacagcataaatgtgcttcccaactcaagctatatgttgatgacttaaagctaaaaaacacatctggagatgacacagctgattgcaaatgacagtaggcttaagcggacagagagatggtgtttccagaaaacattagcatcctgttatgactcactatgtcctcaggcatgagaaaggtatggtgtcagtcccttatctttagaatattagaggcattttgtccctactcagcaacactgaaagaacagatgactaagcaaaaagagttgcaagtagcgctgattctcctggctgcattcagaagctctctagttataataatgtaaacatttccagtagtaagaaagaattcaaggtgagtcacagtttacaataaagttaaaatagcttattagaaactactccaatccagagtagagggtcctcagaaagcaagaggaggaatacccctaactcaaatgtaacacttgcttatgttggatattaaagatgagaacagtgtactttattataaaggcttgtgattagcttgtgacagacaataataataataataataatagtgtaaacatataattttctctatttttatctgatgatcctcagtttaaagcaacaaatatttatttggttcttcttctatgtcaggcactgtgctaggaacttgggttaccatcctgaacaaggaacaacccctggctacatgaaacatgtatccaaaaaagaaacagaaaaatatacaggcaatctccatgtggatgctaaaggctacactagggtgaaatacagtggtctatgagagcccagagaagaggcactaagctagcttgagaagggctggtttccaggaagacgttatggcaaaagcgtaatctgaatccagacccgaaggaagcataggaagtgaaggggaggcagtcaggaatgtgtatagatattggttgcagggcagggtaggggacaggctggagggaagctgtttcatacaaagggcataggatgtccgaaggatcagaagcaagacattgcaacactatcggggaatgaaaagctcagttttcttccttgtttggttggttggcttaaaaaaatttttttaaacagtacgatgaagagaagtgctaatagatgagactagagatgtgagcccctgtctaattatggaatatgaaaaagttttcattggagaccactgaaggaagctaaaccagggagtaatatatcatatttgtgctttagaaaaaaagccactctggtttcaccatgaaaaccaagttagaaggggctactagagccaaacaaacagagttactgtttttcacacccctaaagaggagagcgccctctgataattccctcagtgcacctcctccaggtcctgggctaagggtgatggtggcttctatgtctgacactctcatagttttctgcgtgtgtctgaggacatcacgccaccctttgtcagcttgtctacccagctcctggacaagcacttcagcctcaaggcatgaacttggtgattcattttcccatcccatattttatttaaatctgctaactctcataaataaggaattaaaaaataattaccacgttaaagtttagattttatgtaaccaatagaaaacaaaacaaaataaatattttgatgcctaatttttagcaagaaaaagataatatgcacaatgtttaatgttttaaagttaatgtgtaggccgggcacagtggcataggcctgtaatcccagcactttgggaggccgaggcagaaggatcacttgaggtcaggagtttgggaccagcctggccgacatggtgaaaccctgtctccactaaaatacgaagattaactgggtgtggtggtgggcgtctgtaatcccagctactcaggaggctgaggcagaagaatcccttgaacctgggaggtggaggttgcagtgagccaaaattgtgccacagcactccagcctgggtgacagagcaagactccctctccaaaacaaaaacaaaacaaaacaaaacaaaaaaaacaaaaaaaaaacaaaaaacagttaatatgtattatttctaagccctaatttcaaaatatcaaatctatagtcattttctacagtaattttatataactatcactttgtcaaataaatttagaaacatcagaagttattataccacacttttgaagtctatttataatgttgatatttaactgactcatttattttgtgttttgaaactgctaaattaagaaatggctgattttgacatttctgaaaatggaatcagtgcaacaattgttgggttgactaggtgtgagtcatgtatgcagtgtttctgcaatggaattcaggatgtacttgaaggctggtaaggctaggtaaggagaggacccaaggggggtcaccctgtagatggatcacttctcagtagtgactgtgggcaattacaatagtcaatttgttttggtggttggaaaacattatcctgactctataaacctaacatataggattcttttatttatttatttattttgagacagagtctccattttgttgcccaggctggagtgcaatgaaaccatctcagctcactgcaacctctgactcccgggttcaagcgattctcttgcctcagcctcccaagtagctgggattacaggcatgcaccaccacacccagaaaatttttgtatttttagtagagatggggttttaccatattggccaagttagtcccgaactcctgacctcaggtgatctacctgctttgccctctcaaagtgctggaattataggcatgagctaccgcacccagcccttataggattcttgatatgaaaatatacctttgtgtgtctgtacacagttcttgaaacaattgctcaatggaaacatccacctaatgtcacttagtttgcttctcttaatgtcaggtgaaatcatgtacattgccacacaagaagaatccttcaagatggtaggaagtggaaatgcagagtagttaggagtgtatcctctgaaggcaggcatgtttctacctcttatttgccgctgcaacaggaattagcctctctcagcactacttcctcatgaaaatagaagaataccaacaagagcacttactcagagagttgttctcaaaagatgctagcagttgtttgactctagtaccttttccactgcatcatactgaacatatatagaaggaaatgtaatcccatgggcttggttacatattctgtgttagaaatctgcctctaccacttactacttgaatggcattagatatgctaattagtttctccaaaagtcaggtgcctacctcataaggttgttttgaagattaaattagaaaatgcatataaattactaagttggtgcaaaactaattgcggtttttgccattagttttgcaccaacctaacacttatgccattatggcaaaaatcacaattaggtttgcaccaacctaatacttagcacagtgcctggtccacagtgagcagtcaaataatgtcagatgtgatcaatagtttcaaatgctacagagaggtttgtaaagataaagacagagaatatgctcttgggcttagcaagaaaaaggcttacttctttatttaacatgtatacattgcctgaatgccaagcatgttctaggtgatggggtcaacagcctctgcaatctgataagaaaagagactaagttaggaggaaatctccatggagtgtgatgagtacaaccagagcagaaatttcagcagcttcaatggctcccatttactgtgttatgtgctttacatatgcagattccttcaatcttcacaaccgcttcatgaggtaggcaggggtgaattcaagttttgtggtgcttgaatttcaaatatttgggtccctccttaaggaaaagaacatgaaattgcaaaaacaaaatgagatacaatcacaactattcatttaaaatgagaaatcactataaagtatacatttttaaaaaagatgatgaatacaagaaccatcacaaaatcagcattatcattttattaaataattgctaatatacatatacaacagtttatccataaatttttagctgcataatctttgatcacctcctcatgtaacaatattgttgtagtattatttatagagagcattaaatttcagagatggcccccattttcagccctgctaatatcctcaccattgtcatataactttgtggtgctcacctactttgattttgggcttaaccatgtgattggatttggttaatgggatgttaacaaatgtgaagcaactgaaggtttgaaaagtgcttgcacagttggccttcctctctctcacacctctgccttttgataagaatgtacttagaccagcttagataagtgcagcataccccagtcaccctggttgtcagctgaagccagcctagatcaacctactggtaacctacccacagaaaaggagaaaaccaagctaagatcaagagagccatctggtcaactcccatctgacttcattctcataaacagtatgtttattgttgaatgccactgaggtgttgcagtcatttgttacacagcactactgaggcaatagataactgattcagacagaatagaaaattccctctaacatgcttgataaaaaaaaatatttattattgttgatttagaaaagtttcaacttcacaactcatattggtgatgtcaccaatgtcaagaatggtttgttaatttcattattcataaagtgataacttatcttagcaatataattttttagtattgttgtcaaattttgggaaaacttttcaggcttccttaacgtttgtcacagatataaatggtatttattttaacagtgctgctattggtttgtgtcctacaagcataggaattcaggtaagatttattttgcacaatttttatcaaaataaggcagaaagcataggtgcattcacatttgtatttgctgtattactgaatatatccctgatagtcaataccttccattcaaactgatctctattggatctgaatcctctgcttttttgtacctgatgggaagagttttccacagactatcttcaggctttgtacacttcacatcttggttttccttttgcatttatgtacttctgatgccaggctctgtagaagatgtttctattttgccatgaccacaggtcctgcatctttctcccataataacctggtgagttgccacatgtggcagcaaaaatattgcaggcagacatttctaggtggggatagccagcaaaatttaatcatacatgaaagcaattgtgaaacacataaatatatttttctatactcaagttgaatgtatcaccaactaaacttccctgtagctggacccaaaaattgttatgaccatttcagataccatccagtggaggggaattacaacagaagaagacagacagaaaaaaagaaaaaaagcacttttgcaaaatgttaaaaagacatgacttagaaaatacattgctctggtccttcctcccagagcttgccttcctcccaggcaaatgaagggccctaaagcaggagcttcatttggtgctactaatatccccccttatagtttagagagactgagagagtttaagtaatttgccccaggtcacaggattaatttgataaacttgtgaagaagacctggcggttcagctagacttgattgcagcagcgattacacaatctccaactacggaaagaagagaaacctggaggctgaaaagccagcccagcagggcctggaagtcaggtgggcaagagaggtgaccctggggtgggaagattgtcaagtagctgagaagaaggacccccccaccagactgaaggaaggaatgactaaaatgtgtgttgagtggataaagaaattatagattttagtgattgagtggcatttataaggttctgcatgtttcatgagtgtggtttaactgacaggaaaatgtgcaacctaaatctttaacaaacaattggttttgaagtttcaaagaatagagagttggggagaagatggaaagaaaaaaattcaagctgagtattaaaggcctatccggaagagaaggaaaaaaaatcattgtctcctgttcaaaaccttctacagtttgaaaactataactaagtctctttcaaacttctctattaatccagtgtaccttcaagccttcatcaaaggatattcccaagtttatagttgcttttgccttctgaatattccttaggtttctcattttccattatggtatctccaaattagcctattttatgaccttctaataatgatctggctaaggttagaaatggagagaaaaccttattcctaccagtaagccacagtcatgtgtttacatctatgataatgtggtggtgcatcacccctattgtatcaaatgcaggtttcacaatattcaagaatttcaagctgagctagttagtgtctccaaggtcaataccaccatgacttttcttccagagttcatggttttgtgttcgtgactatggacatgaggtctaaaccagatacacttggagacaaggcctaaagcactttaactctacaatgacaaatggactgtggactctattctttcaaaacactttgcatgaaaagaactgtaataaactaaaaacatagatggacatggagaggtttatttttcttagacaaataatgaaaatagagccccacattttctccacttgattttctatttagactgcagcacttcgtctttatcctctcctgggtgaaagagaccccttaggctaagaggaaattgaaagtcagcagcagtctcctcagtcccttgatctgcctgttgacctaatgggctccatcttttgaagagagttgaggccaaaactttcatttctgaaatgtcaatgaattattaaactcataacacaaatgacatcaaaggaaacccatggtgcttttggtgtcccggggaaaatttcatcttatatctcagattaaatatagtcttgcataaacaaacaaatgaacaaacaaacaaaaacgcagagcagttaaattgtcagtgatttggaaagcccaaatcaaatattcttgaggatgtggcttgtttaataaacttttatgcagttttggctggcttcattacatagagggctaaccagtgctgctttgaaccactgaaaagaacagatgaacttggagatactgttttcactatctaatgagaataaaatagaccaaatgtgattgttaagaaattgctgttaggggaaaaacctttcattgtttttatacaaagttgctattgcaatgtacctatttcaaatcattttaaggtttaacaagtttgtttataaacatggatttctttcactagtacaataaacccatttggtgggcaatgcttttttttttttttgagacagagtctcgctctgtcaccaggttggggtgcagtggtgcaatcttggttcactacaacctccacctcctgggttcaagcgattctcctgcctcagcctccctagtagctggaactacaggcatgcgccaacacactaagctaaattttgtagttttagtagagacggggtttcatcatgttggccaggatggtctcggtctcttgacctcagcctcccaaagcactgggattacaagtgtgagccactgctcctggcctaatttttgtatttttagtagagacggggtttcaccatgttggccggaatgatctcagtctcctgactttgtgatccacctgcctcggccttccaaagtgctgcgattacacgcgtggggtaatgcatatattattgctacagtttatatatgaggaagctgaggattttgtaatgccaagttcacttacaaaaggccacacaactaataagaagcacagcctggacttgaacccaggcttctgtcttttagaccagtgacgttcttatgtgttagtcatatttttaactttctgtcttttatgatctttgatatcttgggttcttgctaatgctagaaaatctgcccctcccatggctagctaattcctatagagagtaaacaacttgtctttcatatgcaaaccaaccaatccaaaacccataccctaaaccacctgctttctttaactctcacacaccaaactagtatttcccctgcattaaatcaacttaggaccaggaactgatagctagggaccacccctatattatggagtcaagtgaaatttttcaaactagccagtcctcaactgcttaccttgcctcgacttttcctttccccccaaaaccacaataaaagccctttgcccatactttctgctcattgtttctgccttctgatcgaagctggtgcttccctgtgtgtggccttgtatggcatggcatgcccctccacttgggaactgtgagtaataaaactctttcttcaaaggtagttgtctctatggctgccaccttggcacatctgattaaaagaaaaaattccagatacatatctaggcatcttcccacatcagcatcatacccctttggtagttagcattacccttgccccgtccctggacactaagggaggaagctacttataaggtcccccagagcttctaagttatacaggccccatgcaaataatttttgtatggtccctgtccttattaacattctgattaaaaatagactgcaagattcatcagtccttgcaagttacagtgttttattgatgaagatttagaataatgggtagagaagaggtacttaggtatttgcatatgatccaatcagtgtactgaagattctttgtggtgtccaggcattgtcttgttcagatccggaaaccattttttaaatgttctttattgacaaatgtgcagtttctggctaatttcatatttcttaccacaagcaaatgatagtaatgctgttattactcaaaatgtgatggatctttagaatctgtttcatgtgggaaaatatagctattcttgcctctgttgttgcccattgccatttgtttactgctggttagatcattacctttgatgctatattatccatcatgccacccatggatgttgccttccagcgactctgaaagggtttgtttctgtgctttgttaatgaggcccacaaatgcaagccttgccccatctgtgcaaaaaatatgagcaataatttgtttgatggtcatgttaaatttgccattcagaactttgtagcaaaagcatgtcttccaactgtatctcctataaactctttagacgataatcactgtcttcttaaaactatcactttttcaatgtcacctgcacactttcctctatacattgctgtcaacaagaggtataagcaaggggctagtgagtggagtgagaagggcattcttatatgtgcaaaaaatggactccctcatatgacatgatttaagacctgagagaacaacatcataatatcaattagagacaagagaggacatggaataaaagggccctttggaatagcagtcactggtctttaacactttcagactagataggtgcagcctgcactgtgactgtcaaccatatgtggcatgaagcctgctgagagggtggggtgacctccctgggtctcacataagctaaaggaaggatgccttctgccactctcaccaccctcaagtgctgtagacaagaggtggatcctggatggaatttgggctggtgaaaggccaagaatgcagccataggccaagaatccacagtggaccagaggcctgactgagctcaccctgcatctttccagagcaaaaggtacttcgtgtgagtgtgccagcaccatggtatagcccaatttcttgtgatcacatgaaagaaagcaagcagtcagtagagagctgcttaccaggccatcctcctagaaccagggcctgaccagagagcctggggacaacacctcaggcataaatccgggcatctgttgatgccttgtatgggaaagagaatcagagactgccccaaataggaagatgcaaagaccagaacccacagagccctgagctcagagcattctgcccttgtgcctctgccagctggtcccaggcaccagagggtcttagaaatgtcaagaatggcacttcatagcacagggctcttgagccggggccctgcttgttcaggtgttagggtgatactatactgattccctgcccccactgcattttgttactttttctgattagcaagacaatgaaaagctccagaatacatgatgagaagcctcattttctgtaacaaatatcatccatgtgccccttcaaatccatttccaccccttttcacctcctctctgctctggagtgctgactgataaggactgcatcttcaaggtctctgaccctctcacttccaggtggatttcaccaatggaaagccctggttggggatcagagggacatgtcaaatgaaataagagaactattccccctcattctttccttgtgaaatcattttaggtttgtttccccacccaagaccactgcccctcttagtccgcccttccccattttaatctctctcctgggttctggccgcttctctcccagtggtaccaacttggctgcttctagcgcaagggttctgcactatctacaggggtagtgttacttcctttgtaattaactcttctagaattgtcttatattgatacacttacaaatgcaatgccttgttaaaacatacacaagtgagagataggcagcaactggtgagggctcctgcttattggcccatggccagtgcaagctgcctacaagcctcatgaacaggctagtctcactcagtcagctatcagggcctgcactttctgtctaagacatgtgagctgtttgcaacagaagacctgggcatccctcagctgggctcacagatcatgaccctctggctgcttcacggagctccatttcctggtcctcctcagaaaacgttatggtttggcacagggttatagccagtcatcatgctttcccatctgtaaaataaagaggttggattaggggatgtctaagatcccttctggcactagcgtttgagatttggagaaattgccaaagtggaagtgcttccttccaggtccacccttaacatttgcagagcttagtaaagaatgcaaatggaagtcatcttaactgtgattctaaatctttagaagtttcaaataacagtacaaacaatttttaaaaatatgttctacattttcaccctgacaaatgattctttaatcacaataaaattttttaaatgtgtaaagctatagtttatcagcaaaatagcaaagatgtgtgaattttaaccatgactgcataaatgtgattattatgttggttggcaatatttgaatgagtaataaaatgaagatgtgcataaattataaataattctgtattacttccaaatttaaaaaaatatttattgtagtgaaggtgctaattatggctttgccatcaaaatttctttacaatttttgttcttctaacagggtctaaatgattaaaaaaataaaggcaatcgtattcaaagtatacaaatattttaatagatttttacacaaatatgacttaccgtgtaaaaattccaaacattaaagttatttctatatgttaaattagttttcttctaaatattcaaatttcttctaaatattcaaaataataagcattaagatgtaaaataatattaatgaataacaaacattcaaataaaaattatttaaataaagctaaactttttgtttgaaaatttaattaaattttcttttattaaaaatctcccacattctagagttcattatcaattatccagcatctataagaaacttaaacaaacttacaagaaaaaaacaaacaattttattaaaaagtgggcaaaggacatgatcagacacttctcaaaagaagacatacatgcagccaacaaacatggaaaaaagctcaagatccctgatcattagagaaatgcaaatgaaaaccacaatgagacaccatctcacaccagtcagaatggctattacttaaaagtcaaaagacaacagatgctggtgtggttgtggagaaaaaggaagacttttacactgttggtgggagtgtaaattagttcaaccattgtgaaagacagtgtggtggttcctcaaagacctagaggcagaaataccatttgacttggcattcccattactgggcatatacacaaaggaatagaaatatttctattataaagacatgagcatgtgtatgttcattgcagcagtattcacaatagcaaagacatggaatcaatgataaactggataaagaaaatgtggtacatatacactgtggaaatctatgcagccatgaaaaggaatgaggtcatgtcctttgcaggggcatagatggagctggaggccattatctttagcaaactaacacaggaacagaaaatcaaactgcatgttctcacttataagacatgggagctgaacaatgagaacacatggacacaacgagggggaacaacatacattggggcctgttggggtcggggttgtggggagggagagcatcaaatatagctaatgcatgctggacttaatactaggtgatgggtggatccgtgcagctaactaccatggcacacgtttacctatgtaacaaaactgtacaccctgcacatgtagccctgaacttaaaagttggaaattaaaaaatatatatcccacaattctagagttcagtgtccatctagttgtctacgtaaaatgtattccttttacacatattatttccacacctgatatatacaagcttaagatgaagatgaattgtttaataacctaaaatcttactcaccagtcatgtgcaactgttgtgaagagtaggctaatttgcaaaacctccagaaacacaaattagaacacaaaaagtaggaagaaaacgaacatttggcactaccaagaaacaatatttcattactcacaggggctgacatgtggttgggcacaataaaatgtaatttttattagtagaagtatcaatagtcatgagtaatagttgtagtattaattatgtttattttaaaaattttgttgctttctgcaacaacagagagcaacaaaagcttatatacaataagtttgtatatatcaggtctggaaataatatgtgtgaaaggaatacttactttttacattggcagctaggtggacactgctctctgcttattcttttgctctgtgttgcagaattatttgggggctaatttaaataaacatagcctattcaatttctcctctatttagacctaattaaatcctaatttcaattcaatagacaattagggggttaattaactactgttgtctcaatagttgtctcaattttacctagagagaagagatttttagtaaacaaaatcatcattctgttagaatctaactgataagtatttagcaaaaagtttcgattcagatacattttgagctaaattgccctcataatttgaacactgaatcttggcttctaatttcaaggacagaaatgtaactgcaaagcaaaattttatacaaagcctgatactttatctctttcaacctcaacaggctaggagtattattaatagaactttaagaaataatctttgcattcctttgtcctatattaattttcatttctttgccttttgtctttttaaaatttctccactaccttatcaaagagaaattggcaatgatcacattttctacttcaattttcacaatgggtatgttttaaaatgtagactaatagaccaaaaggaacggagttgatcagagagttcttgtgcttttgcttttgtgaagtaagctcttcacatcaaccgtcgcaagatttctgtcacactggtaccttttgaaagttgggttctttctcctccaagaaggaaaacagaattgagcttaaagtgcttttaaagtagtaatggcatctggaaaaattatattttaatgctatatgaaagaacatctccaacagaaataacttatcttgaaattagcagaaatgtcacctagattgagaatgcatgagcaccttttataagttaaggtggaacaatttataaatacagtaatgaaactacaggtattgggatagtatactgcttttttcagctgcttaccaattccttttttccttccaatgaaagagaaggatagaagccacaaatccttctctgttctctttagcggaatagttatatctagaagaattccctaaaaatttcccaagacattctggcctgacagcagaaaaggaaagcccactgtcagatagagaccctaaatccatttccatctgaatacagattatccaagacctctctgcttgtggaaaatatttctaaatatccaaacaaaggaacaagtctctgaaaaatggggcaataatcaatgtttgaaaaggaacagtcctggtagtatcaagcatggcttatgaatattcaaattttaattttcagtggccaggccccgagagccccgacacaaaaaaataaaataacatacaaatacaaatagccactgcacctggtcagtatcttaaagattcttagaatgtttgaactggcatggattctaagtaccagatttttcagaagaaagaacaccaagaggtagtgacctggccaatgccacagcattggaccttggcaaaggcaaggactgtgaagatatagaggaagtatagtggcgtagaaaaatcaagggttatgtgaagaggcagactttggttctagtctcagttctgccacttccaagaatgttgaggaagtctcttaatgacactgcctttgcaaaattatgactgagacagcgaaagagatctaacataactgattccaccttgcttctaacctccaagctgtccttgttcattcctgggcgtagactgaactaactttgggagaaacttggggagaaactacttttttttttttttttttgagatggagtctcgctctgttgcccaggctggagtgcagtggcgtgatctcgtctcactgcaagctccgcctcctgggttcacgccattctccttcctcagcctcccgagtagcttggactacagctgcccaccaccatgcctggctaatttttttgcatttttagtagagacgggggtctcactgtgttagccaggatggtttcgatctcctgaccttgtgattcgccctcctcagcctcccaaagtgctgggattacaggcgtgagccactgcgcccagcagatacttagtttatagtttaagcaaagacggtaacagccctttcccaaagcagacctccttcttgcctggggactagattgcctttgcacgactaacattagccacaagattagaaattatggtttaggagtcatgcagctggaggctacaagattctgaccctccttaaactgctcctaaaatcagtgcttgagatattttgcagaccctgcacttgatggatcagctggcaccacccatatcaataaattggctcatctgatcatgtggcccccacccaggaactgactcagcacaagaagacagctctgactccctatgatttcatatctgaccaatcagcactcctggctcactggctttcccccacccaccaagttatccttaaaaacgctgctccctaaatgctcagggagactgatttgagaaataataaaactccggtctcctgcacagcctgcatgaattgctctttctctattgcaattcccctgtcttgatgaatcagctctgtctaggcagagggcaaggtgaaccttgggtggttacattaacataacagagcccctgtatccattttcttgtttttcagagtgaagactactatgtgcttacggattaaatagacagtatataaagtgcctagcacagaccagatgtgttgtgaacatagattatctctttttttctcaaatcaagaattctttgaaatacagacctctgtatgtgatcccactaaaggcactgaataaagggaaatgtatagtaatatttgaaaaaaaaatctctgacctagaaagtccttactttcaaagcaataggtgtcagtgactcattactattggactcaaacagaagaaaagggatgggggttgggaggttcctatcaaagcaaaacataggacacagatgaataaaaatacacacatatatgttttatacacatgttaaactatctgcatttaggtggaactaaagagagttcaatcataactgattctaccctcttctgactcataagcagcattaagtaacttcctgtactctactgaaatgagttttctctctgcccaccccagcaccctgtagcctgagaacctggcttcacttcagaagttgagtcactgcctttttcttaaagaccatttctgccaacacatttctccatctaatttcagaaaagaaagattcacaaagtcaaggagtcccatttgagtagtatctttttttccctggtgcagctataatgccaccatgcatttaaggtcaacattaaagaaacagaagggcaattttgagaagtcatctaaccaaagaaaattaaaataaaattcaaataaaaagaaaaatatcaatgtttcaacatccctcacagttgaattcagctgcaatttctaatttgcaaaaggaagtggttattcatcttagttcataatgctccccaaagtgctcaatttctcttgcttctcttaatcacagactctaaagggacatgagagatgtggattaacaatgtggagatttgaaattgtttttaattttggtactatcaactaaaatatgtaatctttgattaatttaaggaatttcaaattgaaaggaaagataattttcttttctttttctttttcttttttttttaagatgaagtttcactcttgttgcccaggttggagtacaatggcatgatcttggctcactgcaacctctgcttcccgggttcaagtgatccacttgcctccgcctcctgcatagctgggattacaggcacccgccaccacacccggctaagttttgtatttttagtagagatggggtttcaccatgttggccagactggtctcgaactcctgacttcaggtgatctgcccacctcggcctcccaaagtgctgggattacaggcgtgagccactgcacatggccaatgattttcttaattcaagagcactataaattcatatagaattaagcaatagacacattaacaataaaacatgacttatcacatgaagtaagaagttaattatagtgaatgtactcaatttcaatattttttaaaactccaagaggaaattgctatgttgaaaataataagtggtgtacacatgtatgaaaaggaagatcatgggaaatgtgatgtatatggttacatcagatgtacttcttttccatccctgtagctatggtttggagcaggcttcaaccaggtttgtacaggcacgacctgatagtcttgctttgagctatgtcatatacctcatagtgtggcatgggaagcccatgggaagccacttggtgctcacccacgtgtaacctggaagtactgaagagttaacactgatagagcatacttgacaaatgaaggatggggctgctggaaatgcttcccccttggatcttctagagggacaattctgacattcattacataaggctcctcagaaggtcctgctggatggagcatcagttgaccatagaagtaaccaacacatgtcaggcatggtggttcatacctataatcgcaacactttgggaggctgaggcaggtgaatcacttgatctcaggaatttgaaaccagcctgggaaacatagtgaatccccgtctctacaaaaaatacaaaaattatccaggcatggtggcatgcgtgtgtagtcccagctactcaggaggctgaggtgggaggatcacttgagcccagaaggttgaggctgcagtggaccaaggtcatgccactgcactccagcctgggtgacagagtaagagcctgtctcaaaaaaaaaaaaaaaaaaaaaaagaaaagaaaaagaaaaaaaaaaggtgaccaacacattcttacactgcctttccctcctctgcttgacttcctgtatcagctatctattgccatgcaacaaattacataaaaaacttagtgatttaagacaacaatttttttttttttgaggcggagtctctgtctgttgcccaggctaagagtgcagtggcgcgatctcggctcactgcaacctccgcctgccgggttcacactattctcctgcctcagcctcctgagtagctgggactacaggcacctgccaccatgccctgctaatttttttgtatttttagtagagatggggttttaccatgttagccagggtggtctcgatctcctgacctcgtgatccgcctgcctcggcctcccaaagtgctgggattacaggcatgagccactgcgcccggcctaagacaacaaacatttattctcacagtctctgtggtcaacttcagaagcagcttggctgagtggttctgtctgtctcagggtctctcatgaggatgcattccaaatgtgagctaggagtgcattcatcataaggcttggctggggctggaggacccacttctaaagttacttacagggatgtgagcaggagcactcagtttctcactacatggactgctgctcacgaggtggcagccagctttccccagagtgagcgatgtaacagagggcaaaggagagtgcaagcaggaagccacactatctttaatgacctagtttcagaagggacatactgtcacttgtactgtatgctactggtgacatagatcaccccaggttcaatgcaggaggggattacacaagagtgtgaatactaggaggcagggaactaggaggccatcttgcaggtgaggcacactttctctatgcctcactcatgatccctggggtcatttcagaaaaaacacttttctattgacagcacatttgttaaattcccccaaattcagatattgaaatcctaatccccaagtggtggtatctggaggtgaagggtttcacccttggaaagtaattaaccatgaggttggagctcttgtgatgggattagtactcttataagaagagacacaagagagtttgcttcttctctgtccccaccaggtgaagatacagcaagaaggcatctactcgcaaaccaagaagaaggccctcaccaggaaccgagttacttgcatcttcatcttgaacttcctggtctccagaagagtgagaaataagtttctgttcttgacatcacctatttcatgttatttttgttacagcaactcaagttgactaagatacacttgtatgaaactcttttatcacaggctctagacttggataaaaactatgataacatggtgaatgattttctctctgtgacttttctaacgaggtagatctatacgtgtatatgttgatatatggaaatatctttccaaaagatgttattttgtgcaaaaagtaagttgcagaactgttctattgtatgcataaaaccaaaacattataaaggaaacttaatagtggtaatttcaggggggaaggagatgaggaaagactttctaattttcattttattattctcagcactacttgaatttttgaaatatatttatgtattcctttaaacataatttgattttttggggtggtgagattgtgggtcactttaaatttctctataattatctatacacaaaagtatcatagtgtttttaaaaataacaattttaacagtcaaagagaccctattttgtcaggaactattaaagatgttcaagaaatggtttagttaaaacagtacatgaggcccctatgtttaatctttccaggtagtgagcttctgtgttaacccaattatttcacacaacagaagcagggagacattccaaactgcaagaatccatgcccaaagacagcacacttctgtcaatcagtcattgtgctggctgggagtcgattctcttaacattacgttaaacccgggagcacatggaagaattacctggaaccatgctccagaattatgctcttgtcctctgttactgtcatgtgtttcaaattaacataaacccctcaacaatacagcaccaagataatgtgaatcctgataaaaagcaattggcaattggttgctactattttctcaagggaggtcaggtaaaagatcttatcttggaaatgtcaggcaacattgtgtgatgaagcaggtgataacgtgaagggtggctccctgcatcctcagtattttcctagcctaatatcccacagttacagccagagaaatggggatcaaataaccagagctggggtttcattgagcctgtcctggaaatctcctgaccactgagatagttaagctgttgtggactactgccaccaggtggcagcaaactgagttgggactgggatggatttagattatgcttccagatctctcttgtcaattggatacacagatccaacaagcaactcattaacctcgaataatgcaaccctgcattttacccttggctttttaaaaccccacttatgtagttatggcaagattttactatcgtaagatgtctcttacagcccagatgatctctcaataatactaatttatatcaaaaccagaaaagaacctatagtaatctattaaagaatttgagttttcaactttatttgactgcaattgtaaggcatggaggagacagaccaagatgctaacaatgctttttgaaatcatttttttataacaagaaaaaaggtgaaggcatgtagccttcccaaattataggaacatttcttggtaagaaagtttgtggcctagaattttaattgcaaatccaagtgtccttgccaagttttccatgttgtcggtgaggaacagagacgactgtggctaagacattgcatcctttgggtgctgtgggccatgaccactgtgcagtggacactagcaaggttcagtattacagtcagtattgaagtctgtgaatatctggaatgctaatatcagtcagtagattggtggatacctaatatagtgcatcactttctgctcatcccaatatgaatttagtgtcccccacacttccagcttatttttgtgtttagcagagacatgaaagcatgcaatgagatcgaaatcttgttaacacgataaaagttcaaaatgtgacgtaaatatagaaaaaaagtggaaagtttttttgtataaactgtctctcttgtcctataagttttgtccccttaaaaagttgttggtccactatactcctctgaatgcccctctgagagaagttatgtttactcaggactgatacatattgttggattttcatttttgcctttttatggtgaatacatagtgtgtggatataagatttagcatacagtagatattttttgagtaagggtaaatgtggctacaaatatccttgcctgcaacagaaagatcagtaggtataaatttaaattctatgcaaacccacttccttatactcatttacccttagctcctttttatcacattagactgaggtaaatattaataaaatgtgcatatattaacaagttttctcagttattttcctctgttgtaaaaggttttgaaccatagagacagcaattcttctttttctctgccgatgactcttttggctgggagagacactgcatttttgaagcccgacccagaatattcttctcttaacccaattaactattttcataatcactgtaaaatttaaccataaaactcatctctcccacctcaagttttttgtttctcaagtgaaagtagaaaaaccttgtttatgtgagttcctcataattgctcatcatttagagttgttgtttggaaaatctttgcaaagattcctgtatcttcaaggatgtggtagctcactgactgtagagacaagactttactgaaagttctttcttagatatgaagagtatagtatttacactctccttttacttagggaaattaaaaaatattatttggaaattgatttgtggacatcaatgtaaatgcaaataacaaagaaaaaattcttttcttggtcatattccaagagtttccacccggaggagactcagttttggagttaacactttggtgagcctgtttggagtctccagggttacaggttggctggcacctgagatagatttcaaggaatgagggagagctctactatctgcttaggaggggagagatttgagacttcacatgggaaggatggtcagcgggagatctaaaggctggtaactgagaagaaaggttgagaaaaatttatggcgatttttggagttaaataccatatgtcatgcaatgcaagctctcccttaatgtcctctgcaaaatcattggtaaatttgcattgctcactcatgcttcatagagaagagtttctgttgggaaaaactaaaaagtactgaattaaggtttgtgtaaactgaaagaagctgtctgcagaagaaattacatataatatgaaaaaatattataataatatgattttaaagctggagaatctcttccttatctaagatgccacacttcttataatttacatgaatagaacatcagtttagatgtcctaagaataaatacttacagtatgttaaagggaatggtcatacttagtgtgtacctctctgggtttgttagggagcaaggacttgaagacagaaatatataagcctgatgcctgaagtacctgacacctctggaattgtaaattacataaaccaatgatttccatttaagttggtttggtttgaatttccatcacatgcagtgaaaactctcttgcctttgatgcagacagtaattctagttatcatcagaagtagtcagaaaaggaagactcatggggatgagagactgagaataaggaaggaacctggtaaccatggcgatttgccatcctgtctgcctggtctgatcagtatccaagttctagcttcagcactaggctgggcgcctgaagaattccaaggacttctttatgtgagaaacattctatcaaaccttacctgtgccttggatattgacgagtgctatgatttggatgtcccctctaaaattcatgttaaaagtttaattgccattgtaacaggattaagaggtggcatgtttaagaggtgattagggcttgagggctctgccttcatgaatggtttagtgtcattatctcaggagtgggttaattatttcatgtgtgagcttttgataaaaaggtgaagttccgactcccatcctctctgtcccgcattctctcttgcccttcactatgttatgattccgcaagaaggccctcaggagaggctgacaccatcctcttggacttcccagtttccagaaccgtaagccaaataatcttctattctttttaaattactctgtctgtggtattctgttatagcagcagaaaatggtctaagacaaggagctggccagctgcagacttgatcacagaggatggatcactgagggtaactgggataagaagtaatgcataatggtgcacaatgaagcaaaaaggtcatttctggtctaaaggtctgtcttacctctgaactagccttgaccctcttccttgaccatacttcagccagtttttccaacttgactatgtacacttcctattcatgaccctggctgaagccatctccttcatccttgaccctgctaacccagtcattaccccatacctccctggggattgcctgaatctatctcccactgggctgaccatgcccaactctctagctatgtttgcagttgtaagtttggactcctgccatctgttccctttttcacacaggccctcagtggccagaccaacataatgttctatccattatgttttaacaaggcattaactttgactctttggggcctgtgatttactactgtgagagttttatttggaggcttgtgggcggtaataactgaacatggtagtttagaggaaagagcagtgagaagacacagcttcgagacagaaggaataaaaattaaagattattaataatcttattgattgcttaataattttgatcttcactttctttccatttaaaaaaaaaaactctcttgtgctgtcttccatctcctaaaattagaggaagaattctagtcatgattccccaggggtttgcggtgagctaccgtgatggtttctaacctttgacatctgggtatatcaaggcctgagtcaggggaggtcaactgaacagcagaataccaagttaatactaaaatttgtcttgactcccacattcttctatattttctatagctctctcaatgtggctttcacttcaatcctccaaaataaatagctcctgtcaaggtcactaaatgaagtccactttttaaaaaccagtgggaaattttcaggtcgcttacttatcacaagtgattgcacagcagatcctccctcctcacttggcttccagggcaccatactgtctggttttctccctggtaagttgatgcttcttaccagtctttcttctgatttctcgtctttcctattcttttaatattggagtggcccagggctaaatcactggacctcttctatactcagtgtgttggtgatctctcatgtaatctcagggccttaagtaccatctatttgcagatgcttcccaaatcaatatctctgagctgatcttctctctttaattcccaggtgatatatacaacttcctacttgatggctctacttggatgtctaatttgcatcttaactctaacatctcacaaactgaattctagatcttcctctttaaaccttcaacctcctcctcacataggcttccccatctcagtgaatggcaacacaagctgtctagttgctcacaccaaaaactttgacataattcttgttttttaatttaatttaatttagtttaatttatttatttttattttttggagacagagtctcagtctgttgcccaggctggagtgcagaggcatgatctcagctcactacagaactgtctcctgggttcaagagattctcctgactcagcattccaagtacctgagattacaggtgtctgccaccatgcccagctaatttttgtatttttagtagagagggggcttcaccattttggccaggctggccttgaactcctgacctcaagtgatccacctgcctcggtgtgagccacagcacctggcctgacgtcatccttgaattctgatttttttttttttggtgatggagtctcactctgttctccaggctagagtgcagtgacatgatcttggctcactgcaacctccgcctcctgggttcgtgtcattctcctgcctcagtctcccgagtagctgggactacaggcagctgccaccacgaccggctaattttttttgtatttttagtagagacggggtttcatcacgttagccaggatggtctcgatctcctgacctcatgatccgcccgcctcagcctcccaaagtgctgggattacaggcgtgggtcaccgtgcctggcccatccttgaatattttttctcgaatacctcccatccactccaccagcaaatccttttggtctaacttcagcttatactccacccacacaaccctatcatcagaatcctgtgtctgaaatagcctcctactggtcccattt

SEQ ID NO: 984 - protein, 483 aa, Homo sapiens [sequence omitted]

SEQ ID NO: 985 - DNA, 880 bp, Homo sapiens
  source
  (1)..(880)
  CDS (201)..(680)
ttcctgttaccactattccagctagtactagcatagttgttggacctccaacttctatgacctcttactttacataatatgggaccattcgtttaactcacatactgtgtccttttctggattagtcatactctaggtatgaaaaagtacatggaaaggactaattgaacaactgagtttgagttgattctcataagtctatgagtactcataagttgacaaaaactcctttttgtcacatgcttagtggtgtatctagtgaccctcttggggaacagaatacagatcatcccaacactccttgtttcccacctatatttatgccatggcaatccctccttcctggatatcgggcttacgtcctttttactccctctatcctaataaacttcctatcagagggaaaaaaactctctttcacagattgtattatacaaatgtctatcttctattccatggggtccacggagtgtgtgctcctagcagtgatggcatatgataactgtgtggtcatcagcaaattcctgagataccctctcatcataaataaggtgccttggctgggcgcagtggctcatgcctgtaatcccagcactctgggagtccaaggctggtggatcaccggaggtcaggagttcaaaaccagcttggccaacatgatgaaaccccatctctactaaaaatacaaaaaattagccctgtgcagtggtgggcaccggtaatcccagctacttgggaggctgaggcaggagaattgcttgaacctgggaggccgaggttgcaatgagccaatatcatgccactgcactccagtctgggcaacaagagcgaaactccacctcaaaaataatataaaataaaataaaataaaaaaggtgct

SEQ ID NO: 986 - protein, 159 aa, Homo sapiens [sequence omitted]

SEQ ID NO: 987 - DNA, 895 bp, Homo sapiens
  source
  (1)..(895)
  CDS (201)..(695)
tgcttgaacctgggaggccgaggttgcaatgagccaatatcatgccactgcactccagtctgggcaacaagagcgaaactccacctcaaaaataatataaaataaaataaaataaaaaaggtgctttgtgttttcatggctactgtctcttatgaattaggatttctcaacagacaaaatgtattaatagttacatatgaatgcacttttgtggaaaacacatcattaatcatttttataaaatattacagttaatgcctctggcttgcatagatatttccttgaatgagaatataataatattgggcaaagtaaacttttcatttactttattactaccatttcagttctttatattcagttttttatattttcaccatctatgctgtattgaaatcaattcagctgaaggaaggaaaaaggtctcttccacctgttcagcccacataacagtggtgattgtgtttcaccggacaatcctcttcatgtacataaagtcaacatctaatggcactacttcagagaaactggttgacctgttctgcggggtagtaatgctcatgctcaatcttatcatctatagcctggggaatatggaggtgcttggggttatgaagaaattgatcagtatgagtagaccctggtgctggaaaaatgatgagaacctgacatctttgagttcatgtacaaaataagctcacatattttgaggcaagaattttaaatataaatagaacagaagaaatgacgattatgtctagaaacaaaatttcagcattagaaagaaatttcaacattaataatctaatatttatctttaagaaaatgaccatgacctcataaaaatacagagacaagtaatctaagaagtacatgtaaagttatgggagtcaga

SEQ ID NO: 988 - protein, 164 aa, Homo sapiens [sequence omitted]

SEQ ID NO: 989 - DNA, 931 bp, Homo sapiens
  source
  (1)..(931)
  CDS (201)..(731)
tggacatctgctacactagttcatctattccactatttctcagcagcttcttaacgtcaaagaaaactatttccttctctgggtgtggagtgcaaatgtttctctcttttgctatgggagcaacagagtgtgtccttctaagtatgatggcgtttgactgctatgtggccatctgtaaccctctatgataccctatcatcatgagcaaggcttcatacatgtccatggctgcggggtcctggattggaggaggcatcaattctgtgttgcaaacctcccttgcaatgcggcttcctttctgtggagataacgtcattaatcattttacttgtgaaatcttggctgtcttaaaattggcctgtgctaatatctccataaatattattagcatggttgttgctagtatgatttttcttgtagggccagtactttttatttttgttacatatgtttttattctctccaccatcctgagaattccttctgcagaaggaaggcacaaagcctcctccacctgctctgcccacctaacagtggtgattatattctacagaaccatccttttcatgtatgcaaagcccaaggctaaagactcttctggtgcagacaaagaacaagtcacagacaaaatcatctccctgttctatggagtggtgacacctatgcttaatcctcttatctatagtttgaggaacaaagacgtgaaggcagctgtgaagagtatactgtgacaaaaatgcttcttggaaggaatttaaatgcttctttatttatttttaaaagtattttactctgaatgtagggctagctcttacccagaggttccaaaataaatatgagggttgatgattccactaattcccgaaattctcatttttctcttcctaatatttaaaagaaagagggaaatccaggactgagttaccttttc

SEQ ID NO: 990 - protein, 176 aa, Homo sapiens [sequence omitted]

SEQ ID NO: 991 - DNA, 853 bp, Homo sapiens
  source
  (1)..(853)
  CDS (201)..(653)
ttaaattaagggctcagaacaacgagatgaaatttaagagtaataaatacagaatcctatctctaaacttaggaaaataaagagcttacatacacaactggggaaatctggctttgcaatagttcatatggaaaaaataaaatgatcctggagttttgtcaacgagcttgacgtgggttaatgctgtgacgacatgcctcatgatagctatttctttttctctttctcttcccttcctttcctttcccctcccctctcctccccttccctcccctttccttccttccttccttccttccttctttccttccttccttcctttctttcttttctttctttctttctctttctttcttctccttccttccttctctttcttttttctttctttcttcttcttttctttcttttccttccttccttcctttcttttcttttctctttctttctttcttttcttcttttctttctttctttcatctctctctcctttcatttttttttttaatagagtctcactctgtcgcccaggctggagtgcagtggcacaatctcagctctctgcaacctccacctcccgggttcaagcgattctcatgcctcagcctctccaagagctgagattacaggcacatgccacggcacctggctaatttttatattttcagtagaggcagcatttcaccatgttggccaggctggtctctaaatcctgacttcaggtgatctgcctgccttggcctcccaaagtgctgggattataagcatgagacaccgcaccaggccttttaaaaaaattttcgaaatggaatctcactatgttgcccaggctggacttgaacttttgggcctc

SEQ ID NO: 992 - protein, 150 aa, Homo sapiens
MIAISFSLSLPFLSFPLPSPPLPSPFLPSFLPSFFPSFLPFFLFFLSFSFFLLLPSFSFFFLSFFFFSFFSFLPSFLFFSLSFFLFFFSFFLSSLSPFIFFFNRVSLCRPGWSAVAQSQLSATSTSRVQAILMPQPLQELRLQAHATAPG

SEQ ID NO: 993 - DNA, 2269 bp, Homo sapiens
  source
  (1)..(2269)
  CDS (201)..(2069)
acgtattccatactcattattttttgctattaccatggtatgatttatgatagtattattggctgatcctaattaaaatagaatacagaagttatagtattataaaaaaaattcatttgatgaagttttcgtgatttaaagctttaccttctctttttatagccaattctgatctgaacagaaaatccaagaacagggatatgtgtggattacagttttctctgccttgcctacgactgtttctggttgttacctgttatcttttattattactccacaaagaaatacttggatgttcgtctgtttgtcagctctgcactgggagacaaattaactgccgtaacttaggcctttcgagtattcctaagaattttcctgaaagtacagtttttctgtatctgactgggaataatatatcttatataaatgaaagtgaattaacaggacttcattctcttgtagcattgtatttggataattctaacattctgtatgtatatccaaaagcctttgttcaattgaggcatctatattttctatttctaaataataatttcatcaaacgcttagatcctggaatatttaagggacttttaaatcttcgtaatttatatttacagtataatcaggtatcttttgttccgagaggagtatttaatgatctagtttcagttcagtacttaaatctacaaaggaatcgcctcactgtccttgggagtggtacctttgttggtatggttgctcttcggatacttgatttatcaaacaataacattttgaggatatcagaatcaggctttcaacatcttgaaaaccttgcttgtttgtatttaggaagtaataatttaacaaaagtaccatcaaatgcctttgaagtacttaaaagtcttagaagactttctttgtctcataatcctattgaagcaatacagccctttgcatttaaaggacttgccaatctggaatacctcctcctgaaaaattcaagaattaggaatgttactagggatgggtttagtggaattaataatcttaaacatttgatcttaagtcataatgatttagagaatttaaattctgacacattcagtttgttaaagaatttaatttaccttaagttagatagaaacagaataattagcattgataatgatacatttgaaaatatgggagcatctttgaagatccttaatctgtcatttaataatcttacagccttgcatccaagggtccttaagccgttgtcttcattgattcatcttcaggcaaattctaatccttgggaatgtaactgcaaacttttgggccttcgagactggctagcatcttcagccattactctaaacatctattgtcagaatcccccatccatgcgtggcagagcattacgttatattaacattacaaattgtgttacatcttcaataaatgtatccagagcttgggctgttgtaaaatctcctcatattcatcacaagactactgcgctaatgatggcctggcataaagtaaccacaaatggcagtcctctggaaaatactgagactgagaacattactttctgggaacgaattcctacttcacctgctggtagattttttcaagagaatgcctttggtaatccattagagactacagcagtgttacctgtgcaaatacaacttactacttctgttaccttgaacttggaaaaaaacagtgctctaccgaatgatgctgcttcaatgtcagggaaaacatctctaatttgtacacaagaagttgagaagttgaatgaggcttttgacattttgctagcttttttcatcttagcttgtgttttaatcatttttttgatctacaaagttgttcagtttaaacaaaaactaaaggcatcagaaaactcaagggaaaatagacttgaatactacagcttttatcagtcagcaaggtataatgtaactgcctcaatttgtaacacttccccaaattctctagaaagtcctggcttggagcagattcgacttcataaacaaattgttcctgaaaatgaggcacaggtcattctttttgaacattctgctttataactcaactaaatattgtctataagaaacttcagtgccatggacatgatttaaactgaaacctccttatataattatatactttagttggaaatataatgaattatatgaggttagcattattaaaatatgtttttaataatttgtgaacagtgtattcatttagcaaatattttctttgatatatactgtattaagtaata

SEQ ID NO: 994 - protein, 622 aa, Homo sapiens
MCGLQFSLPCLRLFLVVTCYLLLLLHKEILGCSSVCQLCTGRQINCRNLGLSSIPKNFPESTVFLYLTGNNISYINESELTGLHSLVALYLDNSNILYVYPKAFVQLRHLYFLFLNNNFIKRLDPGIFKGLLNLRNLYLQYNQVSFVPRGVFNDLVSVQYLNLQRNRLTVLGSGTFVGMVALRILDLSNNNILRISESGFQHLENLACLYLGSNNLTKVPSNAFEVLKSLRRLSLSHNPIEAIQPFAFKGLANLEYLLLKNSRIRNVTRDGFSGINNLKHLILSHNDLENLNSDTFSLLKNLIYLKLDRNRIISIDNDTFENMGASLKILNLSFNNLTALHPRVLKPLSSLIHLQANSNPWECNCKLLGLRDWLASSAITLNIYCQNPPSMRGRALRYINITNCVTSSINVSRAWAVVKSPHIHHKTTALMMAWHKVTTNGSPLENTETENITFWERIPTSPAGRFFQENAFGNPLETTAVLPVQIQLTTSVTLNLEKNSALPNDAASMSGKTSLICTQEVEKLNEAFDILLAFFILACVLIIFLIYKVVQFKQKLKASENSRENRLEYYSFYQSARYNVTASICNTSPNSLESPGLEQIRLHKQIVPENEAQVILFEHSAL

SEQ ID NO: 995 - DNA, 856 bp, Homo sapiens
  source
  (1)..(856)
  CDS (201)..(656)
acaaatagctctaaaatcttaacagaaataaagatttctttaaaaggcaatttgagagagttgagagagtaatcagagcagagagaaaactctgggcactggttggcacaaagagttcccatacatataggttctcacacatataattgtgaacatacaatctaatactgatatttttttctttgaaagacagggtatgaatgaatctgtcacccaggctggagtgcagtggcatggtcatcgctcactccagcctcaacctcccaggctcaagcaatccttgttgttgttgctgtttttttgttttgttttgttttttgttgtttttgggagaaagagtcttgctctgtcacccagactggagtggagtggcacaatctcggctcactgcaacctctgcctcctgggttcaagcgattctcctgcctcagcctcccgagcagctgggagacatgcaccaccacacctggctaatttttgtatttttagtagagagggggtttcaccaggttggcaaggctggtcttgaactcctgacctcaagtgacccacccacctcagcctcccaaagtgctgggattacaggcattagccactgtgccaggcccaatccttgtttgatgtttgcctttctcactttactgaaggatccatgagggcagacacaatgtctattctgctcatcacagtattcccagcacttaaaaacactgcacagctatactccagcctggacaacagagaccctgtctcaaaaacaaaacaaaacagtgcatagcacataattaataaattaatgagtaagaaagtaatttgtgacacctgtaatcagttctttcacacataatgtaacaga

SEQ ID NO: 996 - protein, 151 aa, Homo sapiens [sequence omitted]

SEQ ID NO: 997 - DNA, 1429 bp, Homo sapiens
  source
  (1)..(1429)
  CDS (201)..(1229)
tgagattaaagacagaattatcttttatgtttttgaatttaatttctctttataattaaaattgaaaaagaatataatatgaaacaaaatttgtaagtactcacatatgcagtttgtttttgttttaattttcagaattcaaaattataattccctatcacaaggaaggacagaaatagcaaacaacaaacagcagaaccatgaccagcaatttttcccaacctgttgtgcagctttgctatgaggatgtgaatggatcttgtattgaaactccctattctcctgggtcccgggtaattctgtacacggcgtttagctttgggtctttgctggctgtatttggaaatctcttagtaatgacttctgttcttcattttaagcagctgcactctccaaccaattttctcattgcctctctggcctgtgctgacttcttggtaggtgtgactgtgatgcttttcagcatggtcaggacggtggagagctgctggtattttggagccaaattttgtactcttcacagttgctgtgatgtggcattttgttactcttctgtcctccacttgtgcttcatctgcatcgacaggtacattgtggttactgatcccctggtctatgctaccaagttcaccgtgtctgtgtcgggaatttgcatcagcgtgtcctggattctgcctctcacgtacagcggtgctgtgttctacacaggtgtcaatgatgatgggctggaggaattagtaagtgctctcaactgcgtaggtggctgtcaaattattgtaagtcaaggctgggtgttgatagattttctgttattcttcatacctacccttgttatgataattctttacagtaagatttttcttatagctaaacaacaagctataaaaattgaaactactagtagcaaagtagaatcatcctcagagagttataaaatcagagtggccaagagagagaggaaagcagctaaaaccctgggggtcacggtactagcatttgttatttcatggttaccgtatacagttgatatattaattgatgcctttatgggcttcctgacccctgcctatatctatgaaatttgctgttggagtgcttattataactcagccatgaatcctttgatttatgctctattttatccttggtttaggaaagccataaaacttattttaagtggagatgttttaaaggctagttcatcaaccattagtttatttttagaataagtttaagcactaagttgagaaaattaagaatatttttaaaattatgaatttataaggaaattaaatataagaaacaaataaaacttttcaaaattggagaaatatatcacttttcaaattaaccaggaaaaaggtcacaggaagattaaactattaaactattgtaaagatattgactacattaaataataaatgataaa

SEQ ID NO: 998 - protein, 342 aa, Homo sapiens
MTSNFSQPVVQLCYEDVNGSCIETPYSPGSRVILYTAFSFGSLLAVFGNLLVMTSVLHFKQLHSPTNFLIASLACADFLVGVTVMLFSMVRTVESCWYFGAKFCTLHSCCDVAFCYSSVLHLCFICIDRYIVVTDPLVYATKFTVSVSGICISVSWILPLTYSGAVFYTGVNDDGLEELVSALNCVGGCQIIVSQGWVLIDFLLFFIPTLVMIILYSKIFLIAKQQAIKIETTSSKVESSSESYKIRVAKRERKAAKTLGVTVLAFVISWLPYTVDILIDAFMGFLTPAYIYEICCWSAYYNSAMNPLIYALFYPWFRKAIKLILSGDVLKASSSTISLFLE

SEQ ID NO: 999 - DNA, 883 bp, Homo sapiens
  source
  (1)..(883)
  CDS (201)..(683)
tgaagagtgctggatagtggtgaccacacatactctctgttgggtaatgtgttttaccttaaacatttgtgtttttgcctcaccgtggtgttgcccctcgggtccctggtttgttggtttctctaggctgtggggtattggcatgtcttacatacggctgttttctggatatgttagaccatctgatgcatcatctgtgaatgaagttgaatgtgttttttttttttggagacagagtctcactctgttgcccaggctggagtacaatggtgcaatctcgtctcactgcaacttccacctcccgggttcaagcgattctcctgtctcagcctcctgaggagctgggactctgtacaggcgcgtgccgccacgcccagctaattttttgtattttaatggagacagggtttcactgtgttgcccaggctggtctcgaactcctgagttcaggcagtccgcccgtctcagcctcccgaagtgctaggattacaggcgtgagccaccacgcctggccgaaagttgaacgtattttacataaagctcctgaggacctgaggagattactgaataagttaataaataaatacatgttttggaattttagtgaggttttctcagagaagttcagagtggcatcagttaggccaggccatgtgatgtgtcttttttttttttttttttgagatggagtcttgctctgtcgcccaggctggggtgcagtggcgtgacctcagctcactgcaagctccgcctcctgggttcacaccattctcctgcctcagcctcccgagtagctgggactacaggcgcccgccaccacgcctggctaatttttttgtatttttaatagcgatggggtttcactgtgttagccaggatggtc

SEQ ID NO: 1000 - protein, 160 aa, Homo sapiens
MKLNVFFFFGDRVSLCCPGWSTMVQSRLTATSTSRVQAILLSQPPEELGLCTGACRHAQLIFCILMETGFHCVAQAGLELLSSGSPPVSASRSARITGVSHHAWPKVERILHKAPEDLRRLLNKLINKYMFWNFSEVFSEKFRVASVRPGHVMCLFFFFF

SEQ ID NO: 1001 - DNA, 1021 bp, Homo sapiens
  source
  (1)..(1021)
  CDS (201)..(821)
tcgcttcccttcaggcaggtactgattatccactgtcatgaccaaccagagctgcccagaaacagttcatcttactgggtttctcaggcagacccaggctggagcatgtcctctttgtgtttgtcctcatcttctaccttgtgaccttagtgggcaacatcatcattatcttgatctcccacctggacccctgcctccacatgcccatgtacttcttcctcactaacttgtctttcctagatctctgcttcaccaccagttctatcccccagctgcttttcaatctaggcagcccaggcaagactatcagccacacgggctgtgccatccagctcttcatgttcctgggcctgggtggcaagagtgtattctcttggcagccgtggcctatgaccgcttcattgcaatctgcaagccccttcactattctgtcattatgcaccctcagctgtgctggaagttggtgtctgtggcccgggggtgttggactcctcagttctctagttatgtctcctgtgactatgaagctgccacgatgtggaagatgtaagttgaaacatttcctgtgtgagatgccagctctaataaaaatcacctgtgtggacacagtggctatggagagcactgttttcaccttatcggtagtaattgtcctgatgcctttgtgtcttatcctcatctcttatagctacattgccctagcagtgctgagaatcaagtcagccgcaggaagaaggaaggccttcaatatgtgcgggtcccacctcaccgtggtctccttgttttatgggaatattatctatatgtatatgcaaccatgaaataattcttctcaggaccaagggaagttccttacccttttctacaacttaatgacccccatgttaaaccctgtcatctatacactgagaaacaaggatgtaaaaggtgcactgaagaggcttgtgtctagaaaacacagtgacagtgactgctcttgagactgcttctttacttatttaatagaaataaataattcttg

SEQ ID NO: 1002 - protein, 206 aa, Homo sapiens
MPMYFFLTNLSFLDLCFTTSSIPQLLFNLGSPGKTISHTGCAIQLFMFLGLGGKSVFSWQPWPMTASLQSASPFTILSLCTLSCAGSWCLWPGGVGLLSSLVMSPVTMKLPRCGRCKLKHFLCEMPALIKITCVDTVAMESTVFTLSVVIVLMPLCLILISYSYIALAVLRIKSAAGRRKAFNMCGSHLTVVSLFYGNIIYMYMQP

SEQ ID NO: 1003 - DNA, 952 bp, Homo sapiens
  source
  (1)..(952)
  CDS (201)..(752)
gagtacttggagctccagaatataagaaaaagaaataaacagaaaaaaatcttaagagataatggttgagaattttccaaaattaatgacaccaccataaatccgagaagttcaccaaacccaatgcaaaataaataagaaaatcacaccgttgccctttaccaaaatgatgacatggatttcccttaagaaaaaacagaatgatcaatgatagccacttcagtggttttatactccttggattcacagggcagcctcagcttcagatgatgatctctggggttgtctttttcttctacactattgccttcatgggaaatatggccatcatcctattgtctttcctagatgaccatctccaagtccccatgtacttcttccttagaaatttggccatcttggatctctgttataccacaaatatagtcccacaaatgttggtcagtatctggggcaaagacaaaagaattacctttggtgggtgtgcctttcaacttttcattgatgtggcactgtactcagttgaatgcatccttctgtccatgatgtcatatgatcgactcaatgctatctgcaagcctctgcatcatatgaccataatgaacctccaactctgccagggccttgtggtcatctcctgggtagttggtgtgattaattgcatcataccttccccttatgccacgagtcttcctcgatgtaggaaccaccacctagaccacttttttgtgtgtgtgaaatgtctgcaatgatcaagattcaagattgcatgtgtggacaccacagccatggaggtaaccacatttgccatgtgcctgattatagttcttgttcctcttcttcttattcttgtgtcatatggtttcattgctgtggctgtactcaagatcaagtctgcagcaggaagacaaaaagcatttgggacctgttcctcccatctcgttgtggtatc

SEQ ID NO: 1004 - protein, 183 aa, Homo sapiens [sequence omitted]

SEQ ID NO: 1005 - DNA, 964 bp, Homo sapiens
  source
  (1)..(964)
  CDS (201)..(764)
aggccgtattttactgagatcacggatttgttatatatgatgttttggtcttctaatattcttcagtggattttctctaaagtagtatgtacagaaagccttgtatagcaaaagagtaaatcacgtaataattctgagattttttggaattgtcataactgagaaacattgctggcggtgtatggtccgcaagtgtgaaaatgttccttgtgaattgcttgcatccagcattaaggactggtttttatcttttatttttccaatcctctttccttctcaaggtgtccaagacacacagagccacagaatctcacagatgtctgagaattcctcctcctgggactctcagaggatccagaactgcagccggtcctcgctttgctctccctgtccctgtccatgtatctggtcatggtgctgaggaacctgctcagcatcctggctgtcagctctgtctctcccctccacacccccacctgtgctgggctgacatcggtttcaccttggccacggttcccaagatgattgtggacatgcagtcgcatagcagagtcatctctcatgcgggctgtctgacgcagatgtctttcttcatcctttttgcatgtatagaaggcatgctcctgactgtgatggcctatgactgctttgtagccatctgtcgccctctgcactacccagtcatcgtgaatcctcacctctgtgtcttcttcgttttggtgtcctttttccttagcctgttggattcccagctgcacagttgaattgtgttacaattcaccatcatcaagaatgtggaaatctctcattttttctgtgacccctctcaacttctcaaacttgcctgttctgacagcgtcatcaatagcatattcatatatttcgatagtactatgtttggttttcttcccatttcagggatcctatggtcttactataaaatcatcccctccattctaaggat

SEQ ID NO: 1006 - protein, 187 aa, Homo sapiens
MFLVNCLHPALRTGFYLLFFQSSFLLKVSKTHRATESHRCLRIPPPGTLRGSRTAAGPRFALPVPVHVSGHGAEEPAQHPGCQLCLSPPHPHLCWADIGFTLATVPKMIVDMQSHSRVISHAGCLTQMSFFILFACIEGMLLTVMAYDCFVAICRPLHYPVIVNPHLCVFFVLVSFFLSLLDSQLHS

SEQ ID NO: 1007 - DNA, 113306 bp, Homo sapiens
  source
  (1)..(113306)
  CDS (201)..(207)
  CDS (11526)..(12452)
  CDS (37954)..(38097)
  CDS (98732)..(98784)
  CDS (112891)..(113106)
gcctggcctggtatgtcaggtcagctaatatgtcagttcccacagctcccatagacaatgggatgccagggaaagtttttaaaaagagaagtgaaatcattgatgatgcaatttggacttcattctagttgtttagctgtacatttgggtcctagagaaacaagaagcaagctggaggtatgaaagagaacattccaagaatgacaggtaagtctgagtcacagctcgaggctgaaggaagggggttagagaggaggtgtcccttgaaatagaagctgaggccagcttgcaaagggcttacatgtcatggtaggaactcagagttttttcttttctctaacagtaaccaaagaaggattttaagcagagacatgacagagggcaggggaaaatcagagtttgaggccaggcttcatgatgaccttccaaggtcaatcacagaggtaaagaggggatcctcatgtggaacaaggaggtccacagccagccagagaggcagccctgtcccctgagagagctggctctgggtttgcagtttatttctgggatcctgatgtcagttgttggtctagatccaaatgtggccatatccaaaaaatgtttaatccagtcagggcactttttcaccattatttcacccattcagttaacaactcatgaccactatttaaaaattatatgctagttttgaaagaaattcaaagttaaaaacaagtccacaaatgactaaaataattaaaacagagaataagacaacaaaggtaggactgaaaggcacctgtaaagctttttgagaaaggagctgagaatgtcccgggggcctgaagggcttgaaagaaaatgcagtctgtgtttacacctcaaagatgtgcaagactgtgtgagtgggggtaatattttgggaagagaaagcgcaatgaagatatataggtgaaatatctaagtagcatcaacaaataactgttgttaatgttgtttaaaaaacaattccctggcttcttgtatttggaatggattgtctccgtggaagcagaaactacctctctcttaccttctttcaggttttcctgggatcagctgcactccttagcaaaagtatattggagaatcaactgagaaagtaactgagacatttcaatcatttctaggtgtaaagaaagaccagatcccaggaaaatattacggtcagttcaatgcctaagtataacaccagcatcactggctgggaccctcagaacctactctcctattttcccttcatcttcttctcttctttctttttcttattccttttctttgtttccccccttctttctcttctctcttttcctccctcactttcttgatctctcgctctctttcatgaattcactgaatcattgcagaagtacttgacacataccatgttccaaattctgagctacggcacatgctatatttttctacaaaataaagtgtgaggtggatctctaaataataataacaagtgtatctcaaacagtctatcctgggcaccttgtaagcttcagttgttttctcttcaaagtgcctgtgtcccaaagctcaggacaaatttcaaaacctgaacctgaatattaagaaatctaaacatatatcatctaaagctggcatccaggaaaacagagcttttcgtttgatcagagactgcatatttcttacctgcaagtgtttgttttaaccacacttggcaggttctgtatataacacgcgtcaaagccatcagttgcacttgtttttgtgactgcaggtgctggcttgcttgttccagggtcccagggcccggccatggccatggtgtttgtctctcaggcttgtctgtctcatacctggcaggctcactgcttcacagctcactgtgtctctcagacattctcttggctttcccacagtctcagggactgttctaaatagcaagctaatattctgaagtgaggtattggaagcatttctgagaagcatttattatttttgtatgtgctcaattttttagcaatgaagacatttcctttcaaggttgttaagctttgaactttccattttgtgaaaaggctcgaaatttccttcattctttgtgggcatccaactctaacagacacataaattaatagactaggaaatatttaacggtctaagttcaaacaaatatgtttactttggctgaattgatgttgctattaattgctattgaaataaaccactgtacaaagaaatatgccctggaggataaatgtgacactgctaaaattaaaactcaaatgagaattatctgcagattttaatgtttcaaattcaatttggagaattcagttctttaatgtaatactgataaaatcatgttattgatcctgcatactcatctcttctcagggattagagacaggctgttacgagtatgtagcaatcccccttgtacctgcataggtggggaggtgattgtccagctctgctggtcgggcactggatgtagtcatggctgcaagcaagtcatgcacgtggagaacgaggtgtctctctgaaagaaatgtagagagaaaattttaggtcaactaattaaaaattcccatcaatctctagaatagcatcccatatgcaaaggaatactctgtcgcccaggctggagtgcaatggcaggatctcggctcactgcaagctccgcctcccgggttcacgccattctcctgcctcagcctcccgagtagctgggactacaggcgcccgccacaacgcccggctaatttttctttttttttgtatttttagtagagacggggtttcaccgagttagccaggatggtctcaatctcctgacctcgtgatccgcccgcctcggcctcccgaagtgcggggattacaggcgcaaaggaatacttcttatacagatatataatttttttgtcccattaggaaaaaattgtgccccaatcgctttctgtcctttcttactaaatgtgaatcttgaaatgtttattgcttcatggtgttcctccatttggccccatcctagttcttgctttgcttttagatgctggggagccatcttgggagtagggtgcccattacatgagatgaagtggtcttcaaggggacaataagggagtaagtgccttgtagaaagaagcaaagtaaagaggaagagaggtttctttgtttgttttttttatttttatttatttatttattttatttttttattatactttaagttctagggtacatgtgcacaacgtgaaggaagaactttctaacttctccttttctttctctctctctttttttttttttttttgagatggagtctcactctgtcacccaggctggagtgcagtggcgtgatctcggctcactgcaacctctctttttgttattaggttgttgcaaaagtaattgcggtttttgtcattgctttgaatggcaaaaaccgcaattacttttgcaacaacctattacctaggctagagtcagagccccctcaccttgagagtgatgagttgcgagagtctgcccccagcaggcagattgagagagtgcatggtttagcagaaggataattttagctgtagtccatgggacagaatggagatgttgcaatttgatgcagatcatctgaaagtcttgtgcaatgtcctgattaagtgtggacagagcaccataaaaaaggaatttggaagttggaaacatgctgagttcaggcagacataaaaggcagcatctggaaaacctatcaggactcaatttcaggacaagtgatcataggtaggtgggatcatggaacttgacctcaaggttacactataggaacaataaataggttatgaagataatgagcagataaacagcaccaccaaggagtctcagtaatagatatgtaacaaaggagcagagcaggactctttataagagctagatggtcgtaaggagaggattggcacagcagtggttcatgcagaatctcctgagacgcagataaaacttagttctgattgggagaaggttattacaaagcttgaggtggagatgtagtcacaggaaagtagcaagaatatatgggggagctgagacatgaagaggcatttcctagaagggaaaattaggctttaaagtcaggcagatgggtttgcctgggaaacaatcaagagcgctgagtctgagccagggagctggtggggagtgagccaaagtgtgtcaggtaaggcagagaaccaaaaccagatatcaggtgacaagtcaagaatgagtaacatagagtacatgaataggtctgggcggggctgagaagatatggacttggctctatgtgcttggctagctgaatgttttgcagctatatctacaggtgcttttattatcatacagcctggcaaggaatgttattataaacagcttgggtcctaggttttgggatgggaagaagccccagctcctgggaataactgtgatgtcaccataacacatggtgacttgtcccagcaaatggagcagggacgtggatgaggaaaaccacagataagtattacagccaggcagggtggctcacgcttgtaatcccagcactttgggaggctgaggcgggtggatcacctgaggtcaggagttcaagaagagcctggacaaaatggtgaaactccgtctctactataatacaaaaaataagccaggtgtggtggcaggcacctgtaatcccagctactccggaggctgaggcaggagaatcacttgaagccgggaggcggaggttgcggtgagccgagatcccagcactgcactccagcctgggtgacagagtgaaactccatctcaaaaaaaaaaaaaaaaagaaaaaagaaaagaaaaaaaaagtattgctaggattagcatcactgttagttaccattccagttattgcccacttgctagacccctcagaaaaacagaagtttgcaggaattttgcagccaaaaggtgatgtttaaaatattcctagaagattttttccacttcatacgttggatatttatctcataaattaatcaatattggccgagtatcgtgccccatgcctgtaatcccaacattttgggagatcaaggcaggtggatttcttgagccgaggagtttgagaccagcctgggcaacatggtgaaaccctgtctccacaaaaaatacaaaagttaggccaggcgtggtggtgcacacctgtagtcctagctactgggaaggctgaggtgggaggatcacttgagcacaggagatcaaggctgcagtgaaccatgatgatgccactgcactccagcctgggcaacagaacaagactgtcccaactcattaattactcaattaatcaatattaattattatgttgtatattgttttaattttgcataaattatctaatttgtctcataacgactatatgaggtaggtagggcttatccacattttaggtgagagaaataagcctcagagaggttaagtagtttgttcacagtaacactgcaaacagtagtagaagcaagaattgaagtaacgcattgttctcttagctacatgttatgaatatttaattactcttccacttcatatttagagactatcttctatgtgttggctattgctatggataaaagagtggaaaataataaaaacatgcacagtccttgtccttgtggagcttaggagcttacaatctaggggaaagagggaagataccagcaaccagcacccattaacccaagtgattatttaatcacccttgtagaggtgattcttttatcttcagaagaggagaaaagagaaggtcagatagatctcatgtagtgtaggagttctctgacttatcttctgaaagagatcttaccaagtagatcttacctagtatgggagtcagagaaaacttccctaaagaactgatagtagacttaagacctgaaggattagtagatggatggggaggggagagaagaggtgttggtgctaaggcaagaaagagcttgaggcattgagtgaagataaggtgttatggagtgtggctgctgccagcagggattagatgatgcactttaaaatgtacaaataacagtactataacatatttacattataattgaaatttataaaagttagggaactaatctttgtatgttggggaggaagttacctttctcttgttaattcaattaatttcaagactgtaagaatgtattgcactactgaaacattaaaaattgcgttagcttctgcatcttcatgggatggaaggttgatcaactgattagagctcccaccaggaataatccaagaaatcaaataaagtaaaatacagaagttatttgcttgaagacagtggagcacagctgaggcaattagtgaagaggtcatgactcccaaggagagaaaagctcaaagcaacttctttcacaacagtagcttttccaattcagagctgagaatccaaattcttcaccaatgcatgaagacattttgatgaattctgggacttggggggatgggagactaatatcctaagccttaaaacagctgaaaaatatagcaaagatgtcagcagttttataagaccaggatttgaagtcaggccagattcatcagaaaaagtggtcagagataagactattgactgtagctaaaattacaaagggggctaaggagacccagaagtacactaagccttactagaactgcaaacaaggcttgactcaaaataatgttagtatagtggcagaaaggatgacccctctcaaggaaaagaacattacttggaaccactaccttttttaagaaaaatatacagaatttattagtaaattactagacatatcaaaggaaaagattacataatggaaaaccaagagaaaaaaacagataatagaagtatatctataaatgttcttgacgagccttttgaaataactatgattaaagtatttaagaaattaaaggaaaaggtgaagaaaatgaaatagatgagaaaatttcacaaagtagaatgtgtaagaccgacacagcctagaactgaaagtatttcatatctggtattaagaattctagttggtttagcagcagaatagaaacagccaaagataaaagcactgaacaagaatatatccaggccgggcatgatagctcacacctgtaatcccagcactttgggaggctgaggcgggtggatcacttgaggtcaggagtttgagaccagacggaccaacatggtgaaacccgtctctactaaaaatacaaacattagccgggtgtggagacctgtaatcccagttactcgggaggctgaggcaggataattgcttgaacctgggaggcagaggttgcagtgagccaagatcgtgccattgcactccagcctgggtgacagagcaagactctttaaaaaaaaaagaatatatgcaaatggaaaaagggaagaagagatggatgaaatgtatataaaattcagaaaaaattagagacagaaggaaagcagttaaaatgtctaacataactataattgaactttaagaggagataacagattgggacaaagcaatatttggcggggtaaaactgattatttcccaaaagtgacaaaagacattaacctataaatttaagaaccccaaacagtataaacagaggaaaaaaaaaaaaacacccaggcaaaagtgcaaaaaaatctttcttaaaaagaaagaaagaaagaaaaaagacatgcaaccataatagaagcaatggcaatattgacaactgaagtctcaatgatgaaaggcaagagacaatgtaataacatctttaaagtactgaaaggaaatgccaacctcggcttttatgtcttgcaaatatatcctaaaaataaagatgaaatgaaaacattttcagacacacacatacgaaagctgagagaatttatccctaagaaatttgtactgaaagaaatttaaaatggagttcttcagcagaaggaaagttatacccaatggaaacacagaaattcaagaagacataaaaatcaatggataagaaaactaaatggacaaaaataaatgactagggattgaatgttaatgatacaatacaataatattgtgtggggtttaattagatatgtagaaataaaaagcatgaaaactgagaataagggagtgggtaaatggaattaaaatgctctgaatttataacattttaaacaagagtcaaaatttctatttacaacacacacattttaaatgtaataatcataaagattgcaagaaaaagggaaaagatataaagtacacacactaaagaaaagaagcttgagtgtgtcaaaagttgatcttgaggaagaatcattatttgaaataaagaggaaatttcataatgaatatatcacttttattataattcctgtgtttataatgtctttcttaaaacccatgtagctggatcctgtttctttgatacagtataacaacctttattttttaattggactgtttactctatttacatttaatgtaaaatgtgattgaaattatgtgtaatatatcatgttagtatttgaaatccaggattctattacagcagtcccagaggaaccagataaacatactactgtcttgtcaaatggtctaatccaaggttatacaacttgcggcccatgggccacatacagtccaggatggctttgaatgtagcccaacacaaatttgtaaactgtcttaaaacattgtgagatttatttttaactttttttttttagctcattagttattgttagtgtattttctatatggcccaagaaaattcttcttcttccccagtgtggcccagggaagccaaaagattagacacctctggtctaatctgtctgcacattgacatccctcatttggttcacttttacctccaagttttgcaatagtgcaacagactagcagaaactaaggcacatacaagcactctagatgcaaaaagtctgtacagaaaagcagtccagaaagggttcgggtggatattgcgtgaactaacctatgggattgactataagcctagtaaagggaatgggaaagtaagatatccaaaaagagagaaaagcacctttcaagatatgttggcatacagccatgtgagtagaaccaaatttcttcatggcctcctttccttcttgtattacagtttagaaacttggacttaggagattcacaatgcttctccataatatataataatgagttttcgggagtgtatgtgtgctttggacactttggtcaaatgacttatcctgctaggactcagttttgtcatctaaaattcagtataataatacattacacaattaactgttgtaagggttaaattaaataagacaaagtacaggcaaggatgtagtgtagtcctgaaacatcgaagatgtgtttctcatatctggcaacgatcatggcagtttataataagaaagaggacttgggacaagtgatgtgctacttactttactttcatcaattaggagtcaatcctactaggccaatagccaaaggaaatggtgagcagaacctatagtggcacattcattcttgactcacatgtgaacacaatataatttcatgtctccttgataaaactacttttctacaaggaaaaataaaaggcaagtagagagatttcagcctacggatgaaatacacagtgtaacatgagacagctgttgcagagccaacaaaaaaatcatgttcagttaagtgagtcacaattccttaaaatttttttccatgcccacaaatgcaaaaggctttgtgaggttgggttattattatctttttttttttaagtttcattgaggtataagttatatgcaataaaaataaccaattttaagtgtacaattcaatgagctttgatgaataactacaatggtaaccaacatgatataaaacagaaactaatcctttcccccacaacccagatcttgagctatctgatttgctttttgtcacattagttttgcttcttctagaaaaagatatcatacaatatataatcttggtggctggtaccttttatttagtaatgtttctcaactttttgtgtttgttatggtccctctaatgagtatttttccctaattgtctctccccacttaatgaaattttgataccacagatatatctatatgtctatgtactgtgtatacacctgtgctttatacagagtaagatttttttcacacctcaaaatgttttgcccctcacaaggtgctatcaccccattgagaatacatgatttagtgtaatgtgtttgagattcatcagtattgtgtgtatcagaagttggttcattttattgctgggtaatattccattatacaaagagacattcaataaatgaataagaataattgcatatgtgttgcaaaggtcagggagtgagttctttctcaaatcttagtctccctggtgtcagtagacatacctctaataacacaattgttcaagtcagaaatctgagagtatcaagacacttcttttttcctcatttccccatgtcaaatccattaaagcctgccaatttcatctcttgattattgcttgaatcttgtctcaagggatcagattttgccactgtaacccagaacattccagacatgtaaggctatcaatctttatcgtaggagagatgggaagccgttgaagggatttagataggaaactgacatgactttcttagtgaaattaaaagattactaaatcttttacagcaagcaatgaataagaatatggagaatgaattagaaaggactgagagtaattgtggagcggatctttcaggagtccaggggataaatgccagtggctctgtcacgaatttgcaaggcctttgagagtaggagatgagagagttggaagacatgctatatttcagtggggcccatgggaaggcttagcaaggcctcactcactgctagaagataaaataactgtaatgagaaattcaggtaaaccttcctattgcttgctgctctcttgacttagatggtatttttggtcaaattaatcagtattctaaatgaattaagtatgaatattcttgggtcatttgctaataagtaagaaagaattagagaattataatcatgcccgtaagaaaaaaaaattgtatacttcatgaatccatcgatctttctatccatctcacaactttttaaagggttactgtagtactagtatccaagtactagctccagatggtctgcaatcctcctgaagttttatgtaaattgtcttatctacatacatctctctggggggcaacttgaagattcagattcgatttttattcctattaaagagtaagaatcaatggcttactgtgttttaggtctagggtatgcaaacattcataggaaataatcttcattcttaaagcatgtaaagtttatatcatataagcacataaatggcaaagtcacattgtcagtgctgtaaaagagataggaacaaagctctgaaagcttgtcagttactctggtgctttttctcctccaggtgacttcccaagtatgcctggccacaatacctccaggaattcctcttgcgatcctatagtgacaccccacttaatcagcctctacttcatagtgcttattggcgggctggtgggtgtcatttccattcttttcctcctggtgaaaatgaacacccggtcagtgaccaccatggcggtcattaacttggtggtggtccacagcgtttttctgctgacagtgccatttcgcttgacctacctcatcaagaagacttggatgtttgggctgcccttctgcaaatttgtgagtgccatgctgcacatccacatgtacctcacgttcctattctatgtggtgatcctggtcaccagatacctcatcttcttcaagtgcaaagacaaagtggaattctacagaaaactgcatgctgtggctgccagtgctggcatgtggacgctggtgattgtcattgtggtacccctggttgtctcccggtatggaatccatgaggaatacaatgaggagcactgttttaaatttcacaaagagcttgcttacacatatgtgaaaatcatcaactatatgatagtcatttttgtcatagccgttgctgtgattctgttggtcttccaggtcttcatcattatgttgatggtgcagaagctacgccactctttactatcccaccaggagttctgggctcagctgaaaaacctattttttataggggtcatccttgtttgtttccttccctaccagttctttaggatctattacttgaatgttgtgacgcattccaatgcctgtaacagcaaggttgcattttataacgaaatcttcttgagtgtaacagcaattagctgctatgatttgcttctctttgtctttgggggaagccattggtttaagcaaaagataattggcttatggaattgtgttttgtgccgttagccacaaactacagtattcatatttgcttcctttatattgggaataaaaatgggtataggggaggtaagaatggtatttcattacttgatcaaaaccatgccttgatgtacccaaaacaaaaggactataaaatgcaagagccctcattgtagtccttatgggatccctcccatctctgagtgatggccgtacaaagaccagtgttgttgaatccacctggagttgcaatattacattattttccagtacagaatgtctgtgtggcccatgaaagcaacataggttttaagagttttagagtttcattagctcattctaagttcctctgtttgaagcatggtctcttaggttttggactgaactcagacctttagttcttttcatcccacttcaccttaggtaagtaaattctggccaccacccagctccaaagacacaaactctccttcgctaaccaggttagatgtcccattcatctcatgccctgataaaaactgataaggggagagaatagttaaaaatttttctagggtatcataactctggtaggaagtcatctgtctagaaatcaagagaaaaagaacgtgtggcctcctgttataacaagggtttctagatttgtcctgtgaaaggtcgtttaaggacttggggatcaacttcctcaattatcaccaattgcactgttgctccaaaaatcatttaaaagcttactggacatatctacataatggtgaaactgtaatttagagactatccctgactaatgtgctggtaggcattaaaatgagttcccaagggaagtgattaaaatttttttctcttctgttttttgagagaatttctagatgtcctgggccacagttaattaagatttttaggggggacagaaagttatactgaaatctttagagctcccttccgccgttaaaattatatatatatatatttaaattataccttaagttctggggtacatgtgcagaatgtgcaggtttgttacataggtatacacgtgccatggtggtttgcggcacctgtcaacccatctacattaggtatttctcctaatgctctccctcccctagccccccacccctggacaggccccattgtgtgatgttcccctccctgtgtccatgtgttttcattgttcaactcccacttctaagtgagaacatgcggtgtttggttttctgttcctgtgttagtttgctgagaatgatggtttccaggttaaaattatatatttttaaataaatgaaaactgtgtttttaaaagaggacttttgagaagtatatagaaaaaccattaatttagactctgtgagattaggttgcatgaagaaggttttctgaatatttgaagagtggataaataaatgtcccccaaagcaataaaatcataatcctttaaaatataggaaaaataactaatgggaactaggcttaatactcgggatgaaataatctgtacaacaaactcccatgacacatgtttacctatgtaacaaacctgcacatgtacccctgaacttaaaataaaatttaaagtaataataataaaataatatggattttctttccaaattcggaattactttttgtaaaattgtattaataacttgtggcatgtggcacgttaaactgattttatttcaagaacttctgttactggctaggttgatacataggcttgtgggtttttgctttttgggttttttttgctcctgcccatacttccagtgtcttcagtgttttatcttaaaattttcccaggatctgatccagtttcatatttaatgctgcagaaaacctgaagtgattagtaacatgaatagaataacagaatgaattaagggaactttttttttcatcaaggtatatcttcgggatttaaaagtttttcataatttattatcactgtggatccacaaattcctcagatgaataagaaatacctctgtgaatttctgtgaccactaaaattactgagccacagaaattaattctgaggaagcagaagtagcaacatagttcaaacatgacttgtttccatatattttctgttttatatattcttttaaatatccttttaaacaagtaatatttcttttctttcttgccttttttcccatttattttttacattttttctttctcattttgaaccataaaatttgtaagaccgttactaagacccctgatagttttaagaaaatttataatacctataaatatgtaaaaaaaatttagaaaaatatttaaattaaaagtattcatgagaatttcattaccttgtagattatgtcatactcttttccagattttagatatgttgaggtcaggcaattcaaaagaattaatctctgtattaatctgttataatgttaacataacactatgttattttcatatattataataacaggcttattagaaatgttctcaaaagatagaaatgcaatatttcataatataaaatatctttttcatcagtatttatggaataaatagaaaaattttagttttcctgttctttgtcttgaatcaatacagaaatgaacctcatgtgacattgggagtgacattggcctctagggccatttttggatatcaccattataagagagcactagtattagcatttggtggtgggagccaaggaatagacatcttgccttgcacataattgtctgtacaataaagaagtatcaggtcttgctctctatttgaatactctattagatattaatgaagtgaaacatatactcataacaatcagagcagctatcaggttttacccagttttcgtaaacacgtagtatttttttttgtatagctttaattctctgaattttctggaaatgcagctatcatggattgaagaaagattttactttggtttcctctgagctttaccaagagttgttcagtactttggaaatgacattataagtaacaataccatttatgacattaaaatatgacacaacatacctgtaagcaatatttgtagctattgtattcaggagatattacatacaggtgtcagcatcagactcactcattttgtctctttatgtgattatgcctgagcatttacacactgaattatatactgttatccataacttttcttttcattactcatttatattacagtgagaacattatacgtaaaaataatgtgtatgtttacattattagtgtagaaagcatatacatttcattttgaaatggtaaaattatctgtaagtttccttttagaatggtaaaagtattaccaaatatttgtgataaaaagcaaggtattgggtctgagaaagctgagaaccactgaattaccacaaagggacaaaataagagggaaatttataaattttaacattataaacaggaaaaatatttcagtgtttttgaaatacttacctcatcttcattcaattctaaattacttcttttgtttctacagcaattaaatgcaacttttagaaaaatgtgaagaaaatatacatgtgtattttcttttttaataagaaaaatacactttttctgagcctcaccactctcagattggctcttgatcaatatctaccagatttttaacccagacataataatttttgaggcccagggagaaagatctcttcaggcacccattaaaagggacactatttggctcttgtttattccttaattttcctgtgaaaggatcattgagtcccctgccttcctcctcaacttcatttaaattaaggagaaattgtaggtgaaatgaactttgtgtaaagtgattcaagaggtgttaataaatccctcttgcctccccaaatcctcctcaatgaagctgccatgaaaactcgattgttgggttaagaatcagtttttctgaaggagggtattgggccaatccattctcagtcattggcttttggtgtgaagttagaatttgggatgctgtcatagctttgattggatagattttgcccactttcctctatgagacagacataggccaaagactctcacacctattggtactggtaggaacaaggaagctcttcttgttataggggccaactacagcattctgtagacagttggtactgagagctccatggtaaaggggcacagggatggcagaactgtggggataatgcccagagattgcaacatgccaagggacacccatgggtattggaaaccaggggaatctgaagacccagcaggagctgctggggaaatgagacccaggtctgagaacggctagctgagagcaggaggggcttgtgtgagtcttgctcaggagttctgagcaaacaggactgctcttggaagacagggcaatggaggcagcaaacaaagactgttttgaacaggaggtaagaaagtgctggcgagcatggtttattttatttgcagtttgtcctaatagtttatgtcattagcaatgaattatttctgccctttgttgctgatctgggccatagatctcatggaggacagggtgtggttacaaagatgtaaccactggcaacctgatcagagattttggataaagatctccagctcatccttaagtcaagtaagaaaagaatcccttggaatttagagaagggtctgaagagtttcccttctgttttcaggaaagcatcatcttacatgtcaggagtagacacttgccaaagtctacaccagcctctggcaccctcaggagggtctggaaagacatctaggccccctctccaatgatgttcaattctgtataacacagcacacttcttaccacagcccagctgggtaccccattctctgagttgtcctttgcctctcagaattccattattttcgtagcattgtgcttaacagtgggacacactactgacctgtacacttaagaacggctaagatggttgatttcatgtcatgcatatttatcacaataaacaattttttaaattagaagatatatatatatcttatatatatttagttatatatataacatttatatatatatatatttagaaactttaataggcaagaactgagctgatggagaaagttaaaatattagaaagaaaaaagctagtctgagacatagaaagacttcagtcctcctatcaagggactacctatagggaaagcaaatggaaaacacttcacatctggacatatccttggagaatgctttgaattttaagaacaaagaattagtacaaaaaaagccaggcaagagaaatgtttacctctaaaagaaagaaaaacaattagaaaggtattaagtattttccttcacagcctaatgccagaaaatgggaagcaatgtctattggattttgatttaaaatatcatggctaagaactctctaagcaggcaattactgtgcatgcccctgggtaaacaaaggaacttgagacggattttcctctccatctcggggcttatcatcccaaagccattgcttctccctctccagggtcttccacaggtaggagagcaactccacttggttatcttgaggccaaattatcttttcaggaggcaagttgctggcgaaacctaactttccttttagaataagatccattcagcactcagtctagaaaaatgtttcttccatgattcttacaataggaaggcagctttccctggcctcttgttctcacgttccattcccgcttagagccgctcccatgtcactatttccttagttagactagaaagagagccagatatctgttctgaaataattgtctctctcctcctatcacaaccatcttcaaaattttgctttgcatttgaatttttattgcatatttagtttcacaaccttatttcctaaactttcctaaaattaaatttctgcctcatctccatttttatcacaacctgttaacttattgcacatttaacctctgttctatagaaaacatgtattttgagttttatcaatggtttaaaattgaccagtgcagtctacaatgcctttccgtctcattcagaaaattcttttcagacgtgctctttctacaatttgagcagttcaggttattggccacatgtagttttttccccttattcctgtattcctaagtaagatatcaccaggccttagttttccttatcaactgtgtcagtggcttcttctcagcaactccttattatcaggcgctcttagaggcttccacttaaatgtaaaaattggagattgattaccagttcctggtgctaagtgcccaagggcaagagagaggctgtagggattatggaaaactctactaactttgcagtttcttttgtatagttattaattcccttgtgtaaagtggtcagccctgtgtacccagaatgattctggagtgaagaaactgccctttttttgtgtgtacaaaccccctctacccaatgtcagtgaacctctaagtaatcttcaatccacacacgagaggtgctgattcataataaaattttgtttttccagggaaataagaaatgcaataatgatgcactgagtttttcttaaagtgaaacatatttaatgatatattcagagacatatttttataattcactttatttgtattatatcataatgtactagaactattataagcaccatttataagattataattaagtaatctgcaagatggtggttgtgctaagaaccacacatagacaattttcttgacaatattggtcagtttccagtctttggccttagatgtcttttggccagtcttggtatatcatggacacaaaatgagttctatatctgctgttgttatcagtaaagtcaccccagatgacacattgctccaaaaatatctggcaaagtttttaaaacaataaatttttatatgcaattggaattatttgtaaaaaatcaataagtgaacacacattgaatttctctcgaagtcctgacttttgatgtatttgatgattaaaattaattctaccttttatggatattaaaagaccaataatgttaaacatatcaaagtgaagtttgttccagttggtctgtttgaatgttctttttttttctttttcttttttgacatagagtcttgctctgtcgcctaggctggagtgcaaaggcacgatctcagctcactgcaacctccgcctcccaggttcaagtgattcccctgcctcagcctcctgagtagcgggaattacagatgtgtgccaccacgcctggctaattgttgtatttttagtagaggcagggtttcaccatgttgactaggctggtctcgaactcctgacctcaggtgatccacctgccttgacctcccaaaatgctgggattacaggcgtgaaccacagcgcctggccttgaatgtttttaaaaagacctgacagagtaaaaatgtgtatgccatgaattgtgttgtgagtaaattcacagaagggcatgatgagaataacatccagcctgccaggagagtcatgcagaattacttgaaaatatgagtgttcacatattcacttcagatttattgagctaaatgcaaatgatcaaagcaactctactgcatgatattaataagttttgtctgctctaatgctttaaaaccacaaaacctttaaatacatttaaatataagatactatgctaaaagatcaatgcagataattttttgaagtaaaaatgctccaaaattatgaaactaccaaatcttgagtgttggtatataaatacgtacttattccacagacctcatcctctcttgtccactcaggactttgcctctgctactgtggcctcagactcctgcaccatcattttctctctttctactgaactacccatgtctgcataaatgatacagtattaatgaaacaaaaccactcccatcatctccagtaaatgccatgctattgctttgcctccctttataagttttctacaagaaaactccttgaaggtaacatccacattattttattttattttatttctgaggcgaagttttgcttttgttgcccaggttggagtacaatggcgtcatcttggctcactgcaacctctgtctcctgggttcaagtgattctcctgcctcagcctcctgagtaggtggaattacaggcgccagccaccacccctggctaattcctgtatttttagcagagacgggatttcaccatgttggccaggctggtctcgatctcctgacctcaggtgattcgcccctcttggcctcccaaagctgcattctgtttccagttcttcaccttccattattcccttggcccagttccatagtttcctttatgccccactccaccataccaattttgtcaaggtaattaatggtatcaattatataattcaatggttaagtttgagtcttcaccttattcaatctcaaagtagggtaggatgcagttgagaaatctctttttatggaaatactttcctcatttaattactaaaatgtctcctgctcttgggttttctcctacctcattaggtgttccatttccatttctttgctattcatcctcttcttcccagtttctaaaggttggagtgcacagggcttcatcctcagcaaccttcctgcctttctctgcacacctccctaaaacatcttaccagttttgtggctttgaatgtgatctgtacgctgatcttcaccaatttatatctctcactctgtcctccctcctagattccagctacacttgaagcctctgcttataataatacgcaacttcaatttaatttcaccagagcaaaacactggatttcctcccctcagcagccttccccatctcagaaaatggcatcactttttacccattagctcaaaccaaataccaagaagttatgctcaatgccctttgtgtccatcgggttccaattatgagacagaaactgcttggtgatttaaacagggaaagtttaatcattagctataaaaggagattgaagtgttgagagattagctactaagaggtaaagagatgtctaaagaatacaagagtaggagatgtagccagcagccactatcttcagatcagaggcaaagcatgcaaagaaaaaccaacctgggtaaggaatccgcctccttacccccaccagcccacctcacatacacacacacccagcactgaaatgcagaccttgcaggaaagggtgggtcccctggatgatggagaagttcacaaaggtgctttgctgatggaacttgctgaaaagccactcataggggtattagaaaaagctgtccaaggggagaaactgcatctcaggccatgctgggcatctgcccaaggaaccgaatgcctttggaagctgctctctgaagggcagggatggctgtccacgaggaggccacatgcattgcgtgcattaggcaggagcctgctacgagaaagcaggtaccagagccagggagaaaagcctattcttccccaagtgctgcttcagcgccttgtaatgatgaagattagtttagcatcccacccattggtaagggagaaacgtgctagtttcatggcagggcagtagagggtggatttggagccgaagacaatatatggatggatagcctttcttttgtttacacccacaccacgtatgctgtatcttctaataccgatgactctgctttaaagcgtgtctctcatctgaccacttctcgccatttctactgctactaccttctcaggctagtacaacattctccctctccctgttttcactttcgctgcactgtggtcagttctctgcacattagccatacatcgtgtgaaagtataaattcaatgttatactaatttatagtactgatgttaaatcatgatagtctccactaaaatttttcctgtggcttttgatctcactcagatgaaaatgtaaacgccatgatcagacccttgcctgtctctcagtcaacttctttctgttcctttgtttttgcctcataagctttgaattttctgttatctctgatgggaacatttcctcaaatagctggttcctctgtatcattcataactgctccagtgtcatctctgcaaagaaggtcctgatttctctatttctctatgtaaaattgtagctttttgttccctactttttatactattttatatatatatatataatatatacatatacatatatatatatattttttttttcagagatagagtctcatgctgttgcccaggctggagtgcagtggtgcgatctcggatcactgcaacctccacctcctaggttcaagagattcttctgcctcagcctcctgagtagctgggattacaagggcacaccaccacgcccagctaatttttgtatttttagtggagatggggtttcaccatgttggccaggctagtcttgaactcctgacctcaagtgatcctccccaccttggtctcccaaagtgctgggattataggcatgagccaccacacctggctactttatattctttttggcatttattattaccacaaattatgttaagtattcttaattaacaagaattaattaaatttttgtccactagaatttaagtgtcataaagaaggaaattatttttgcctggctattgtgagctaaggtttaatggcattcaataaacatatgttgaaagaataaaaaagtgggtaaaggaatgaattcctgcttttcaacactgatttgaacccatgatctgccattttttagcatataaagtttgagtcagtttctcaatatctaagaacctcaaattcttcttctctaagatgatagtttaaaacatttaactctcccaagcttactgtgaaaattcaccaggttggatgatatctcctcaaaaaaccataagaaagacttcttgatcaagcagagccatctcttgatggagtctaagtagtttcttaaaaagagcaattagggcaggatatttataggaccacaggccagcctgggagattttaaagagtgtctattaaggtttggattggacagagtttatgaaacagctgtgctttgatggacacagtagggtgagggtggtaaaatgaattaagttagcaagctgttagtcctaatgaataagtgattgggttggcttacagtcttatattctacaagcaagtgtttcaaggagcaagtagctaagtgtgttttgtttgttctcagtattgattaataaagaaacagggagaatatattgtctcagatttggttagcactggggcaggagagtatgttctatggcgttgtttatgggacagaggtattttggttccagatctcaagtgagatggtatttgtgaggtgtggaaacagtgccagcccatatgcacaatgccataaagcagagtagatatctaagtgaattgcccgtcactgagcagcttagcatatacagcctgtattcagataaaagcatcatggtttcgcttctttgaaaagttcttttcattaataaaatggtttttttggtttcttttggatgatttaaaaatgattctttcagagatgataaattatgtgcttggggaaattctgtaattctgatgggtttgtaatgactctttttgactttgcgaattgatccagtagagcataaacttcgggagtgccttaggccttaataggctatgttcttgttttaataattttgacagaattgttgtgggaatcataattagagtctctctctcagtgaatttgattaatttaaaaaattaataacatttctacgtaaacaaaaggtattaggatggtgcaaaagtaacttgcagttttgccattaaaagtaattacttaccacaattactttttcaataacctaaatgtaataaggaagagaggagagcctatccccgagcagatgtgcactttagggaaggagttgatgcttgtcctgtgttgtgaggctttgtgattgaatcagctgctcaggatatcaaagaatcttcaacctgaggaccagttacattagaatggtattgtctgcttggactcctctgttgagaagaattgcaacgattctctgagttcaggtgggaaaaagagctgtggtatgggcataggaaaggtggatgatggcctactcatagcacatttattggtacattgttgtttttgctgctgctattgctgtttcctgtttcattgatgaatcaggagtcttctattaaaaactatatgtactacttttacacatgttcacagtaacataacaacaagcataggtcttatcatccacttattccaaggctaagaataggagtcagggaagttaagtgactagtctgaggacacagggataaaatttggcagagacatggatgtggctatgcccaggtatatgtggctgaaagctggtgctctgtctctatgcaagacaggcagaggaaaacctctggttaccaaaaaaaaaaaaaaaaaaaaaatcacaacaaagctacaggaaaacagaaaccatctagaaaagaagtcaagtctccttctcaatgacagctgaactttgccaaggaattgagataactatgagctaaggctgggtaaagattctgatttaaagcattacagactttctaaagttttacttctttcaggagcaggaacaaaatcccttttccccttttatctacatgatttagaggagtgctctgctaggaggtctatgaatatttatagaggatgataataattaaagacaaaagtttcaagatatacgtagcagaattaaagaacagggttatattttgcgtttctgttagtgtttaagagaaagagatctcttagtgtataagtttttattttgtgaatttacatatcccaaatgacaaatcactgttatacatggccattagagattgcacagtatgtttacttttctcttttaggtgacaaagctatttgaaggatgtgtgtggaaccgaatataacccagttaagcattattactagaaaccaatcagggacatatgtaactttgtcacctcgctgcctaaaacacttcactggttttaacttcagaggcctctgattctcctaaattatttgtaaatgtttgtgtgtacctcgtatgcctgtattttcagggtttagaatccatagatctcactagattttcaaagtcagtatgcaactcaaaagaagtttagaaagtaatgacatgcaggatacagcccacattcctcattatgacctccataacttgatctggcccttgcctgctttttcttttttttaaattgcatttatttaaagtgtacagcatgacgtttgcttacacacatgcatagtgaaatgattgctatagttgagcaaattgacatacccatctacaaacagagttgcctttatttttcttatggagagagaacctaaaatctactctcttagcaaatgttccatatacagtacagatttattacctggagtcctcctgctagtcattagatctctaaacattcatcctacagaatagcaactttgtaccctttgaccaacatctccccatttcaactatctccccatccctatttctatgtatttaactttttaaaattccacatataagtgagattatacaatatttttctttctgtgtctggcttattttacttaatgtctcatccatgttgtcataaatggaagtatctcctttttaaaggtcacataacattctattctgtacacacacacacatatagtgtgtgtgtgtgtgtgtgtgtgtatatatatattagttttaatattaatccataaatccaccattttagtccatgaatccaccaaatgacacttaggttgttcccatagcttggctattatgagtaaggctgccgtgaacatgggagtgcaggtacctctatcatgtgctggtttcgtttcctttggatatatatccaacagaaggattactgggtcatatggcatttctatttttaattttttacggaatctccattctgttttccataatagctgccccaccaatagtgtacaaaggttcccttttttttccacaccctcatcaacacttgctatcttttgtctttttggtaacggccatcctaaggagtgtgaggtcatatgatttggaattgcattttcctggtgattagtaatgttgagcttctttttatatacttgttggtcatttgtatattttcttttaaaagatgtctattcaggtcctttgcccatttttaaaccacttgagtttttttgttgttgttgttagtgagttatgtgcatttattatatatttgtgatattaaccccaatcagatatattgtttagaaatatattcccccagtccttagatagaaataaatggaaatatatcctttgtccatggtttagaagaattaatcattaaaatgttcatccaaagcagtatgtagattcaacgcattcctattcaaaattgcaatgacatttttaacaattctaaaattcaaatggaacacaaaagacccaaaatagccaaagcaatcttgaacaagaagaacaaagctggaggcatcacacttcttgatttcaaattatactgcaaagttatagtgatcaaaagagtatggtgctggcataaaaacaaacatctagaccaatggaacaaaatagtgagtccagaaataagtccaaacatataaggactactcactttcagtaaggaaaccaatgatactcaacagagaaaggatagtctctttaataaatgctattgggagaactgggtatgcacatgcaaaaaaaggaaattgaactcttatcttacgccatacacaaatatcaactcaaaatggattaaagacttcagtgtaagacttgctgtaaaattcctggaaaaaaagatagggaatgagctcctttacatgggctttggcagtgagttttgggttatgacaccaaaagttcaggcaacaaaagcaaaaataaacaagtagggctacatcaaactaaaaaaccttacttacttttctagaaagaaaatcatcacttacaactttcttatgttttagcattatgaagtttctttaaaactcccaaagcacttcacatgttttctcgcctcagtgactttgcacacgccattgtcttgtttctctgctgccaacagtggtctctattgtttgcccagcaaattgctgactgtcctttaaaacccagaacagaattcattccttcaagaagagctgatcattccttcatctgtgcaaccctgcctattatccataggtgttttattttattatgcagtcctaaaaatggtgctgctgaacttttctttctatgaaaaaaatgttctttgtgtattattcaggaaactaagcatatgacaaatacagtgtgtgtgtttatctttacatgtaaagttatcgagaagaatttaaattgagattttagctgtactcacagttgattctgattggctttttttttttttctgaatgtctttactcctgtggactttaaagtagtaaatgtgtatgacttcggtaatattttaaggtttaagaaagcaatctattcactcttggaaaaggtgaatttaatggtgcaattgccacctttggtgaacaattaaaagcagaattgaaagaatgttgaccatgaggtaatctcattcgatctgccaagggatattttttgctgtgagggctgggtgtctagtgacagtaaaccgtagtcacagataaggagagagggtggttttcagttggaaggaggtggtatcacatgactactctctgttggaatgaggagagagaattgagcttcacagagaaggtttagttttgaagtgtaactagattcaatacaatttcttcatttttgtgtttttttcttttcaataatatatttcctaggtgcttaagtgaatattttcagaaatagaacaaataaccgaagttttaaaataaggatattcagataaaagtgaggtaaaagaatatcatctgggccccttgtggaagagtcccctggcattgccacgcatgatgggagccctccaggggaagccccacagccagagccttgtcttctctggccatgcactagtgcagcatttgacatgatttttttttctttttatttttttgagatggagttttgctcttgttgcccaggctgaagtgcaatggtgtgatcttggctaactgcaacctccacttcctgggttcaagcaattctcttgcctcagcttcctgagtagctgggattacaggcatgggacaccacgcccagctaattttgtatttttagtagagatggggtttctccaagttggtcaggctggtctcaaactcctgacctcaggtgatctgtcttggcctcccaaaatgctgggattacagacaagagccacctcacccagccttgacctgatttttaaccagtgctctcagaggtggctgattagctcttaccacagcgacgtcatcacttttgtcaaaaccaaaagataattggtagggacggcagtacttccacagagtgttagtaggacacaaacctggctgcaccctccctaggctctgtggttctagtcatcagtcccttatgtgcacttgttggcaggtacttgatatactctgctcttatgtatttgcttatatgtcttctggatcatgagctccttgaaggcaggggctgttgctgaaacaatctttatttcaaagtctgccatgtggtcatagcagttaaatatttaatctagtgtaaattaatcatttaatttaatttaactttgtggtgccataaaccagacatcatctagtgtcagcatgccttgattaaagctacagagttttggaagaaatagaatttgtgtaactctcagtcttgatgatttgcttttctccaaagtaataagatgtatctgcaagtataacttggagagtggggagctctcagattctcattcttctccttggcattcttttgggcttttgggaagagcagcacttggtcagaccagtcatttttctttcagtgtgaagaaactaatcctcgctggaggctgactttgacagaaaatcactgcgagtgcctggaacgtgggttctgagtaggagtccatgagggctagttactaaggaagaaacagtggagagaggcaagtgtcaggatcaggagggcaaaggttgagatgggcctgctttcctagttcaactgcagtctagcgatgtccaagaacatttggacagtcatctcagacaggagcccagttatattctctgaatttgactaaatttggggacaaaaaaatatttgacaaactacctgttagaaatattttctgtgcccatgtaggcaagggtgacacatgcagcattgagtgagtgaacaggcaggtgcatgtagttctgcacagtcattctcaactattcttccctattctgtgatggatagtactcacacgtggtacactatctctcccagtaaagcacacagaggctggaggctggaggatattccctgtggaatagctgtaattctgcgttgccctctcctcttccagggaacatgttggaacacatggaaaagatgtcataacagatggaacttaaatgcaggctgagaagctcacatttccattgaaagcagttttctcgctaaggctggagatgagcagactttatatttttgtacctgaagttttgtacctactgaaatagacccttttgctctcaatggtccctcttagtgatgttgctgtagatcaagtaccccactcactgttctgaaagaagaatgtgtcatccatgtcagcctagcaggagtctgggacacagaaaccttgctgtgtatggttaggcaaaatgtatctcttatgtattgatttgattctgctttatgttttttcctagaagccaaggacttttctggaagaaagagaaatagaacacaaatatcatctctgaagtttacaataattaactagaatctgtttgatgcattagaagggtggcaaataaaaccagctaccaagaaaggtcaacagggtaccctaggaggaaactcaccatcagggagggatctaaatgagtgatttggatgtaacccagagcctagatattctcagaaaaaggctggatcaagacacaatttgtggctgtaccgtaccctttcctgatgcagttcccattattttactctttcctcctatcttctactgggaagatagctgcatgtatgcaaactcaaagagctgttgtctcagagcccagaactgttgggtgttgcgtcctgtggctgttgctgtaggacacccctggtcgagtgtactattaaagagtcaaacactttcatctgttacagagaaacattgaaggatcaatgctgtagacagcatattacacagggttgctggagtgccagctgtgcaaggatggctgggccttggttaccatggtgattccttgggcaagcagagcccagcttagagctgtgggatcacactggcttactgctcgctgggtcccagcagaacacggggcttgcaccacctgcccagaagtgagcagattagagatcagctgtcgtgggcacagctggttttgtgttctccagacagatggcagcagcagggaaacaccaaggagagctgattattcaggagtataaactacagtagagagtcttagcatgacctggatagaagtccagaataaaatctcactttccaaccatgtgcttggggacattgtcattacagtttgaatactggaggaaatatgactgtgttttcattaatgaactaataagttgattcattttttattgtatatatttatagtgcacaacatgaggtattcatacatgtagtgaatttattattacaggtaagtaaagtataggtacttaacttggagtacctttacttttatagcatgaaatactacccattctttaaaaagaataaaatcatgtcctttgcaggaacatggatataattggaggtcatcatcccaagttaattaaagtagaaacaaaaaaccaaatactgcatgttctcacttataagtcagatctaaacactgggcacttatggaaataaagacgggaacaatagacactggggactgctagaaacgggaagagagggcaagaaggactgaaaagctacctattgggtactatacttactatctgggtgatgggatcatttgtacttctaaccttggcatcatgctatatacccatgtaacaaacctgcacatgtacccctgaatctaaaataaaagctgaagttatttttaaaagtgatgaataaaaggatgagagagaaatatcattaattgcatgtatagatgagataactgatacttagaataatttgtccaatatcatacagcataagcaaaacactgtctttctgattgcatttttgtactatggtacattatctagagacatgcctcattcaaatacataatgcattaaatgttataatttatgtagaatagtgtattactttcatgttacaatttttttcagttaagatgaatctagtaaacataaaattaaagtgatttaattatatgtaaacattttcattttaaatgcttaatataaaattcacccccttaccaaattttcaatatacaatacaatattattaactgtagtctccctgctgtacatcagatctctagacttgttcagcatacatcatagcatttggactctttgacctgcatgtccccatttctttttctttccagcccctgataaccaccattctaactctctgtttctatgtatttgactttcatttggattctacatataagtgagatcatgtagtatttttctttctgtgattttgtttatttcacttagcacagtgtccttcaggttcatccatgtggtagcaagtagcagtgtctcctcctttttataaggccactgaatattccgctgtagatatataccacaatgtctttatctattcatccattgatggatacttaggttgtttccataacttggctattgtgaatgatgctgcaatgaatgtgagagtgcagatatctctaccaggtgctgatttaatttcctttgtggcaaaaccagacgcatataaaacttcaagctcagaatagctctactttgagatagaaattgaggataagaaagggaacttacacagacaattaatttctggccaggaaagacttcagggggccagctaagttcactcacagaggaataaggaaaatatcactttcagcttctagggaaacagtgtcttctgtattatttcagctcttaatttagttgatttttgaatttctcttctctgcttctgacacttagggtttattaggtcagaggacaagttgcagaagaaacatttttgttctccaatttgtgtgtgtgtgtgtgtgtgtgtgtgtgtgatcttatgattaagattgtcaaagggaagaaagttataggttctttaatagcacagggagggcaaaatgtacatagttttgaagaccatatgacctggatgactggaaaaatgagaaggaaataagaaaccaactgttactgagagcctgccatgtttgacactctacatattatttaaaaaaattcatatgacatgaaatcatctgctccttgagaacagtgaccatgtcttgttcaatgcactctgtgctgtgtgaggtacatggtaggtactcaataaatatttgttgagcttatacactcttggtgggaatgtaaattagtttagccactgtggaaagcagtttagagatttctcaaagaaataaaaaacaaactaccattctacccagcaatcccattactgggtatatactcaagggaaatacatccttctacaaacaagacacatacattcatgttcactgcagcactactcacaataacaaagacatggaatcaacctaggtacctatcaacagtaaactggataaagaaaatatggtacgtataccatggaatactacacattctttaaaaagaataaaattatgtctttgcaggaacatgaatgtggctggaggccatcaccctgagtgaattaacacagaaacagaaaaccaaatattgcatgttctcacttataagtgggagctaaacactgagaactcacaggcatgaagatgggaacaatagttactggggactactagagggggaaagggagagaaggactggaaagctgcctattgggtactataatcactatctgggtgttgagataattcgtactcctaaccttggcatcatcctatatacccatgtaagtaacctgcccgcctacccccgaatctaaaacaaaagttgaaattattttaaaagacttgaataaaaggatgagagagtgatatcattaattgcgtgtatagatgagataattgatactcaggataatttgcccaatatcacacagcaaaagctaaacactaagtctttctgattatattttcataatatagtacattattattattcaaataagtaatgcattgttataatttatgtagaattgtgtattggttttatgtgacaatttttttcatgaagacaacctagtaaacataaaactaaatatgatttaattgtatgtaagcattttcatgtaaaaagttctacaattcagaaaataaatctgtccaatcatgtatttttatttgatttggaaaataatatgactggggggcagggccaagatggccgactagaatcagtgtcagtcagagtcttccattgaaaagaaccaaaacagtgtgcgaatcctccactggcaacccagatatccaggttctgtcatcaggactgagtaggaggctggggtgacccacggagaggaaggaagagcagtgtgatgggcggcccacctgagagccataaggggcggaggagacctcaacccccagccaacggaggtggtgagtgagcacactacccagcctgggaaactgtgctttttccatgcaactgagcgacccacagatcagaagatcccactcgtgaacccaagccaccgtggcctagcgtcccaactatggagccatgcagattctcaacagccactcagctagaatctgcctaagcttgcccagttcttgaggagaggggaggccatcgccacagctgcagctgcctgctgtctaagccttctgggctccttggaggaggggcggcaggcaacactgggaatgctagctgcctaacacactatgctcccagggcaggggaagggcggcagccatctctatagctccaggccacgcttttcctctgctggagccaaggaggctggacggttgggtcccaagaggtattcgccacagcctaacaaaccggctgtggcagactacggccaaagtgcctcttcaggcctgaccttgacccattcctcctcactgggtggggcctccctgcaggaattccaacaactccaaccaggggctcagggacagaactctaatctccctgggcctgagcccatgaaggggtggccatagtctccgtggaccagcagacttggtcttttgttcttctagttctgaggaatcggagcagcccagaggagtaggtttccccacagcgaggcacaccccctctaccaagggacagccaaagtgcttcgttaaatgggtcctgcatcccatgccatccaactgagtgagatcctccaacagaggttgtcagacaccttatatgggagcatttctactggcatcacattggtgcccctcgaggtcagagatcccagaggaaggagcaggcatccatctttgctgttctccagtctcctcgagtgacatctccaggcacgggagtgaacctgatgaatagggcctgaagtgaactcccagcaaaccacagcagccctagagaagagggagctgactattaaaaaacaaacaaacaaacaaacagaaagcaacaacaatagcatcaacaaaaaagtccccacaaatcctcatccaaggatcaacagcctcaaagatcaaaactagacaaacttatgaagaagagaaaaaataaaaaaaaacacagaaaacccaaaaggccagagtgcctcttctcttccaaatgatcacaacacctctccagcaagggcacagaactggacggaggatgacatggatgaactgacagaagaaacaatagatgctggcaaggctgtggagaaatagaaatgcttttacactgttggtgggaatgtgaattagttcaaccattgtggaagacagtgtggcaattcttcagggatctagaaccagaaattccgtttgactcagcaatcccattactgggtacataaccaaaggaatataaatcattctactataaagatacatgcacatgtatgtttattgcagcactatttacaatagcaaagacatggaaccaacccaaatgcccatcaatgatagattggttaaataaaatgtggtacatatacactatggaatactatgcagccataaaaacaaatgagatcatgtgctttgcagggacatagatgaagccagaagccatcttgttcagcaaaccagcacaggaacagaaaaccaaacactacatgttctcactcataagtgggagttgaacaatgagaacacatggacacagggaggggaacatcacatatggggacctgtagggggaggaggagagggagatcatcaggacaaatagctaatgcatttggggcttaaagcctagatgacgggttgatagttgcagcaaaccaccatggcacatgtatacccatgtaacaaacctgcatgttctgcacatgtatccagaaacttaaagtaaaataaaaattaaaaacaacaataataatatgattgtaaagatagatcacgtttaaagagggcagctcactgtggtgtactggtaatttttgaacaactggttcccttctccctaaaaaaaacctctgtgtgtgtgtgtatgtatgtgcgtgtgtgtgtatgtatgtgtatatgcatatatattatatacacaatattatttattataaattccatacagccagttagttcccacagaatgcttttattaatttttaccaaactcttatctatagccaacctttgtttgcaactgatgaataagttagttgacacatttgtttatctcatgtaagacaaaagtcaaacaatgaagactcacgtctcggaaattcactgttttgtccatggtgtgagcaagttccctgttgaattgtgtaatagtggttgaatactagaaaactgtatttttcatttcagtgctggtcagtgtaataactacagacacacaacacacttctaagtttaatctgctttatcaacattttctctaccacttccataagtctagacagtcaataaaaaataaattgagccctgatttgtagtatttgccaattcccaccaggccaatttcaagctatccgagtgatgtcaccaaacacagatttgggaagaaatgtgcagtgacacagcattatgtagaactcgcaacttgcaactaagacataagtaacttcaaaagtataaataaataaaacacagtaattgataagttctagtaagtgatgagttctacacattattacttgaatttttaataatggctagttggtagagaatgtaaatcagtttagtttctacagcagtgacatcagattccaatgaaggggtgagaaaagaaagtgaaaaacagaagaaaggggaaagaaatatttgagcatgtgatgtgggctaggtactttccttacatgagctcctttagagtcctttctccaactttcgaatgaacaaaatgagtcccagcaaagcacctcctcctttgaccacaggacgctgcctcagaaggagagccaccagttcctgttgctcctggctgcttttctttgtgttccgtttcctctatttaactcaaattactgagaagtagtctgcttatgttttagttataagcctctgatggaaagctggggcagccacccactagggaagatagatggccagaccctctctcttcatctctctggcagccagaacttaggtgacccagcagggcctaatcagacatacatgcccagcacttgaacatgggagccgtggatggtggagaatttattccgactagtgtgaccaactgtcctgctttgctgaagacagagggggttctcaggagcccagactatcagtttaaaaccagcaaagagttttgagcataccagcgcaagtgggtcacctgctgctggagtctgggggtggcagtttcagcctcagtgtgcagggtcaacagtgactgcaggggaatctgcagcatctgcagtgcggcgttgaccaccctaagatcaagttctgagtcttgatttgggctgtggttctggctgccctccgttcatgcctattttcagaaactagttctgcatcttcccaattattctgtgaaccaactaataaccttgcaaaacctccttttctgtttaatgtcagccaaggcaaagtttctgctgcttgcagggaatagccctggactgacaccatgcttctctcagctttccttactgttgttccatctcccagcaatggctggctctggagttcattgttctgtgctccgcataggtgaagtctccagggaaaagtgcttctttctaaggcactgtcagacttacggaagtgatttatttaatagataaaccagcactgatgacttctaaccagttaaagctgattgttttttccagtcaggaattctggtaaaaccatatacctctatccatagtgttagtccctaattgccaggcatgggctgtagagtttaagtgggactagagaccaacacacgtacgataaacaatagaggtaggaaatatacctcaaatttcctggctattgattgattcataaaactattttataatgatccaaaggattaagcaacaaataaagtcattaaaatagtgtacttaaaagttgcactttgcaaaatgggtatgttatctaggtactcgtacactatttttgtactgctggtcctgtaccagaaacatttttttttccattgttacttgctttttaaactttgcttagccacttaaagaaaatctgcttgcacaatttgcctcaaatccactcccattgtgagctgattttttaatttttccaattaaaaaaatcacaatttatgccccctcccccccaaaactccttaaatcatagtgagacaaaccttccatgaggccagactatgcccttctcattcaatagggttagtattcaggaccaaaagagctaaccatctaagtttaaatacaatagaaatataatgccagccatgtgagaaaatttaaattccctagtaactacattttttaaaaagtaaaaagaaataggtgaaattcgtatatcattttgtttaacataatatgttaaaaatataatcgcttcaacttgtaatccatataaggatattaacaatatatcttacatttcttttctttaatagtgagacttcaaaattcagtgtgtagtttaccttcaagcacatctcaactaggacgaccacatttcaagggttcagccccatttgacttggggctgctgccttaagcagtgcaggtccaagatataagcccaagcaagacaagggttgtctccgcatcctccttcatgtgagatgtggcaaggcttgaaacctctctagctctgatgccttacagtaagattagtggctgtgttagattattgatgtttcatttgaacactgacaattttatgatcctatgctttctctcagcaactagtcttctggattttttcatttatcatccagccatcaggacttttacctaaattctagatacaatggctgattgttctgcaataacattttttattgttcctaaaaaagcttgttttgaatattcaaacataagttgtttgatattgagattttttaaaatgtaccttgccaaagaaaagggaatgcaggaatacagaagccaactaagatactcttactgctagtatttattctcttgccacagctttaaaagtgcaaaccagataataaaattatgaaacataaatggaaccaagcaagaagtctgtttgtttgtttgtatttttagtaaagatggggttttgacatgtggccaggctagtcttggactcctggcctcaagtgatccgccctcctcggcctcccaaagtgttcggattacacgcatgaaccactgtgcctggcctatatgtttttaagttacattattcacagaaatcgttaggcatgaatgtccttgtgggcatatagaaaaacatgatttcatgtcatttcaaaaacagaacccagactacttttgtgcagcatttcttaagacactttcccttgaagaaggaaatatgttagaggtgcgatatcttaagataagccttgagaaaaataaaatgaaaagaagtaggaagaaggaatttatgttttttttttaaaaagtgaggaaacattcaagttatgaaatattgctaagtgcatcacaacaagggttgcaatgacacagagaagatctgcagaatcctgcacaggaggctgtgtgctgggaatgtacactgttttactgtttttcagaggaggatgaatggaaggaggacttacagtcttctcagttgtatttggagcttagttctttgaccatgactttactgccataatttgataatgggcagaccataaagaatccatgcagtaaactctgcacggatgtgttcttggcacttagccattgtatctaaaatttaggtaaaagtcctgatgactggataataaatgaaaaaatccagaagactagttgctgagagaaagcataggatcataaaatcatcagtgttcaaatgaaacatcaataatctaacacaactactaattttactataaggcatcagagctagagaggtttcaagccttgccacatgagtcaaagggtaaaggcactatgtgttgtctttaaagagatatgccaattcttgccttgctcactgcaccacaatacttttctgtactgggaggagtaggctcagggaaaagaggctcttctctagccacagtgtgaactataatgcttctaagatggactgaggaatcaacaaatattcattctgtcaaatgagatgtaaaggcagatctgcacgagggcttcaggaaatgtttttctccctgataaaaagaggcaccaggaagatatagtttctttgtcttcctctccagaaggttgtgtgatggcctgaaaattgaagcaacattcatctttttgtagtcatgaaaagaaggccatgagaccacagggaaaccaagctagagttctgccatcagtgagtgctcaagaataacctggtctggagccatccaccccaaatctcttgtaatgtgggatacaaaatctctcattttatccaagactcttgtattgggattcttcaacttgaaggcatcacttggtaataaatactactgaggctactctagatgtgatgtatccctaccttctaggcttctctatggttggatctgcctctaaaccctgcctctagggttatatctcacagaccatagtcatgcaggaagtgtggtagggctttggccaacatgtatgaggtgaacacatctggctagcccgagttaatcgttttctgctcatcagcctgttgcctgatccacacaactatgattctgcttctatttcttctctagaacactagcttcctttttaggtgggcctcaggtaaaatctggccctgttgcgtgctaccttgacacctggaatgacaaggcctcctttccattgctttagaagtggtcatctgatcaattgtattaggacaacctagcggctttcaaaagtgtggatgcccggtctcctcccagctccccacagtccatcaggaagggtcatgtcagcaagcctcccagatgactcagaagtgggttaaagctgaaagttccacataccttctgactgttctctcaccgggcccatgcatgaatgaacataaaaccaggttcattgcctctacctgcctgggtttagaatacatccaccacctggatctcctcttgcttccttgtcctcaccaggtcgaacctgcctgagtctgtcatttcatctgagcctgcccttggatggccccactgccccaatggggcaagccccttggtggtgtccattccctcagtcccatcctttctgtcttcatctttctctccagtacctgtaattaagctcaactcaattatgtcatctcccagatgtccactgataccgtgtccccatgaatgacctctatgagttaatcaaaggaaactcagattttaaaaaattgcttaaaataaaagtataagccatcaactaatgttcggtgcatgagctgggtcagcactgctcaactacttgaagaaatcaagatgcctttgatgtccttgtttattttgctttttgttcctctaaaaaaaatctcttaagagaagaaaaaattatattttgcctattttaaaaataacagaattaagataatctatggtttgcccgaagtcacgcagtactcatttgagccaaaatctcattgtccaactggtcccaagagtcctttcaagtaacttcgtcagctgtcctttgccagcatgtaatgcagtgatgcaatgctctggtagtaatttggaacaatccaggaagcaatattctcagtgttcaaggcccggcactgcccgggggaaattaaaccttatctaccccagcacatgatgcatgccattctccttgagagggcttttctgctgctgcaacgggaaaatgcaatcagtttcacccatcactgagttctacagacttttgtgtttttttttaatttactaataatagggcaattaatgtaattttaagaagttttctttcctttaaaaagaggctggcctgtgctcctaattaaaactgcttttcacactctgaacaaggcttcagatttcgattggcaaaatcccatagcgcttggcctagagggtttatttttaagggtctggtgagattttgagtaaaaaatgattagtgaaattgctcctcatcctaactagagcctgcaaaacagcgaagagttctgtagtcactggtgtattcatgacaaagtaattatttttctacttagccagaaggaaatgggaggtttctttgaaggcttgagatctgcttcttagaatgggagaccgaaatctttaacagctaatggtatttgtttgagttctttgaactgtcagagcataaattaggtcaccacaggtcccatttcgactggagcattcaaaaccagtatatcctcatggccattttgagagttatcatgtaaacaagcaaaaatcttccatcttcagaaacccttgtttgatgctatattccaccaactcctgccctcttactctgtccttctcttcaaggtcaatgaacagtttttaagccttagcttctttttcctcccagcagcatttgaccctgttgatcatgcctttcttgaaatccccttgttcttttgattccttaacaattattctcactggttctcttcagtcccattgcccccagttccaaatccaagtgcttatccagccaatttttgctcttctccaaatgtaagctgtcagcccacagctaaaagagagatgaggtgagatcacagggattaggagttgtttgataaattgtgttttctttagtagatatattcaatagaactctctctgattgagcacttgaaatgtggccaacgtgattgaagaagtaaattgttaaatgtaatttaatttaaattaattgaaagagccacatgtgacaaatggctattttattggacagtgttttgtgaagtcttgccacataaaatgtggtccatgggccagtggcttctgcatcacctgggtgctggttataaatgcctactctcaggctcctccctggacctacagactcagaatctgcatcttagcaagatcaccagatgattcgtaagcacaataatatttgagaaatagtgctttagaagtttaacttttaaaccactagagtgacagacatgtgtacaacttctggatattattataccctgaagaaagtgctttctgtgaattcttacagagtcctccttgtcacattaatcagatatattgttgattatatcttgattgacattcctctggatgtcaaaattctaagataattgtttctgtaaacagttgagtttaatctactgatctgagctacatgtcattctttagtccagagtatatcatttgttagaaaaaatgccagctcccttcctgtgctctggggaaataaatagtttctttctttcataaagacatagaataaagaagatgaaaaaaattaaacctcattgtacagtaacctgtaaagaggtcacttgcttcttctatactaaaatcagactggtactctaaggcatgagtgaagatttgcacaaaacatttaaggatctaagactaaaaagaagatcagagaaaaagtctacattggacaaaatgttttttcattcattttatttactttttaattttgaatttttatgggtatgttggtgcatatttttatgaggtgcataagatattctgatacaggcatacaatgtgtaataatcacatcaaagtaattggggtattcatcacctcaagcatttaccctttctttgtgttgtaaacattccaattatgcttttacttattttaaaatgtacaataaattactgtagactgtatgtgtgtactagatcttattccatctatctaactatatttttgcacccattaacaattgaccattcccactctgccccctgccacttccccactaccctttccagcctctagtaaccatcattctactctctatcttcattggttcaattgttttaaattttagctcccacaaatgagggaggacatgtgaaatttgtctttatttgcctagcttatttcacttaacataattatctccagttacatccatattgatgaaaataacaggatctcattcttttttatggctgaatagtactccattgtgtatatgtaccacattttctttatcccagatttctttgagttgtatcccaaaagcacaagtatcaaagcaataatggacaacagggatcacatcaagttaaaaaaaaatgcacagcaaaggaaacaacaaagtgaagagacaaagaatgggaaaaaatatttgcaaactgtctgtctgacaagtgattaatagatacaatgtataaaggagctcaagcaactcaatagaaaaaaatttgttaatgaacacttagattgattccaaatcttggatattgtgaatagtaccacaataaacatgggaatgcagatatctctttgatatactgattttcttattttgggtaaatgcttatctgtgggattgctggatcatatgctagttttatttttagtttttttaaggaacctccgtactgttctccagggtggctatgataattcacattttcaccaacaatgtatcagggttcccattactccaccaccgcaccagcattcattattgattgtcttttggataaaagccattttaactggggtgagatgatatccaattgtagttttgatttgcattttctctaataatcagtgatgttgagtaccttttcatatatctgtttgccatttgtatgtcttcttctgataaatgccattttaaattagattattatattttttcctatttttttaacttgatgtgctccctcttgaccattatttgatactcatgcttttgggatattactcaaaaaatctgtgcccaaaccaacgccctggagagttttcccaatattttcctttagtagtttcatagtttgaggtcttagatttaagtctttaatcaattttgatttgttttttgtatgtgccaagagatagtggtctagtttcattattctgaatatgaatatcctattttcccagtaccatttattgaaaagactgtgctttccccaatgcatattcttggcacctttcttgaaaataagttcactgtagatgtatggatttatttattgattctctattctattccattggtctatgtgccgattttaatgctagtactgtgctgttttggttactatttctctgtaatataatttgaaatcaggtatgtgattcctccagttttgttctttttgctcaggatggcttcggctatttggggtattttgtagttccatataaattttaggtttttttttcctacttctgtgaagaatatcattagtatttatttatttatttttatttttttgagacagagtcttgctctgtcacccaggctggagtgcagtagcatgataatcagctcactgcaacctctgcctcccaggttcaagcgattctcctgactcagcctcctgagcagctgggattacaggtgtgtgccaccatgcccggctaatttttgtatttcttagcagagactgagtttcaccatgttggtcaggctggtcttgaactcctgacctcatgatctgcccatcttggcctcccaaagtgctgggattacaagcgtgagccaccacacctggccaatatcatcagtattttgataaggattgcattgaatttgtagattgctttgggtattatggacattttaaaatactaattctttcaatccatgaacatggaatattttttcatctttttgtgtcctcgttaatttcttgcatcaactttttacagttgatatggtttggctatgtcctcacccaaatatcttgaattgtagttcccataatccccacagggacttggtgggaggtaattgaatcatggaggcagttatctccatgctgttctcctgaaagtgagtgaattctcagaagatctgatagttttataaggggattttccccttttgcttgggacttcttgctgccaccatgtgaagaaggatgtgtttgcttcccctcccaccgtgattgtaagtttcctgaggcctccccagccatgctgagctgtgagtcaattaaacctctttccttcataaattcccagtctcaggtatatctttattagcagcatgagaacagactaatataataaattggtactgcagagagtggggtgctcctataaagatacccaaaaatgtggaagtgactttggaactgggtagattggaacagtttggagggctcagaagaagacaggaaaatgtgggaaagtttggaaattcctagagacttggagggctcaagagacagggagatgtgggaaaggttggaacttcctagagacttattgaatggctttgaccaaaacgctggtagtgatatggccaatgaagcccaggctgaggtggtttcagatggagataaggaacttgttggaaactggagtaaaggtcgctctttctatgcaaaaagactggcagcattttgctcctcacttagagatctgtggaacttttgaacttgagagagatgatttaggatacttggaaaagaaatttctgaacagaaaagcattcaagaggaggcagagcataaaagtttggaaaatttgcagcctgacaatgcaatagaaaagaaaagccaatattctgcagagaaattcaagccagctgcagaaatgtgcataagtaatgaggagccaaatgctaatcatcaagacaatgggggaaatgtctccagggcatgtcagagacctttttggcaacccctctcatcacgggcctggaggtctaggaggaaaaaatggttttgcaggctaggcccaggacccccctgctgtgtgcagcctagggaattggtgccctgcatcccagctgccccagccatggctaaaagcggccatggtacagctcaggccgtggcttcatagggtgcaagccccaagccttggcagtttccacatgctgttgagcctgcaggtgcacagaagtcaataattgagatttgggaacctccacctagatttcagaggatgtatggaaatgcctgtgtatctaggcagaagtctgctgcaggggcagagacctcatggagaacctcttctagggaagtgcagaagggaattgtagggttggagaccctacacaaagtccccactgggactctgcctagaggagctgtgagaagagggccactgtcctccagaccccagaattgtagattcactgacagcttgcaccatgcaactggaagagccacagatacttaatgctagcctgtgaaagcagcaaggaaggaggctgtatcctgcaaagccacaggggtggagctgcccaagaccatgggagcccacctcttgcatcagcatgacctggatgtgagacatggagtcaagatcattttggaactttaaggtttaatgactgcccttttggatttcagacttgcatggggtctgtagccccttcattttggccaatttctgccatttggaatgggagtatgtacctccattttatctaggaagcaactaacttgcttttgattttacaggctcatgggcagaggggacttaccttgtttcagataagactttggacttgcacttttgagttaatgctggaatgagttaagattttgggggactgtttggaaggcatgattgtgttttgaaatgtgaagacatgagatttgggaggggacaggagtggaatgatatggtttagctgtgttctcacccaaatctcatgttgaattatagtttccataatcgccacatgttgtgggagggacctgatgggaggtatttgaatcatgggagtggttacttccatgctgtcctcctgaaagtgagttctcacaagatctgatagttttataaggggcttttccccttttgcttggctcttctccttgctgccaccatgtgaagaaggacatgtttgcttccccttccaccatgattgtaagtttcctgaggtctcttccagccatgttgaattgttcccattaaatcttttttcctttataaattactgagtatcagtaatagttataataaaataaatttcattatagagacctattacttatttggttaagtttatacctatgtattttactttacttgcagctattgcaaatgggattatattcttaatttctttttcagattgtttgatgttggcatatagaaatggtactgatttttgtatgttgactttgtgccctgaaacgttactgaatttgtttatcagttctaatagtttttctggtggagtctttaggtttctccaaatataagatcgtgttacctgcaaacaaggataatttgacttcttcctttccaatttagatccactttatttctttctcccatatctttgctctagttgagacttccagtactttacttaatgacagtggtgaaagtgggcatccttgtcttgtttcagatctcgaggaaagacttagttgttcctcatgctgtatgatactagatgtggatttgtcatacatgactttttttgttgaagtagtttcttctttatccagttttttgagagatttttatcatgaaggggtgttgaattatatcaaatgttttttcagcatcaattgtaatggttatgtgatttttgtcctttattcttttgatatgatgtatcacattgattgatttgcatacattaaaccatccttgcatgtctggaataaatcccacttgattataatgcatctttttaatgttcagatgaattcagtttgctagtattttgttgagaatttttgcataaattttcatcagagatactggcctatctctctctctctctctctctctctctctctctctctctctctctctctctcattttttgatgtgtttttgtctggttttggcattagggtaataatggcttcatagaatgagtttggatgtattccctcctcctctatttttcagaatagtttgagtaggattggtattagttcttctttaaatgtttggtaaaattctgcagggaagccatgaagtcccagagttttctttgctaggagatttaatttcattacttgttggtgttctattctgaatttggatttcttcattggtcaatcttggtagattgtatgtatctagaaatttatcaatttcttttggtttttccaatttattggcatatagttattcagaatagtctctaatgacttttgaatttctgtggtatcagttttaatatctcctttttcatctctgattttatttatttgggtcttctctcttttttttcttagtctggctaaagatttgttgattttgcttatctttaaaaaaacaacttttcatttcattgagcttttgtgttgtagtatttcttttcttctaataattttgggcttagtttgctcttgtttttctagttgtttaaaatacatcattaggttgtttactgtttattaggttgtttattgattattagcttgcttattgaaaagtttctacttgtctgaggtaggtgcatgttgctataaacttttcttttagtatcgcttttgttgcactcctattggttttggtatattgtggtttcattttaatttgcttcaagaaatttttaaatttccttttttttttttgagatggagtttcgttcttgttgcccaggctggagtgcaatggtgcaatctcgacacaccacaacctccgcctcctgggttcaagcaattctcctgcctcagtctcctgagtagctgggattacagacatgtgccaccacgcactgctaattttgtatttttattagagacagggtttctccatgttggtcaggctggtctcgaattcccgacctcaggtgatgcgcctgcctcagcctcccaaagggctgagattacaggcatgagccactgtgcctggcctaaatttacttcttaatttattaattgaagcattggtcattcagagcatattgtttaattaccatgagtttgtatagattcccaagttcttcatattattgattgtagttatattccattattctcagagaagttactcgatatgatttcaatttttttaatatttaaagacttgttttgtggtctaacatatggtctatccttgagtgtaatctatgtgctgagaagaatgtgtattctgcatccattggatgaaaggttctataaatatctattatatccatttggtctatagtgcagattaagtccaatgtttctttgttgatttgctgtctcaatgatctgtctgtccaatgctgaaagtggagagtgttgaagtctccagctattattgtattgcaatctatctctctatataggtctaataatatatgctttatatatctgggtattccaacagtgggtgcatatatatttacccaatatcctcttggtgaattgacccctttatcattatataacaatctttgtcttttttataagttttgtcttgaaatctattttatcttatgtaagtatagctacttctgtttttatttttatttgcatagagtatttttctagccttttattttcagtctatgtgcttctttacaggtgaagtatcttgtagatcattggatcttgttttttttttttcaatcctttcagccactctatgtcttctgattatataatttagtctatttatattcaatgtttttaattgataagtaaggatttagtatagccactttgctatttgttttctggttgtttcttggtcttgtcttccttcctttctttctgtcttctcttttctgaaagtgattttctctgatggtatgttttaatttcttgcttttcattttttatgtctgttacaggttttttgatttgaggttccatgaggcttgcacataacgtcttataaatcattatttcagctgataaaactttaactgactacaaaaacaaacaaagagaaaaactaatgaacactctatgctttaacttcatccacaccactttataactttttactgcttttctattgatatcttattatactatctctgcattaaaaagtcattgtagttattatttttgataggtgtgacttttagtcttcctactcaagatatgaataatttacacaccacagttacagtgatataatatcctgtatttgtgtactcattattaccagtgagttttgtaccttcaggtgatttcttattgcctgttaacatcctttcccttcacattaaagaactgtccttagcatttcttgtaagacatgtctggtgttgatgaaatccctcagctttcgtttgtctgggaaagtctttatttctccttcatttatgtagggtatttttgttggatgtactattctaggctaaaagttttttcccttcagcactttaaatatgtgacgccactctcttctggcctctaagctttccaatgagaaatctgctgccaggtgtattggagctcctttatatgttgtttgtttctttcttttgctgattttatgaatctttctttatctttgacctttgggagcttgattattaaatgtctttaggtattcttatttgggttaaatatgcttggtggcctataccattcttatacttaaacatgaatatatttgtatattttggaaaggttctctattattatccatttgaataaacattctaccctgatctctttctctctgcttccttattaaggccaataactcttagatatgcccttctgaggctattttctaggcttgtaggcatgcttcactctttttttcttttgtttaatctgtgtgttttcaaatcgcctatccttaagcacactaattccttcttctgcttgatcaattctgctgttgagacacagtaatgcattctgcagtttgtcaattgattttttaattccagaatttctgcttgatttaaaaaaattatttcaatctctttactaaagttatctgataggactctgaattccttctctgtgttatgttgaaattcattgagcttcctcaaaacaactgttttgaattctgtctgaaaggtcacatatttcggttactctgggatcggtcactggtaatttatgtagcttgtttgatgtagtcacatttacttagatgattttgaggcttgtggacattcactgatatctgggcattgaagagctagatatttattctaatcttcacactctgggcttatttgtacctgtctttcttgagaaggctttccaagtattcaaagggaattgagtgttgtgatttaagtctttggtcactcactgcagccacatctgcattaggagacaccccaagcccagtaacaatgtgacccttgcagacttgtaaaagcatcattttggtggtcttgggtaagatctgggtgaattccctgaattcccaagcattgtctctggttcactttccatacttttcccccaaacaaatggagtctccctgtctgtgatgagctgcctggagttggggaaggggtgatggaaccactcctgtggcctccattgctgggtcacacctgaagccaacacagtacggtctcacccaaggcctgtggagactgttgcctagctatcactgatgtttattcaaggcccatgggctctttagtcagcaagtggtatatccttccaggcctgtgtcttttccttcaggtcaacaggttcccttctggcccaggattgacctagaaatgttatctggggaatagggcctgaaatcaggaatttaaggagtctacttggtgctttattttactatggctgaactcatacccaagttgcaagacaaagtccttttactcttccctctcctttcctcaagcaagagtctctccctgtgtctgccactgccctggcccatgctgactactgcctagctactgctgatgtttatgcaaggcccaagggctctttagccagcaggttgtggtgaatcctgccaggactgagtccttcctttcaggacagcagattcctttctggcccagggagctagggcctggaacaggggcttcaggactctgcttggtgctttattttactgtggctaagttgatattcaagctacaaaacaaagtcttctttgttcttccctcaagtggaagaagtctcagagctgtgtgctgtgatgcctggagttgggggaagggtgatgaaagcaatctcttggccctgacatctcagctggtgtctcactaggtcacatgcactccaagtccactggagtgcccaggaattgcacttcttgtgacctagactatctttctttcaaatttatttaggaccctgagcactttaacctgcagtggtgaagctaactgaagctcaggttcaggccactaagatgagcgattctcctctggaatgctccctccatgggcaaaagctggattctgcctggtgttgctctccattgttacagggaagcactgatttccaatgcaaagccccacaattactcacttttcctcctgcaagcacacaaattatctctccatgctccacatggtgctgtggaatgatgggaaaggtgtgtttcaagactgtctttcttaccctcttccattcccctttccttgatctgatgttaaaaccacatactgtgattgctcacctgaattttgcttcttaagaaggtgatttcttgtgtggataattgttcaatttgatattcctttggcaggatgataaattgagggctttatttagtcatcttgctcctccctctctcattcttgattgaatgtacccatgctatgggatgcttccaaagtgttaagatatacaatgccctcaactgtgaactgggatcagaaaacaattgacttttatttttcactcatctataactaaatctgtcatttccatctattataaatatagacaaaaaaggagaattgtattagagaaaccagtgtctctgtcaccagtaggaatcacagatcatttaacattacactgcaactgtggcaaattctcagaataccatttatgcaaatcatgacttcaatattacagtgaccattaaacctgtcactagatactgtatttactatactaataaagaaacacatatattaatattaaaataaagatatacagtgccctaaaaaggctgtctttggaaatggagaaacctccagctgtaggggatttgagagatccctttgggtaccagttctggttaagaaaggaggatggactgagaatctcagagccagggcatttcaatactttctactcaggctgcctctctgggttctgttccttccctgcaaaataatgtatatggatttgatagagcctttttttaggtcagttctcctcacattcaacactgatcccagaaaagttttgaaaatgaagttaagaatgattaaatagctatctacaaaagaagggttattccacgactattctcagaaaatcatgtatagttagaccatcattgaaaatattgaattacttgaacaaatatgtgcaaggcattattctgggcattgggaaataacaataaacaatatagttagggccatgtggaatatattgttagaaaagtgttagctaaatcagcaactgctaattctcaaacctgtttaccctccctgtttacactgatcaagactataaaatgccaggtgggggtgccttgtttgattttaaagtatagtgactaagtccactaagatattggaggcagaatatctcagcagaaggcggacaaggaacccatgccaagtaatagggcaataaaaacatctggtggaaagtcatatgcaaagaattcaaatagaataatgtgatagtgcttgagcagtttcctaacactgtggcagtcaaagcagccttccccaagtaggtgccattaatactgagaatggaatgaccagggactgccccacatgtggaagtgagaaaagcactccaggcagagaaacccacaggtggaaagatcacaatgcacaaagagctgggtgggctccaggagcaaaataaaatccaagggatggagcgtggcatggtaggaattatggtcaagcatataaaaggaggatgtcgtaggccagcataaatctctctctgtattcattagagatcccttctagtggctaatctcaactctcttgctgcacttaaaatcatttatcattttgttagatgtagagagcactcttatagggcagggtatgcatttataaatatttgaagactaatatccacagctttcaaccatccaagacttttgtgtgccaactatgatttcattatttgagactatatctagactagaaaataaatgccagataataattttttttttaacatgcttgttttcttggtcctatggatgctcagaaatgctgccttggatcaccttcctctgggggaggagtgagagagacagaatgtcctttgtgggccttcatctctcatctgcaaagtggaagacagggatgggataacctatctggacacttctcatttgaaatctcatgtctcaatggaagaaaggtctattgtaccattgctgggaaatctccgttttgtggtttctcctcaggctacctctctgggttctgtttcttccctgtaaaatactttagcaacagaacccagagagtcagcctgagtggaaagcactgaaatgccctggctctgagattctcagtttatcctcctttcttaaccagctctgccacccaacgtgaccatctcaaatccactacagctggagggttctccaaattccaaagatggcctttttagggcactgtgtatcttaacactttggaagcatcccagagcatggatacattcaatcaagagtgagacagagtgagacatgcacatacgcagagaaggaaagatgaataaagagagatactttatgaatgtaggtgcctagtgtgaagagcctacacactactcctagtttctaggttggctaagactctgggattttttagatcaaacagggcaccaagcctggcatctcaagtttttggctaatgacttttgagtgtaaacaggtttggaaattggcagttgcagattttgttaccactttcctaaaaatacttcagagtggcaatttaaggactctagagaagaaaagtgacctccacccattctttcaggagcagagattgcccagcaatggccatttcaaatggcacttccatggaaaaggagaagtgagcaagttggtggcatctccagcagcatttgctttggacttgcctcagccgaggacagattgactttgtcttctgaaaatgaaattaggctaatcatttatgttaatgttttaatttaacagtttagagggggaaaataattatgtttaaagaattttaattctctaggatttaaaaataaacttctacttaaaggttaagttccaactcaaaaataagattccagatagcaaaaagaaggtggaaaatgaagccatagatagttaatgtgtctgccagagactatctcaaattccttgccatgtgtacatcatggggcagtggaaataaagacttggaacacaaaccctggttttcatctttatcttctccctaagtagccctgtggccttgtggtaaattcctaaactccgaattggggtggcttcatctcttaaataagagaattatattattctggagtaaattatttctgagctctcgtattaaggaattgttagttttctttaaaatcttggcactacccaagaaaaaagtgctgaattctgagtatagtaagaaaatatatgaaacacctgcattcttctagctgtgttgcaaatgcaatatgtacagattttagtactttgaaatcgtaatatcatcaatgtgaacaattaaagtttgtgttggtcatagttccaaattgtagctgatttttatttttatactccactcttggtcacatctaacttatttcttagtttgtcctttgttagacaagcaatccctaaatatagcacggtttctatgggaacatacattctcctgaagattccaggaacacgttttatctgaaaaataaggaactgtcagataatacgtccaaattcaggactataacccaggttttatatttttgaattaatttcatttaagtagagttgtttaaaattagttgaaaaattggtttcatgtgaaattttccagctgagttgaattggtacatatttgattttgataataagaattaaaatcttatcttttattgagagctttttttgaaataattaagcatatggctccataacatttggattctgttgttttacatctctgtggccacaagcactgttggatgattgtggagcagatggcacaggtggggacaatacttactcttttccaaagcaaatgagaactttatcagttgttacctaaacgtaggccataacgcacttgcattatgcatttttgtccttttgaattcctgtagctgagcaataatatgatttggtgctgagttttcctgtaactgctagttccttccatctttagggtgtagtcacccaatacttcctcaaaagtatgccttgatgtcttagcacagctacagatgactgtgaagttagggcagaaagtgagaaggttgacatatgaaaattaaaaacttttgaggaaaacaaccctcattgttgaagttacatcaccagaggattggacttcaaagaaaaccatatgtccaaatggcagttgatgagagaagggacctttgaaaatggaaaattatagttataaatattggacgcttactgctgagaatacaaaagtctcacaggaagtcatgccacaggtcgttttcattctgaatgtgaaacatttggggcaatacataaaagtacaatgagaaacagcattgaaaaataccttttaagtgtttcattttaataagaaatatttctgaaaataagacattgagagtgaaaatgaagcatttacttatgagaatattctcgaatgtgtttcaccactaactgtagagataaacattcctttgtggctgggatggctcatctgggctcttcattttcactgttcctccttgtgagccttcagtctaaagctattctctcgcttcctcatttttcacatggttttaaagactgttgaggttagcgaagtcttggttccagtaaactgctctcattgcctgccctgatcatgattagcaaatgactatggtaaattatatccttataaaagataatattaggagtaatattcccctgaaatactatgaaaaatatcacacggtgtacatccactgtgatattaggagtaaattccccctaggatattatgaataatatcacagggtataatatcacacccactgtgatattaggagcaatatccccataagatattccaaataatgtcacaggatgtacacaacaggtgtacatccactatgatattaggagtaatatccccataagatattacaaataatgtcacatggtgtacaaaccgagtgtacacccactggaatattaggagtaatattcccctaatatattacgaataatgacacagggtgtacaacattggtgatattaggagtaatatctcactaagatattacaaataatatcacaaggtgtacacccactgtgatattaggagtaataagcaactaatacattacaaataatatcacagggcatacacacaagttgtacacaaactgtattattaggaataatatccccctaagatattatgaataataacacagggtgtacacccactttaatattaggagtaacatccttctaagatattatgaatgatttcacagagtgtgcacccactgtgatattaggagtaatatctccctaagatattatgaataatattacagggtgtacacaccgtgaggtattcgtagtaatgtccccctaagatattacgaataatatgacagggtgtacatccactgtgatattaggaagaacattccccaaagatattaagaataatataacagggtgtacctccactgtgatattataaaaaatatcttcctaagatattatgaataatatcaccagatatacacgctggtgtacatttactgtgatattaggagtaatagccttctaagatattatgaataataccaacgggtgtacacaccaggtgtacacccactgtgatattaggagtaatgtcccttaagatattaggaataatatcaaaaggtatacacacactgtgatattaggaggaatatccccctaagatattacaaataatatcacctggtgtaaacccactgtaatattaggaggaatacccttctaagatattacgaataacatcaccaggtgtacaccaactgtgatattaggaggaatatactcccaaaatattagaaataatatcacagggtgtacacccgctgtgataccaggaatatccccctaaggtattacgaataatatcactgagtgtacagccactgtgatattagaaggaatatcccccgaagatattatgaataatatcacaggatgtatacccactgtgatattaggaagaatatcctccaaagatattaggaataatatcatagagtgtacaccctctgtgatgttaggaaaaatatccccctaagatattacaaataatatcacagggtgtacacccattgtgatattaggaggaatattttcctaagatattatgaataatattacagggtgtaaacccattgtgatattaggaggaatatctccctaagatattaagaataatatcacaggctgtatagtcgttgtgatattaggaggaatattcctgtaagatattatgagtaatatcacaaggtgtacacacattgtgatattaggaaaatattcccctaagataataagaataatatcacagagtgtacacccactgttatattagaaggaatatcctcctaagatattacaaataatacacagagtgtacactcactgtgatattaggaggaatatccttctaacatattatgaataatatcacagggtgtacacccactctaatattaggaggaatatcctcctatgatattacgaataatatcacagtgtgtacaaccgctgtgatattagtagaaatatccctttcagatattacttataatttcacagattgtacacacactgtgatattagaagaaatatctcccaaaatattacaaataatactgcagcatgtacaccgcaggtgtacacacactgtgatattaggagtaatttccccctaagatattagaaataatatcactgggtgtacacccactgtgatattaggtgtattatccatctgagatattatgaataatatcaccggctgtacacccagtatgatattaggagtaatatccttctgagatattaagaataatatcaccgtgtgtatacacgcttctatattaaaagtaaaatccccctgatatattacaaatactatcactgggtgtacacccactgtgatattaggagcactatcctcctgatattataaattacttttaataccactgtacacccactgtggtattaggagtaatatccctgtaagatattacgaataatatgagcaggtgtacattcactgcgatatcaggagaaatagcctcctgatatactacgaataatatcaccaggtatacatccactgtgatattaggaaaaatatccccctaagataatacgaatagtatcacagggtgtacacccacagtgatattaggaggaatatccccctaagatattacgaataatatcacagggtgtatgtacattcacagtgatattaggaggaatatcttcctaagatattccgaataatatctcagggggtacgctcactgtaatattaggagaaatattccctgaagatgttatgaataataacacaaggtttacacccactgtggtattataaggaatatccatctaagatattacaaataatatcaccaggtgtaaacaccaggtgtacacccactgtgatataaccgggggtacacccactgtgatgttaagagtaatatcccctgagatattactcctaatatcaccgggagtatacacccactttgatattagaagtaatatttttcaaatatattactcctaatatcactgggtgtacgcatcgggtgaatattcactgtgatattaggagtaatgccactctaagatattgtgaataatatcactggttgtacacactgggtgggtacaaatatctttctaagatactactcctaatatcagggtgtaccagttgtacacccactgtgatattaaaagtaatatttccctaagatattatgaatatcatcactgagtgtacacccactgtgatattaggattaatagccccctaaggcattacaaataatatcaccgggtgtacacactggtcgtacacctactgagatattaggagtaataccccctaagatattacaaataatatcataggttgtccacacactgtgatattaggaggaatattcctctaagatattttgaaaaccatcattgggttcccccctccaataatattaggaggaatacctctctaagatattacaaataatatcaccaggtgtacacccactgtgatattaggaggaatattgccctaagatattacaaataatattgcatggtgtacactcactgtgatattgggaaaaatatcccactaatacattacgaataatatcacagggtgtacacccattgtgatattaagaggaatcccccctaagatattacaaataatatcacagggtttacacctattgtgatataagaaatgccttcctaagatattactaataatatcacagggtgtacacagcgaataatatcgctgcgatattaggaggaatatccccctaagatattacaaataatatcacaggttgtacacccactgtcatattagaagagatatctccctaagatattatgaatatcacaggatgtacacccactatgatattaggaaaaatatccccctaagacattatgaataatatcagtgtgtacacccaatgtgatattagggggaatatccctgaaagatattatgaataatttcacagggtatatacccactgtgatattaggagaaatatccccctaagatattacaaataatatcaaagggtgcacaccactgtgatattagcaggaatacccccctaatatattataaataatattacaggatatacacccactgtgatactagaaggaatatcctcctaatataatatgaataataatacagggtgtacacctattgtaatgacaggcagaatatccccctaaagtattacgtataatatcacagggtgtacacccactgtgatattaggataaatatctcccaaagatattacaaataatacgacagggtgtatacccactatgatattaggagaaatttccccgtaagacattatgaataatatcacagggtgtacagccactgtgatatgaggaggaatatccccctaagatattccttataatatcacatggtgtacacccactgtgatattataaagaatattattttaagatattatgaataatattacagggtgtacactcactgtgatatcaggaggggaatccctgaagatattacagggtgtacacccactgtgatgttaggaagaatatccccataagatattatgaataatatcaccaggtgtatatccactgtgatattagaagtaatatccccctgagatattaccaataatatcactggtgtacacccacagtgaaattaggagtaatatccccctgaaatattgtgaataatatcacgtgtgtacacccactgtgacattaggagtaatatccccctaaggtattatgaatagtatcaccgggtgtacacccactgtgatattaggagtaatatcctcctaagatactatgaataatatcaccgggtgtacacccatggtgatattaggagtcatagccttctgagatatgactcctgataacactgtgtgtacatccactgtgataccaaaagtaatagccccctgagatattactcctaatatcaccaggtgtacacccactgtgatattagcagtaatattcctctaagatattacaaataatatcagtgggtgtatacccactgtgatatgaagaggaacatcctcctaagatattacgaagaatatcaaatggtgtaaaccccgggtgtacacccactgtgatattgggaggaatatccccctaagatattaggaataatgtggacacactgggtgtacaacgactgtgagaggaggaagaatatccttctaagatattatgaataatatcatagggtctacaccccgggtgtacacgcactgtgatgttaggatgaatatccttctaagatactataaataatatcacagggtgtacacaacgcatgtacacccactgtgatactaggatgactacacccctaagatattacgaataatatcactaagtgtacacacctggtgtacacccactattatattaggtggaatatccccctaagatattatgaataacatcacagggtgtccacatactgtggtattaggagtaatatccccctaagagattacgaataatatcacagggtctactctcactgtgatatttccagtaatatttccctgagatattgcaaataatatcacagggtgtacacccactgtgatattaggagtcaacccccccaacatattatgaataatatcatagtgtgtacattcactatgatattagcagtaatatccccctaaggtattacaaataatatgacagggtgtatacccactgtgatattaggagtaatatcccccgaagatattatgaataatatcacagggtgtacacccagagtgatattagaagtaatatcccccaagttattatgaataatatcacagtgtgtacacagcaggtgtacacccactatgatattaggggtaatattcccctacgatgatattgcaaataatattacaggttatatacccactgtgctattaagcacattgtaacaggaaaagaacaagtaaatagtttgtatagccatttgtttctgagtataatacagatccaaaaatgtctttacttggttttaataagcaagtaccatcccagaaattaagggtttttgaaagataatgttacgagtggttgtgcagtcataggatagggtcttgagggatatgaaaagtgattgtgtaacttatcccctccttctgaatttgtccttatgaatttaaatatttgtaggtttctgagaggcaatttaagcagaatgggcttttgcacgttgtgtttgtgaaatatctttatgtccattatagaaggacacatgacgttgacacttcaataacctataatatgtcagagagtctgttaggttctttgcagatgtgatctaacttcctacctacaaaaatcttacaaaataggcattatcattctcatttttatagctgaagaaacagctacagagttaaatatctgtctcatgattcaccaggtagtaaggtgtggcactacctgtctgtttccaaacatcacactgccttaggagatatgttcatataaaccatggaagtgataaataatttaggtttttcattctcttgaaattattttaaaagatcctgtatgcttagacttaaggatgaccaatattttaaaactaaatcagtatcatatttattgcttgttaagtcatataaacctactctattttacccaaaagcttataagcattacattttatatatatatatacttctaaaaatgcatattttaacacataaaacttagatcactatgtcagttgtaattatgtttttaagttgccataaaatcttattgagggtagtaaatatgccaagtccaatataatctatcacaaacaaaaagattacttattctaggaagattctgtagtagcagaggaaaagctctaagatatttagactttcactgtggaataacttttcactctgatagaatcaaactccaatctggccaggtaggcaggagatacatgaagaaaatgacacaggtcttcccagagagaatattttgagctgttggtgcctgggtttctcatactgtcagaaaaaagtctggaaaagttattgtttgtttttaaacagttagatatttactaaatagctattgatgcaaccataattttatggatcgtaactatgtttctgcccctacttacagtagagaggaagaggcaaataatgtcatcttgtggttgttgttttgccataagaaccataacatttatatggcttttttttttttttttttttgagatggagtctcactctgacacccaagctggagtgcagtggcgtgatctcggctcactgtaacctctgcctccggggttcgagcaatccttctgcctcagcctcccgagtagctggggctacaggagcgcgccaccacgcccagctaattttttttttttttttttttttttttttttttttagtagagacagggtttcaccatattggcaaggctggtctcgaactcctgacctcgtgatccaccagcctcggcctcccaaagtgctgggattacaggtgtgagccaccacaccctgccaatttacttaatttttgaatagccctttaagtcaggcagtacaacctttctcgcttcacagctgaagctctgagaagccaagtaactcacggcaggcccacagtaactaaatgacagagttggcacttatttgcagggtggcagatcgacaatgctctgtccttctgctgcgtgatcactgccccttaaactctcacttaaataaaaactaaaaagaactatcttcaatccccaacatttcaccaaaatgtaacacatcagtgcaagaagagattcaggtctaaaaagaaaggactgtaggaaatatatatattatatgctactttctgctcaatagatcccacagaaaatattctaaaatgttgtctgatatactgtcttacaataaatacacatgattagtgtctttttctctacgttttccccagttggatcgcatgacaataggagaacgacctttatatatctgacctaagtgtggactggatgtatactgatcctgcatttacttaaaattttgttatttttttcatgatattttgcattaatttttattttaaaaatgttgcttcaaaatattatttattttgtttcctgtgttttttggcccttccctaaattttacccctgaagctaatatgtctcatactagccctgaccctgatatgtgtgcttaaacttgtctgtagaatacctaggtgcacagctctgaattttatattcaaacaaacttttgttgttaatttatttcaccaacttctgtctcttaaatatgtttggtaattgggtggaatctctgacaatttttttttggtatataggtttggtttttaaataattatctggggttgccaaattcaataatattaatacacagttgtttagcttcaatatgtttatcataattttgtaaaacttttcacttaggggtttgtccaagctctgcatggcaaaacatgtagatgatcaatacatccaccctgtcagactcctcaaacatagacttagatcactgtgacatgcattgtaggataatcctcatgacactctacagtgtggttgtacttagtggcactgcaggaatggttatgatgttacgtatgatcttcaaaacaaatagccaatcaatgatcggtacaatcatcttcaatatcatagtgctgcactccatcctcctggtcagccttccgttccacctcagctattatgtcttagtcatctgggagcttggatttctttacctgccgagtggttagcatcatatatgggcatatgtactttacttttgttttctgtgtggccattgtcatactctgattactcatttatgttaagaaactccaaatgcaacagttacaaaactaccatgtagtagttttaagcattattatttggatggtgggttgcctcatttttgtcaattttttttttttttttacagtatggcatagatccaagttactcagaacaacgatgctttgaattctgcaaagatcttaaccacagagaattcattatcatgaactactctgtgattgtcactacggatgacaatggttgtgatcctcttcctgatacagacagctgtcatcattcaactgataaaagctctttgacctgacatgtggacccatcaagagtatagaccccaaatcaagagtttcttcttccttctagtaatagttgtctgttttgtaccccaccatgcattctgggtacactttattcaaaataattcagagagaaaagcttctaacttagttctttataatgaaatttatgttgctttaacgactgtctgttgcctggatatgctgtgtttcttaagtggggttatacattaagcattcctatgtctcttccttcacagtattttcccacctttgtgataaaatgctttaactgaatgagtgttactgtgatttcaaaatttttcatcttaatcatcatcagaattgttttttttcccaaaaaggtaatgaggattgattgctcccctctctttagagaaccattaccagttctatatttaccatacaatatgttcaatctcttagctctatataagctgactgcatcattttttccagacttaactaccttcatgcagtacttaacttgagctaagcacaacaattggtttccctgtactctccagggaaatttgctcacagatttcacagaacaagataaatgtcagtgtactcaaattacattgtgagcaaaagttgtgacatttgctctctctttgagttctgaccctagaacattctttccctccatctccacctatcaattttttaagatccagagaacctggaaataggaacagtataaactgggctctagagaatacttaagttgacatagctgcttcttgaaaactactgattgtcagtaaagcttcagttactgtctttggtatttggaggaaaacattagctcggataggaagtcaacagagagaaaactctttcaggaatgactaggcataataacttgccattattattgttactataattattaattatatttgaaaatgctatagtagacccactttataattttgctaccacataacaggataaatggcagtgcactcaaattatatttaatcaattttcttagggcacatggtgtgttttaagtcagtcttctcaagatagacagtattcattattgtcagtactcaacttactaattcattaggtttcacaagttcgtttttaatatggtaggcagcctctaagaggagctccaacgattcctgcctcctaatatttcctgtataatgaccatgtggaatctcctccccttttactgacttcttattaatagaacaaggcagagtgatggaatgtcatttccaaggttaggttacaaaaaagctgtggcttccatctcgagcactctttctgtctttcttggattgcttcactctggaggaaaccaggtcataaggcagccctatggagaagcccatgtggcaaataattgaggccttctactagccatgcgagtgagcttagaagtggatcttctgagacctaccaatagctgtggagcaagctcagaagcagatcctctcccacctctcccatttgaaccttgagatgttggcagcctggctgggaattgattggtgcttcatgatagaccctaagccagaaccactccgctaagctgctgctagattcctgacttgaaacttgttgttttaagtcctcatgtcttggagtaacgtattatgcagcaatagataacgaatatagtaagttatttacacctatagaatgctgccacataagacactagtgtctgacatttacaacctgcttcttagtctctgcttattccagttgctgatgataaaaatatatccttgcctgttgtttgagtcaataagaactgtgcctggtactgtattagaagttttacttctatgcctgaaaagtaggggtatgagcatataatgtacatggagatacactgggctcatttagagtaaagattgcaagggggtcagttgaagagtgggtaagaattgctctgttagtcatgttgaaatctggaccattggttctccatatgtggccctggaccatcactaccagcagcagtagcacctatgaccttgttagaagtgaaaattctaagaaggaaaaatcagtggagctccacctgagacccactgattcagaaattctgggtgtgggttagaggttcaacaagccctccaggtgattttgatgcaggctaaaatctgagaaccactgcactggattaagttgataaattgaaaatgggcacaaattctttgaaactgctccaattgagaggtggaatttatatctcctataatttactatgggtggaatttgttattgcttcaaccaatagaacacaaggaaagtggtgctgtgccaattctcagctgcaggttttaagaaactagcaacctccgcttcctgtctcttgaagcatgggttcttggagcctgaactccatgaaagaagtctgacttgcatgctgcagaacatctagagatgcctgagattacatggagatacatggagatgtgcccagatatagccagacttccagtgaaggcaccaggcacgtaaacgaagaagctgtcttgggccctccagaacaacctatctgccatgggaataccactatctgacctcagcccacacaacatggcgcagaagaattgcccactcaatactgcctaaattcctgatccacacaattatgagagaaatcgttgctttaaaccactagattctaggattatttgttacataaaaatagataattgccacatgtattatttaaaattttctacttaccatattaaaaattttaaaaggaagaggcaaaatccacaataataataatataatttgtttaacccattatatctagctagctatcaatcatctacttttctttctatttatctattctagctttctttcttttatggattctgactttggtgctgtctttaaaaagtagtcaccaaacccagggtaatgtagattttttcctatgttatcttctggtagttttaaacttttgtgttttacatttacgtatgtgatccattttgaattagcttttgcgaagggtgtgaaatctgaatctagattcatattttttgcatgtggatgtccaattgtttcagcaacatttgttgaaaaggctagcatttcttcattgcattgcattttcttctttgtcaaagatcaattgactctatttatgtgggtctatttctggcctctctttttcattgatctgtttgcctatacttttgccagtaccacacaaacttaattactatagctttgtaatatgtcttaaagtcaggcactcttcatcctccaattttgtgcttctccttcattgtgctggctattctgggtcttttgcctttccacataaatcttagaataactttgttgatatccacaaaataacttgctggaattttaattgggattgtgttgatcctataaatcaagttaggaagaactgatgtcctgacaatattgagtctgcctctccgtaaacacagaatatctcttcatttactgggctcctctttgatttctttcatcagctttcctcatgtagatcttgcacatattttgttagatttacacaaaagtgtatcattttggggggcacaaatgtaaatgttattgcgtttttaatttaaaattccacctttcattactggtatatagaaaacagattgacttttgtataatacccatgcatcctgcagccttgctgtgcttattagttttaggaggttttattatctggtttgttctttctgactttctacatagatgactgtcatttgtgaacaaagatggtttttatttctccttgcccgtcagtatgctttaaaaaaaaacttcgtttatttggttagctaggacttccagtatgatactgaaaagaagtggtaagaagaccatccttgccgtgttcacaatcttagtgggaaagtttctcatttcttatcgttacgtgtaatgttagctgtcagttttttgataaatattgtaggggaggcaaaattttacctctacccttgtaaagtcccagttaagcctgagaattaaattgacttaagagagtaatgggagagaagcatacaaattgaatttaaattttacatgatatggagtcctcataaggaaatgatgatccaaagaagtggcgagtttgtatgcttttatattaggttgaacaaagagaggtagtcatggaaaagtaactaaattatatggggaggctaatggaaggtagaaaaggtagaattattttaacaggatttgtttgcccagaattctctggatatgattctctattgaaggatgtttcttttctcctgctatagagggggcatcttccctatgagtttttctcttctgttttcaggaagaaaaggggaagattagaatgccttcttgcaaatgatgttttttaagtgcctttagtctgaagtaatactatgtcaaagtggcatattttgaggtggcgtgttatgtcacccttcaatattccttatctagtgtcctctattcctagtttactgacagctttattgtgaaagcatcttgaaatttataatgatttttatgtatccattgatatcatcatgtgatttttcttctttagattgctgatgtgatgaattacattaattaatttttgaatgtcgaaccagttgcccaccagggataaatctcactatgggtgtgatatataattcttgttattcattgctggatttgatttgttaatattctgctgaggacttttgcgtctatgatcataagagatattggtctgtagttctgttttcttgcagtgcctttgtctggtttgactattatggtgatgttgacctcatacaatgagttaggaagtattccctctgtttctatattctggaagagattgtagaggattggtataatttcttccttaaatgtatggtaaaatttaacagtgaacccatctgggcctggtgctctctgttttgaaatattattaattattgattcaatttctttaatagatatagtcctatttagattgcctctttcttcttgctttgtcagattgtgtctttcaaggacttggtccctttcgtctaccttatcaaatttgtgttcatgcagttgattataatatttcttgattatccttttattgtctatgggatctccagtgatgtctcctctttcacttctgatatgaagaatttttttttttgattgacctagctagaatcttacctattttctaggtcttttcagagaacgagcattgggtttcattgattttttcctgttaatttcctatcttcaactgtgttgatttatgttgtaattttcattatttctttttttctgattaccttgaatttaatttgctcttccttttctagtttcctaagatagaagcttagatgattgatattagatctcccttcttttctaatatatgcattcaatgctataaatttccctttaagaactgcttctcctgcacccctcaaacatttataagttgtgttttcatttcaatttagttcaaaaatttttaaatttcttttgaaatttctcttttgactcatgtgttatttaattttgtttgatttccatgtagtttaggattttccaattatctttctgttattgatttctagtttaatttcactgtgatatacaccagatattacatgacatttctattatctttgatctcttaaaatgtgctttatggccaagaatgtggtctattttggttaatatttcacatgagcttgagaagaaagtatattcggctgttgttgtagagagttacagatgtccagatgattgatgttgctgttgagtaaaactatgtccttgctgattttgtgcctgctggatctgttcatttctgataggaggtactgaaatcttcctccataatggtagattaacctatttctccttccagcataattagtttttgcctcatgtatttttactctgttaggcacatacatgttaaggattgttctgtctttttgggtaattgatttctttattattaagtaatgtccttctttacccttcctaactttccttgttttgaagtccattgtgcctgaaattaatacagtgattcctgctttgttttcattagtgttagtatggcatatttctccttttcccttcccttcccttcgcttccctttcctttccatcccttccctttctttctctctctctctctttttttttttttttttggcaagtttttgctctgttacccaagctggagtgatcatggctcactgcagcctcaacctcctgggctcaagtgattctcctgcctcagccttttaagtagctgggactacaggcacatcccaccacatgcaggttttttttgtttttttttttttttaatggagacaaggtctcactatgttgcccaggctggtctcgaactcctgaactcaagcagtccccctgtcttggcctccaaaagtgctgggattactggtgtgagccaccacacctggcccatccatctacttttaatctatgtgtcattatatttaaagtgggtttcttgtagacaacatgtagttgtgtcatttttttttcatccactctgccaatctctgtctttcaactggttattttataccattgacattgaaagtgattattgatatagttgaattaatatttaccatatttagtgttttctatttgttgtttttggttctttgttcttattttgtctttcactctttctctgccttttgtggttttaattgaacactttatatgtttccatattctctcctctcttagcatatcagttatgccttttttcacttattttagtggttgccttagagtttgcaatatacatgtataactatttcaaggcaacttccaaaaacactgtactatttcacagctagtgcaggtaccttataataacaaaataattcaaactcctcccttctatcccttgtatcactgctgtcattcattttacttgtatgtaagcatatataagcacagatagacatatatgcataagatatacacataagtatacataattgaatgcatagttgctattattattttaaacaaactgtgctgtggagtgaatgaagacactgattgttttgcttgtacctccagcacactgaagccaccatattcaaaggagtccagtctgtcttcctggtgagcccctgacctctctgctcttcatcccctggcttggacctgcagcacagccatcctacttccacctgaatgttctcattggcagcagctccatgtctttctggggtggagttccccgaggcaactgacagccccctataactgccactgcagtggatgcccacccttgctgccaccagactgggcaaggaacaaagagcccgagtgctttattcacacctccatgccacagctgctctatggagaagaggccagactgattttacagcaagcctccaatcctccagctcttcaccgggaagggccgcctggcttgaggcccacaatgcagctgccccacccccagctgatcattttgattggtagcagctctgtgcttctctggggtgaatccttcaaagacaagtgaaaggccctctgccattgccactgtcaaggtccccacccctgccacccccaagctagggagagaacaaaaagcttgagttcacaaaggggctacagtgcacagcctgggagtgccaagctgagatatatggccaacacttgagtgggagaggggcccacactctcagagcactgagagagagcatagctgcaattgaggaaatacagaggaaccatgtggctgggtaagagcctatctaccagccattacggttaagtgccatctactggatggaagcccaaactttaacaccaaaaatacattgctaacatacctccccataaaattaaggacaagaattcagccacaaataaagaccctgcacaaagcatcagccctctgaaaacatccagaaacaaattcaactgactgtactcaaattacaccacagttaaaggcacatcagcccacacagatgagcaaaaacgcagggaactctaaaagccagagtgttttcttattcccaaatgaccacactagctcctcaatgatgtaggagttaaaaagaaattacttaggcagacagtgaggtaagaaagtctttagtaaggttttccttttaatgaaaagcagcccccaaatcattttcttttctaacaaagagcaacctgtaaaatcgagctgcagacatagaaaggcaagctagaagtttgcacggggaagtgatggcagctatgccagtaggaaaggagctacctggggactaggcatgttcaaaatgtcagctccttctttccttttctttgccaaaccatatgtacagtaaggcgaagacaacatggcgctgacagggcaaatatcccatttgcataataagattagggtggggaagccagcttcctcacatgctatgtaaatgtcaccctagtctaatcaatctttgggtcctatgtaaatcagacaccgcctcctcaagcttttttataaaatcctgagcactccactgtgggccagaagtcccatttgggcacccctctctaaagcaggagagagaagtgttctcctttttctttcttttgcctgttaaacctccgcccctaaacctacctcttgcatatgcatacttgatttccttggcatgagatgatgaaccttggttatttaccccagacaatgatgccgcttcaccagtgatggttctcaaccagaatgaaatggctaaaatgacagacatagaattaagaatctggatagcattgaagatcattgagattcaggagaaaattgaaactcaatccaaggaatctaagaaatccagtaaagtgattcaagaggtgaaaggcaaaataggtattttaagaaagaacaaaactgatctgatagggctgagaaactcactaaaagaatttcatgacacaatcagaagtattaacagtggaatagaccaagctgagaaatgaatctcagagctcaaagcacagttcttcaaattattttaatttcaaactattttagtcagacaaaaataaaacaacaaagaatttttaaaatgaacaaaacctttgaggaatgtgggactgtgtatagagaccaaacctacaacacattggcacccctgaaagagagagagagagagaccaagcaacatagaaaacaaatttgaggatattatccacaaaaatgtctccaacctcactagataagtcaacattcaaattcaggaaattcagagaacctctgtgagctactttacaagacaaacatccccaagacacatagtcatcagattcttcaaggtcaatgcaaaagaaattatgttaaggcagctagaaagaaggggcaggttaactataaagggaaccccacaacattaacaatagacctttcagcagaaaccctacaagtcagaagagattgggggcctatattcagcattcttaaagaaaagaaattccaagcaagaatttcatatccagccaaactaagcttcataagtgaacgagaaataaaatctttttcagataagcaaatgctaagggaattagttaccactagacccgccttacaagagttgcttaagggagtgctaaatatggaagtgaaagaccactaatggccaccacaaaaacatacttaagtacatagactatttacactgtaaagcaactacacaatcaagtctacctaacaaccaagaacatgatgacaggatcaaatcagcacacatcaatattaaccttgaatgtaaacaggctaaacacctcacttcaaaggcagactggcaaattggataaagaaacaggactcatagatagctcttattattttgagatacgtcccatcaatacctaatttattgagagtttttagcatgaggggttgttgaatattgtcaaaggccttttctgcatctattgagataatcatgtggtttttgtctttggttctgtttatatgctggattacatttattgatttgcgtatattgaaccagccttgcatcccagggatgaagcccacttgatcatggtggataagctttttgatgtgctgctggattcggtttgccagtattttattgaggatttttgcatcaatgttcatcaaggatattggtttaaaattctctttttcagttctgtctctgcccggctttggtatcaggatgatgctggcctcataaaatgagttagggaggattccctctttttctattgattggaatagtttcagaaggaaggtaccagttcctccttgtacctctggtagaattcggctgtgaatccatctggtcctggactctttttcgttggtaagctattgattattgccacaatttcagctcctgttattggcctattcagagattcaacttcttcctggtttagtcttgggagagtgtatttgtctaggaatttatccatttcttctagattttccagtttatttgcatggaggtgtttgtagtattctctgatggtagtttgtatttctgtgggattggtggtgatatcccctttatcattttttactgcgtctatttgattcttctctctttttttctttattagtcttgctagcggtctatcaattttgttgatcctttcaaaaaaacagctcctggattcattaattttttgaagggttttttgcatctatttccttcagttctgctctgattttagttatttcttgccttctgcaagcttttgaatgtgtttgctcttgcttttctagttcttttaattgtgatgttagggtgtcaattttggatctttcctgctttctcttgtgggcatttagtgctataaatttccctctacacactgctttgaatgtgtcccagagattctggtatgttgtgtctttgttctcattggtttcaaagaacatctttatttctgccttcatttcattatgtacccagtagtcattcaggagcaggttgttcagtttccatgtagttgagcggttttgagtgagtttcttaatcctgagttctagtttgattgcactgtggtctgagagatagtttgttataatttctgttcttttacatttgctgaggagagctttacttccaactatgtggtcaattttggaataggtgtggtgtggtgctgaaaaaaatgtatattctgttgatttggggtggagagttctgtagatgtctattaggtccgcttggtgcagagctgagttcaattcctgggtatccttgttgactttccaatatcatactgaatgggcaaaaactggaagcattccctttgaaaactggcacaagacagggatgccctctctcaccactactattcaacatagtgttggaagttctggccagggcaatcaggcaggagaaggaaataaagggtattcaattaggaaaagaggaagtcaaattgtccctgtttgcagacgacatgattgtatatctagaaaaccccattgtctcagcccaaaatctccttaagctgataagcaacttcagcaaagtctcaggatacaaaatcaatgtacaaaaatcacaagcattcttacacaccaataacgacaaacagagagccaaatcatgagtgaacacccattcacaattgcttcaaagagaataaaatacctaggaatccaacttacaagggacatgaaggacctcttcaaggagaactacaaaccactgctcaaggaaataaaagaggatacaaacaaatggaagaacattccatgctcatgggtaggaagaatcaatatcgtgaaaatggccatactgcccaaggtaatttatagattcaatgccatccccatcaaactaccaatgactttcttcacagaattggaaaaaactactttaaagttcatatggaaccaaaaaagagcctgcattgccaagtcaatcctaagccaaaagatcaaagctggaggcatcacgctacctgacttcaaactatactacaaggctacagtaaccaaaacagcatggtactggtaccaaaacagagatatagatcaatggaacagaacagagccctcagaaataacgccgcatatctacaactatctgatctttgacaaacctgagaaaaacaagcaatggggaaaggattccctatttaataaatggtgctgggaaaactggctagccatatgtagaaagctgaaactggatcccttccttacaccttatacaaaaatcaattcaagatggattaaagacttaaatgttagacctaaaatcataaaaaccctagaaaaaacctaggcattactattcaggacataggcatgggcaaggacttcatgtctaaaacaccaaaagcaatggcaacaaaagccaaaattgacaaatgggatctaattaaactaaagagcttctgcacagcaaaagaaactacaatcagagtgaacaggcaacctacaaaatgggagaaaattttcgcaacctacttatctgacaaagggctaatatccagaatctacaatgaactcaaacaaatttataagaaaaaaacaaacaaccccatcaaaaagtgggcgaaggacatgaacagacacttcttaaaagaagatatttatgcagccaaaaaacacatgaaaaaatgctcaccgtcactggccatcagagaaatgcaaatcaaaaccacaatgagagatcatctcacaccagttagaatggcaatcattaaaaagtcaggaaacaacaggtgctggagaggatgtggagaaataggaacacttttacactgttggtgggactgtaaactagttcaaccactgtggaagtcagtgtggcaattcctcagggatctagaactggaaataccatttgacccagccatcccattactgggtatatacccaaaggactataaatcatgctgctataaagacacatgcacacgtatgtttattgcggcactattcacaatagcaaagacttggaaccaagccaaatgtccaacaatgatagactggattaagaaaatgtggcacatatacaccatggaatactatgcagccataaaaaatgatgagttcatgtcctttgtagggacatggatgaaattggaaatcattctcagtaaactatcgcaagaacaaaaaactgaacaccgcatattctcactcataggtgggaattgaacaatgagaacacatggacacaggaaggggaacatcacactctggggactgttgtggggtggggagaggggggagggatagcattgggagatatacctaatgctagatgacgagttagtgggtgcagcgcaccagcatgtcacatgtgtacatacgtaactaacctgcacattgtgcacatgtaccctaaaacttaaagtataataataaaaaaaagtaaaaaaaaaaagaatattaaaaaaagagttgattagctattaaaatgtacaatgtaaaaatttaaaacagcatgaattattcttcaaaattctatttccttatataatatgacatgaaatacaaagtttttaataatttattttgaggactaagaagtattaaaagatctattagtctgttgaaataaaacatgttaaatggtatacaatttatttatgtggaaaaaagcctatttttaagtagctgactaaacctgaaaatgattgaaaatataatgtttaatataccattaatggaaattaaattactgggagaggaaaaaaaaagaaacaggactcaactatatgctgacttcaagaaacccatctcgcatgcaagtacacacataagctcaaagtaaatagatggagaaagatgtatcaaacaaatggaaaacaaaaaagagcaggggttcctatttttatctccaagaaaacagactttaaaccagcaatgatcaaaaagaccaaaggagggcattgcataataataaagggtttcattgagcaagaagacttaactatccaaaatacatatgcacccaacattgtggcacccagattcatgaaacaagatcttaaaggacttacaaagacacttagattaccatacaataatagtgggaaacttcaacactccacgacagtattcaacagataatcaaggcagaatattaaaaaagatacttgagacctaaacttgacacttggctaaatggacctaaaatcctcttatagaacacttcacccaagaataaaatatacattcctctcctatgcacatggcacatactccaaaactgatcacacacttggccacaaagcaattatcaacaaattaaaaaacaactcataccaaccacacactcagaacacaacacaatccatcctggctaatgcggtgaaatcccgtctctactaaaaatacaaaaaagttagccagtcgtggtggcgggtgcctatagtcccagctgctggggaggctgaggcaggagaatggcgtgaacccgggaggcagaggttgcagtgagctgagatcatgccactgcactctagcctgggtgacagagcaagactccgtcttaaaagaaaaaaaaaaaaaagaacacgacacagtaaaaactaaaatccacatcaagaacatctcttaaaaccatacaattacatggaaattaaacaattggttcttgagtaatttggggtaaacaatgaaattatagcagaaatcaataaattctttgaaataaatgaaaacaaagataccacacaccagaatctctgggaaacagcaaaatcattgttaagaggaaagtctacagcactaaatggccacatcaaatttagaaaaactttaataaacaacttaatgtcacccctagaggaactggaaaaataagagcaacccaaccccaaagctagcagaagaaaagaaataactaaaatcaaagctgaactgaatgaaatagaggtaagagaaaaccatacaaaagatcaacaaaatcaaacattgtttttttggaaaaagtaaataagacttgtagaccactagccagactagtaaagaaaagaagagagaagatccaaataaacacaacaagaaatgacaaaggggacataaccactgagtccacagaaatacaaaaaaccctcagggactattacaaatacctgtatgcacacaaacttgaaaacagagaacaaatggatagattcctggaaagaacctctcaagattgaaccaggaagaaattgaaactctgagcagaccaataatgagttcagaaattaaatcagtaataaaaatcctaccaagcagaaaaagccctggaccagagagtttcacagccaaattctaccagacatataaagaagagctggtaccactcccactgaaactattccaaaaaattgaggagaagggactcctcccttactcattctatgaggccagcatcattctgatatcaaaacctggcagagacacaacagaaaaagaaaatttcagggcaatatctctgataaacatagacacacaaatcctcaacgaaatgctagcaaaccaaatccagcagcatatcaaaatgctaatccaccatgatcaagtaagctttattcctaggaggcaagaatgcttcaacatatgcaaatcaataaatgtgattcatcacataagcagaaccaaaaacaaaaaccacaagataatctcaatagatgcagaaaaggcttttggtaaaattcaacatcctttcatgtaaaaaccctcaataaactagacatcaaaggaacatacctcaaaatagtaagagctgtctatgacaaacccacagccaacatcatactgaatgggcaaaagctagaatcatttcccttgaaaactggaacaagacaaggatgcccactctcaccactcctattcaacacagtactggaacttctatccagagcagtcaggcaagagaaaaacataaaaggcagacaaataggaagagagaaagtcaaactatctctcttcacagatgatatattctatacctagaaaatcccatagtctctgcccaaaggctcctagttctataaacaacttcagcaaaattttaggatacaaaatcaatgtacaaaaatcagtcacatttctatatgttaataatgtcccaagctgagagccaaattaagaacacaatcccattcacaataggcactaaaagaataacatacctaggaatacagctaactagggaagtcaaagatttctacaataagaatgacacaacactgctgaaagatatcagagataatatgaacaaatggaagactattctgtgctcatggataggaataatcaatattgtaaaaatgcccataatgcccaaagcaatttataggttcaatgttattcctattaaactatcaacattcttcacaaaatttaaaaaatactattctaaaattcaattgaaaccaaaaaagagccagaataagcacagcaatcctaagcaaaaagaataaagctggaggcatcacattacctgaccccaaactatactacaaggctacagtaactgaagcagcatggtattggtacaaacacagtcacatacaccaatagaagagtttagagaacccagaaattaagccacacatgtaaccatctgatcttcaacaaagctgacaataacaagtaatgtgaaaatgattcccttttcaataagtgatactgggattattggctggctatatggagaagattgaaactggaccttttccctttaccatattaaaaaaatcaactcaaaatgtgaccagtcacagtggctcacgcctgtaatcccagcgctttaggaggctgaggtgggtggatcatggggtcaggagatcgagaccatcctggctaacacagtgaaaccccatgtctactaaaaatacaaaaaattagctgggcatggtggcgggaacctgtagtcccagctactcgggaggctgaggcaggagaatggtgtgaatctgggaggcggagtttgcagtgagccgagatcgcaccactgcactccagcctgggcaacagagcaagactctgtctcaaaaaaaaaaccaaaaaaacaaatcaactcaaaatgtattaggcttaaatgtaaaggctaaaactatagaaaccctagaagaaaacctaggaaataccattatggacataggccctggcaaagatttcatcacatagactccaaaacaattgcaacaaaaacaaaaactgacactgggacctaattaaagagcttctgcacagcaaaagaaactatcaacagagtaaatagacaacctatagaatgggagaaaatattgcaaactgcaagtcacatccaacggaggactaataccagaatcttaataaatcttaagcaaatcaacaagcaaaaaacaaacaaacccgttaaaaaatagacaaaggacatgaacagacacttctgaaaaggaagacatacacatggccagcaagcatatacaaatgctcactatcactaattattagagaaatgcaaatcaaaaccacaatgagatgctgtacacaagtcagaatggctattattaaaatgtcaaaaataacagatgctggtaaagatgcagagaaaaaggaacgcttatacattcctggtgggaatgcaaattagttcagccactgtgggaagcaatttggagatttctcaaataacttaaaatggaactaccattcaacccagcaatacctttattgggtttatacccaaagaaatatgaattgctctaccataaagatacatgcatgcacatgttcatcacagcactattcacaataacaaagacatggaatcacataaatgcccatcaagagtggactggataaagaaaatgcggtacatatacaccatggaatactactcagacataaaaaaagaagaaaatcatgttctttgtagcaacatggatggagctgaaggccattatcctaagtgaactaatgcaggaacacaaaaccaaatacttcatattctcacttataagtgggaactaaatagtgagtacacatggataccacaaagaaacaaacagtagacaccagggcctatttgagggtagagagtgaggtttgaaatattacctattgaatactatgctgattacctgggtgacaaaattatctgtataccaaacccctgcaacatgcaatttacccatgtagcaaacctgcacgtgtgccctcgaacctaaaataaaagttggaaagaaaaataaatgaataaaataaaatcaagggttttattttaaaaaagaatagtaacaataaaagttatttcatcctcttattccttctatttattgattgattgatttttatttttatttatttatttatttttgagacagagtcttgctttgttgcccaggctggagtgcagtggtgcaatctcggctcactgcagcctctgcatcctgggttcaagctcctgcctcagcctcccgagaatggctattattaaaatgtcaaaaaataacagatgctggtaaggatgcagagaaaaggggacaccaccatgccccactcattttttttttttttttttggtatacttagtagagacaggtttcaccaggttggccaggctggtctcgaactccgggcctcaagtgatccacctgtctcagccttccaaagtgctggggttacaggtgtgagtcactgcacctggccagatgtgttttctttctttatgtagatccaagtttctgagctatgtcacttttcttctctctaaagaactcctcttaacattttttgcaaggcaggcatactagcaacaaattttcggagtttttgtttgcctgagaaaaatctttatttcttcttcatttttgaagggtagctttgcagattacagaattttaggttggtggggatttcagacatcaatttgggaaaattctcagttaatattgtttcaaatatttcttctattcttttttctcttctggtattctccctcctcatatattactacttttgtagttgttccacagtactgagatattctgctacatttttatgaatttttttctattggcctttcaattttggagatttcttggagacattgtgaagctcagagattgtttcctcagctatgtccagcctaccaataagcccatcaaaggcattcttcatttctgttagtgtttttggtttgcattccttttggggactttcttaggatttccatctgtctgcttacattgcccatctgttcttgcctgctgtctactttctccattacagctcttagcatatgaatagttgtttaaatgctgggtctgatcatttcaatatccttgctatatctgggtctggttgggatgtttgctctgcctcttcaaactgtgtattttgccagttagtatgtcttgtaatttttcttgctatctaggtagacatgatgtgctgggtaaaagaaatggccataaataggcctttagtaatgtagtggttaaggtgttgggggaggaaatacattcttagtcttatgattaggtgtcagtctcgtagtgagcctgtgcctccggactatgaactttacacatgattctcaggttttatttttttctctcctttggtgagacaggatgaagataacttatgagcttactctatctagctagagtgagctggagttgggtatttccattccccaaggttagttaggcttgataccatcccagcaggttaggctcttcagtttctcctgagaacagtttttgttaagaacagaatgctgtggtatatttaaaaatgtccgttttaccctccccctgctaaaaatgtgaggtttttctctgaaatttactgttggaaccccaaaggaatttttgtctcatatttactgtgaaaatctcctgtggagatttctatgaatttctgcttgagaaaagttgtaatgccttgtgcctctttgtctgtctctccaatttggggagcagcagtttgtgctatgacttcacttctcttagagatctaagaagaattgttaatttttttcattttgctcagatttttacttgttgtcaggttggagaggcaacacccaatctccttgcatgtggaaacagctcatatattttattttgagctattttctgtaccatgttgtgttgtgtttgcctctttattgatattaaaacttctctacagcattcttacacaacagccttggtgttttgtatggttaaaataaggagatgatcaaagtatgattttattcatcacaatcatacagtttattgccacataaaaatgctctgctttttccaccacactcaaagagagggagaataaggagaataaacctcacagagaacacacttaatagacaaggtacattaagcacatagtgagtgaattccaattttgtttagagttcaattattaaagtctagctgctcaattaggatggaagcaggcatctgtgaatgtaaagtctaatggaggtttgaggcttatgttaaagcaaactaaatatggcctgagaaggactctgtaattctatatttgagtccttgtggatgaacttgtaacctagcttaattggcagacaaaattgaaaatctaacttaagggtatgcgcctgtaacaatagctgagtcttggccaaccccaggggtcatacttaaaccactcataggctgctaagtgttcaaactgtgttcaaataaggcaaacgccaacctgcaaccaatccagctgtttctgtgcctcacttctgatttctgtatgtcacttccctttttttggactataaatttgttctgaccatgaggcatccctggagtgtctctgattctgctgtgattctgaaggctgcccaattcatgaatcattcattgctcaattaaacgcctttaaatttaattctgctgaagcttttcttttaacacttaacctttctacaagaggttcttgaaagagacgtttgatgaacacaatgatatgtaagctccttcagtgctttcaaatagtgctggtgttggtgggcaaagctgtagagagtagctcaaaggctggcagaaagtaccctgccacactctaagctcttaatgtctgtcaaagtcttgggtttatatgtgttttggagtagttgaggccaataactcgcatatgtggtctgataaggtgttataacattcttctggggagagagattacactccatgctcttaccacagcaaaacatgccacccacatagaaaattatatgtttggaattttctatgtgaaaattaacctaagtagcctaacacttaggttattggtgctttgggtgaatgaatacaataaagtggaatagagagacaacaggagccataggacacaaaatgagaattctgctgactcttggaaatgagagcataaagtgtccaggaaattctaaattttggagaatttttggaaatatttgagaagtcagtgaatcaccacaggctgtacagttttctgcaatggtttgaatcattttatttggttgtgaaataagagtgacctcagaatgctagagtacttgtacatcaccaggttccacactaaatacatgatgacaatgatgataacaacggtgatgacaacactcaaggaggaaaaatactggcttggtatgctgtaaaaatttactctgtagcttttcttattcaccttagctggaatgcattgtaaggattcagttgcctgtatctgggcctcactgcaacttcttagagattttccttcatagtttgtttccgttgaaggctctcttactgctttttcttctattccccttactctccctattcaggctaaagcttattaagtgctggcactttatcagctacatttaaagcccggattcagggcagcaaccactgaaagcgtaccctgagacaaaggatgtaggtacacaccgaatgagctcctcaagtttctcaagtccaaagaatagttggcactgcatactggtaacttatcagtacacttcagagtgagttaaaaacaggaattattttagactctggataattacttattgttagctcttgtgcatatgcaggcttccttagctcagttaacccttccttcttttcccaaggcctccatcaccactctcatacactatctggggctccatcctatttttgcattaattcctttggtatttcccttttaatattttcattccaagcctttagcaaacaataaaattaaaaacaaaatgagcatcaagatacagtaggaaaattgccaacagatacttggcaaacatatttgtagagacatctatcgttgcccttgttacataataatttgtctctatggaattctctgtcagatatgccactgcccatttcaccaaatatttgagagcaaaaaatcagtgtcatctgattgtgtatgtttacctataaatcaaaactttctttaagcaaagaatgagagcttgaatctgtgaaatctaatattctgtcctcaagtatcatttatctgtttatgagactctgcctaggatggaagctgctaacataacagagaatagccaatgatctcacaacctgggcagatgtgagattgtgcaaacacctctcaatctagatgatgataaacattgatacttcagagtgaacgttatcaaattggagagcagaacagatctcagacattatctggatcaaatacagatcttttgattcactgatttactattctctgatattttccgccttcaccaggtatgttttcactttatagcaaataaatctttaataaaattgtgtgcataaaagttcactatcagatgctccattcacaaggaactacaaggaggataaactctttatctactttattaataccaaatctataatcttcaggcttagaaaggggatgccagctggatcaaaaactcccagcctttatttagtcaagggcccattaggaaacagatgatcctcacaaatcaaaataattcaaggataagaggctagttacaaaagtgtggagacagcatagagaaaccacaaacaatagtgaagtaccacactactactaacagcagtgctatcaatattcctaggcctgaatggcaaagggagtgagtgtttatcaaaggtggaaagagggaataatgtggagagagctgctttgaaagacgctctgatcttaggttcagaaacgcaaccatctcaaggcaacaccacagagcatcaaccggtggaatacttatcacaatcttattcttctccatccctcaaatcttttgttgttggggctgaattcaccagaagccagaaggcaagagagcctgttgatgtagttcacatagatcagcttctctgggtggagcagggtagacaactatggagaaaagtgttgacaaagcccctttaaaaaaagagtttcttattaaaacaactgcctccaaaaccaaagcaaaaagcagaggtaaaacttgtcagccatagtaagaaaataaaaggcaataaaatataagctggcatatctcaaagaataaacaaaacagaaatttagaaatcaaggccatgctgaaaacttcataatacagaattgaaattgctgaaaacataacaaaggactcagaaatcggaattattaaaagcaaaaataattatatgaaaattttttaaaacaaaaagaattaacaagaaaatgataattgttgaacacagaaaaggagattcaacatatgtattgttatcctctaagaagttattatttcagatacaacataaggattatagttagtaaaattgtattgtattagagatttttgttaaataagtaaattttagctgttcttgtcactatcaaaaagtaactatgtgagatgaagtaaatacatgttactcttcttcagtatagtaacaattttagtatatgtatgtattctataacatcatgttgtaaacctcaaactttaaaatttattttataaataatgacgaaaaccaaaaataaaaggaatctgggttgacagttctttcatttcagtacagtaaacatgttccactatcttctcacttaaattgtttctgatgagcaatcttttggcagctttaacgttgatcttctgtatataatatctcttgctttcttgtaactacttttaagattttacctttatctctggttttgagaaatttgattatgatataaattggtgtagttttcttcatatttcttgtgttcggggttttttgagctttttggatctgtggttttatacctttcatcacatttggaaaaattaagccaccatttcttcaaataatttttctgatgtttaccctcttttttgaggactccagttacatatatactgtgcttatggaatttttttccccagtttactgatatgcttttattttcttttttcttttttttaactttgaattatatattctctttttttattttttattttttttaaattttattattattatactttaagtttcttttaagttgtggttatatatatatatatatacacacacacacacaacataactcagtagtcttggaaccagattgagtttcatgccaaacaggtgtttctcaaggaggaagcaagacagcccacagaaacccttgtagccagccagagctccaacaagcccttgagagaccctgagactcccagatcttcaggttctatgtgcaatagatggaagccaaatggcaagatactagggagattgtccctcaccattctgcaggagaacaactcgtctggcaccctgacaccatgacaggtaaagcaagagaagggtaagcagtcttcactaagtgaaaatgttagtgaactaaaggaaggagccattcttggaactgggcaacttctgaaaagtggaagacagcatgggagcaaggccaggacaatgacaaggaaaatcagcactttcccttggtggagtgctaagccctgcatgaccccagcaatgcagtcacctagggcctggtggatctgtgttctctcaacccttctttcccagggatattgaggaagggcttgttttcttagactcctcctcaactaccaaactgggactaagagctttattggggaaaaaaaatagaattttaaaaacattgttaaagaatttttttttaaattctttgtttagctttttgagggactgctgaactgatttttacagaggctgcaccattttacattctcactagcaatgtatgagagttccagcttctccacatccttgtcaacacttgtgattttctatgttaggttttttgttcgtatgtttttaagccattcttgttaagtgtgaaacggtatctcattctggttttgatttacatttccccagtgactagtgatgttaaacatctttttatgaacttattggccatttgtatatcttttgagaaatgtcttatttatgtcttttgtccatttttaaattgagttttctgtctttttgtttagttttagttgtccattatttattttgaatattaaactcttattagatatatgatttgtaaatttttttcccattccgtagttgccttttactatcctaataatgtcttttggtgcacaaaattaagatcttttattttctttgtcagtctagctaaaggtttgccaatttgaaaatttcttttctaagaacaagctttttgtttcattgcttctttttattatttttcaattctctacttcatttatgttcactataatctttattatttcctttcttctactagtgttggttttagtttgctcttctttttctagttcctcaagatgtaaactcaggttgttaattttagatcttttttcttttcaattgtgtttacagctataaatttccccctgaacactctcttccctgcaatgatgcactcttgatttttaaaagttaatttttcactgtgtgtttgatttttggggagtatctttgttttgtcttcaactatgctaattttttatttctgtgatgtctaagctgccagtagtctcatcctgtgtttttcatatcagccagaatatttatctgtattattttgatatgaatcatttttatgtgtttgatatctcttctctactttttgaacatatagaacatgattatgattactgttttaatatccttatctgttaattctagaatctggcagctttattgattttctgatttttctcctcattttgggtcatatttacccgcttcttcacatgtctgacaatttttaattggggatgtccttcattgtaaatttcatctgattggatgttgagtatttttatgtttttataaatatgagtgtgctttcttctggaatgcagtttgatcatttcaggtgttgcttttaagatgagttaggtgaatccagatcagtgctcaatctcaggctatgcatttcccactatgtaggcaagatcttcttgagtaccgtattcagtgttccataaattatattcttcaatgtacctggtggtaacatctaccattctcagagctatgtaaacactggacactgcccctactaattctttcatattcttctttctccagactgatcagtattcagcggaacacttgagctcagggaggaggatagggactctgtaaatgcctgtggttctctctgttttgctgtctcctttcttctttctgttaccctgctctgcaaattctagctgcttgaattttcagtttggcctcctcagatcccagggatggcttctcattctgccagtttcccccttaggttgcaaagtagaaactttcacaaggcagtaagttgatcacagggctcatctcatttgtctttcatctgtcattgatcactgtcattctttgcttgatgcccaatgtattgaaaactattgttatagggatttgccagtttttaactttttcggggagtagggcaaatctggtctgtcttactacgtcttggccagaaccacaggaatttcatatgtaacaacaagccataggtattcatgaccttctttcatattctgtgggctgagcaatttgtctcagatgatataatgttaagatgacctaaatacagatgctgtaatcaaattttgtttttctgatttagcaatcaatcaatgagtcatttgtctgaacagacatcagtatctaacatcttaaaacattttagtcatgtaattcttcccccttccccatccccatatctgtcccttggcattccttcttctgcatctccattctattctaacttaatagtgatagaaattagtttgtgaaaatacattttctcaaagttcaggtagagtaaaattttatacggatatagtaatgaaaatatattaaagttatatctctgcatgacagtaaataataattattgaatgctcaccataagttagagatttttctaagccttttacatatttaaaatcattgaatcctcacagaaaccatttgataagttagtttataatctccagcaaagatattggggttcagggaggttaagaaacttacccaaggtcacaaagaccaccactacccaatattgctgtatggagattttacccccaaaaaagtgtatatgtttatgtgtggggagctaattagctaggaaaagccctaatgtaatatgctttatttattttcaaattactgattgcatagaacaatgttggcccaaacctaatgctattgtgaaaatggacttttgtcttattcattgtttccttggtaatcatcatatgtgtggatcataataatcctggtttaactgtcaatagtggtagtgagtcttcttccatcttgtcattctaaaagtcctgaattcatgatctacccttcagatctgatcttccttttacgtttctcattaactttgttaaagaaacattattctttgacacttattaaagatggtaaagaaggttctactaagaaaggggattatggtgatgagtgtaggaaccacgtcaataggagaagagagattgggtctgaattcaactccaaggaaaagtggagatttatagccaaggagcagagtgggagtcaatggatgaaaaattactaggaagaaatatcaagggttagggggattcttgctagacagactcaacagaattcttgttgaagacaactcaaggtgataagaatggagagtggttggatactaagggtgggaaattttcactaaactgacttagcaggattcttgctcagactggattctataagaatagagagggaagctgaagcttgggcccagttgagcagagggctcagaagagcctgattaaaatttggtcaaaggagagagagtctttgtcaatatgaaaggcatcattccctcacccaaacctgaaacttaggagatttctgtggttctccccctccctcacccctccacagagtaagtccgcaagtccccttgatgctaaaccccaaatatctctcgagtcagtctcttttgctccttactcacagtctctgccttagtttaggcccttggccgagctcctctgggttgcaccaacaggcccatatctccttatctcttgtttcacttcccacccacatttactacaattgccacagtgatgccacagtggtttttctagacttgaaaccttttcctgtcattcatctatcataagtcttcccacttaaaactttgagaagcttcatactgtttttgtataaggcccaaatttattatcaggcttattgcactccctatgctgcagccaagcttgcctttccaggcttgtcatgccctcacatgaattcctcacatcaggtaaagcatcaaatccacaggcacctccatacatctggctctcccatccctgtgactacacttacttcctgctgcaccttgaagtcccttcccccaaaatccctttatctccatcttcctccctctatgctccatgctcagctccaccttattgtgttctagtcttacctctagtcctttatggacagtggcgggagtgattaattactcctatgcatctgttgcaagaactcatatgccaggatttcaggatgctccttttctatctccagactgattatgagactcctcttaaccaactcccctgtcatcttacctgtgcctctattgcagtgactgtcatttggcaagctatgacatagtaccagacagggaaatcataaagagagaaaactaaattatacttctctctgtgtcctcatgctctagaataatgccttgctgttcaataaatatttgccagggaataaatgaatgaagaaataagctgagcaatttcctaacatttttccctttagaaaacagaaaaaaaggttgaaatctgaactcatacctgaaccaatcccagttgaccattttctactagtgacattagtgttgccattgaaatagtataaacataaaatgaaagtttgataaagtcacctctgataaaaatacataatatataacatgtataacatcacagaatatatattatatacatgtgtattataagagctgtcttttttatcttatatatgtatatacatatcttacatatacatgtatgtgtgtatatacatgtgtgtgtatatctatctatagatacacacatgcacacatatatacgataagaaaggagcttaacaggcagtgatatgtagatttctctccaatgaagcctgaaattattttgcgtgaacaactacaaatgagatgtgttacttttactgcggactgtttacatgagcataaactggatgctttaatcctttgttattttttcttgcatttcatacaaatttttaaatagttgtgattacagattgactggataaagtcacggccaatggatatggatttttaaaatggtaacatttttgcaccacagggatcctcaaagatgcttgtaatagaaataatttgcataaagacgctagaaaagttattgaaaatataagctatttaaatacataaaatggagaaaaacaatatatggaaaggctgtattttttctttcggtcatgctagaggaagcgcccctcctctcatctgacgtattttcttcacctgcacctcccatcttctatttcttcaacttctactctcctgactgttaaaaatcagcatttaaatatagtattatagtcaaacttcttcctccttgtttaaaaaagaaaaacgagccctccagcactcacattttttgggcaactgtctcttctctgtttccatttcttcacccttacgcttctggaaatagttgctgattctgtctccacctcctgtctttatagtctctcaagggactttcccagaccacgctactgaagacactcttatgatcaccactggcatctttgttgctcagtccacgtgagtgacattttatttggccagatcttgttttatttggccactctgtaacacttggcaatagtattgctgcctcagcagcatctcattctttgatttttatgacatcacttcttggttcttctcctgcctttttggctgttcctcctcattttccttcatcagctttactttcatgacctgttcctgaaagttgatgttcctagcgtatcctcctggaccctcactttctcaaactacacaaatttcttggccatctcctctgcttctattcccctaatgtgctgattatcaacacatctatatctccagcccaggtatttcctaagtatctttcatatccagtagtctccaatgtgttgtgtacgccttgcctggggtgtgcaatataaacctatgaggctacacaaagaaaaatacatgtatatttttgttgattttcttatctgaaatatgagaaaagatagtgctaatttattaatggttatcatatgcatcatcagtagtgtcctcaatggcttttcgtcctcctgtttccagttcgcacggacacactttgtctctggtttttcaaccaccacacatatgcaaaggtaccaggaagctcaaggtttgttgagtgtctcctacaaggagctggtcacataggaacatcccagctattggtcagccttgaccattaagctccctctccctccttatccctgggctccagcaaaaccaggtggtataggtctaaatccagttattattcctgagcaatgctgataaactggtatgtccactccaaaacaactcgcaaaccaatggttacagaatattatttactggttatctcatggcaaagttcatttttattttgtaaaaataaaatgttttaaatttgaggacacgtggctgtctaaattttgctatctaagaggtatatttgaaaaaattatcatcattatctattcccccaagattaaagtgatgttttgaaacagtgaaaaaattactgctttttgaaataactcatggtgaggaggtggaaatgtatgaaaaccaatatttgaaatttttctataattaacatggcttaatagtgaaaatgagcatgacttataaacccgctcacaattacacccttaaaataccttagcatcacaaattttctattgtgttaaaaaatttccccaaaagttacatttttaagtcatttgtcaaatgcaaacccctcccatttatttggtagaaaaagcaatttagattttttaggatgttgaaaagttacagagtaattgtaacaaaagtcttttcataatttttggaagatactgaaagataaatatcttttgttttaaatggcattttcttgtgagaaagtattttcagcattgaaataaatttaaaacttagaagcaggcatttgaatcactccatcacacaatattaaatcaagatttcaaaaacaatgaaatcatatttcaattacatttctcactaaatattaataacattaatatttgtttaagcatttaaatattaataacattaatatttggagaaagccatgaagttctgaactagtacgtaataaataagacgcaacaagtaaaaaatagcatatatttatatatttaatcagatcataatctgagttaacgtttttgttgttttttaacttttttttttttttttttttttggtagaatcagggtctcactatttttcccaggctggtcttaaactcctggctcctgggctcaagtgacccacccacctcagcctacccaaagtgctgggattacaagcgtgtgctaccacactcgacccatttttggttttgtttaagcattataacatgcagaagtgatgagtaataggaaaaatatttaatctattaagacataaagatatctaatttgatgtgcaggtttaaatagttttactggtgtaaatgtgttgtcaggtacctcctaatcctcttgtggatccatatactttcttctgtttttccttcagtcttgcagcagaccacccatctcactttgattcccccagtttttctgtttttccatcctgtcctctctccttcaacccattctccagtcccagtcagagtagggtttctaaaatgtaaaaatgagcagtcactttgctcagtagaaggctgcggtggttttgcttgccctcaggctgtatacccagttcttcatacctctcccaggctcctccagatctgcctcctgctgaccttgtacccagctgcagcgacaccgagctcctcacagcttcccaaagtgggctggcccctctcacgacagggtcatcgcacaggctccctctgtgggggaacacaacgggagtcatttcaacaccactttcttcaggaagcctattctgatccttggtactccaagcagctgttgtcaatgcctaccccaggtgataccatgccatactgattttattttcctggatacttaatcacaggtaaagtcactgaggccacacaaccctgaggagaaaatgcttgagcaggcaggattttgatgatattttgtggatgatactccattctcaaactgcctacattcacacttcttttcaccgagagaaaattaagccactatgcttttaaaccattcttacttgggttttgtgtaacatgcagcaacatggaattattacggatacaattggttctgacttgtatggatacacttatagaaaaacgtgtgaggatatattgaacagcaaagtactgatttttttcttattttgatttgtctctgatgaacacatatttctttatgtaaatgtattagaaggaattaataagaatatgttgaggaacaaataaattgccaaatcccagtggcgtagcacactgatggttgatttgtccgtcacacaaaggcccatgcaggttaactagggctagctcgagccagtgactcaaagatccaggctccttctgtcttgtgattattaagggtagtaaagaaaagagaatgtggcggtggcagaccccctgctagaaactgaaggtgccatttctagtcacaggccactggctagactacatcacatgaccttgcctgtcaggaactagcattgcagacttaccagcatgaccgagaaggaaatgagagcatatgtagggaagcacgcattgtctctaccaaaatgaaaatggaagtttaaaaatgcaagtactcatgggaaaggtaacacactgcacatcttagccactgtcttccctgactgcaatggcagagggtagaaggggagggaagaggtgcgcatatatggaggcgcatgtagattctttacaatttgtctcaggtgaggaagggttaatgtgtgtgctcagatgtgccagtgagtaaagaaaagagtatgttttcaagcttcgcaccaaatgtgaaagtcacttgtttcttttttcccttttaattctaaatctgagaaaaagcagtgctccgctttgaatttcaaatgtcttcaacattgaagtctgttaatcaggctattttcttatcagctctgagtctcaaatgctgcatctataagaagagaagtcctttccagttctaagagcagtgactgtgtgtggcttcaggaatgataattacacattccaaaatgcatcctggattaatttcttaattcacatctaccagagatgtgagtacccaatgcttaaagaactatggttccatgactaacaagaagtgattcactgagcccaacaagcaatctaatctaattgcctctaagtgttgtttagtaggggtaactttggctattttaatgaaatgtgaatttttagaaattatagacaacaaaacaaatgtgtgttcagcaattcctgcctacaggagttcacactcacttaaggaaggcaaggcacgtgcagttgaaacaactagcgaaaaaacaattctaaataaactagcgttgtataccgatataattaagtgctaaagtgtgcagttcaatcagataatataagatttggaaaagaaaggtgataaagtatgcccccagacaaaatggactccctgtggctaactgaggagctcaaagttaaaacagaactaggtgtccatagctgggtgacagaatggtcacatgttctgcgctctcagaaagatgttgtaaaagtatcaaaggacctcccattctacaatcaagctgaaccagctcctgttctgttgttgggctacaagataaactgctgcaaaaagcacagcacctgcccacacctcccagtgccgcaagccccaggccccattggccatttgaaagaaacatctgacagggactgctggtttggggcttgggaagcaaccagagatcacctcccctagccaattaaggctcagctgtttgggccaatcagaactcagctctgtcagccagtcaaaaccaaacaagactcaaccctttgtttgcataaatagacctggttgggaacctgggtggggacttttcctataaaaccccaggcatgccatcccttcattctctggaatggaccttcattttacacagcggcctgcatgtctgcctgatttgcaaacagttctctggaataaaatctctttcctccagattctttttcagagagcttttgttcacaaaggggataaaaagattaagctaagatgaaaatcagaaaaaaaaaaatagaatcactgcaataataaggctcattatttccaagatttttatgtatcctggtctgagtatgtccgtccttaaagcatatgaactgaaaagaataggaattggatttatgggttttgatccatttaaaatatcagtattacaaagttttctagtgaagttaaacgaatgcccgcaagtaatttttttacagaaacccagttgagaagggctgcaagaattaagagtattttgaaaatataccagagtaagcaaaaattgcaacatatgatggttaaaaaaaaaagctcagtagtatatcatattaaagatttatatattaaatataacagaatttagaaattatttatgtgtatgggacactgtttttatcattttttcacgtagagttgtcaccatcattcattgtgaagaacagtatatttaatattcataggaacatagtataaacattcttctatgtaatattaaattcacaacaaatggagtatttcttgggttacatgggaaaaaaaatagcagaatcttgctgagcctccccagacagattctatcaccaggacagctctttaagttcccagatgcgggtgcctcccttccttggcagaatgcctggtggacttggcagctgccttctcagcccttatcacagctgaggcttcctggggagtcacgcttctcctcttccacccactgtgggcgtggggtgccaccccacggcttctcctggtagctctgatgctgccactgcagtgaccctggcaccatctggtccctggatgtacttgctgacactgccatcatcatcacctgcacctctgccccaagacaaggttgaggatatttttcccagaccagtttccccagttggggatgtttgtcctaggcctagatgccattctagaatcaggaacttaatcaaatcatagatcttcacttgaagaaagcataatgtcgatggccatgaaccagcaatttttcttcctttctctcatctccctactcctttttagggctattctgcccagcctcatttccccgttctggatggcagatccatcttctagaaataactttcaagatggaactataatccaggtctttggttgtaatcgaggtcttctgggagttccgttttgggatccagacttatatcaaatcctacatttgcttctggggaaagttaaaattttgatatacaagagaattaaaaaaatactgtgccatcagagattaaaatgctaatggaaagtaattcaggagagaagaaaaattgattatgctaataaaaataatatcaatttggttgaaaatgcaaaatacagtttaggtcctcaggggccatggtagagagtgtggtaggattaatgagagaaggagtggggtagtccctgctttgtgcggggtctagtcttgaggggttattcttgctgttcatggttgatgtgtgacgacacctccatacttgtgttggaatcctagggatttctgggcatcggctcccacttctaaagacagggactctcctgtgtcggagcttttggggttctgctgagaaagggggaggctgagtagcacgaactatcatgattgattagtaacgtctgctacaaaagtgggagggtgggggacggctcatatggcaaatatttatcaccttaccccataacatgctttctggctgtattgtcaggctgctaggaaatgctttccactcggaactgagacctaaaactggaaactaggctgcaggaccacctgggtacgtgtgaattacagaggttcatgcatttccaaatgggggtgtcattttagaactggggcgtaagatgatgagcaacagaaaagacaacgccgagcccccgggtatgagctcagaactctttacatgtttgatgctccaaatggtctagggcaggggggcttcagagccttggcagcagaacgtggtcgcgtagatgtttatctgattttctgttgcgctgctgctcaaccgccactacggaagtgcacactgccaccttatggacgtcttgagaagttacacttacacgttattaattatattaaataaaattcaaatgtaataaataatgtcaggggtagtttttataaacatttgcaatgaaaattcatatgaggacttcagacagaatatattcaaatgaagagttgatttcgatttcactgatgaaattaaataacaggattaagatgaaattctcagctattttagcattttagtgtttttctgctactgagttgtgggaattccttatatgtttcggcttgtcataaatatggttgacaaatattttatctgattttatacgttttttcactctattgattatttccttggttgtacagaaactttttaattttatgtagtcccacttgtctattttttacttttgttgactgtgcttttggtgttgtattcaagaaatcactgccaagatcattatcatgaagctttctccctatgatttcttctagaagttttatagttggggtattacatttatttatttatttaaagacaagatattgttctgtcactcagctgcagtgcagtggcacaatcaaagctcactgcagccccaacctcctgggctcaagtgatcctcccatctcagcctcccaagtaactgcaggtaactacaagtgtgcactaccacaccaggctattttttgtggagacagggtttctctgtgtttcctgggctgatttcgaactcttgaactcaagtgatccttccaccttgccctcctaaagtgctgggattacaggtgtgagcctccaaccctggccaggtcttacatgtaagtcattaatctattttgagttgaatgttgtgtgtggtgtaatatacacatgtgaatatccagttttcctaacatttgttgaagaaactactgtgtattcttagcatctttgtcaaagatcaattaatcatatgtgtgtgtgtttatttctgcactctccattctattccattgatttatgtgtttatctttaagccaatacaatacagttttaattgcagtagctttgtaatatattttgaaatcaggaactatgatgcctccagctttctttttttttctagagattgttttggttcttctggatcttttatagtttaatatgaatcttaggattgtttttactatgtccgtaaaaaatgccattgggattttgatagaaattgcatttaaactgcagatcactttgaagaatatgattatttcaacaatattaagtcttccaatccatgaacatgggattttgtgaatattcttgtatggttttagcctaattagaatgtttctaatgttttgattttacatacaatgttagctgtaagtttcagacggaattatttctcaactcttagtttgttcagagctttctaaaattattattaatgaaagttaatcatttttggcatagacttggtttttaactttgattaagtccagttattacttttaaaattttatgatgactctttgtgttctaagaaatatttgattaccatcccaagattgtaaaaatattctatacttttggaaaagctttatagttgtaaacttttatgtgtaagtctgtgatccatctgaactacattgcatattttatgaaggtgaaggttcattattttccatatggagtttaaatttttccagcatcatttatttgaaagaatttcctttccctgttgaactaccttgatgtctttggagaaaataaattgacagtatgtgtgggactctttctgaactctgtatttttttcattgatctatacatggcattaccacaccattttaattgctgtagtttaatagtaaagtgcacgttttctaccttttttctttctgactcttctgggtacttgacatttccaaatcaattttagaatcagattgtcaagtgcaacaaaaaatggttgggatttttattatgattgcattgaatctatagaataatttcgattaaaagtgacatcttgggccgggtgcagtggctcgcacctgtaatcccagcacttcgggaggccaaggtgggcagatcacaaggtcaagagttcaagaccagcctggccaacatagtgaaaccccaccactgctaaaaatacaaaaaaaaaaaaaaaaatagccgggcatggtggcaggtgcctgtagtcccagctacatggaaggctgaggcaggagattcgtttgaacctgggaggtggaggttgcagtgagccaagatcgcattgcaccactgcactgcagcctgggtgacacagcgagactctgtctcaaataaaccaaaaaaagtgacatcttaacaattagtcttctaattaatgaatatgatacacttttttggtttctttaatttttttcagcaatactttgttgttttcagcaataagatatatttctctttttaaatttatgacatatttttatcttctttgatggtattgtaaattttaaagttaattttattttccaaaccttcgatgctagtttatggtatacaatcaattttttatatttaccttgtattttgcaactttgcttaatcatctattagttctagtaggttgatttttccccaagattccttaggatacaaaatcgtgcctttgcctgtatgtatatatttttttcaatctttatacctattatttatattccccttgtattgcactagctagcacttcaatataacatttagtagaattgggggaagcagacattcttgacttgttaaaggtattatgggaaagtttttaataattgaccattacatataatgttagccagaggtgttttatagatacactatatcaaattggagcagtttgctaagagattctgtgtgtgtgtttatcacgaatgaatataaagcttatcacattattttcttcatttatttatatcatgatatagtttttctcttgtattatgctaatatggtgaataaatgcttcattttcaagcttgcattgatagataaacctcatttggtcatgacacgtgatctttttcatgtattattagaatcagtctgttaatatgttacatatatttacatctatgttcatgaggtatattggtcgataagggttatgctggcctggaagcagacacatgtcaggatatattcctctttctctattttgtaaaatagttcatatagtattaaattatttttcttatttgggcataaaatttcctttatacaaatattttaattatatactcagtttaagtaacagatacatggtaattcagtttcttgttaccctttgctaaattgtatttttcaagtaatttttatttaatctaagttttaaaagcttatggcataaagttgttgtaatattccatcattgtgtaacttcattgctatgaggtctttagtgatatgccctctttcatttacaatactgaaaatttgtatatagcctatttttcttatgtagtctagctttgggtttgtctttttctatctttattaaaaaaaccttgtatgtttgtcagcttccatttttttgttttctatttaattaattttctaacttttgttagtttcttctctcaattcactttgaaaaataagtcatttatttcagctcataagttgtaacttacatccttattctgaacatgttgtattctctaatataagcatttatagtttcccactaagaactgcattagcaacatccaacaaactttgatatggtatgttttaattatcattcaatttaaaatattttctaggctgggcttggtggctcatccctgtaattccagcactttaggaggctgagggggtggatcgttttgagctcaggagtttgagaccagcctgggcaccatggcaaaatcgtgtctctacaaaaaaatacaaaattagctgggtgttagtggctcacgcctgtaattccagctacatgggaagctaaggcacaagaatagcttgaacctgggaggcagaggttgcagtgagcagagagaacaccactgcactccagcctaggcaacagaatgggatcctgtctcaaaaataaataaataaataaatacataaataaaatatgttctaatttcccttttgatttcttgtttaactcatggattatttggtagtatattgttaactttcaggtatttcagactttaccattattgtattgttcttaatttctaacttatttctattgtgatcagagacaatatagtgaaatatgtaaatatttgaagtttattgtgattttattatctggcttatgattcattaaatattcaatgtgcatttcaaaagaaagtatattctgcagttattcagtaagtgtcaatttagtccagatgattgacagggttgttcagatcttccgtaatcttactgattttatatatttatatcaattattgagatgtaatgagttatctgtttttcatttaattcaggaaatttttgtttcatatattttgaatctctgttcttaaatatacacacatttaaaatacttatgtctccctaataaacccttttatcatcaggaaatatttgtctgtgaaaatattccttgtactgaaatctactttgtctgacattaacatggtcatgtcggcattcttactttttacattatattttttccatttttgactttcaactcatatatatctttaattgaaaaagcatgtccttttgccagatgctatatatcatgggtattctaattttgcattttgagtatagaaatgtatgtcaattgcctactagaataataaaatagaaatgtttaaaataacacaacagaactcaaaattgttacaaggctggctttattatctacaatgtccagttttattactaaaatttaccagatatgtaaaaagatggaaaagtatgacctatactcaaaaaagggcaatcaatagaaattgactgaatgggcccaaatgttataattagtagacacagatttcaaagcagttgttaaaaatatgttgaataaattcaaaaaagttcaataattaaataaaatataatgttaattaatagactagacagaaaatcccaacagacaaatgcaaactatgcaaaatgtaaattctaaaggtggaaagtacaataactgaaataaaaaagattcactagatgagctcaacaaataataaatgacaaaaaatgtataaacttgaaaataaatcaacatatgttatctgcacccaaagaatgaattaagagaataaaactaaacagagttacagagacctgtggggcaacatcacactctcacatatgtgtaattggaatacgagattgagaatagagaaagaaggcaagaaaatgttagaaggaatatgatcaaaaacttgaaattcgatggaaaatattaacgtaggagtctgagaaactcacaaaacacacgcagaataaatgcaaagaaaaccaccactaagcatatcatagtcattttgttgaaagccaaattaaggagaaaatcttgataggcagagaataatgacatattgcatactgcagaacaatgataatgttaaatactgatgtctcatcagaaactatggaagccatcatactttagaaagatacattcaaagcactgaagagagggaataaaaaacatgtcaagcaagaactctgtatccataaaacatttttaaaaatgaaggaaaaattaatacattttcagataaacagaactgagagcgtttgtcactagaagacttacattacaagtaatcctatagtgttctgcagactgaagagcgatgaaacgagatggcaattctgatgcctagaagaaatgaagacaaccaaaaatgatggtaagtatgtgagttagtaagttaagaactcttctctctctctctctctctccctcccctcaccacatatgtgtgtatctgtattttctaaaaaacatgacattttaacaaaaattatagcactttattgatgagtttacaagatatataaatataatgcctaaaatgataataacattaaggatgggggagagatgactagaaatatactgttgcaagttttctatatttcacctaaaaaaaaatcaatactaattccaagtaggtaaggctaagttataggtgtatattttacgctctaaagcaataagttaaaaataatttcaaaacatatagttagaaaactaaaaaaggcattaaagtggaatgcttaaaaatgttcaattaaaataaggcatctaaggaacaaatgacaaaaacaaataagacaaatagaaaaatgggacacctcagtacaaccatatcagtaattacattaaatgtatatggactagatactccaataaaaaggcagcaatcaagatttttcaaactgtgtaaaaaagtaagaaccatcaatatgccatccacaaaataatgcactttaaatataaaaacacaaataaattgaaaataaaaggatggaaaacagtaaacataataaagtggagtagccatactaatatcagccaacatgaaattcaagacaaagatactagagacggagggacattttgtaatgataaagagacagttcaaaagaagacataacaactgcaaacatatgagcctaataaatgaacttcaaaatatatacaggaaactgacagaactaaaggaagtcatgcacaattcccacagtcataattggagactctatcagactttctttttgccatgtagattttccaaatgttaatattctttttatttatcaggttttataaaggaataaaacattacaaatacagctgacgtcccgcctttctatcacattctcctccctctttctttgggcattggtaagctaataataattcaggatgtaaatctctggagtgtgtgttcttggagtgcagcactatatcttattaatcttgaatttttagctaatagcagtgcctgactctagaagagacaaatgaattttcaaacaattaaataataaatgaatgaaagggattgtttttataataataataatttttatctttgccatatgtaataggggctctgtaaatgtttgatgagtttgggaattaataaaatagctttgatttcttactgagaataattgcccctaggtgtttttttttttatactttaagttctagggtacatgtgcacaacgtgcaggtttgttacatagttatacatgtgccaagttggtttgctgcacccattaactcgtcatttacattaggtatttctcctaatgctatccctcccacactctcccaccccaggacaggccctagtgtttgatgttccccaccttgtgtccaagtgttctcattgttcaattcccacctgtgagtgagaacatgcgatagttcttgagacagtttgctcagaatgatggtttccagcttcttccatgtccctgcaaaggacatgaactcatccttttttatggatgcatagtattccatggtgtatatgtgccacatttgcttaatccagtctatcattgatggacatttggtttggttccaagtctttgctattgtgaatagtgctgcaataaacatatgagtgcatgtctctttatagtagcatgatttacaatcctttgggtatatacccagtaatgggatcgctgggtcaaatggtatttctagttctagaaccttgaggaatcgccacactagttcaatggttgaactagtttacgctcccaccaacagtgtaaaagcgtacctatttctccacatcctctccagcatctgttgtttcctgactttttaatgatcgtcattctaactggtgtgagatggtatctcattgtggtctatcagactttttaagtaattgttagaacaactacaccaaaaaaaaggtccttaagaatctgaatgacaaagtcagtggctttaactcaaatgacatttgtagaacactgcctccaactactccataatacacattgtttttttgtttttttttttttttgaggtggagtttcgctctgtcaccaagctggagtgcagtggcacaatctcagctcactgcaccctctacctcccggattcaagcaattctcctgcctcagcctcccaagtagctgggattacaggcacgcaccaccatgcccagctaatttttgtatttttagtagagacggggtttcaccatgttggccaggatggtctggatctcttgacctcatgatccgcgcaccttggcctcccaaagcgttgggattacaggcgtgcgccacagcacccagcctattttcaaatgcatatgtaaggcttaacaggctagactataagctgggccattaaacaaatcttagcagatttcaaaagcctggaatcttacagaatatgttctctgaccacaacagaattaaggaaatcagcaatgat

SEQ ID NO: 1008 - protein, 448 aa, Homo sapiens [sequence omitted]

SEQ ID NO: 1009 - DNA, 1336 bp, Homo sapiens
  source
  (1)..(1336)
  CDS (201)..(1136)
gaaccaaatttattttctgctttactctggattaaaggatttggcataatggctccgaaaaaccttgctgactgagtcagcaccctgtgtgcaccataaaccccctccttctgttaactgactaatccggatctgcatttgctcctcagcacatagctcattgccacagcagagtccaacgcaggtactgtcacaagggcatgacaaaaaatcagacatgggtcacagaattcattctcctgggatttccactcagcctaaggattcagatgctcctctctgggcttttctccctgttatacgtcttcaccctgctgggaaatggggccatcctggggctcatctggctggactccagactgcacacccccatgtacttctttctctcacacctggccatcattgatatttcgtatgcttccaacaatgtccccaagatgctgacaaaccttggcttgaacaagagaaaaacaatctcctttgtcccatgcacaatgcagacctttttatacatggcttttgctcacactgagtgtctcatcttggtaatgatgtcctacgatcggtacatggctatctgccaccctctgcaatattctgtcatcatgagatggggagtgtgcacagtcctggctgtcacttcttgggcatgtggttcccttctggccctggtccatgtggttctcatcctgaggctgcccttctgtgggccccatgaaatcaaccacttcttctgtgaaatcctgtctgtcctcaagttggcctgtgctgacacctggctcaaccaggtggtcatctttgctgcttcagtgttcatcctggtggggccgctctgcctggtgctggtctcctactcgcgcatcctggcggccatcttgaggatccagtctggggagggccgcagaaaggccttctccacctgctcctcccacctttgcatggtgggactcttctttggcagcgccattgtcatgtacatggcccccaagtcccgccaccctgaggagcagcagaaggtcctttccctgttttacagccttttcaacccgatgctgaaccccttgatctatagcctgaggaacgcagaggtcaagggtgccctgaaaagagtgttgtggaaacagagatcaaagtgagggatgccagggaaagtctagagggttgaagatttgctcccaatgagatttgtaggaacagtggtgtaaatgccttacagtctcatctcttagatttctgatatcaagaatgtatattgattggattctatccctaaacgtggagtaccatgcagatcacaaagcacatgcagacaggcgctgagccgtgtggtgcagca

SEQ ID NO: 1010 - protein, 311 aa, Homo sapiens
MTKNQTWVTEFILLGFPLSLRIQMLLSGLFSLLYVFTLLGNGAILGLIWLDSRLHTPMYFFLSHLAIIDISYASNNVPKMLTNLGLNKRKTISFVPCTMQTFLYMAFAHTECLILVMMSYDRYMAICHPLQYSVIMRWGVCTVLAVTSWACGSLLALVHVVLILRLPFCGPHEINHFFCEILSVLKLACADTWLNQVVIFAASVFILVGPLCLVLVSYSRILAAILRIQSGEGRRKAFSTCSSHLCMVGLFFGSAIVMYMAPKSRHPEEQQKVLSLFYSLFNPMLNPLIYSLRNAEVKGALKRVLWKQRSK

SEQ ID NO: 1011 - DNA, 952 bp, Homo sapiens
  source
  (1)..(952)
  CDS (201)..(752)
caaagcctggctgctgcctcaaatgaaggggcatggaactggcaaacctcaaggtgggcagggccccagggagcttttatagtctgtgcagtgcacaaagtccccggggtggcagctggcatctgattgcttatcagggcacaagctgtatccagtgggaggaaggcacccattttccttaactttgctcatcaagcaccatgtcttcgtgttgcatctcccagtgtctctttctaattctaaggtgttttaagggctggaaacacagccccagtagtggagcggcagggagaggggatggggactgcagggacaccatacctgctcttgaggccaggaccacaatgacaaccccagagactgccaggagcacagccatgaacgccagggcccagtacagggacttcacgtacatgggtagccctgggacgggggcaaacaggataatcagattagtggagaccatcccaaccaacccaactcagaaccacagacacagcacaccagcatctcacccacctcaccccagcacccaccccctcagcctgggatgccaacataaaccacaacgtttaagttccaactttatattctggagaaagaagccagatattctttttttttttttttttttttttggagacagagtcttgctttgtcgcccaggttggagtgcagtggtgcgatctcggctcactgcaacctctgcctcccgggttcaagcaattctcctgcctcaacctcctgagtagctggggttacaggtgcgtgccaccatgcccggctaattttttgtatttttagtagagacggggtttcaccatgttggccaggttggtcttgaactcctgaccttgtgatctgcccacctcggcctcccaaagtgctgggattacaggtgtgagccaacgcgtctggcccttttttttttttttttttgagactgagtctt

SEQ ID NO: 1012 - protein, 183 aa, Homo sapiens
MSSCCISQCLFLILRCFKGWKHSPSSGAAGRGDGDCRDTIPALEARTTMTTPETARSTAMNARAQYRDFTYMGSPGTGANRIIRLVETIPTNPTQNHRHSTPASHPPHPSTHPLSLGCQHKPQRLSSNFIFWRKKPDILFFFFFFFGDRVLLCRPGWSAVVRSRLTATSASRVQAILLPQPPE

SEQ ID NO: 1013 - DNA, 940 bp, Homo sapiens
  source
  (1)..(940)
  CDS (201)..(740)
cttgatgcctgtgtgccttgggtcccgtctgcccggctgggcctggcatggagctgcacgcagaacttcagacagcagcgggtgtgcatgtgtgagctttagattctttctggagagcgtgtggagggggtacggtgaggggtgaatgtgactgggacacatgcagtgcctggaggctggggtgcctcggaggattgaggatgaagctgtgtgttggggcgtgctggggtagtactgccgcgagcagtttttcccagaactgcccaaagctggctcagcccactcccattgaaggagggttccctggctcagccactcccattggaggacggctccctggctcagccactcccactggaggagggttccctggctcagccactcccattgaaggagggttccctggctcagccactcccattggaggacggctccctggctcagccactcccactggaggagggttccctggctcagccactcccattggaggagggttccctggctcagccactcccattggaggacggctccctggctcagccactcccactggaggagggttccctggttcagccactcccattggaggagggttccctggctcagccactcccattggaggagggttccctggctggctccatagctgctcttcttccacgagtgaagccacagagcctgttcttacccacttcctgcacaaaggctgtttccttacaggagcagagttaagctgagatccaccaggcagggctggcagctgatgccacaagttccactgagagaatcagtcaccgaggctgctcctgtgccctgtgccctgtgccctgtgcccctccccgcttctgctctgcccacttccatgctcccttgggccacggaactgtcatgactcggcctgagagcagtgggctcccatgtcgcctgggatctccac

SEQ ID NO: 1014 - protein, 179 aa, Homo sapiens
MKLCVGACWGSTAASSFSQNCPKLAQPTPIEGGFPGSATPIGGRLPGSATPTGGGFPGSATPIEGGFPGSATPIGGRLPGSATPTGGGFPGSATPIGGGFPGSATPIGGRLPGSATPTGGGFPGSATPIGGGFPGSATPIGGGFPGWLHSCSSSTSEATEPVLTHFLHKGCFLTGAELS

SEQ ID NO: 1015 - DNA, 1402 bp, Homo sapiens
  source
  (1)..(1402)
  CDS (201)..(1202)
agacggccatttttcaacgctcaacttcactttcacagaaatgcaccaaaggcagcctcgctctgtggtctgcagcgattactgcaccaggagaaggcacccctgtacctgcagcacttctgggccagggctttgggacgggacgcgagctgaccacctgttccttctttccgcagggtcgcggagcctcgccggccgccatgtggagctgcagctggttcaacggcacagggctggtggaggagctgcctgcctgccaggacctgcagctggggctgtcactgttgtcgctgctgggcctggtggtgggcgtgccagtgggcctgtgctacaacgccctgctggtgctggccaacctacacagcaaggccagcatgaccatgccggacgtgtactttgtcaacatggcagtggcaggcctggtgctcagcgccctggcccctgtgcacctgctcggccccccgagctcccggtgggcgctgtggagtgtgggcggcgaagtccacgtggcactgcagatccccttcaatgtgtcctcactggtggccatgtactccaccgccctgctgagcctcgaccactacatcgagcgtgcactgccgcggacctacatggccagcgtgtacaacacgcggcacgtgtgcggcttcgtgtggggtggcgcgctgctgaccagcttctcctcgctgctcttctacatctgcagccatgtgtccacccgcgcgctagagtgcgccaagatgcagaacgcagaagctgccgacgccacgctggtgttcatcggctacgtggtgccagcactggccaccctctacgcgctggtgctactctcccgcgtccgcagggaggacacgcccctggaccgggacacgggccggctggagccctcggcacacaggctgctggtggccaccgtgtgcacgcagtttgggctctggacgccacactatctgatcctgctggggcacacggtcatcatctcgcgagggaagcccgtggacgcacactacctggggctactgcactttgtgaaggatttctccaaactcctggccttctccagcagctttgtgacaccacttctctaccgctacatgaaccagagcttccccagcaagctccaacggctgatgaaaaagctgccctgcggggaccggcactgctccccggaccacatgggggtgcagcaggtgctggcgtaggcggcccagccctcctggggagacgtgactctggtggacgcagagcacttagttaccctggacgctccccacatccttccagaaggagacgagctgctggaagagaagcaggaggggtgtttttcttgaagtttcctttttcccacaaatgccactcttgggccaaggctgtggtccccgtggctggcatctggcttgag

SEQ ID NO: 1016 - protein, 333 aa, Homo sapiens
MWSCSWFNGTGLVEELPACQDLQLGLSLLSLLGLVVGVPVGLCYNALLVLANLHSKASMTMPDVYFVNMAVAGLVLSALAPVHLLGPPSSRWALWSVGGEVHVALQIPFNVSSLVAMYSTALLSLDHYIERALPRTYMASVYNTRHVCGFVWGGALLTSFSSLLFYICSHVSTRALECAKMQNAEAADATLVFIGYVVPALATLYALVLLSRVRREDTPLDRDTGRLEPSAHRLLVATVCTQFGLWTPHYLILLGHTVIISRGKPVDAHYLGLLHFVKDFSKLLAFSSSFVTPLLYRYMNQSFPSKLQRLMKKLPCGDRHCSPDHMGVQQVLA

SEQ ID NO: 1017 - DNA, 922 bp, Homo sapiens
  source
  (1)..(922)
  CDS (201)..(722)
  modified_base (812)..(911): a, t, c, g, unknown or other
ctcccctttaacccaatcttccacacttagctgtataacttgtaataactcatgaaaacccagacacatacataggaataggaattggaattctgaaaagtttaagtgtaactggaaaaccaaacccatgctcacttcattaactgatctctgtttctctcctattcatgtagctgaaattaagtcccttccaaaattcaatgaatgagacaaatcattcttgggtgacagaatttgtgttgctgggactgtctagttcaagggagctccaacctttcttgtttcttatattttcactactttatctagcaattctgttgggcaactttctcatcatcctcactgtgacctcagattcccgccttcacacccccatgtactttctgcttgcaaacctgtcatttatagacgtatgtgttgcctcttctgctacccctaaaatgattgcagactttctggttgagcacaagactatttcttttgatgcccacctggcccagattttctttgttcatctcttcactggcagtgaaatggtgctcctagtttccatggcctatgaccgttatgttgctatatgcaaacctccccactacatgacaatcatgagctgctgtgtatgtgttgtgctcgtcctcatttcctggtttgtgggcttcatccataccaccagccagttggcattcacgttaatctgccattttgtggtcctaataaggtagatagtttttttctgtgaccttcctctagcgtcgaagttagcctgcatagacacttatgttgtcagcctactaatagttgcagatagtggnnnnnnnnnnnnnnnnnnnnnnnnnnnnnnnnnnnnnnnnnnnnnnnnnnnnnnnnnnnnnnnnnnnnnnnnnnnnnnnnnnnnnnnnnnnnnnnnnnnntttcctggcaa

SEQ ID NO: 1018 - protein, 173 aa, Homo sapiens [sequence omitted]

SEQ ID NO: 1019 - DNA, 856 bp, Homo sapiens
  source
  (1)..(856)
  CDS (201)..(656)
caaggagcacagtgtcctggtggctcagaggccaccgaggcacccccagatccccatccgctccctggacctgcagtggactgttgactccagccctgctccaggattcaggctggctctttggtcataaaggaacccattgccccctggtggtgactggacacagctgtggaaggaattccagactctggcggggtgaaatggggacaggtcctgcttctcacctagacctccccatgtctgtcaccagcatccctacccaggtgttcagtgtgggctcaccctcaagccccctctgtcctctcatttcttttcttttctttccttttttttttttttttgaggcagagtctcactctgttgcccaggctggagtgcaatggcgagatctcggctcactgcaacctccacctcccaggttcaagcgattctcctgcctcagcctcccaagtaactgggattacaggcatgtgccaccaacccaagctaattttttttttttttttgagacggagtttcgctcctgtcgcccgggctggagtgcaatggcgcaatctcggctcaccgcaacctctgcttcctgggttcaagcaattctcctgcctcagcctcctgagtcgctgggattacaggcacatgccaccatgcccagctaatttttgtatatttagtagagacgggtttcaccatgttggccaagctggtctgaaactcctgacctcaggtgatccacctgcctcacccaaagtgctgggattacaggtgtgagctaccacaccctgcctagtttttgtattttttgtagagacagggtttcaccatgttggccaggctggtctcaaactcctgacctcag

SEQ ID NO: 1020 - protein, 151 aa, Homo sapiens
MGTGPASHLDLPMSVTSIPTQVFSVGSPSSPLCPLISFLFFPFFFFFEAESHSVAQAGVQWRDLGSLQPPPPRFKRFSCLSLPSNWDYRHVPPTQANFFFFFETEFRSCRPGWSAMAQSRLTATSASWVQAILLPQPPESLGLQAHATMPS

SEQ ID NO: 1021 - DNA, 931 bp, Homo sapiens; identical to SEQ ID NO: 989
  source
  (1)..(931)
  CDS (201)..(731)

SEQ ID NO: 1022 - protein, 176 aa, Homo sapiens [sequence omitted]

SEQ ID NO: 1023 - DNA, 1650 bp, Homo sapiens
  source
  (1)..(1650)
  CDS (201)..(551)
  CDS (1007)..(1450)
ttcctgttaccactattccagctagtactagcatagttgttggacctccaacttctatgacctcttactttacataatatgggaccattcgtttaactcacatactgtgtccttttctggattagtcatactctaggtatgaaaaagtacatggaaaggactaattgaacaactgagtttgagttgattctcataagtctatgagtactcataagttgacaaaaactcctttttgtcacatgcttagtggtgtatctagtgaccctcttggggaacagaatacagatcatcccaacactccttgtttcccacctatatttatgccatggcaatccctccttcctggatatcgggcttacgtcctttttactccctctatcctaataaacttcctatcagagggaaaaaaactctctttcacagattgtattatacaaatgtctatcttctattccatggggtccacggagtgtgtgctcctagcagtgatggcatatgataactgtgtggtcatcagcaaattcctgagataccctctcatcataaataaggtgccttggctgggcgcagtggctcatgcctgtaatcccagcactctgggagtccaaggctggtggatcaccggaggtcaggagttcaaaaccagcttggccaacatgatgaaaccccatctctactaaaaatacaaaaaattagccctgtgcagtggtgggcaccggtaatcccagctacttgggaggctgaggcaggagaattgcttgaacctgggaggccgaggttgcaatgagccaatatcatgccactgcactccagtctgggcaacaagagcgaaactccacctcaaaaataatataaaataaaataaaataaaaaaggtgctttgtgttttcatggctactgtctcttatgaattaggatttctcaacagacaaaatgtattaatagttacatatgaatgcacttttgtggaaaacacatcattaatcatttttataaaatattacagttaatgcctctggcttgcatagatatttccttgaatgagaatataataatattgggcaaagtaaacttttcatttactttattactaccatttcagttctttatattcagttttttatattttcaccatctatgctgtattgaaatcaattcagctgaaggaaggaaaaaggtctcttccacctgttcagcccacataacagtggtgattgtgtttcaccggacaatcctcttcatgtacataaagtcaacatctaatggcactacttcagagaaactggttgacctgttctgcggggtagtaatgctcatgctcaatcttatcatctatagcctggggaatatggaggtgcttggggttatgaagaaattgatcagtatgagtagaccctggtgctggaaaaatgatgagaacctgacatctttgagttcatgtacaaaataagctcacatattttgaggcaagaattttaaatataaatagaacagaagaaatgacgattatgtctagaaacaaaatttcagcattagaaagaaatttcaacattaataatctaatatttatctttaagaaaatgaccatgacctcataaaaatacagagacaagtaatctaagaagtacatgtaaagttatgggagtcaga

SEQ ID NO: 1024 - protein, 264 aa, Homo sapiens
MSTHKLTKTPFCHMLSGVSSDPLGEQNTDHPNTPCFPPIFMPWQSLLPGYRAYVLFTPSILINFLSEGKKLSFTDCIIQMSIFYSMGSTECVLLAVMAYDNCVVISKFLRYPLIINKLMPLACIDISLNENIIILGKVNFSFTLLLPFQFFIFSFLYFHHLCCIEINSAEGRKKVSSTCSAHITVVIVFHRTILFMYIKSTSNGTTSEKLVDLFCGVVMLMLNLIIYSLGNMEVLGVMKKLISMSRPWCWKNDENLTSLSSCTK

SEQ ID NO: 1025 - DNA, 928 bp, Homo sapiens
  source
  (1)..(928)
  CDS (201)..(728)
gtgaatgctgttttatcaccacagttattcctaaacttctggtcatctttctttcaggcaggcaaataatcccctttactacttgtctcatgcagtccttttcatttttatttcttgggtcaacagttttcttccttatggctgtgatgtccttggattgatacctggccatttgcaagcctctgcattactccaccatcatgagcctgaggactagcttccacctggtcactgcctgctttgtcgtgggcttcactctcatcactggtctcatggtgaaggtttcccagttatctttctgtggaccccatgtcatccctcacttcttccgtgacctcggccctctgatccaactctcctgttctgacaccagatctactgaaacgttggcctttgtccttgtttcattcgttctttttacatccctcattataaccatcattgcatatggcaacatagtagtcacaattgtacgactcccatcagccaaggagcggcagaaagctttctccacctgctcctctcacctcattgtcctctctctggtgtatggcagctgtgtcttcatatatgtgaagccgaagcaaatggacaggctggactccaacagaaaggctgctcttgtgaacacagtggtgaccccactgctgaacccgatcatttacactctgcggaacaagcaggtccaccaggctctgagggatgctcagtccagaatgaaattgtaaaaacagaatcacaacctcccagtgaaggaatgcaccttctccttgatctaatccaatctttctcctgtttctggaatcctttataaaaaatttgcaaatatgttttttttaggttctgtttgttttttcttagaataagggctaattgtccctctccctctccctctccctctccctctccctctccctctctttccacg

SEQ ID NO: 1026 - protein, 175 aa, Homo sapiens
MSLRTSFHLVTACFVVGFTLITGLMVKVSQLSFCGPHVIPHFFRDLGPLIQLSCSDTRSTETLAFVLVSFVLFTSLIITIIAYGNIVVTIVRLPSAKERQKAFSTCSSHLIVLSLVYGSCVFIYVKPKQMDRLDSNRKAALVNTVVTPLLNPIIYTLRNKQVHQALRDAQSRMKL

SEQ ID NO: 1027 - DNA, 940 bp, Homo sapiens
  source
  (1)..(940)
  CDS (201)..(740)
aacagatgctgatgccatgcttgcacagcctgcagaaccaggagccaaataaatctcttttctttataaatttacccagtttcagatattccttaatagcaacacaaaacagattgaaattcttcctcattgtaccttgcacagatgtagacgtgctcaagtaatactgtttgagtgattgccaactgtaacctctgcagatgacacctggagaactagcccttgccagtggcaaccacaccccagtcaccaagttcatcttgcagggattctccaattatccagacctccaggagcttctcttcggagccatcctgctcatctatgccataacagtggtgggcaacttgggaatgatggcactcatcttcacagactcccatctccaaagcccaatgtatttcttcctcaatgtcctctcgtttcttgatatttgttactcttctgtggtcacacctaagctcttggtcaacttcctggtctctgacaagtccatctcttttgagggctgtgtggtccagctcgccttctttgtagtgcatgtgacagctgagagcttcctgctggcctccatggcctatgaccgcttcctagccatctgtcaacccctccattatggttctatcatgaccagggggacctgtctccagctggtagctgtgtcctatgcatttggtggagccaactccgctatccagactggaaatgtctttgccctgcctttctgtgggcccaactagctaacacactactactgtgacataccaccccttctccacctggcttgtgccaacacagccacagcaagagtggtcctctatgtcttttctgctctggtcacccttctgcctgctgcagtcattctcacctcctactgcttggtcttggtggccattgggaggatgcgctcagtagcagggagggagaaggacctctccac

SEQ ID NO: 1028 - protein, 179 aa, Homo sapiens [sequence omitted]

SEQ ID NO: 1029 - DNA, 1075 bp, Homo sapiens
  source
  (1)..(1075)
  CDS (201)..(875)
tttaaacagaaggtatgtatgaagtttcaatagctgctttaaaaatgagttagcacgtggctcatagcaggtgttcaattcttaccagttcctctccctctttccctaacactgtctatcctggggatatttaaaaatctctgggcactgaccctaactctagggtacacacgtgtcttatttggtctctctgcagtgacatgcacaccatggtggagaaccacacccaagtcacctggttccgcctgctgggacttacagagcaggaggagctcagaggcatcctctttgtgctcttcctgctcatgcattcagtcactgttatgggcaacctgggaatgatcactctgatccatgcagacccacagctccacacccccatgtatttcttcctgagcgtcctatccttgatagactcctcgttttccacagtggacatccccaggctgctggagagcttcctcatctcaagccaatccatctcctttgcaggctgtatggtccagatggccctcatgatcctccatggtactgctgagtgtctgctcctggccatcatggcctatgaccgattcaccgccatctgccaccctctcctctatcacactattatatcccaatgtctgtgtgccctgctggtggtgacctgctatactgtttctgttgccaattcagctttgctgactgggtgcatctttaagctgccctactgtggccccaatgtcattaaccactatttctgtgacatcccccctgtgctccaacttgccggtgcagatactacgaggttgagaccattatcttctcattgtgtgccttgctcatcctctttaccatcaccattatcccagtctcctatgcctacatcctcgtgaccatttgcaggatgcgctccctgcaagcccagagcaaagctctctccacccccacctcaccatcatctgcctcttctatagcaccatcaccttcatgtatgctcagccaagctctcacaattccatggaacacaacaaggtcatgtctgtcttctacactgtggtcatccgcaggctgaaccctctgatctacagcctga

SEQ ID NO: 1030 - protein, 224 aa, Homo sapiens [sequence omitted]

SEQ ID NO: 1031 - DNA, 1261 bp, Homo sapiens
  source
  (1)..(1261)
  CDS (201)..(545)
  CDS (675)..(1061)
agagagctgctttgaatatccctactttagtttacctgaaacaaagttcattagaaataaaatgaggaaaactgctgaaaagaggggaaaacttttggtaagaagattattactctactggtaataatagtaataatcatgttgctattgtattgcaatcaatatatatgtaaagttcctttctcccactgaaggaaattatgagaaggaacttcacgttggtgactgagttcattctcctgggactgacgaatcaccaggaattacagattctcctcttcatgctgtttctggccatttacatggtcacagtggcagggaatcttagcatgattgccctcatccaggccaatgcccggctccacacgcccatgtactttttcctgagccacttatccttcctggatctgtgcttctcttccaatgtgaccccaaagatgctggagattttcctttcagagaagaaaagcatttcctatcctgcctgtcttgttcagtgttacctttatatcatcttggtacacgttgagatctacatcctggctgtgatggcctttgactagtacatggccatctgaaaccctctgctttatggcagcaaaatgtccaaaagtgtgtgttccttcctcatcacggtgccttatgtgtatggagcgctcactggcctgatggagaccatgtggacctacaacctagccttctgtggccccaacgaaattaatcacttctactgtgcagacccaccactgattaagctggcttgttctgacacctacaacaaggagttgtcaatgtttgttgtggctggctggaatctttcgttttctctcttcatcatatttatttcctacttttacatttttcctgctatcttaaggattcgctctacagagggcaggcaaaaagctttttctacctgtggctcccatctgacagctgttactattttctatgcaactctgttcttcatgtgtctcagacctccatcagaagagtccatggagcaaggacaaatggtagctgtactttataccactgtgatccccatgttaatcccatgatctacagtctgaggaacaaggatgtgaaaaaggctttatccaaagaactgttcaaaagaaaattgtttcctaaataaacatcagtattgatttttgtcatgctgtcattttatttagcctataattttttcatagagcttagtgcaatacaaatttatccaaaattatacattttccttgaagggttagggaatttttat

SEQ ID NO: 1032 - protein, 243 aa, Homo sapiens
MRRNFTLVTEFILLGLTNHQELQILLFMLFLAIYMVTVAGNLSMIALIQANARLHTPMYFFLSHLSFLDLCFSSNVTPKMLEIFLSEKKSISYPACLVQCYLYIILVHVEIYILATMWTYNLAFCGPNEINHFYCADPPLIKLACSDTYNKELSMFVVAGWNLSFSLFIIFISYFYIFPAILRIRSTEGRQKAFSTCGSHLTAVTIFYATLFFMCLRPPSEESMEQGQMVAVLYTTVIPMLIP

SEQ ID NO: 1033 - DNA, 853 bp, Homo sapiens
  source
  (1)..(853)
  CDS (201)..(653)
taaattactgagagtacaaaacatgcctttttcaaatttgcaattccaaagtctatgacagatttgacatagatactgcatacacatttttaattgaatgaacaaacaaaatattaaaatcataatacatttaaagttttcccccttgttttataggtaaactgcttctatgatctgaagtaagcagctataaagaatagatggagctaaggaccaatgtgactgactttgtactcttgtgcttcacgcagaatccaaaggagcagaaagtactttttgttatgttcttgctcttctacattttgaccatggtgggatacctgctaattgtagtcaccgtaactgtcagtgagaccctgggctcaccaatgtacttctttcttgctggcttatcatttatagatatcatttattcttcatccatttcccacagattgatttcagacttgttctttgggaataattccatatccttcccatcttgcttggcccagctctttacagagcacctttttggtgggtcagaggtctttcttctgttggtgatggcctatgaccttgcattacttggttatcatgagacaatgggtgtgtgttttgctgctggtagcgtcctgggttggaggatttctgcactcagtatttcaacttagtgttatttatgggctcccattctgtgacctcaatgtcattgatcattttttctgtgatatgcaccctttattgaaactggtctgtactgatacccatgttattggcctcttagtggtggccaatggaggactaggttgcactattgtgtttctgctcttactcatctcttatggtgtcatctgcactctctaaagaacct

SEQ ID NO: 1034 - protein, 150 aa, Homo sapiens
MELRTNVTDFVLLCFTQNPKEQKVLFVMFLLFYILTMVGYLLIVVTVTVSETLGSPMYFFLAGLSFIDIIYSSSISHRLISDLFFGNNSISFPSCLAQLFTEHLFGGSEVFLLLVMAYDLALLGYHETMGVCFAAGSVLGWRISALSIST

SEQ ID NO: 1035 - DNA, 973 bp, Homo sapiens
  source
  (1)..(973)
  CDS (201)..(773)
ggtcagcccaactttggatgccccatgtacttcttccttggctacttatcatttatggatgctgttcattctactacagttaccccaaatatgattatagacttactctatgagaagaaaaccatttcgttccaagcttgattacccagatttttataggacacctatttgggggtgctgagattttactccttgttgtcatggcctatgatggctacgtgaccatctgcaaacccctgcattatttgaccatcatgaaccaacgggtgtgcattctactgctgctgttggcctgggctggaggtttcttgcatgctgtagttcaacttctttttgtttacaaccttcccttctgtggccccaatgtcattgaccatttcatctgtgacatgtaccctttattaaaacttgcctgcactgacacctatgttactggcctcactgtggttgccaatgatggggcaatctgtgtggtcatctttatgctcttactcttctcctatggggtcattctgcactccctgaagaatcttagtcaggaagggaggcacaaagccttatccacctgtggctcccatatcactgtggtgatcctcttctttgtcccttgtattttcatgtatgtgagacctcctttgaccttacccattgataaatccttgactgtgttttacactgttatcacacctatgttgaaccctctaatctatactttaagaaatgcagagatgaaaaatgctatgaagaagctctggactagaaaaagaaaatgaggtggcagacaaatgtatcatctattttcagtgaagagttgctccctccaggaaagccatttgtgattatttaatggcagtgaaattttcctcaggtttaataactagtatgcagtgaaaatcatttattacatgaatacttgcaataatcaaaatatatttagaaaattttaataatttattggaaaaatatatgttca

SEQ ID NO: 1036 - protein, 190 aa, Homo sapiens
MAYDGYVTICKPLHYLTIMNQRVCILLLLLAWAGGFLHAVVQLLFVYNLPFCGPNVIDHFICDMYPLLKLACTDTYVTGLTVVANDGAICVVIFMLLLFSYGVILHSLKNLSQEGRHKALSTCGSHITVVILFFVPCIFMYVRPPLTLPIDKSLTVFYTVITPMLNPLIYTLRNAEMKNAMKKLWTRKRK

SEQ ID NO: 1037 - DNA, 1003 bp, Homo sapiens
  source
  (1)..(1003)
  CDS (201)..(803)
ctaggcgagcaaataacacattctcagcagcaggtaaaagttattttgaaacaagtctaagtaaagcagataatgggacagaaaggtgagggagagattttaatggtatagctacacaaagcatttttttttcttataacctaaggtgattctgaagataatgaaatcattgcatcattatttggaatgagtgcacaataatggccacgtgtagtggacacctaccacatgccagagacaaggctgggaattttatatacattatgtctcatctcacagcgtctttgcaaggcagttttttttttcttttatatggagtctcgctctgtcacccaggctggagtgaagtggcacgatcttggctcactgcaacctctgcctcccaggttcaagtgattctcctgcctcagccgcccaagtacctgggacttacaggtgtgcaccaccatgcctggctaatttttgtattttcagtagagagggggtttcaccatgttggccaggctagtcttgaactcctgacctcaagtgatctgcctgcctcagcctcccaaagtcctgagattataggtgtgagccacagcgcccggcctgacagatttcttatcagtttcacagatgagggaattggggctccaaggaggtcacataacccccaccaccatgcctccacccccctaccccacccccacccaagccataggcagtggtttgaggagctggaatccaaaccaggtctgttagattctcccctgccctccaccaggtccctcatgattctgttgatggaaggcaatatttaacaagtgactcacaaagtgacttgggtgtaatacctagatctgttcagtgcgttccttagaaagctcctcatgatctcaatgcaatcattctctggttcccatctccccttacagcacagagcaccaatttcgttcctacccttgcccttcaggtataacccgtggctggttcccttccttagaaagtgcattcatgaagt

SEQ ID NO: 1038 - protein, 200 aa, Homo sapiens [sequence omitted]

SEQ ID NO: 1039 - DNA, 868 bp, Homo sapiens
  source
  (1)..(868)
  CDS (201)..(668)
aaagattggaaaattacttcatctttatgaaagaagctttgtaacagggaaggccaggataactgtagaattatctaccatggttgatgccgtttccacatagagaatgggttatcagttctcaattaactgctacatgctggatgctctttatatcccagtggggagagagatgaagggtgagaagaaatgtccaactcatgacagcattcatcctcatggaccttccccatgtcccagctctggacgccccactctttggagtcttcctggtggtttatgtgcttactgtgctggggaacctcctcatcctgctggtgatcagggtgtactctcacctccacacccccaagtactacttcctcaccaatctgtccttcattgacttgtggttcttcactgtcatggtgcccaaaatgccgaggaccttgttgtccctgtgtggcaaggctgtgtccttccacagttgtatgacccaactctatttcttctacttcctggggagcaccgagtgtttgctctacacggtcatgtcctatgatcgctatagaggaaatactcagcacttcccaggtagtgaaaacactccccacgaagtgagccaaatgctagtggcccggggggcacacgggctcccactcatcatcctggcagatctgagtgggtaactaagagttgatagttcttagtgggcaattcaaaattagtaatataatttagttatccaagtgaaatttattacatgtataggtctcagcattaaacattattccaaacaacttgcacagttataattctttcacagattatctaagacatttttaaattcacagctagatttttatttatgatgaacatgcttgtagta

SEQ ID NO: 1040 - protein, 155 aa, Homo sapiens [sequence omitted]

SEQ ID NO: 1041 - DNA, 1369 bp, Homo sapiens
  source
  (1)..(1369)
  CDS (201)..(1169)
acaagaactggatttcaaactggatttgaggacccccacctttggtaagtgacttattatctgcgagcctctgtttctctcttctttaaatgaggacagtaaatcccatacggcagggtggtggggagaatcagagatgatacagctggtgatcacatctggtttgtgttcccaggggcaccagactagggtttctgagcatggatccaaccgtcccagtcttcggtacaaaactgacaccaatcaacggacgtgaggagactccttgctacaatcagaccctgagcttcacggtgctgacgtgcatcatttcccttgtcggactgacaggaaacgcggttgtgctctggctcctgggctaccgcatgcgcaggaacgctgtctccatctacatcctcaacctggccgcagcagacttcctcttcctcagcttccagattatacgtttgccattacgcctcatcaatatcagccatctcatccgcaaaatcctcgtttctgtgatgacctttccctactttacaggcctgagtatgctgagcgccatcagcaccgagcgctgcctgtctgttctgtggcccatctggtaccgctgccgccgccccacacacctgtcagcggtcgtgtgtgtcctgctctggggcctgtccctgctgtttagtatgctggagtggaggttctgtgacttcctgtttagtggtgctgattctagttggtgtgaaacgtcagatttcatcccagtcgcgtggctgatttttttatgtgtggttctctgtgtttccagcctggtcctgctggtcaggatcctctgtggatcccggaagatgccgctgaccaggctgtacgtgaccatcctgctcacagtgctggtcttcctcctctgcggcctgcccttcggcattctgggggccctaatttacaggatgcacctgaatttggaagtcttatattgtcatgtttatctggtttgcatgtccctgtcctctctaaacagtagtgccaaccccatcatttacttcttcgtgggctcctttaggcagcgtcaaaataggcagaacctgaagctggttctccagagggctctgcaggacaagcctgaggtggataaaggtgaagggcagcttcctgaggaaagcctggagctgtcgggaagcagattggggccatgagggagagcctctgccctgtcagtcagacgggactttgagagcaacactgtcctgccacccttgacaattacatgcgtttttcttagcgtttcgcctcagaaatgtctcagtggtaactcaaggtcttcaaataaatgtttatctaacctgacagttgcagttttcacccatggaaagcattagtctgacagtacaatgtt

SEQ ID NO: 1042 - protein, 322 aa, Homo sapiens
MDPTVPVFGTKLTPINGREETPCYNQTLSFTVLTCIISLVGLTGNAVVLWLLGYRMRRNAVSIYILNLAAADFLFLSFQIIRLPLRLINISHLIRKILVSVMTFPYFTGLSMLSAISTERCLSVLWPIWYRCRRPTHLSAVVCVLLWGLSLLFSMLEWRFCDFLFSGADSSWCETSDFIPVAWLIFLCVVLCVSSLVLLVRILCGSRKMPLTRLYVTILLTVLVFLLCGLPFGILGALIYRMHLNLEVLYCHVYLVCMSLSSLNSSANPIIYFFVGSFRQRQNRQNLKLVLQRALQDKPEVDKGEGQLPEESLELSGSRLGP

SEQ ID NO: 1043 - DNA, 874 bp, Homo sapiens
  source
  (1)..(874)
  CDS (201)..(674)
aggccatattttactgagatcttagatttgttatatattaggttttggtcttctaacattctccagtggattttctctaaagtaggtatgcacagaaagagttgaatagcaaaaaagtaaatcatgtaataattctgagatttttgggtttgtcacaactgagaaatattgctgagggtgtatggtcctcaagtgtgaaaatgttccttgtgaattgcttgtatccgaaatatacacacaacattaagtcctggtttttatcttttattttttccaatccttttttcttctcaaggtgtccaagtcacacagagccacagaatctcacaggtgtctcagaattcctcctcctgggactctcagaggatccagaactgcagccactccttgctgggctgttcctatccatgtgcctggtcacgatgctggggaacctgctcatcatcctggccgtcagccctgactcccacctccacatccccatgtacttcttcctctccaacctgtccttgcctgacattggtttcaccttggccacggtccccaagatgattgtagacatgcaatcacatagcagagtcatctcccatgcaggctgtctgacacagatacctttctttgtcctttttgtatgtatagatgacatgctcctgactgtgatggcctatgactgatttgtggccatctgtcaccccctgcactacccagtcatcatgaatcctcacctctgtgtcttcttagtgttgatgtctttttccttagcctgttggattcctagctgcacaactggattgttacaattcacctgcttcaagaatgtggaaatctctaattttttctgtgactgatctcaacttctcaaccttgcctgttc

SEQ ID NO: 1044 - protein, 157 aa, Homo sapiens
MFLVNCLYPKYTHNIKSWFLSFIFSNPFFFSRCPSHTEPQNLTGVSEFLLLGLSEDPELQPLLAGLFLSMCLVTMLGNLLIILAVSPDSHLHIPMYFFLSNLSLPDIGFTLATVPKMIVDMQSHSRVISHAGCLTQIPFFVLFVCIDDMLLTVMAYD

SEQ ID NO: 1045 - DNA, 1075 bp, Homo sapiens
  source
  (1)..(1075)
  CDS (201)..(875)
cattttattcaagcccaaaagctcaggaaacagaaggaaatagagctcctaaaatgaatggagtttgtttcatagcctaagaaagggttatgaggtagctcttctttctcaagcccacacttactagggactttataagtaatgatcaaatgaacaatgcttcttactcctagggtggacaactactgcctggaatctctatgttctcctgcaacaccagcacttctggtcagtctaccttcctcctcactggttttccaggcctggaagcctctcatcattgggtttccatccccatcaacctcttctgtgtggtttccatcctgggtaataatatcatcctcttcctgatccacacagatccagccttacatgaacccatgtatatcttcctgtccatgttggcagcctctgatctgggcctctgtgcctctaccttccccactatggtgcgtctcttctggctgggagctcgtgagctgccctttgatctctgtgcagcacagatgttcttcatccataccttcacctatgtggagtccggtgtactgctggccatggccttcgatcgctttattgccatccgggaccctctgcattatgccataatcattacctgctcagtcacagccgaggtgggaactgccattctggtgagggctgttctgctcaacctcccgggacctatcctcctgcagcagctgctctttcccaagatcagcgctctctgtcactgctactgcctgcactgtgaccttgtggggttggcctgctcagacacccagatcaatagcctggttggcctggtttccatcctcttctcactgtgccttgactccttcctcatcatgctttcatatgccctgatcctatgaactgtgctgggcattgcatcacctggggagcggctcaaggcactcaacacgtgtgtctcacacctctgcattgttctcatcttttatttgcccaaacgggctgtctgtcttgcaccgagtaaagaagcatgactaccctgctctggcagtgctcatggccaacctacacttcttggtcccacccttcatgaaccccattg

SEQ ID NO: 1046 - protein, 224 aa, Homo sapiens [sequence omitted]

SEQ ID NO: 1047 - DNA, 1129 bp, Homo sapiens
  source
  (1)..(1129)
  CDS (201)..(929)
taagattagattttgatatcaatttgcattattttttctcggttttttgtttctagttgagtctacctatctatttctccttttaggtttgtgtctaagaattatgtctatatacctggtgttgtaagacctcaatgagttcaataggatagagccaggcatttgagccgatctacttatacctctacagaaaacctcttatgagcttctcatcttttccctcaaatactgggatgtccattctcaatacctctgaaatggaaatctctattttctacttggttgggatcccaggtttggagcatgccaatatttggatctctatccccatatgtctcatgtacactgttgctatcctagggaattgtaccattctgtttttcataaaaacagagccttctttgcatgagcccatgtactattttctctccatgttggctctctctgacctgggactatccctctcctctctccctaccatgttaaggattttcctgttcaatgctccaggaatttcccctgatgcctgtattgctcaagagtttttcatccatggattctcagctatggagtcatctgtacttcttataatgtcctttgatcgctttattgccatctgcaaccccctgagatacacttccatcctcaccagtgccagagtcattcaaattgggcttgctttttctctcaaaaatgttttgttgatcctcccatttcctttcactctaaaacatctaaaatattgtaagaagaacctcctgtcccaatcctactgcctccatcaagatgtcatgaaactggcctgcactgacaacaaggtcaacatcatctatggcttatttgtggctctcacaggcatcctagacttgacatttattttcatgtcctacatgttgatactgaaagcagtgttgagcatagcatcatgaaagaaaaggctcaaggtcctcaatacatgtgtttcccacatctgtgctgtgctcatcttctatgtgcccattatctccctagctgtcatctaccggtttgccaaacacagtttcccaatcactaggatcctcatagctgatgcttttctgctggtgcctccattgatgaaccccattgtatactgtgtgaagagccagca

SEQ ID NO: 1048 - protein, 242 aa, Homo sapiens [sequence omitted]

SEQ ID NO: 1049 - DNA, 1033 bp, Homo sapiens
  source
  (1)..(1033)
  CDS (201)..(833)
ttttatgccattgccctctctgggaacagcgtgatcctgtttgtcatcattacccagcagagtctccatgaacccatgtattatttcctctccatgctatcagccactgatctgggcttgactgtttcttcattgtcaacaacattaggtatcctctggtttgaggcagtgaaatcagtctatacagctgcattgtccagatgttttttcttcatggattcacttttatggaatctggagtgctggtggctacagcctttgaccgttatgtggccatctgtgatcctctgaggtacactaccattctcactaattccagaatcattcaaatgggtcttctgatgattacacgtgctatagtactaatattaccactacttttgctccttaagcctctctatttctgtagaatgaatgccctttctcactcctattgttaccatccagatgtgattcaattagcatgttcagacattcgggcaaatagcatctgtggattaattgatctcatcctgaccactggaatagatacaccatgcattgtcctgtcatatatcttaattattcgctttgtcctcagaattgcctcccctgaagaatggcacaaggtcttcagcacctgtgtctcccacgtgggagcagttgctttcttctacatccacatgctgagcctgtccttggtgtatcgctatggtcggtcagcccccagagtagtccattcagtgatggctaacgtatacctgcttttaccccctgtgctcaaccccatcatctacagtgtaaaaacaaaacaaatccgcaaggctatgctcagtctgctgcttacaaaatgaacagacatagttttatttgatacaaacctggcatgaatgacttgcactgtagaaaagcgaacttgctctcttactgcctattgcatgtgggtttttaaaatatttttcattcaccaaacaaatagtaaatatgttgtacatttggtcataaaatataagtatgatatatcacccaagacatttgtagtggaattaggaaa

SEQ ID NO: 1050 - protein, 210 aa, Homo sapiens [sequence omitted]

SEQ ID NO: 1051 - DNA, 892 bp, Homo sapiens
  source
  (1)..(892)
  CDS (201)..(692)
gaacctgtttaaatattttccattgttttctttacataggaaaatatatgttatgctatttcttgacacctaagattgagctatatttaatttaaccaacaactgaacttaaatatgttcagcaagtacaattaaaaacttttatctattgtgcatctttctttagacccacgagtggataagctagtgacctatctgtgatgtttctgctcaatacctcagaagttgaagtctccacattcctattgattgggataccaggacttgagcatgcacacatttggatctctatccccatctgccttatgtacctcatggccatcctgggcaactgcaccatcctatttgttatcagaacagagcattccctgcaagagcccatgtactatttcctctccatgctggccctgtccgacctgggcctgtctttctcctccctacccacgatgctgagaatcttcttgttcaacaacatggggatttctgctgatacatgcattgcccaggaattcttcatccatggattcacagacatggagtcttcagttctcctaatcatgtcctttgatcacttagtagccatttgcaaccccctaagatatagctctattctcaccagcttcagggttttgcaaattggactggcttttgccattaaaagcattctcctagtgctaccccttttactttaaagagactcagatactgtaataaacaccttttatcccactcctactgccttcaccaggatgtaatgaagctggcctgctctgacaacagggttaacttttactatggtttgttcgttgcactctgcatgatgtcagacagtgtttttattgctatttcctatatgtgttcatcctgaagactgtgttgggtattgcatccc

SEQ ID NO: 1052 - protein, 163 aa, Homo sapiens [sequence omitted]

SEQ ID NO: 1053 - DNA, 1105 bp, Homo sapiens
  source
  (1)..(1105)
  CDS (201)..(905)
aactttttattaccatccactgcttaaattcatccagacccttctcactgagaattcacattttcgattgttctttatgtagtacatttctaatcgtgtgaatttttttggttttcaattctgcagaattttacctgttttcctgctgattggcacacatacagtcataaagatcatggacttatgcattcacaagcaggatgttccttcccaataacacccagtttcacccctcctccttcctgttgctggggatcccagggctagaaacacttcacatctggatcggctttcccttttgtgctgtgtacataattgcactcatagggcgcttcactattctacttgtgatcaagactgacagcagcctataccagcccatgttctacttcctggccatgttggccaccattgacttgggcctttcaacagctaccatccctaagatgcttgggatcttctggtttagcctcagggagattatctgtgatgcctgcctcatccagatgtttttcatccacaactttactggcatggagtcagcagccctcgtgggaatggcttatgaccactttgtggccatctgcaacccgctacgatatagcatcatcctcaccaaaaaggctgtttctgtgattggtcttggtgtgttagtgaggtcatttatgtctgttattccatttgtttttctcattttgcggttgcccttctgtggggatcatgtcattccccacaccaactgtgagcacatgggtcttgctcatctgtcttgttccagtatcaagatcaatataatctatggcttgggtgctatttcaatcctagtattcgacatcatagccattgccctttcttatgtgcaaatacttcacgctgttttccatcttccttcctgtaaagcctgactcaagtccctcagcacatgtggttcacatgtgtgtgtaatccttgccttctatacaccagccctcttttcctttgtgactcatcgctttggccaaaatgtgccccgctatatccatatactcctagccaatctctatgttgtggtgccaccaatgctcaatcctgtcatatatggagtcagaaccaagcagatctatga

SEQ ID NO: 1054 - protein, 234 aa, Homo sapiens [sequence omitted]

SEQ ID NO: 1055 - DNA, 1385 bp, Homo sapiens
  source
  (1)..(1385)
  CDS (201)..(545)
  CDS (715)..(1185)
tagactgttagggaattcatagttcactatatgctgaatcctcagaaaagtgcctcccacagagagggcatttggcaaatgctctagcatcctaagccctagcatcaccctcactcatctaaaatctctgtacaattgctggttgcctctcacaggccccatttgtatcctgcagggacacagccagatggaggcaggagatggggctggatcctgcactgccagctttcagtcagaacttgctgatctctgggtctgggtcctttgtcctgctggggatgccgggactggaggctctgcatgcctggctctctgtgcttgtgtgcctgctctacatggcagctttggtagggaatgcccttctagtggggctggtggtcactgacaaggcactctgggcacccatgtaccagctgctgtggcttctggcagctgctgattttgttctggccacatccacagtgcccaaagctctggctgtactttggggcttgtctagtgagatatcatttggaggctgcttggctcaactctttgttgcccatgtgtcaatcattgccacattgctgagtcctcagtgctgctgtccacggccgtagactgccagcctttgcgctatggggcgttgctggcccagtttgtggtaggtctagtggctctgactaccatgacccgtgatgtctgtgtcatgtacaccctgtgatcctgttcaagaaactgccttactgtggacagtgggccctgccccacacctactgcgaacacatgggtgtggcttgcctggcatgtggagatacgtgccccatcatcaggtatggactggccaccacactgctctccccagccctggacctagggctcataggtgcttcctatgccctcattttccgtgctgtctgccgtctgccatcccatgttgcctgccacaaggctctgggtaactgcgggacctatgctagcatcattggtctcttctacacacctgccctcttctccttccttgctcactgttttgggtgtcacacagtgcccaaccatattcacatcctactggctaacctctacgcagtggtgttcccagctttcaatcctgtggtctatggagtgcagactcagcagagctcagaggctcaggaacttgcttcaacttttctgggcaggagcagtgaagaaggttggccctgagagggcctccccacaggaataaatgtgatccctattttcttcagcgtgcctgcccagatgaccaagtgatgctgcaggacccatctgggtagagctctgactaaagcatctccattgtctgccgtcaggtggccctatgctcactccagccctattttatcacccattatgtaggcagaatatactgaactgacctctct

SEQ ID NO: 1056 - protein, 271 aa, Homo sapiens
MGLDPALPAFSQNLLISGSGSFVLLGMPGLEALHAWLSVLVCLLYMAALVGNALLVGLVVTDKALWAPMYQLLWLLAAADFVLATSTVPKALAVLWGLSSEISFGGCLAQLFVAHKLPYCGQWALPHTYCEHMGVACLACGDTCPIIRYGLATTLLSPALDLGLIGASYALIFRAVCRLPSHVACHKALGNCGTYASIIGLFYTPALFSFLAHCFGCHTVPNHIHILLANLYAVVFPAFNPVVYGVQTQQSSEAQELASTFLGRSSEEGWP

SEQ ID NO: 1057 - DNA, 1060 bp, Homo sapiens
  source
  (1)..(1060)
  CDS (201)..(860)
aatttttagaatatttctcttcaaggctgaatactacacatatttaggtcagtagttaacaaaactgagtaggtaagacttgttaacctgagctcattgagggttaataaatatatgctaattgattatgaccaattgactctctactttctttcacattagacagaaaagtggtgaaagttccttaccataattctggcatgtcagctcccaaccactccactgccaatcatgatatgtttgtcctcattggcgttcctggcctgaaggagctgcacgtgtggatctccatccccttctgtctgatgtacctggtggctgtgtcaggaaatggtctccttgtctgtgtggtggcagtggagcacagtcttcatgaacctatgtaccttttcctctccatgctggcattttgggatctgattctatccacatctgcagtacccaaagccttgagcattttctggtttgatgatgtggacatctcctttggtggctgtgtcactcagctcttttttatgcattttgcctttgtagcggagtcaggcattctcttgaccatggctttcgaccgctatgtggccatctgctacccattgaggtatagcaccatacttagccacagtgttattggcaaaattgggggtgtcgtggtgttcaggagttttgcaactgtcttctccatcgtcttccttgtgaagcgtctgcccttctgccggacaaacatcattgcccacaccttctgtgaacacatggggctggcaaagctaggttgttctgaaatcaccatcaatatttggtatggaatctctgtaccactactcagtgttacgttagatatggtgacaatagtcatctcctaggggctcatagttcaagcagtcttcaggctgccctcccttggtgcttggatgaaagcactcagcacctgtggttcccatggcagtgtcatcctcatgttctgccttccaggaattttcactgtcattgttcagcgctttgcctgaaaatttcccaagtatgtccacatcctgctggccaatctctatgttcttgttccccc

SEQ ID NO: 1058 - protein, 219 aa, Homo sapiens [sequence omitted]

SEQ ID NO: 1059 - DNA, 21188 bp, Homo sapiens
  source
  (1)..(21188)
  CDS (201)..(346)
  CDS (20200)..(20754)
  CDS (20841)..(20988)
ttcctttataattgtggccttgatgttgcaccaagaagccttgttggacacttcacctttgggcccacagtctggcaagatcccttcctccatattccaatgtatttatttttatttttttggcattgactatgttggaaattggctactccaccaacatttctcctccaacactggctaccgtcctttacatggggaagatgcttatctccctccctggctatggaactcagatgctctttgtcatccttttgagaggatctgagtgtgtcttgcttgctgtcatggcttatgataggtatataaccatctgtcatccattcaattacaatctcatcatgagtgggtagctctgtgggcagatgactttgggctctttgaggctgggattcctgttgtcactgtttttgactatgttgatctgacaccctccattctgtggcctaatgaaacctaccacttcttctgtgacatgcccacagcaagtgcctggtctgtgcagacaccacatgcatgagtcagctctctgacttccgtgtggccaccatcaccatccccttccttcctccttgtctgcctcccctatggctgccttgcagccaccatcttgaggatgcattcagctaagagaaagcactaggccttctctaccagttcctcccacctcattgtggttctcctgaagtattggtgttgcatcctcatctgcctttgccccagctctagttactccccagaggagggctgggaggtatctcttgttcacatgtttttctcccggtgtggaatcccttgatctatagcgtatggaaccaagacgtaactgatgcagtagagagacttgtggcaagaatgtccttgttctaacagccagaaatattccttcttaaaaaatatttccctaactaggaggacatgatctaagggacaggaagctcaaagacaaaaaggaagaagtggagcatggggagccagtcataatcccaaaagacacaatccaagtcttaaaatcttgaaagatcaaaatcccaaaaatataattctgaaaaaagaatttaaaaattatttaaaagatatttatttacatttgtaaaaggggatttatttgagaaacataaaagcactgcagagtatgttatagggcactttacacattaaaataggcaataataagatacatatttttgcaagcataagcactcaggtacactaatgacagtcacatgagtatgacagttatgagcagatgctgaaccgtatttacaaagaaatagctcatataactgcagtcatctgaaatactgtagggacaacctaagtcttttgacgagattgatgaaaaactgcagtgggtcaccgctgctcaggcagtcactcaaagagctgatatcttgagaaatgttatctttcacaaaagtagatgcacaaaaaggacatttcttcatttactgaggaagttttaacactttcatgttacgcacaatgcttacacacaaagtcgatgttgcaataatgcacttttgtggggtcaaatttgcaaaaaatgcatacaatgtattagaactctctaaatgtctttacaaaatttatacctccagtattggaaatgatgcaaagataaactacatagcatagtgaattgttaaaaataatgctggcaatttaaaattgtgagaaaaaactaaaaatactaaaaacaaaatacaaaactacctgtaatcccagcactttgggaggccgaggcaggcaggtcacgaggtcaggagttcgaggccagcctggccaacatagcgaaccacgtctctactaaaaattcaaaaattagctgggcgtggtgttgggcacccgtaattccagctacttgggaagctgaggcaggagaatcatttgaacccgggaggcggaggttgcagtgagctgagatcgcaccgttgcactccagctggggtgacagggtgagactccgtctcaaaagaaacaaaataaaacaaaacaaaaaacaaaaacaaaaacaaaacaaaagtttgacatatgaaaatgcatatttcaggggtaaattatgggcaattagacaaaggaagtccataagagctttctgagtttcataatcattaactacattttgaagtcttgcattgcaataagtagctgctttttttttcttttaggacatggctcttcctggagaatatgctcgtattcattttctatgtggtgctgctgtttcagaaattcttctgtgattctatacacatggacatgagcattccctattaaattttttcatcttctgtgccatccatctatattgttttgggcatgtggaaatccatacatttatatgcagaccataaatttggcagaaacaatactggtgatcaaacagcaacaccattgtgtgtcttcttatcttagcttgcacataattatttttgaaccaatcagtaacttcactggcttcttcaggcaaatgcaactttaatttgttaaaagtttctggcatgtcatcagctgaaaggaatgccaatgcaggcaaattatccattctcacactgaagttgttgtccttgtcatatcatgtggccaattcactcatctgaatttttcaccaaatgcattgggatgaattttttaaaaaagctttttattggtaatactttgaaattcatttttaggagtcttgattgcacctaattccaaatctgtcataactagggagactgatggtgtaactctgagtccgaggctgacaggaacctgggagctgctagtgagtcccggagtccaaaggccactggcctggagttctgatgtctaaggcatctgaagaaaagtgtgtcccagatctcagagagagtcagtttgcttctgtttttgtgtgtgtgtgtgtgttttttgaggaagggtcttgctctgtcacccaggctggagtgcagtggtgtgatcttggctcactgcaacctccacctcctggactcaagcaatcctcccatctcagcctcctgcacagctgggactacaggcatgcaccaccatgcctgactaattttttctttttttttttggtagagataggattttttgccatgttgcccaggctggtctcgaactcctgggctcaagcaatttgcccgcctcagcctctcaaagtgctaggattacacgcacgagccaccaaacccagccttctgtatttgtgggctctctaggtccccagcccattggatggtaccagctgacactgagggcagatctcccccacctaatccactcagactcacacattaatctgctctggaaacaccctcacagacacacctaaaataatgctttaacacgtttctaggtatcccttaatccagacaagttgacaccaaaaattgagtccacaagtccacccttgtcaatttggcaccaatattcatctctttaaaccatagttatttccagatagggacaataataaggttattaccttattaccttattctgcctaatgtgaggcaactgtcacatgattgtgattttgaggaatttaaatataagggatttttagtttagaaatattgatctttcaggatttcaacttttaggattatgtatggtgttcgagattgtgatccaaaccccttaatggctgtcttggcctatgaaatgctgatcagcagtaatttctccacctttcattagattccaatgatgaatccctggattgggtcctactgttaccagaaaggggtcccgacccagaacccaagagagggttcttggatcttgtgcaagaaataattcagggcaagtccatagaataaactgaaagcaagtttgttaagaaagtaaaggaataaaagaatggcaactccataggcagagcagcagaatgggctgctcgttggctatttttatggttatttcttgattatatgctaaacaaggagtgaattattcataagttttctgggaaaggggtgggcaattcccagaactgaggattactcccatttttagaccatatagggtaacttcctgacattgccatggcatctgtaaactgtcatggtgctggtattatggcaggccaggtctcactaatgcaggcctccattacaactgtcccagcactgactgagaagctaggttaaatattaaaagctgattgagccagtgcccttatacaaaggctggaatgtaacaaacagcccaccaagagttttgcctaggcttttcctgggccttcaagcatgacaaggtaatgaaggaattcttaacaggacccttttaggattaaccaagttttattgggggtctgacgaaactccccaggcctccacaaacaagtttattggggtctaaaggaactccccaaacctttatgatttagcgggagacatgataagggtaatcaccccagcacctagacccatttagattaagtaaacttactgaggctccagaaaaaggtcttcaggactcagaccttagttatagattaaaagaagttggctgggcatggtggctcatgcctgtaatcccagcactttgggaggccgaggcgggcaggtcacctgaggttgggagtttaagaccaacctgaccaacatggagaaaccctgtctgtactaaaagtacaaaattagctgggcatggtggtgggtgcctgtaatcccagctacttgggaggctgaggaaggagaactgcttgaacccgggagacagaggttgcctcgagccgagattgtgcgattgcactccagcctgggcaacaagagtgaaactccatctaaaaaaaaaaggttaatcacttgtgtctttagaagaatgcacgcttacatgtagacatacagtttagaaggtatataaactctggaagactgtaattttgagttggtctggtgataatttccaggccttctctcttctctggttacagaaatgaaacctgtcttcctgccccgttcatctgcatctcgttattgggccacgagaaatagcagctcgaccctcagtttggtccgggaagagtaggagtgtcctctagcatgctaatgcattataattagtgtataatgagcagtgagaatgaccagaggtcactttcattgcatcgccattttagttttggtgggatttggctggcttctttaccatatgctgttttatcagcaaagtctttgtgacctgtaacttgtgctgacctcctatcacagcctatgtcttagaatgcttaaactcctaggaatgcagcccagtaggtttcagccttattttgcccagcccctattcaagatggagttgctgtgattcaaacgcctctgatactaccacctccacaaactcctcttccaccatagggcttagaataaggactggcacaggaaggtcaatgaataaaagaatgaatgtggccgggcgtggtggctcacgcctgtaatcccagctctttgggaggccgaggcaggcagatcacgaggtcaggagatcaagaccatcctggctaacatggtgaaaccccatctctactaaaaatacaaaaaaattagccaggtgtggtggtgggtgcctgtagtcccagctacttgggaggctgaggcaggagaatggcatgaacccgggaggcagagcttgcagtgagccgagattgcaccactgcactccagcctaggcgacagagtgagactccatctcaaaagaaaaaaaaaagaatgaatgaatgaatggatggatggattggtgggagcaggtggtagagtggatgccatcctgtctgctgttttgagggcctacagccctgaaggcatgcagacccaatggatttacatatccgtatgtctttttgaccctttgtcttttaaggcctgctcaagttccactgcctcaagaaaatctgcctggcaactctatctggtggtgatctttctcttttcattaaatcatacttctttctataaactgagtttcatatattttggtattgcctctataatatgcctataaggccccttgggtcagaagaaatggcttactttttctgtgtattttctggcacagtgctgggcacatagtaagtgcttagccttagggtccagggcacagacttgagctctaatctttcctttatgtaaaaaggggataataataataataatggcagctttcctacctcaaaggactggaatgatagtcaaatgagataatgggtatgcaaaaatataataggaaagtacacaataagccgtgtgtgtgtatatgtgtgtgtgtatctttaaggttcttagtcacttgcaactgaatagctctcgctaagttgtgtaagtctcaccttcctgaaggtcatatcagctcttcccaaagtgagtagtagagtcagctacttcttatggcagtatattggatcctgcaatccttccaggggaatgccaaaaccgcaataggcaatgagcagggttgttacagagattggtggagaggctcaaatggaagattaggagtagggaaagatattttcaagataccttccttaataagataaaagaaaatagtctccattctcttctgctttttttctttttctttcgatatggagtctccctctgtcacccaggctggagtgcagtggtgcaatcttgactcactgcaacctccgcctcctgagttcaagtgattctcctgcctcagcctcctgagtagctgggactacaggcgtgcgccaccatacctggctaattttttttgtatttttagtagagacggggtttcaccatgttggtcaggctggtctcaaactcctgacctcgaatgatccgcctaccatggcatcccaaagtgctaggattacaggtgtgagccaccatgcctggcccctcattatcttctcgatgtggcaaatgcaatgcaatagatgatagaagccactctatcccatatctaatcgtgcaatatacaaaaaagggaaaaaatgaagaaaaccaatatggaaacccagtggcaagaattcttggggtccttggctgggcaacaacattaagaagtgaagggtcatacaagcattttatttattttattttattttttagagtcagggtctcactctctcatccaggctggagggcagtggcataatcatggctcactgcagccttgagctcctggcctaaagtgattctcccacctcagcttcctgagtttttgggattacaaggatcaaccatagtgctgagcacaagtatttttaatagtgctaatgtggagaagatttgataaatattttatctataacaatggcatttgttgaacttaataaattacttctctatttttcatctattctattcccaatctccttccacaaaagatttgaagcagcttaaagatacatctaatccaaaagttaaaaacacatggtcaagaagattggggtaaagaaaaaaatccatcaggatagtaaaaaatacagtagtaagattgctatgcagaaaggcaaagcatgtgctcctctgcggtttagacagtggccagctataggcatctgagcttcccagtagccaagagaaagaataaaacacaattaaatttgagaattttaaagttcatataataacatacaaatatatgaagaaatctaacttttttggcataaccttagatgtaaaagggtcttttcctacagttttcaaaggagaatataccatatattaaaacacatcagcaatgataataacactagctgtcttttattgggcatttaagtatgtatcattgttttaggtgcttagtacatgttaattcatttgagtccacaaaatcttatgaggtaagtacaattatcattcccattttacacataaagaactgaggctcagagagagtaagcaaatttcccaagattacacaggtagtaagtgctggctcagcctcactccagagcctgcgaccttaaccactaattctcaatgtaggctaatggtgtgtcattgacatacaaggcacttcaagcagttctgtaacgggccatcacaaccagtaaaaggatacagctatttgattgtctaacttgattttagggaataaacctaaattatcagagcctgattagccagcgtttcaagaaatgccccacaaacgctgttttactcaaccaggatcttgataggaattggaaacgagaaaatttctgattatagtttctacccaagagctggaacacctatattctgcaataataatgagtaagaagttttacatttagtgtacaagatttggacatgattggttttcatttctttaaaaaatatttttatttcaataagtttttggggaacaggtggtgtttggttacgtgaataagtttgttagtggtgatttctgagattttggcgcacccaccatctaagcgcctacacctacccaatgtgtagtcttttatccctcaccaccccgcaccctttcccctgagtcccaaaagtccaatgcgtcattctcatgcctttgcgccctcatagcttaactctcatatatgagtgagaacatatgatgtttggttttccattcctgaggtacttcacttagaataatagtctgcaattccatccatgttgctgcgaatgccattaattcattcctttttatggctgagtagtattccatggtatatatatataacattttctttatccactcgttcattgatgggcatttgggctggttctatatttttgaaattgcaaactgcgctgctataaacgtgcatgtgcaagtgtcttttcatataataacttattttcctctaggtatctaccagatacctagtagtgggattgctggatgaaacagtagttctacttctagtcctttaaggatctccacactgtttaccataggggttttactagtttacattcccaccaacagtgtaaaagtgttccctttttactgcatccacgccaacatctatttttttttattttttgattatggtcattcttgcaggagtgaggtggtatcgcattgtggttttgatttgcatttccctgatcattagtgatgttgagcatttttccatatgcttgctggccatttgtatatcttcttttgagaattgtgtattcatgcccttagcctactttttgacgggattgtttgtttttttctcactgatttgtttgagttctttgtagattcttgatattagtcctttgttgaatgtatggattatgaagattttctctcactctgtgggttgtctgttaactctgccgattatatcttttttttttttttcagatgaaatctcgctctgtcaccaaggccggagtgtggtgggtcaatcttggccatgttggccaggctggtcttgaactcctgacctcaagtgatttgcccactttggcttcccaaagtgctaggattacaggcatgagacactgcgcctggcctctgctgattatttcttttgtgtgcagaagctttttattttaattaagccccatctctttatctttgtttttgttgcatttgcttttgggttcttggtcataaagtctttgcccaagccaatgtctagaagtgtgtttttctcatgctatcttccagaagctttatggtttcaggtcttaaagtccttaaaccatcttgagttgatttttgtataaggtgacagaggaggatccagtttcattcctccacatgtggcttgccaattatcccagaactatttgttgaatagggtgtcctttccccactttgtgtttttgtttgctttgtcaaacagcagttggctgtaagtatttgggtttatttctgggttctccattctattctgttggtctatgtgcctatttttataccagtaccatgctgttttgctggctatggtcttatagtatagtttgaagttgggtaatgtgacgcctccagatttgttctttttgcttagtcttgctttggctatgtgggctcttttttggttctgtatgaattttaggattgttttttcagttctgtgaagaatgatggtggtattttgatggaaattgcaattaatttatagattgcttttggcagaaggatcactttcacaatattgattctaaccatccatgagcatgggatgtgtttccatttgtttgtgtcatctatgatttctttcagcagtgctttgtagttttccttgtagaggtctttcatgtccttggtcaggtgtattactgagtattatttttgcagctattgtgaaaggggttgagttcttgatttgattctcagctacatcactgttggtatatagcagagctactgacttgtgtatgttaattttgtatcctgaaacattactgaattcatttaccagttctaggagttttttggatgagtctttagggttttctaggtatacaatcatatcatcagcaaacagcaacagtttgacttcctctttaccaatttggatgccctttatttaattctcttgtctgattgctctggctaggacttccagtactatgttgaagagaagtggtgagagtgggcatccatgtctttttccagttctcagggagaatgctttcaccttttcaccattcagtataatgttagctgtgggtttgtcttagatggcttttattactttaaggtatatcccttctatgccaatttcttttaatcataaagggatgctggattttgtcaaatgctctttctgcatctattgagatgatcctgtgattttttattttaattctgcttatgtggtgtatcacatttattgatttacatatgttaaaccatccctgcctccctggtatgaaacccacttgatcatggtgaattatctttttgatacactgttggattcggttcactagtattttgttgaggatatgttcatgagacctatgttcatcagagatattggtctgtagttttctttttttgctatgtcctttcctggttttggtattagggtgacactggattcatagaatgatttaggaggatttcctctttctgtatcttttggaatagtgtcaataggattggtacctattcttctttgaatgtctgatagaattcagctgtgaatctgtctggtcctagactttttcttgtcagcaattttttggttaccatttcaatctcactgcttgttattggtctgttcagagattctatatcttcctggtttaatctgggagggttgtatatatctaggagtttattcatttcctctaggttttctagttaatacatttcaaggtattcatagaagccttgaataatcttttgtatttctgtggtatcagttgtactatctcctgttttgttcctaactgggcttatttggatcttctgtcttctttgttaatctcgctaatggtctatcaattttattttaatttgttgagacagagtcttgctctgtcattcaggctgccgtgcagtggtgcaatcttggctcactgcaacctctgcttcctgggttcaagtgattctcctacctcagcctcccgagtggctggaactgcaggcccatgccaccacacctgtctaattttttgtctttttagtagcgatgaggttttgccatgttggccaagctgatctcgatttcttgacctcaggtgatccgcccacttcagtctcccaaaatgctgggattacaggcatgagccatcacccctagcctatcaattttacttatttttttcaaagaaccagctttttgtttcatttatcttttgtatttcttgtttgtttgtttcaatttcatttagttctgttctgatcttcgttatttcttttcttctgctgggtttgggtttggattgttcttgtttctccagttctgtgaggtgtgaccttagattgtctatttgtgcttcttcagactttttgatgtaggcatttaatgctctgaactttcatcttagcaccacttttgctgtatcccagaggttttgataggttgtgtcactattatcattcagttcaaagaatttttaaattcccatcttgatttcattgttgccccaacgatcattcaggagcaggttatttaatttccatgtatttgcatgtttaagggttccttaaacatgcaaatacatggttgatttccaattttattccactgagagagtacttgatgtaatttcgatttactgagaattgttttgtggcctatcatatggcctatcctggagaatgttccatgcgctgatgaatagaatgtatattttggagttgttgggtagaatgttctataaatatctgttacatctatttgctgtaaggtatagtttaggtcccttgtttctctgttgactttctgtcttgttgacctggctagtgctgtcagtggagtattaatgtctcccactattattgtgttgacgtctatctcatttcttaggtccagtagtaactgttttataaatttgggagctccaatgtgttagatgcgtatatatttagaattgtgtattttcctgttggacagtccttttgtcattatataatgtccctctttgtctcttttaactgctgttgctttaaagtttgtttagtctgatataagaagagctactcctggccgggtgtggtggctcacacctgtaatcccagcactttgggaggctgaggtgggcagatcacctgaggtcaggtgtttgagaccatcctggccaacatggtgaaaccctgtctctactaaaaatacaaaaattagtcgggtatggcagtcctcccaccttggcctcccaaagtgctgggattacaggcatgagccaccatgcccagccaactttctttttttaaactaaagatgtcaggcaggccatagctcagctttaggtggcccccctctgacactcacggtctctttttgctgattacccacaatagtggaggaagatccacatataaagtcaaaagtctaggttaaaatcccacatcagccactgatgaactgtgcaagcttggaaaaatcatttcacctctgtgaattgtggttttgccatctgcagagctgaatgttaaccatagcccaagatactaagtattataggattgaaatgaaatataaatgaaactttgtaaatgttaaattataacacaaatcatatggtcagtgtcgatgtcctaattgttcctaactcctcatcacactctcctacttcttcattgtggctgccatcctgatatccgctctgcagaggggaggcacaaggcttttcccacctgctccttccacctggtttaattctcctccagcacaatgaacaagcctcacctatttgtgccccagctccatcttctcttatgagaggggcaaggtagtgtctacggtttacacatgcatcactcctgtgccaaaccccttgatctgcagcatgaggaagaaggaactcaagcatgctcttaaaaaaaaagaagaaattgcaaggttcttgctgctcagaacacattgactctttctggatattgttgatcaagaagctatttctacctggaaaagaaaactgaatgaaccatacagaagttaagggaaaaaagacacctaagtgtcaggaattgttgtaaattctattgactctccttttgttgctgtatcccttttctggctgtgaagacacaatgtcttttttcatctctaaaatcagcctgcttgtgaggcctgttgaaagtaccatcaagtgagaccgtggacctaatagtcctatataaattgctaagtctgatctcagatgacttggggtcttgattctgttgcttcctacaaacaaaatccatttctcttttctttctgaaatgcatttacattatttaggtgactattagctaagaaggcaagtgtgtcaagttccagtagccacaagatatcagaattctcaaatgctgctgaaaaggagttaccgtaagaggtgtatcatcttctcttctagaacagaataaatcagcatttcttaaaatgctggcttactttcaggtgcctactttcctcaaatgactggtaaaaaaaaattccatggctaagaggagaaaagtgcatactaacactgctttcctcttgaagactcacatgcacttcatctggggcatcctagagtgaaacaatctttgtagggttggagcttcccaaaacatttgatcatgagaactctttctttaaccacctatgaatttagccgaatgaagacaatcttctgggaatacttttagagaaatggttatgtaaataaccaacagcaaagacttaaggaaatggtactaggtggaatggtcctttagtgctgaatgaagtaagtctactgtaacagaatccaggctgtagacatcaactcataagcaaactgtttttttttttttgagacaggatcttgccctgtcactcaggctgcagtgcagtggcatgatcatggcttactgcagtctttaactcctgggctcaagcgatccttccatttcagccccctgagtagctgggactacaggtgcatgtcaccagacttgactaattttttttttttttttgtagagatggggtcttactatgtgacccaggctggtctctaactcctggatgcaagcagtcctcctacctctcttcccaaagtgttgggcacctggcccatgagcaaactgaaaatgcaaattgttaggctcatgtccatctttgcattactgaacacaattcctttagatatattttaaggtttgattgttacccaggtaagtttcacctagaaaccaaaaaatttcaagaagaaaacactaaaaatacaatgatttactaattttttgaagtgaaattcactcctcactcttagcttttagcagtggctcatacctgtaatttgaagcaatccaggagtctgaggcaggaagattgcttgagcccaggagttcgagatcagcctgggcaatatagtaagaccttatctctaaaataagtagataaatagataaataaatagaaataaaaataaataaaaagatctttaggggcatagaacatttactggagtgtaaatgcttactattcttagagaggggagatgtaggtgtttgttgaggcctcatttaccaatagcaagcttggctgggcccccattcaagccatagagacacagcccatacttgccaactgtgtccactggggttagtggttgcatttgggagactcaggttgaaatgatggggtcagctagaggctctcagtaaatcaatggggaatgtgggagaaaatgatccattgatcatagtaatagcctcatagtcgcctgggatcccatcactttctcttccaaactccctggagtctgattctagaagatgggccagaaaatggctaagggctggtgccacttgcaaaggagtcaatagacttttctccctgaagcttttttaaaaaatgagttttcatttgtacattgaattcagcaaatagggaaccattaaaggcacattaaattcagcaaataggctgggtgcggtggctcaggcctgtaatcccagcactttgggaggctgaggcaggcagatcacctgacgtcaggagttcgagaccagcctgccaacatagtgaaactccgtgtctactaaaaatacaaaaattagccaggtgatatggcagttgcctgtaatcccagctactcaggagtttgaggcaggagaatcccttgaacccgggaggtggaggttgccgtgagccaagattgcgccactgaactccagcctgggtaacagagtgagactccatctcaaaaaaaaaaaaaaaaaattcagcaaatagagaaccatacttagaggcatagataatggagaaaaagacaggcaaaagaaaaggaaagagaagggataatgaaatgtagaacttaaagaagaaagagaaggttaaaaatattttgtgtggttggaattaataaagtactgtcaagtagtgccttcgcacagaaaaacaaatatcacactttctcactcatatgtaggagctaaaaaaagtggatctcatggaggtagacaatagaatggtggttgccagagactgagaatggaagcagggagggaggatgaagagaagttcgtgaagacgtgcaaaaatacagttagataggtggaataagttctagtgttcaatagtagagtggggaaattacagtaacaataattgatcgtatatttcaaagtagctagaagagaagaattgtaatgttcccaacacaaagataaatatttgaggtgatggatattccaattaccccgtttgatcattacacatgtatacagctatcaaaatatcacatgtaccccccaaatatgtataaccattatataaaaatttgttttaaatattgctttctgtgttatgcagagactgtttttctggctttagcagaaagagtgtagactccaaataaattgaactgtggctgggcttggtggctcacgcctgtaatcctagcactttgggaggcagaggtggtggatcacctgaggtcagggattcaagaccagctggccaacatggtgaaaccccgtctctactaaaaatacaaaaattagcctggcgtggtggcagcaggcgcctgtaatcccagctacttgggaggctgaggcaggggaattgcttgaaccttgggggcagcagaggttgcagtgagccgagatcacaccactgcactccagcctgggcaacagagtgagactccgtctcaaataaaataaaataaaaaataaaaaataaataaaaataaataaataaattgaattgcaactcaaacatggcagctgctccaccacgtgcatcctgaagcactgggcagtagaacaaaaccttgaaacacaacccatccgaaagcttattcatggtctgtagcctgtaggccagcagcttgcaattactgctctaatgcaataaaatggttttgtttgagtggacacttgaccacttgtatgtccttaaaatatatcccagcccaggattcacatacactcttaaatgggtggtgactgtttcttaaggaaaggtcttgtattttttttcaagactgctttgaaaaattcctgccaaattttctctctctctctctctctctctctctctcacacacacacacacacacacacacacacacagacacacacacaccctgtaagtccttcttttcaacaatgattccagagttttcagagctattggtataggaagtgaaagttttaggttctacatgaataaggatttaaacatcttttgtgtttatttataagtgagggataaatatatataaatagtacaatacacattgttatgtaacaaaaagtgagtgagttgaatttaagaaaaatgttaagtaaataatatcaataactgagataaaatataagtcatgaaggttgttcatgaataatgcaagtttggaaattttattttttccttttttttttttttaagagatagggtctcactctgtcacccatgctggagtgcagtggtgtcatcacagctcactgcagcctcaaactcctgggctcagaggatcctcttgtctcagtcttccatgttgctgggactacaggtgtgcaccaccacaatgggctaattaaaaataaatttttcttttttttttttttgtagagataaggtcttgctatgttgcccaggctggtctcaaactcctgggctcaagtgatctttctgccgcagcctcccagattgctgacattgcatttgtgagccaccacccctgacctattttctatattttatacaatcttgaccaggtatcaatatcagcagtttgcataaaacgcttcatttataaaaagtgtgtatggtcttgaacaacattagatgaatgaatgaaggaatgtccaatgacataatgttctgcaatcaatgaatgctaaacatgtgctatatgcttagcaccacatgagaaaatgcaatgcaatatctagctgaataagttactctctttgaggacctatcctggtagaggtggagcaacaagtcctatgatatcgcagagtgataactgctgtaattggggtgggcacaaagccagtacagagcatgaaacatggaataatttttccttcttggaggagggtgggggaaagtatatatcagaattaagcttcatttgacaggagacacttggctgaaatttgaagattctgagaatttgtctaggtgcacaaaattagcctctgccttgatgaattaaagctggctatcttgccaaacttatcttaaatgtggagaataaaaacttaagcaatgattaaaatagagctagctaagtctagcctgggcacagtggctcacgcctttaatcccagcactttgggaggccgaggtgggtggatcacctgaggtcaggagttcgagaccagcctgaccaatatggtgaaaccccgtctctattaaaaatacaaaagttagctgggcgtggtggtgtgtgcctgtagtcccagctacttgggaggctgagacaggagaattgcttgaacccgggaggtggaggttgcagtgagctgagatcgcaccactgcactccagcctgggcaacagagcgatactctgtctcaaatatatatatatatatgtccagtaacaattaaaccagtttagactatcttgtctttaagcaattcctgtttgtgttcaaactttaaccctactggggatggtcaagttgaaagctaagttatcctcttggggctttactgaaccaaattaggcagggaattctccagaaatgatatgagaaggagagagagttgagaaagaacctacaatgaaagccccaccgccttctcttttgaagcagcagcaggaaaggactaacagaatctaaatgtgtgcttccctcggtgaaaggcggtttatcgagatttgactccatggttcccaagatagtaaaggagaagattctacctcgggctctactcagtttctggtaaggatgtgatcatcagcctctctgggcaggagacaaggaagggtaaagggaagactgggctgattgggctgttatgtggtctaaaccctggggaatggaccagtgaaccctatgggctttgggatttcctaaccctgtgagggacttcctggtgtggagttacaaatgaattgaaacatttacagtagtttaaccgcctggagctaatgaagtgacattatatgctaatgatactaacaacaagtaagtcttcaaaacagacattatgagtggcatcaataaatggtgaactagggggtcccaggcctcactccccccacagaaaggtcaactagcaactatccacagacaaaaacactttggtaaaaaccccaaaatatgggacccaggtggtctagctgtgaagtttctccctatatcccctgtttcccaagaggtgggaaaagggaaccaaggaggcaacattcagcctccctagcacatcctgagacatttcccagcaagctcacttcatagtattaatgattattgctaacatttatgaagagctgactgggagccagatacacttattctcacaacaagttttttgagctgcgtcctaccgttatatttatagataaagaagttgcagcagaaatcttcaacaggttatccgaggtcatactcttggtcaatcagcccaggaattagaacctagactagaggctgtactcttgacaaccaggcaagagatagaagtagagggctttgtggtctgggaatggtatagtgtgttttaaatttcagtgctgactcaaagaggtatttgtgcaccaatgttcctagcagcattattcaaaatagctaaaaagtggaaatagttcagtgtccatgagcagaagaatgggtaaacaaaaggtagcatatacatacaatggagtattattcagcctttaaaagaatgcagttttgtttgtttgtttgtttgtttgttttttaaaggcagggtctcactttgtcacccaggctggaatgcaatggctcaatctcggctcactgcaactccacctcctgggttcaagcaattctcccgcctcagcctccctagaagctgggattacaggggcatgccaccacacccatctaatttttgtattcttagtagagatggggtttcaccatgttgaccaggctggtcttgaactcctgacctcaggtgatccacccgcctctgcctcccaaaatgctgggattacaggcatgagctaccgtgcccagcctccatgtacttcttcctgacaaactttgcaggtctggagatcttctactttttcaccattgcccctctgactctggccaatgtcctacccatggggagaaacctcatttccctgcccggctgtggaggccagatgttcttcttcatcttcctgggaagggctgactgcatcctgctggccgtcatggcctttgactggtttgtggccatctgttgtcctctctgttacggcctcatcatgagctggaggttgtgtgtccagctgaccctggggtctctgctgttggggttcttcttagccatgcagctgaccgtgcttatcttccaactccctttatgcagcagcaaagaaatcagcacgttctactgtgatgtcctccctgtcatgagactggcctgtgcagatacctgggtccatgaggccactatgtctatggtcagcaccacctttctcaccgtccccttcctgctcatcactctttcctatgtctccatcatggccgccatcttgaagatttgctctgcagaggggaggcacaaggccttctccacctttcctcccacctgactgtggttctcctccaggactgatgtacacgcctcgccttcttgtgtcccagctctagctactatcctgagaggggccaggcagtgtctgtggtttacaccttcattacccctgtgctgaaccctttgatctacagcatgaggaacacagaacttaaggatgctttgaagagagcaatgacgagggtcccgctgctctaaacacatgccactcttcaatactgctgggcagagacacatggcatactgccagaaagataaggagaaggggcacaacagttgattgtgttttatactgttagttcttagttatattatttttgaaaagtcattttccatttcccagcctcaggttcttcacctccaaaatagagattaaactacctgcaggatctaaattc

SEQ ID NO: 1060 - protein, 282 aa, Homo sapiens
MLISLPGYGTQMLFVILLRGSECVLLAVMAYDRYITICHPFNYNLIMSGHELPCPASMYFFLTNFAGLEIFYFFTIAPLTLANVLPMGRNLISLPGCGGQMFFFIFLGRADCILLAVMAFDWFVAICCPLCYGLIMSWRLCVQLTLGSLLLGFFLAMQLTVLIFQLPLCSSKEISTFYCDVLPVMRLACADTWVHEATMSMVSTTFLTVPFLLITLSYVSIMAAILKICSAEGSSSYYPERGQAVSVVYTFITPVLNPLIYSMRNTELKDALKRAMTRVPLL

SEQ ID NO: 1061 - DNA, 1317 bp, Homo sapiens
  source
  (1)..(1317)
  CDS (201)..(979)
  CDS (1054)..(1117)
ttcttctactttataataggattgggagtatatcatacatttttccatttctcatctatatctcctatcagtatctcatcaattttctggatgagaaagtgttagcaaatattttgacaactttgttttccattgacctaattcatgtgtcttatcatacaaaaatccaggtgaaattttctcaactgagaatttatttcatgacattacccagcgatgactccactgtcccagtctctgaattcctcctcatctgcttccccaactttcagagttggcagcacttgctgtccctgcccctcagcctcatttcctcctggccatggggaccaacacccaccccccccatcaccatccacctggaggcctctctgcacctgcccctgtactacctgcccagcctcctctccctgctggacatcgtgctctgcctcaccgtcatccccaaggtcctggccatcttctggtttgatcttaggtcgatcggcttccctgcctgcttccttcagatgttcatcatgaacagtttcctccccatggagtcctgcacattcatggtcaaggactatgatcattatgtggccatctgccacccactgcagtacctgtccatcatcactcatcaatttgtggccaaagctagtgtcttcattgtggtgcagaatgctttgctgctttcacctgttcctattctctctgcccagctccattactgtaggaaaaatgtgattgagaactgcatctgtgccaacctgtctgtgtccaggctctcctgtgataatttcacccttaacagactctaccaatttgtggctggttggaccttcctgggctcggatttcatcctcatcttcctctcctacaccttcattctaagagctgtgcttagattcaaggtggagggggtggcagtgaaggccctgagcacatgtggctcccactttatcctcatcctcttcttcagcacctgctggttgtggtgttgacaaatgtggccagaaagaaggtccccatggacatcctgatcctgtttaatgtccttcatccctttagtcctcctgcattaaaccctatcatatgtggatttcaaactaaagagttaaagaaggaattttagaagttgctgcagaggggcctttgaaaacacggaagggactctccatagaagcacctattactgtttctatttcagaagctgtgattccagaaaataaactaatgcttaaatactgagtatttcctacccatttctctctctccagtatcaggaattagtgagggctccttagtacctgacataaattcatttgcctagct

SEQ ID NO: 1062 - protein, 280 aa, Homo sapiens
MTLPSDDSTVPVSEFLLICFPNFQSWQHLLSLPLSLISSWPWGPTPTPPITIHLEASLHLPLYYLPSLLSLLDIVLCLTVIPKVLAIFWFDLRSIGFPACFLQMFIMNSFLPMESCTFMVKDYDHYVAICHPLQYLSIITHQFVAKASVFIVVQNALLLSPVPILSAQLHYCRKNVIENCICANLSVSRLSCDNFTLNRLYQFVAGWTFLGSDFILIFLSYTFILRAVLRFKVEGVAVKALSTCGSHFILILFFSTCWLCPPALNPIICGFQTKELKKEF

SEQ ID NO: 1063 - DNA, 856 bp, Homo sapiens
  source
  (1)..(856)
  CDS (201)..(656)
tgtgcctggtcacggtgctggggaacctgctcatcatcctggccgtcagccctgactcccacctccacacccccatgtacctcttcctctccaacctgtccttgcctgacatcggtttcacctccagcatggtccccaagatgattgtggacatctaatctcacagcagactcatctcctaggcaggctgcctgactcccatgtctctctttgccatttttggaggcatggaagagagacatgctcctgagtgtgatccctatgacccgtttgtagccatctgtcaccctctatatcattcagccatcatgaacccgtgtttctgtggctttctagttttgttgtcttttttttctcagtctcttttagacgcccaggtgcacaacttgattgccttacaaatgacctgcttcaaggatgtggaaattcctaatttcttctgggaaccttctcaactcccccatcttgcatgttgcgacaccttcaccaataacataatcatgtattcccctgctgccatatttggttttcttcccatctcggggacccttttctcttactataagattgtttcctccattctgagggtttcatcatcaggtgggaagtataaggcctgctccacctgtgggtctcacctgtcagttgtttgctgattttatggaacaggcttttgggggtacctcagttcagatgtgtcatcttccccgggaaaggctgcagtggcctcagtgatgtacacggtggtcacccccatgccgaaccccttcatctacagcctgagaaacagggatattaaaagcgtcctgcggcggccgcacggcagcacagtctaatgtcaatatctccttatctg

SEQ ID NO: 1064 - protein, 151 aa, Homo sapiens
MSLFAIFGGMEERHAPECDPYDPFVAICHPLYHSAIMNPCFCGFLVLLSFFSQSLLDAQVHNLIALQMTCFKDVEIPNFFWEPSQLPHLACCDTFTNNIIMYSPAAIFGFLPISGTLFSYYKIVSSILRVSSSGGKYKACSTCGSHLSVVC

SEQ ID NO: 1065 - DNA, 874 bp, Homo sapiens
  source
  (1)..(874)
  CDS (201)..(674)
ccaggagattcagctctccctctggagataaagagtgaggatccattattaatgttttctacacctgttcctacagatcacacccagcaagttaatggctgtggaaaatgactcttcagtgacaagagtttattcttttgggattaacagaccagcctgagatctaattgcccctgtttttcctgttcttggtgaactatatgaccaccatggtgggcaacttgagtttaattaatctaatttgcctgaattcacaccttcacactcccatgtattttttccttttcaatctgtccttcattgatctctgttattcatttgtctttacccccaaaatgctgatgagctttatttcagagaggaacatcatctcctttccaggatgcataactcagctctttttcttctgcttttttgtccactctgagtgctatgtgctgacagccatggcctatgatcgctatgtggccatctgcaaaccccttctgtacatggtcaccacgtcccctcagatctgttctctactgatgcttggttcatatgtgatggggtttgctggggccatggtccacacagagtgtatgatgaagctcatcttttgtgactccaacgtcatcaaccattacatgtgtgacatcttcccactgctccagctctcctgcagcagcacctaggccaatgagctggtgatgtctgttattgtaggcacagttgttatagtatcaagcctcattatcttaatctcttatgctttgattcttttcaatatccttcacatgtcctcagccgagggttggttcaaagccatcggtacctgtggctcccacataataactgttggcctattctatgaatttgggctgatcactcatgt

SEQ ID NO: 1066 - protein, 157 aa, Homo sapiens [sequence omitted]

SEQ ID NO: 1067 - DNA, 886 bp, Homo sapiens
  source
  (1)..(886)
  CDS (201)..(686)
tgtgcaggtaacccagacagggatgagtgtaacgccacacagcgtttagaacagtgcctatcccatagttagtgctcagtaaatgtttcttttcttctccctcccactaccttaatttccattaacctcccggtgtgtgtagcctttctctctttctgagtgactctttctttttctctcacagacagtcctagaggagaatgcctgccaagaactcctcctccgtgacagcgtttatcctctcaggcttaaccgaccagccgggactccagatccccgccttcttcctgtttctaggtttctacgcggtcacggtggtggggaacctgggcttgataatcctgatagggctcaactctcgcctgcatatccccatgtactttttccccttcaacttgtccttcatagattttagttattccactaccctcgcccctaaaatgctgatgagctttgtctcagagaacatcatttcctatgcagggtgtatgactcagctttttttcttctgtttctttgtcttttctgaatcctatattctatcagcgatggcgtatgaccgctacgtgggcatctgtaacccactgttgtacacggtcaccatgtctccccagatgtgtttgctccttttactgggtgtctatgggatggggattttggggctgtggctcatatgggaaacataatgtttatgtccttttgtggagacaaccttgtcaatcactatatgtgtgacatccttcctctccttgagctctcctgcaacagctcttacataaatttgctggtggtttttattattgtgaccgttggcattggggtgccgattgtcaccatttttctctcttatggttttattctttccagcattctccacattagttcc

SEQ ID NO: 1068 - protein, 161 aa, Homo sapiens [sequence omitted]

SEQ ID NO: 1069 - DNA, 931 bp, Homo sapiens
  source
  (1)..(931)
  CDS (201)..(731)
tagattttagtttctctacgaccatcattcccaaaatgctgatgagttttgtctcaaggaagaacattatttccttcacagggtgtatgagtcagttcttcttcttctgtttctttgtcttttctgagtccttcatcctgtcggcgatggtgtaggaccgctacgtgggcatctgtaacccactgttgtacacgatcaccatgtctccccaggtgtgtttgctccttttactgggtgtctacgggatgggggtttttggggctgtggctcatacaggaaatatagtgtttctcaccttttgtgcagacaaccttgtcaatcactacatgtgtgacatccttccccttcttgagctctcctgcaacggctcttacataaatgtcctggtcatctttattgttgtgaccgttggcattggggtgcccattgttgccgtttttatctcttatggttttattctttccagcattctccgcgttagttctgctgagggcaggtctaaagccttcagtagctgcagctcctacataattgcagtttctcttttctttgggtcaggagcttttacgtacctcaaacccccttccattttacccctggaccaggggaaagtgtcctccctgttctataccactgtggtgcccatgtttaacccattaatctacagcctgaggaataaggatgtcaaacttgccctgaagagaaccttttccagaataagcttttcttgaaaaaaattttagaaacagaaaagagatactaggatttttttaaaatcagattgcttttgcgatgatttttttttcagtgaggaatctaagcttccagtgctttccatcctatatatagagaaaattttaactctcttttctgagtggatttattcttccccaccctcacctccatctcttccttgatttataaagaagtt

SEQ ID NO: 1070 - protein, 176 aa, Homo sapiens [sequence omitted]

SEQ ID NO: 1071 - DNA, 925 bp, Homo sapiens
  source
  (1)..(925)
  CDS (201)..(725)
gacatggtttcacctccaccatggtccccaagatgattgtggacatccaatctcacagcagtcatctcctatgcgggctgcctgactcagatgtctctttttgccatttttggaggcatggaagaaagacatgctcctgagtgtgatggccctatgaccggtttgtagccatctgtcaccctctatattattcagccatcatgaacccatgtttctgtggctttctagttctgttgtcttgttgtctcagtcttttagactcccagctgcacaatttgattgccttgcaaattacctgcttcaaggatgtggaaattcctaatttcttctgtgacccttctcaactcccccaccatgcgtgttgtgacaccttcaccaataacatagtcatgtatttccctgctgccatatttggttttcttcccacctcggggatccttttctcttactataaaattgtttcctccattctgagggtttcatcatcaggtgggaactataaagccctctctgcctgtgggtctcacctgtcagttgtttgcttattttatggaacaggcgttggagggtacctcagttcagatgtgtcatcttcccccagaaagggtgcagtggcctcagtgatgtacacggtggtcacccccatgctgaaccccttcatctacagcctgagaaacagggatattaaaagtgtcctgcggcgcctgcacggcagaacagtctaatctcaatatcttattatctgttccattccttttgtagtgtgggtttaaaaaggcagcaaggtctggccgggcgcggtggctcatgcctgtaatcccagcactttgggaggctgaggcaggtggatcacctgaggtcgggagttcaagaccagcctgaccagtatggagaaacctcgtctctactaaaaatacaaaattag

SEQ ID NO: 1072 - protein, 174 aa, Homo sapiens
MNPCFCGFLVLLSCCLSLLDSQLHNLIALQITCFKDVEIPNFFCDPSQLPHHACCDTFTNNIVMYFPAAIFGFLPTSGILFSYYKIVSSILRVSSSGGNYKALSACGSHLSVVCLFYGTGVGGYLSSDVSSSPRKGAVASVMYTVVTPMLNPFIYSLRNRDIKSVLRRLHGRTV

SEQ ID NO: 1073 - DNA, 1009 bp, Homo sapiens
  source
  (1)..(1009)
  CDS (201)..(809)
tagtgcatgattgaataaaataatttatttaatttatttaattacagtaatgtatccacttggacccaattttatcaccacctgtgcatttgctgacaaggatttcatcttgcttttccaagaaacgaacatgaggatataattggataaacttaattttcacaggctgttgcatttagtacatataaacaatagctaaaatgtcagggttgccttcagatatggatctatacaagcttcaattaaacaattttactgaagtcaccatgtttatattaataagcttcacagaagaatttgatgtgcaagtcttcctatttttattatttttagcaatctatctattcactctaataggcaatttagggctggttgtaccgatcattggggatttctggcttcacagcccaatgtactattttcttggtgttttatcattcttggatgtctgctattctacagttgtcactccaaaaatgttggtcaatttcctggcaaaaaataaatctatttcatttcttggatgtgcaacacagatgtttcttgcttgtacttttggaaccacagaatgctttctcttggctgcaatggcttatgatcgctatgtagccatctacaaccctctcctgtattcagtgagcatgtcacccagagtctatgtgccactcatcactgcttcctatgttgctagcattttacatgctactatacatacagtggctacatttagcctgtccttctgtggatccaatgaaattaggcatgtcttttgtaataatgcctcctctgcttgctatttcttgttctgacactcacgtaatccagcttctattcttctactttgtgggctctattgagatagtcactatcctgattgtcctgatctcctatggttttattctgttggccattctgaagatgcagtctgctgaagggaggagaaaagtcttctctacatgtggagctcacctaactggagtgacaatttatcatgggacaatcctcttca

SEQ ID NO: 1074 - protein, 202 aa, Homo sapiens
MSGLPSDMDLYKLQLNNFTEVTMFILISFTEEFDVQVFLFLLFLAIYLFTLIGNLGLVVPIIGDFWLHSPMYYFLGVLSFLDVCYSTVVTPKMLVNFLAKNKSISFLGCATQMFLACTFGTTECFLLAAMAYDRYVAIYNPLLYSVSMSPRVYVPLITASYVASILHATIHTVATFSLSFCGSNEIRHVFCNNASSACYFLF

SEQ ID NO: 1075 - DNA, 1024 bp, Homo sapiens; identical to SEQ ID NO: 959
  source
  (1)..(1024)
  CDS (201)..(824)

SEQ ID NO: 1076 - protein, 207 aa, Homo sapiens; identical to SEQ ID NO: 960

SEQ ID NO: 1077 - DNA, 955 bp, Homo sapiens
  source
  (1)..(955)
  CDS (201)..(755)
cccatctccaaaatcctcattcctgtgatgacctttctatactttacaggcctgagctttctgagtgccatgagcaccgagcgctgcctgtgcgtcctgtggcccatctggtaccgctgcctcctccccccacacacctgtcagcggtcgtgtgtgtcttgctttgggccctgtccctactgcggagcatcctggagtgaatgttctgtgacttcctgtttagtgatgctgattctatttggtgtcaaccatcagatttcatcacagtcgtgtggctgatttttttatgtgtggttctctgtgggtccagcctggtcctgctgattaggattctctgtggatcctggaagatgcctctgaccgggctgtacgtgacgatcctgctcacagtgctagtcttcctactccgcagcctgcccttcggcattcggtgggctctgtctactgggatccacctggatttggaagtcattttctgtcatgtccatctagtttccattttcctgtcccctctaaacggtagtgccaaccccgtcatttacttcttcgtgggctcctttaggcagcgtcaaaataggcagaacctgaagctggttctccagagggctctgcaggacatgcctgaggtgaaggtggagggcggcttcctgagggaaccctggagctgtcgggaagcagattcgggcagtgaggaagaacctctgccctgtcagtcagacgggactttgagagcaatactgccctgccacgcttgacaattacatgcgttttcttagtgttgtgcctcagaaatgtctcagcggtaactcaaggtcgtcgaatagatgtttatctatactgacagttccagttttcatccacagaaagcattagtctgacagtacaatgtttagattctccttgatattaccaacacatttttcctgttatcttacactgaaaactttttctgcaa

SEQ ID NO: 1078 - protein, 184 aa, Homo sapiens [sequence omitted]

SEQ ID NO: 1079 - DNA, 2214 bp, Homo sapiens
  source
  (1)..(2214)
  CDS (201)..(243)
  CDS (1112)..(1254)
  CDS (1385)..(2014)
tttcccaaaccaaaatgaagatcatcattgcatcctaatgatattatcatagcaagcactcaaaagattgtgtgagtgaagtttgaagcttcaaaacacctacatcgtgctcactggtttttatgcattatttcacttaactcttataataattaattttgttagatcccaccaccggcttcatcttacagatagataaaatgaggttcaaagaagttatgttagtgtcaacgtcttccagtagtaaatagtagggctgttacttcaatgtatatacccctcttctgagagcccaaactctaacactcaatgccataccttctcattagaattgcttttgttggttgcatatgtctctactactgttgagctattatcccaccacacctaatttacatatattacttcactagacaccctaagcatgggctaatagacacaataagtaaatgtgaattgagttcaaataaattcaatttaatttcagttaagagcataggtcttgagaatcactctgcccaggttcaaaacttgctctgtcagttgatactcatgtaaatttgcacaaaatactcaatcttttaaccagcttattaacaagattgaacatactaagcatgtggtgtgtgtgtgtgtgtgtgtatgcttggaatgagtgctataaatgttaactatttacacactcaggtgatgtgatttgggagatgcatttgttgcaaatatgtgatctttgagaaatcatagcctttttctgcaccactacacctctgtttgttcatgtacaaaagtagaaatttgtgcatgtggtgagaggatacttcatttcaacagtctgtgaccacataaataatttatcagccaaatgtttcgttttgctcaaattaatgctttagaataaaaaatcatgaagaaaaaattatggccttaatgaaatgatgaaataacagaatatatgtgtatgtgtgtgtgcatgctcatgaacacaaactttttacattataagtgcaatgtcttatatatttaccaactcttcctttttttcatattacaatagagatttttttaattcacatgtaaaataactcaaagtttactgatttcatcctggtaggtctaaccaatgccacagaacttcagatccccctctttatcttgttcatcctcatccacctcctcattctgactaggaacctggagatcatactgttgatcctgctggactcttgtctccaattcccatgtactttttcctcagtaacctgtctctgcttggatacttaactgtcactcccagggtcacggctagcagggctaggttacttagagggtaggaggctaagttcctcgtacaatgcttgtgctgctcagatgttcttttttgtagccttggccacagtggaaaatatcgctgttgacatcaatggcctatgaccactatatagcagtgtgcaaacccctacactacactaccaccacgatagccagtgtatgtgctcatctggtcataggctcctatgtctgtggctttctaaatgcctccctccgcattggggacatattcagtctctctttctgtaagtccaatcttgtccatcaccttttctgtgatgttccaccagtcatggctgtgtcttgctctggtaaacacattagcaagaagattctggtttttatgtcaagcttcaatgtctttttggctcttctagttatcttgacctcctacctgttcatattcatcaccatcttgaagatgcactcagctcagggacacttaaaagctttgtccacctgtgcctctcacctcattgcagtctccatcttctatggaactactatctttatgcacttacagcctagctccagccattccatggacacagatgaaatggcatccttgttctatgctgtgttcatctccatgctgaaccttgtgttctacagcctgaggagcaaagaagtcaagaatgcattcaaaaaggcggttgagaaggcaaaatttttcttagaactgtgatttaatgtggtagggtacacaataacccagtttcattcttttcagaacttccccatgaaattaatcacattgcattttcacaatgcatttaaattccagttgtgatagccttacttcttcagaaggtaatagccttacctttctttttacctgcctagtaaaaagaaaatacgtccagaatgtattacatgaacgaaaat

SEQ ID NO: 1080 - protein, 271 aa, Homo sapiens
MRFKEVMLVSTSSSSLTNATELQIPLFILFILIHLLILTRNLEIILLILLDSCLQFPCTFSSPWPQWKISLLTSMAYDHYIAVCKPLHYTTTTIASVCAHLVIGSYVCGFLNASLRIGDIFSLSFCKSNLVHHLFCDVPPVMAVSCSGKHISKKILVFMSSFNVFLALLVILTSYLFIFITILKMHSAQGHLKALSTCASHLIAVSIFYGTTIFMHLQPSSSHSMDTDEMASLFYAVFISMLNLVFYSLRSKEVKNAFKKAVEKAKFFLEL

SEQ ID NO: 1081 - DNA, 1018 bp, Homo sapiens
  source
  (1)..(1018)
  CDS (201)..(818)
aaaaatgtgggtggagcaggttgggaaagcactgtagaacagtagaccattcgggagccttagagtcaggcaaacctgggttcacatcatgactccatcataatgacctggaataattgacttgaacaaacgggtcttagtttctcttccacatctgggagacaataaggcctgtctctgatgcgtgctgtgatgagtaaatggataagccaagcatggagtgtggccataatagtatctttgttaatattaactaccttcctctcttctcttgggcccagacctggaagaagaagcagtccagtggtgacagtgggaaccagaccacctggctgatcctagtgggcttcggggagctgcaatacctgggcttccttcccttcactctcttcctggccatctatgtggtgacagttgggggcaatgccctcatcatgctggctgtggcctctagtcggacactgcacccaccaatgtacttcttcctctgccacttctccctgctggagattggctatacctccaacgtcatactatggctgttgcagagtttcttggaggggaaggaagtcatctctctagtcagctgtctggctcagttctacgtgttttcctcgctggctgcagctgagtgcctcctgctatctgccgtgtcctatgactgttacttggccatctgctgcccccttcactatcctgccctgatgagcacctggttttgtcactgcctggccgctggtgcttggttcagtggcttcttctcctctgccttcactatggccctggcagcacctctgtcctggcagcagggagattgaccactatttctgtgagtttgctccagtagtcaggcagttctgcggggatgtgggagtcatgtagggagctgaagtcagcatctcaggcttcctgacactggccgccttcctactgattgtggcatcctctgccttcattgagggctgtactgcaaataccctcaggccatgagaggcagaaagccttcttcacctgttcc

SEQ ID NO: 1082 - protein, 205 aa, Homo sapiens [sequence omitted]

SEQ ID NO: 1083 - DNA, 1264 bp, Homo sapiens
  source
  (1)..(1264)
  CDS (201)..(1064)
cctacggttatgaatgcttgggagggctgcaccggacatccacgggatgctgggggtgagaagacactagagaggggtcagagggaaggagcagagggagataatgggtcaaagtgtctgaggaaggagcctgggctgggtagccccagccacccgggcctaagcccaggtggaggggaggagataggaacgaggacgggatgtggagaagtggggaaaggcaggccgacgttggcagggtgcgaggaggccttggagaaaggagggtggatggggcaggcccccaagggaggcaaggagcgccgacagaagggcccaggcgcttgcagggcgcgagttcccacctcaagcaccgtggcggctcccgcgctgcgcacctggaagtgcgcaggctgctccgccgcctcgtcggcgcgctggtagctgaagcaggcttctgctatgtccaggtggccgaggggcagcgggtcgtgggggttcttgaagtagcagaggcagcagcggcgcccgtccaacacgaaccgacggctgcggtaccacgcagtcgcgctggttcccgcgcggtacccgccccgggctctgcagcctccccatcgccgtcgctgccctcctctgcccgggttccggccccggtatggctgcctgcgcgccaaccgtttgttccccggcccccgcgccttcgcgctgcggctgctgcgctccctgcccccgcggtgcccccttcccgccgccccgctcctctctcaggcgctcaaagtggcctggaatttgtagaacgcccccctccaagcccgttggcagttgtcctagcccgctggcccttgcccccgcccgctggccgttgcccccgcgacgccccggaagccaggtcctgcctcccgcacctgccaagtccccgccctgccggagtctcgctctgtcgcccaggctggagtgtagtggagccatctcggctcactgcaacctccgcctccccggttcaagcaattctcccgcctcagcctcccgagtacttgggattacaggcgcccgccacctcgcccggctactttttgtatttttaatagagacggggtttcgccgtgttggtcaggctggtctcaagctcctgacctcaagtgatctgcttgccttggtctcctaaagtgctgggattacaggcgtgagccaccgcgtccggcccaaaagccttttttggatgagaaagactcactcagcttcgtcctgaagagcaagtgggctggggaagaggagagtatgaatg

SEQ ID NO: 1084 - protein, 287 aa, Homo sapiens
MWRSGERQADVGRVRGGLGERRVDGAGPQGRQGAPTEGPRRLQGASSHLKHRGGSRAAHLEVRRLLRRLVGALVAEAGFCYVQVAEGQRVVGVLEVAEAAAAPVQHEPTAAVPRSRAGSRAVPAPGSAASPSPSLPSSARVPAPVWLPARQPFVPRPPRLRAAAAALPAPAVPPSRRPAPLSGAQSGLEFVERPPPSPLAVVLARWPLPPPAGRCPRDAPEARSCLPHLPSPRPAGVSLCRPGWSVVEPSRLTATSASPVQAILPPQPPEYLGLQAPATSPGYFLYF

SEQ ID NO: 1085 - DNA, 1006 bp, Homo sapiens
  source
  (1)..(1006)
  CDS (201)..(806)
ccagcaacattatttttccttttttttttgggggggggacggagtcttgctctgtcacccaggcctgcagtggcactatcttagctcaccgtaacctcagtctcccaggttcaagcaattctcctgcttcagcctcccaagtagctgggattacaggcgcccgccaaaacacctagctaatttttatatttttagtagagatggggttttgccatgttggccaggctgacctcgaactcctgacttcaggtgatccgcctgcctcagcctcccaaagtgctgggattacaggcatgagccactgcgcccagccctttttttttttcttttcctttttttttttgagatggagtctcactctgttacccaggctggagtgcagtggcacaatcttggctcactgcaacctctgcctcccaggttcaagcaattgttgtgcctcagtctccagagcagctgggactatagttgtgcaccaccacacccagctaatttttgtatttttagtagagtcaaggtttcaccatgttggtcagcctggtctcgaactcctggcctcaagttatccacctgccttggcctcccaaaatgctggaattacagaagtgagccactacgccccggtcagcaatgcaaattctttttttttttccccccgagatggagtcttgctctgtcacccaggctggagtgcagtagcacgatctcggctgactgcaacctccacctcctgggttcaagcaattctcctgcctcagcctcccgagtatctgggattacaggcacccaccaccacacccagctaatttttgtatttttagtagagacagggtttcaccaagttagccaggctggtctcaaactcctgacctcgcgatccacctgccttggcctcctaaagtgctgggattacaagcgtgagccaccgcacccgcctgccgatgtaacttctaagtcgtcttcacaaaatgggctgtcgtctcaaagcattagaaactgtaaaatc

SEQ ID NO: 1086 - protein, 201 aa, Homo sapiens [sequence omitted]

SEQ ID NO: 1087 - DNA, 907 bp, Homo sapiens
  source
  (1)..(907)
  CDS (201)..(707)
agtgtgaaatggtatctcattgcggttttaacttgcatttttctaatggctaatgatgttgagtacttatgtgtttattggtcatttggataatctattttgtgaagtgcctgttcaagcctttttgtgtctgcaatttttactagcgagtttatttcttcttatttaaacctcactctgggctccggacaaatatatcaatggaattcttcatactgctgcttgtatgttttgaaaggacctcagctgaacataaaggtaaacttacaatttcctctctcactcttcccccctccactttcagaccttggcctccaccaccgacacatcctctagtagatgacctcatcatccacacagtggcacagaccagaaacctaggcagctttcctgatacctcttctcatctgtttccctactcccacccaatccatcgcgtttcctcctgcctatttcttgaacccaatcaattcccccaaattcctccatctccaccattgcctaagccaccatggtctctcacttgcattactgcaatagcctcctttctttctttcttctttctttctttcttttttttattttggaaaggaagtctctgtcacccaggctggagtgcagtggcgcaacctgggctcactgcaacctcagcctcccagattcaagcaattctcctgcctcagcctcccaagcagctgggattataggtgctcaccaccacaacccgctaatttttgtatttttagtagagacagggtttcaccatgttggccaggatgatctcgaacgcctggcctcaagtaatctgcccacctcagcctcccaaagtgctgggattataggcacgagccaccacacccagtcaatagcttcctttctaacaagtcttgttcccttcaggctgtac

SEQ ID NO: 1088 - protein, 168 aa, Homo sapiens [sequence omitted]

SEQ ID NO: 1089 - DNA, 44585 bp, Homo sapiens
  source
  (1)..(44585)
  CDS (201)..(384)
  CDS (3704)..(3781)
  CDS (7017)..(7122)
  CDS (7936)..(8007)
  CDS (16600)..(16671)
  CDS (17298)..(17369)
  CDS (19356)..(19427)
  CDS (20492)..(20563)
  CDS (23651)..(23722)
  CDS (24656)..(24727)
  CDS (28363)..(28434)
  CDS (28546)..(28617)
  CDS (31102)..(31173)
  CDS (33786)..(34015)
  CDS (34658)..(35068)
  CDS (39181)..(39399)
  CDS (44126)..(44385)
ggcagaggtcacagtgagctgagatcgtgcactccagcctggcaacagagcaagactccgtctaaaaataaaaaataaaaaataaagttgtcattgagaatattattcaaagaaactgtgcactaagaataataccagatgaactcaactcatatagctcttgtgaaaattaaatgggacaacacggagagagcttggccatggtaacactttgtttttgccccttctttcatgtagattttgcactgactcaaggtagcatgatcactccttcatgccaaaaaggatattttccctgtgggaatcttaccaagtgcttaccccgagcttttcactgtgatggcaaggatgactgtgggaacggggcggacgaagagaactgtggtgagtgctcccctcggctccccatgtgtgcctcactttatgaacaccccaaaactgtgggtcggttggataatgattgtgataaactaggaaagctgatttggtgttctgtagggatttcctttgaaacacaaataatgactccccaatgtatttgtgataacgacctgaatttttgtaggtacaggttacttaagtcagaaatacagtatcataaaatgttatattttataaaaataaaattatatttgaaaatctacttcaatactcatattttaattataagcagttttctatgaatacctccttatggctggtaatttggttcagcttcaagaatattcgtaaagtggctgggagtggcggctcatgcctataaccccagcactttggaaggccgaggcaggtggctcacctgaggtcaggagttcgagatcagcctggccaacatggtgaaaccccgtctctactgaaaatacaaaaaaattaaaaaattagctggccgtggtgacaggtgcctgtaatcccagctactcgggaggctgaggcaggagaattgcctgaacccgggaggcaaggttgcggtgagcccagatggcaccactgcactccagcctgggtaacaagagcaaaactccatctcaaaaaaaaaaaaatgcataaagtgtgaatgggcctagctaaagaattaattgatagaacagacctatactgagtgcctgctatgtgccaggagctctccaaatcactgggacacagtgagctcaagggagacaagtgtcttgaccttgtggagttcacatgggtaatgtgaactaagatgatgataaacctgtatgtaaaaaaatcaataatctgagtgataaataaggaaatgaaacaggataatgagatagaaagtaacttggagggagggatacttcaaggatgtaaccagagaaaatctttttaagatgatgacatttggattgagaaagaaagaaagaaagaaagaaagaaagaaagaaagaaagaaagaaagaaagaaagaaagaaagaaagatactgtgaaatattctggaggggcagaattccaggcaaaggcaacatcaagtgcaaaggcccaaggctgactgaaacaggatgatgtgtttgatggtgtgtggctcaagcagagtgaacaggggtatacacatggaatgaaggggtaaccagagaccagatcccagagcatcttacaggccaatttcacctctgtttattgaaacctaaaaaatatttttctctggaggaaactgatgccaagagaggctgacatgtctagttaatccaaaagaatcctgtgtgttttctcccacagagagctacctctcttcagcactgcccaaccatccatcaaagtggggcagcaaagcccacagcatgcatctctagaatctcctgtcctgcccctgggtactcaggcgtgcctccctctgaaggacatagcctctatccacacttcccgtggatcacttctactcattctttagggcctggtttaagtgtctcctcctccaggagggcttccctggcccccctgaagctgtatcaccggtctaggatggctgcaatttctctgttatcacagcaccctgggtgtatctgtatgctgcacaaagtagaatgccttatcttttcagtgttgttgttgtttgtttgtttgtttgtttgtttgttttagagatggagtcttgctcttgttgcccaggatggagttcaatggcgtgatctcagctcactgcaacctctgcctcctgggttcaagtgattctcctgcctcagcctcatgagtagctgggattacaggcgccctccaccatgcccagctaatttttttgtatttttaatagagacggggtttcaacatgttggccgggctggtctggaactcctgaccttaggtgatccgcccgcctcggcctcccaaagtgctgggattacaggcatgagccactgcgcttggcccttatcattgtatttatcttcctagacaggaactccttgagaagaggcctgagtcttatcaccagagcttagagcagtagagtacacagcaggtactcagtcagtgctcagttttgggggcaactgtctggatgccaatgggcaagttactcaaattctcatcctttcctctttgctgcatgggaatcagaagccatgaatgtttaccccatgaggatttctgaacccaaattaaataatgcaagtgagggagcatcatagtagcatcattgagagtattaataagaaatagaaataaagattccaaggatcaaagcagactgtgggcaattattttaattgatttaggtatttgtgtgaacttcagtatcttacattataatgcatattttattattttataacatatagtgaaataacaatacttcacaattaggcctccttttttaaaaatatgatttaccaaaaggaagaggaaaatttggcaaataaattacatttacatatgacaaattgacattaatatatgacaaattgaggaaatgttattttactcaaaaacctttatttatttatttatttgagacagggtctccctctgtcacctaggctggagtgtggtgccatgatcatggttcactgcagctgtgacctcctgggctcaagctatcctcccacctcagtctcccaagtagctaggactacaggtgcgcaccaccacacccagttaattttttctgttttgtaaagagagggtctccctatgtttcccaagctggtcttgaactcctacatgcaagtgatcctcccacctcagcctcccaaagtgctgaggttacagacgagtgccgctgcacccagaaaaaagcctttgagaaactttgcttttgctttattaaaaaaaagtcagatgacataaatgttatcagaactcaatatatctatcaagtatgtttctacatatacagcagtatgcacgtgacaaaaacaaaattcagatattttcttcagaggtcctcaaaattaaagtcaaacatggacaatgtctgtattagaaatagatgatattttccaagacatttatatttatgtaaaataattatatacttgcattgcaaattttatgatacatacatttggagtatttttcatgtaaaaaagggacaccttgcagatgtttgcctaactttttctctcttactatgtatttaaaatatcaataattctattacttaaacatattttagtttaaaatcattaccaaattgttaaattttgtcagatggtatttagtttctagaataagtgacacatctcaatcactatttcacaggtgacactagtggatgggcgaccatatttggcacagtgcatggaaatgctaacagcgtggccttaacacaggagtgctgtaagtggttttgattcaaagacagtatcagctttgtgaaaaacatgatttgtgatgcacagatttatatgggtaatgtgacaaattcccttcagaatttccgttttagttcaatgtatttcactggctaacaggtctgctgtctgcctgtgattggaaagatagaaaaagaaaacgaccatctccatttatgctattttcatgcattactctctgattgcaagaatatataagtattgaataattgtgacaaatagtaaagttcttattacttttaactattttcttcaagaaagatgttaggcactgagaggacaacgatgactaagactgagttctaacccacaaacatctcacatgtagcaggaaagacagctccttacaaaagcagtgatgatataatattattgctaaaagggaggaataatgtttgcaccagggaatggggaagcccattggaagaaatgatggctgtgctgaggatggggaaagattcccagagaggataacatttgagatggactttgaagtccatggatgaaggaaaggatatgaggtgacaggatgagcagaggagcaagatcaacaaaacactggggtcagaagatgcgcagcaggctgcaggatgcctcttcacaaccattctgagtgcatgaggtggaggggcaggagccgagcctagaaggctggtgctagcccatgaagggttttggtgtacaccttgaagtgtggcctctatcccatagatagaatttttggggtgtgtgtgtatatgtagagacatagatatataattaggaagatgaatgtacaattacatacattagtatgtatatgtaaatgtatatatataacatatatatcaaatactacactgatagtattttatgtactctataataccagtttataattaccacttatatattttattatacacaagaatattctgtatgaaaattagaaagtaaaaaaggataagattaaaaataaatataaccaaaagttctactattctacctgagccacaatgagttgtcttgcccacatcccattttaaaggttactgctgtatagaatgggaaatcatcatagttttgggccttatgtttgtttgatttgttctatatttctttcattcttaatgaggaggaagagcatgtgatcagaaatgtatgtgaggaagattatttcattagaattgcagagaatggattagagcagcgagtctcagccatggcaacagtgcctgcaaagaacgtttgacagtgtctggagacttttttttttttttttttttgagacagcatctcactctgttgcccaggatggagtgcagtgatacaatcacagctcactgcagcctcaaacctcccaggctcaactgatccttccaactcagcctcctgagtagctgggaccacagacatgcaccaccatgcctggctaattttcatattctttgtagagatggggtcttaccatgttgcccaggctggtctcaaactgctgggctcaagcagtccacccatctcagccccccaaagtgttgggattacgggtgtgagccacgcatgcccagcctggagacacttttggtcatcctgatggaggagggtgggttgctgctggcatctagtgggtagaggccagggctactgctgaacatcctacaatgcaaaggacagcctcccatgacaaagaacgattgatccaaaatgtcaatcatgttcagatagaggagaaagaatgatgataaaagagttactggttattatgtttattccaatccccagaaaatgccattgagaagattgaggtagagagagatgcaaaaggagtttcagaaaaagaatccacaaaatcatggggacatgattggtttgcaggtgatggagggtgaacagttaatgctcacatttctggtgttgacagcacacccagcttgaccatatgaaattattctattggtaaataagtttccaaccacaggttttcaatttaatcatataaccactatttcaatggtggttatgtcaataaacattgacgtaagcatatgaaagttatctttaggaagttgagctaattaacatatatgtatagacaacataaaatattttccaaaatgtatacactaaaagcatcttttacattaagtactcagtagaagtttgttggctttactaataaaattcagtaaaatttatttttaaaataacatttggataaaagtgatctaaaagaagaagggcacctgaaaagaacttataattacattaaaataaataacaaaataaattcaaaaataactctcacattcttagctctatcagtacaaatattcataggctcagaggagaaatcagactccaaaaatacttgctctttctctcaaagcctcgctctctctcctctgccctcgtctgtctctctctctttcacacacacacacacacacacacacacacacacacacacacacacagtgactgtcctatggaccagcttggcctggcttctccttagatttctcactcctttacatgtcattatcctagtaactacgtaagtcccttcagagtacatcctgagtccttcttctttcttctgaatgcttcagatagatagatctttggttatttcagctttgcagctttttaccttcaactttcaacctcatagtaataaaaaacaaagaaccaaaatgaaggaatatctggctggatggattttagtaaggtgccagggtggttatggtagaacctgcatctcaatcttctcatggctctaagggaagtttgaaggaagaaaaaaaatgaatctgattttaaacaataaggatttattgagcaactattttatgctattcaaatgaattgactcagtcatatccattaagaattactcaatcatacaaatgtttttcattgaagtgaacttaatcttgcttcactagatgagtttatgctagttaacattttgtgcgttttttccaatcacttggtaaatgcctctgaaatgactactagaagctagaactgagattaacacattagtctgcatttaagtaggagagaattcttatttaattttattaggggctgaatgagttcatttaacagatgtaaattttatacattcgatgaaaagaaaacaatatcagttattaaaggcaaagtcataattaatgtatttgtttactagtgaaatcttactctttttgtcccattagttctaaaacagtatccacaatgctgtgactgcaaagaaactgaattggaatgtgtaaatggtgacttaaagtctgtgccgatgatttctaacaatgtgacattactgtgagtaaaacttaattattggtgatatctgtccctatagtcacatgaaaaccaagaaaaaacccaatagtgttgcttgtgcattagcaaaataatagaaaccctgtttaaaactaccagtcatcagagaattctccatgcttcctattcagggggaaaaaatggtttacacactgtatgttagattagcctgtcatcagttagctcacaaatgtctgtgggcctggagttcttattttcaattgctttctgatttatgtatgattactactgtccttgtgttgaaatgctttttttttttgttttaaaaggaagcacactcacttattctacgttttttttaacgttggtaatctatccaagactgcaaagatataaaagatccatgaagctagtagctatgttatatcatgcaaaattttctgtactttgcataaagttcttgaaagcctcaggaatttgcagtcatgtcatcatttgggcatgcatgagtgggttgggatctttggctggtttttggtttggtttggtttgttaatgcacccacagagtaaaaacaaagaagttaaatcaacatggacttcccagtctactatactaactggctacatttgtcaaatactcacaagctactttattttgctttataaacttttcattctcccatgaaaaatttttagttattgtcatgttcaaatatggattagtataatgaacgtcatcaaatattcttttcccaagcatgtggcttctagggaagagtgggttggccataacaatccataatgaagtttgctttacatgttattttaggtctcttaagaaaaacaaaatccacagtcttccagataaagttttcatcaaatacacaaaacttaaaaagatgtaagtagccgttaatagcatatttatttaaaaaaaatcctcgtggtggtgtaagatgtttttgatctaaaaataaaatattgtttgttatctttatcattacatttatgtttctaaatgtaattaagattagaaaataaaacatttgaaagtatgttatctttccatttcataatttgaaggagctgaacccattttatttaaactttttcagagaattaacttggagtcgaggtaaaacatctcaataggaaaatacacagttccattattttcctcaagatattgggaaaatgacattgcagattcagaggcactttttcacttgaaaaaaaaagagtgacagcataaacaagaacaatcagatcatttcagatacataatgatagggtacagatatcccccagggtgttaggagtgaaaacacaggagttatgcaaccagtgatattaacatatctgaggaaagaaaatgccaataaataggatatgatcagcagagaaggtattctgtgacaaagaagggccaatatgcttccagaatcatccaagaaagaaaaccgggaactgggaaatataatccctagagatgatctctcttggagggtcaggatgcaccatcaatccccaccacaattttcatgaacaatccctttgctttgattctctactcaccaagaaaccttaggatgatgaatttaatttcccaacttcttcattttaaagtatttgaaaagttgcatggcatagagaataagagcattcctataagtgggatgggatgctttctattcacattaataaatggagaatattcaggttcgtgtatcagtcatttgtaagttggatcaatatctgtcaatccctctgggccagttgctctgtggcactggaggggctacacctgctgagatgatcattagactagataacaaaattagcaagagaatgctgtacacgctgcaagcccccttggtggtaccatcatcttattgttttatccttcaatatccagcatagaggagaaaagtttctagaaatgtgaaatttatgaaaatccaggaataaaaattatctgaatctttgctgatactgggcacacacatttggtttgaaataccatcaaggattttgtgttcctgaatttaggtataaatttcctcatacaagaaaagaagtagctaatggaagtccatgacgtagaaccttgtgtgaacatcaatactcaatcatacctgggcttgattgtggcctctgtaaaccccggctgctctcagacctgttgcttcatcctaaagtatgtgggtatgtggtcatgtcattgccacactggagtagctatgcattggctctgcatgtccagattcctctagagaggaaattctaaccacattcttcctagtcttccaagaaatccctaaaatcacaacatgttcattagatgaatcaatattgtctttgtactgcctgaataatacatgtgggaggaaaaataaaatagcactagcagaaaggaagggaagagattttcgtttcagaattcttgtttcacagcaattgaaattctattttctagagtcatagaagttttaagaatttctaattaaatcttctcattacacacgaagtgactaaagtctgcaatggttaaatgactcacctaagatctacaactagtaagtggaagacccagaattagagccaatgtcttctgatgtccaaggtagtgcttactttaccataacaggaaaccttaagagggaaagaaatagttctagcaatcaactgaatttctaccagcacagactgtcccaccccatgtagaattcccttgtatatgttttgccccctaatctggggcaagctgacttctggggagggggcggagtcactagaggctcaagcaggagggttaaaattagacttctcaggccacgtccttccttggtctattaactcataactgtgttctatgccaatatctccctctgtggtcccaggccctgctagcccactgaagagaagaatatagaagcaatttaataattcaggtccacaattttcctagtgaaaaaagatagagactaacctttattgccaagattagctagcaatttctctaagtaaatgtctaattctactttgtcagagaaaacaggcaccacatcataacctgaatatcacctgacagggcttctccccatgcaagctgctatttgatgatttgcaggcaatttaattttcccagagactaatagaaaagaggttatgagactctcatcaataaacattcaccaagtgtctattatatgtaagataaagcacagggggataaaacacaattgcttacagtcatctaccactttttaaagtttacaaagaattccaatatttggaattttcactttggctttgatctccaaagtctgtgaggtggggcagacaccgttacagcagtttcaggaatgaggaaagctacttggggagagaggttgtttgcccaaagtcagtcagctgacaagtaatagagattggcctcaaacccaaaccttctgaccatgctcctttggaagcccacccacatagtccaggctcagaatatgttattatcaatgaaaccacccagtaagtaaactttgatttgaaaataactcaagttctttatactcaaatatcctagagcagctcataagctcaacaatgcttccttaaatctcctttcctcaccatcccctttacccacattcctcaactcctcctgctcttttccaaactcccagaaaaatagccccctgcaccagtcctacttcttgtccctcctgtccatctactcttacctttttcttcccaatcctcattcaatgacccaaataacaaatgtggcaaataccaaaccatccccaggaagggatgtcagttggaggaagaaaccagatgggcctcagccagaactcttggtatggaatctggtagcaggagagcagtagctagcaagacccacatattcattcactcctgtgatgaatatttattgatacctacaaggtgccaggcaccaaggatacagcatgaacaacacagatgaaaagatgaaattaagcttgtggagcttaatttccaatcaagaaagatagtcaataaacaaagtttaaaatatataatttgttaggtggtggtgagggctaaaaataaaccagaaagaggattagaaggtgctggggaaatggaatttcaaacaattcactaataattttgtccacattaccactgctcaaggcgcctctaaagcttcccatcattcctaaatttacccccaagagactgctcagaacacatctaattggtcttctacatacgtctacaggtatttaagactagctatcatcaccctccaccacaccactaatctcttccctaagtatcctcatttccttaaattcctccccaaaggacatagtttcaaatctgttcttcattctagtcacaataatctgcatatgtttacctacatttgtcttgatgggtgacatctagaataaatatactattatcaccgtaacatgaccgaggcaaatagggaagaactcgcatccctttccttctgcactctatgtgccctatgattatattgctcttttgatgacttcttgatactcttgactcctagtgatctataatttctaattccatgccacatgtgttgctgctaagtgatgtgtgtgctacatcttgtactcatgcacttagcatttgagagttagtcatgggtccttaaatacatccctagtcagtttcatcctgttagagtcagcttttcttaccggagtgtgaaggtctttttgtattttccatcatagtcactactcctctcataattatgtcatctgcaaataagatcaactaccttcacccaggtcatggagtaaaatattgaagagaacagcactaaattgtctttctatattccttcatcatcatccttcagataagaatatgtgtcattctttcttttgtccataaaaaattataaaactgcttgatcaatgcccagtagacatgtaacaatgtttatcacatagttttgcacagtctttcaaagaagaatatgaagttggtctgccatgtggtttcttgtgagctctcctggtcactctctctttgaggcatagacaaagcagcatcatattcacctgttctatgatcttcccaagaccagcattgagctcatccaactacagcttgtgaaaccaacttcttccctttttgagaacttaagactacatttgccatcttttactttccagctgctcatcctttctctggattcctcagcaactgatcataatttgatgttctcattttttggcatttctcaatttctgggagaaaatttccaaaccagagggctttaattaattttgattaacaccttctaccatcttgggctttcactgacctgccatatagcctttccatttgcttcaatcctaagaccatcttctttgatccagaacacaagaacaaagtaggagttgagaaataagcagttgttccttttatattatctcacaacattataaaacaggttccaggaggcaaactgagactttccttgacactttcttgcttctccaactagatacacatttttattgccacagtattctctactgtttgagttttacacatgactcgggtcaactacaattctattttcatgaagccctcactttccttctcgaaggaacaactctctgaccaccataccctcctcatgggctggacagtcctcctggttctctcttagtctattgaggcctgtgtcgtagcatacctagtaagaaacccataaggactaatgagtatttgctgaatgaacgatgggtagcactaacatgtagaactaaagagaaggtggggagcatcttcaccagggagaagaaagaaacataagcagaaatactcaaaggatgttgagaagagagtgaacatgcagtttgcctaaaggaaaggcatccccacaggagatgatggagcgtatgccggagaggtcactgaatcttgattgtatgccagctaaggcatctgaattttattctgtttgagcagagaacagacatgcacaaatatgtgttttagactgtattgagctaataaagttaatctgcatatttaagttgtattgggatatatcctatgccaggggttcccagaccccaaatcacagagcggtaccagtctgtggcatgttaggaactgggctgcacagcaggaggtgagtggtgagcgagcaagcaaagctgagctctgcctcctcctgtcggatcagcagtggcattagattctcaccgtagtgtgaacactattgtgaactgcacatgcaagggatctgggttgtgcactctttaagagaatctaaggataaatgtaatgcacttgaatcatcctgaaaccatcccccctctccatccatagaaaaattggccaggcacagtggctcaagcctgtaatcccagcactttcagaggctgaggcaggtggatctgttgaggtcagaagtttgagaccagcctggccaacatcgtgaatgtctctactaaaaatacaacaaaaacattagctgggcatggtggcgtgcatctgtagtcccagctactcaagagggtgaggcaggagaatcgcttgaccccaaaaagtccagattgcagtgagccaagaactcaccacagcactccagcctgggcaatggagcgtaactctgtcttaaaaaaaaaaaagaaagaaagaaagaaaaaagaaaaattgtcttctacgaaaccgtggggactgttgtcctgcgagatcaccaaatttaatgtcaagagggtctccagtctggaatgctctaaatattcacagtggagttgagatcatttaggcatccaaaaaaaaacaaaaaacaaattcctaaatcaaaattaaatcttaattgccagatgaatgtgttgcttaactgatctgaatgtttttaccattgatcagtttattcattttaataatcttttaaaatgtcaggcctttctaaattgggggtggatgcagtttcaaatgacctttcagggaaataaaatacaatttatggaattgactataatactttatcactgctaccatggaaacaaacagcagttctcctccttattgtaacaaaaaccttttataaattaggaattccttcttaatctgggttcttgttaaatacaatcactggaaacaaaacgaaactcaaggtgtctgcctggctcttgaatacaaaatggcacattcaaaaattgcctataaacatgcatgtcattaaagcatttatttgctttagtttcgggtacataaattcctggcatttctgcttgaaaagtcctgacagctgaaactgcaggaattcatgaacctgtaagttatccttagaaaaggcattcggtgtaaagtatattaaatgggcttatatctcagctctgaataaaaagagggcgccacttgccaagttgtcatgtttccaaatatccccacacattctttaagctactattctgcaaagaagacagcagagactagaggatggagttcaagttcagcagcctaagtctgagacatggaacgtaggagggactacagttctctatggggtggcaaccagctaactaaatagaagactagaagctcttcattatttaagagtttgagttttaactgatgtcagtgaagggagataggttgtacacatcagatgagttgtgtggatcactggttttactctttctttcccttgacttataagacaaaagcgtaaggtcaaattcacaatttgcaactgcattcatctcttcaagatgtgacaacatgtaggtaaaatatacattccatttttgaatttctcatcttgaataaaatgtaaatagcattagttaagcagtgaattgtatatttaagagaaacttcaatatacctacaatacagtattttgctctttttctattttcatttgctactgtaacataattcatcatattaacttcattgcatcagtctcaaggctctgaaagtgctaaaacagatattgatctgtgtgagttcatcctattcacagcagaaccttcaaccaaaagcagaatgtatgctgctctgtgaagcatctccccatagatatggtaccgggaatgggggttaagatggcacaaggtcacactgggtttcaagtttactttgcaggattgaaattgatgctttgcatatcaccacagatgtgatgttctgtagtgccaacacttggcacatggaggaacatagggaaaatgaccgtatttgtaaagtacttggggtaaaagattgtgtttgctgataactggaagcctgtcctggctttttttttttcctttctaataatctttatttactttcactttctttttttaattgaagttaaataagtgtactttaccatctttaccatttttaagtgtacagtttagtggtagtaaatattcatttgtaccccttcatctccccgcttcctgacctctgataacccctccaatcttggctttacctggctctcttcaggtctgaaagagtcaccatcctggcactcttataagacaatcgtgactcagaggcaaaggctggggagctctgctaggaaataatcatggtataacaaaattcacagtatagccagacgtcaaatgagcatgtgatctacaaatagttttgcagtagaatatcataacaatgaaacagcgctgtgtaatagtttaggaagcaattcaaaccaaaataagagaaatggaagccattcaaaagactatgtaacaatttgttactattagtatagttatttcctgcccctgagagccttcagagaataggaattcagagctaacttcccattgtacaatgaagacagcaaatggaaattatttacttagatactcctgacagcgcaattacggaatcaatactgtactattaagttgcttcagaggttaagtcagtcctgatcctatgacttgaaattggcatacttgccctggttcaactgctgatgtcctttgatatcctgagtacctaacttgccttgtccttctcactttgcatcatgaaatagaaaagaattaaagcttgccctctcctttatttcatgggaatagaataaggataaatgaggagttaaaggtgcatctctgtgcacaaagaggaagaaagttcagcagtgcgaggctggctagtctcacatggccagaaactcctgccagtcagaacaggacggtcaccatagtgccagtttgcagaaacaagactagatccttccgcagacacatcacactggagttcagcgtatgaatcagagatgcctcaatctcattgcatgagtactatgaggaaagcactggctagttggtagccatttctcactgacaacatctccccaacatgagaataggacttcgtacttcaatttcacaattgtcttcaggtaaagaaagtggagaatatgttcaacaacctaatatagtccataaaccataatcacctgactctcttatcttattcctaccagatttcttcagcataattgcattagacacatatccaggaaagcattttttggattatgtaatctgcaaatattgtgagtaacctctttctcatattgtaggtataattttaagcaaagactaaaaggatagaatggtactttttcaaggctcgacttgattgtagggaagtgggaggaataggttatcacaaagtacttagattagttattacactgaaagaattattaaacgattcctacctttaccagaagacatacaaaggttctccttaaccttgtcttctctagcttgggtcacttccacaatattttagcattttatttcttttctaactcttgctaacttgctatgcattttcttaaaatgctagtctactaaggatgtcaccaaaaaggacaaaagcaaaaattgccccacatacttagttattatacccttacaatctaacatgatgtaatatcccaaaacattttaggaccactttctctgccctggccctggtgttgcacacactgggcttgtggttatctgtaccttctggataccccttgaatttgccccctctgctcattcagccgaatactttcagacgcagatgtccatatccataatcatcatcagtggctcatattctaattatatgtgactaaaatagggtattgagtttgcctaattaactcacccatgctatttgtagatatctcaaccacaactgcatcacaaccctcagacctggaatattcaaagacttacatcagctaacttggctgtaagtactctaattcttctttctcccatagaggatcatagtcttgatgatatataacagtgctaatgtagtttccactatttgacatatcttatttttatacttgcttttctgattatcatataatctgcagaactttatccaggcaattcaatgtcatgtcaagtagtggttatgtgcctgtgcattttaggatgctaagaaccatctgtggcctctacccactagatgcctgtagtataccccttctcccaagagttgtgacaactaaaaatgtttccagacattgctgaatgtcccttgggaggaaaaattgacctctgctgaaaaccactgtactgaaaagtaagcaagttaagaacttgttctgctttccagagcattcagagagaagtctgaaaacatgatagcttgtagtatttcaccactttccagactgagccaccagctccgttccaagaaacctcacgtcagatgtctgtgctttcaccaggaaaatacacaaggggcggttagcaggctttctgtattgtttgcccattttctgcaggttggcctggtctagtggaaaaagccagggcctcaacttcatccaagcccttctgtgtgcctggcccttagccccatgcttagccttccaggcaactttttctttctttcctttctttcttcttctttctttctttctttccttccttctttctttcttttcttttctttctttctttctttctttctttctttctttctttctctttctctctctctctctttcttccttcctttctctttctctctttctttcttttttctttctttcttgtttgcttgcttgccttccttttttccttccctctttccttcttttttttttttttttttttgagacagggtgtcactctgtcacacaggctggagtgcactggtacaatctcaactcactgcagcctcaatctctgggactcaagcaatcctcccacctcagcctcctgagtagttgggactacacgtgtgagccactacacccagcgaattttttgtatttttagtagaaatggggtgggtctcaccatgttgcccaggatggtctccaactcctgagctcaagcgatctgcctgcctaatactctcagtgttaagattacaggcaagagccaccacgcccagcccaggcaactttcttaattttcctagacctctttattttcatctgtaaattataattcctttccaagaaggatgttatgaggattatatcacataacagttaaacagttccacatgcaaagctcctggcatatagtaggtgctcaatgtggcttccttctcccactcctgccctcaccggccactgcaagtaagaggaaacacaacctggcttcacaggcaacaagaggaatagaggcctatttccccttactctaatttcttctataaaatatagtttaaaacagtggtttgaatatgcaaatagtttcactctttcacccagaaagctccttatgaatagcgtgacatccatccattgatttaaacacaccttatttaatacatcagtttaacaccatgtgaccaaagaaccctctgtgatttcctaaaaattatactttaattcatccttcagctcagccaattagtaggttaaggcatttatggagcccaaatgcattcaatacgtggagtttgtgccagacccaggtacccagaggtgacagatacaacctgggtctttaagtccagcaggaggtggaggcagcagggagaaagcaaaacaatcaggatccaacttgataagtgggatggaagctgtaggaatttggaggaaagagttgctccaaccacagacggaaggaaaagctctcagggaagggacaggtgagccaagtatggaagcacacaaaggagtaggccaggtgttgaggggaggcaggttttatttcacaaatgtctctaatattggaaatgtttcttgatacattttgtcagaattctagatgacaatccaataaccagaatttcacagcgcttgtttacgggattaaattccttgtttttcctgtaagtattcatcaacctttcaatacatctatcgatacattgcaatgacatctagcactagcttacaaaaagaacttttaaaaaaatcaagcccacaaaaatttttattagtcaaaacttctcctgtgtttccagccacagttactgttaatataatacttcctggccatggctcaaagggaagagctgaccagatcataatgaatattttaagcctactagttgatttttctatcccttttaatttcctttagtactaaggcatgtttttatttgcagtggttgaccaaagatagtattaatttttatatcctatgtttatattttcttagaatctcccaggagttcatctccaactccatttttaatggaagaaaatgtgcctttgcccagcaagactcactgaaactttcaaaatctttgtcctaccaagagagctgtctcacaataatattttcactgtttattaatacactagaatgatttatcagcaggggattattatattcctttacaactgatcatataacatcattatttttccatttgtcaaaaggaaccacaatatcataaattaatcctgcagcttaacatgctcaagagttgttttctttccccaaattccccctactgtcacttctccaatttaatgcagtttccaatgtggccctttaatattataaatgattaatgatgcccttaagaagaaactttggatgtatggcactggaaatgattacaacgtgaagtttacaaggaaaattaccatgaacttcaaaattattacccaatatatacttttgtttcatctcataaaattaaactgtgtaacatctattcctaggatatgtatcatacttatgcattcatagtttctttgacaacatctgctccctaatctttgccatacacatgttttaaagaccattttgaaatagctatatatgttatcatcataagatattaattttagcacgcaagttttgaaattttaaaataataaaaagactgtcctaaaagtgtcatatcattttatttctaattaacattttctttgtgtaaaggtctatggttaataactacttagaagctcttcccaagcagatgtgtgcccaaatgcctcaactcaactgggtgtgagtatttatttaggaattaatttgttatttgccctgattaaggaaactagccataaagttaattcaaggttacctagaaagtccatctataatttctttccaaaatcaaaatctgatcatattaccttcccagtttcaaaattatttgagggttcccaaagggtgagggtaaagtttgaccttccctttgagcatccaagaccctcattttccattccttaccccatctagatgctatccctgaccctcgtatgcatgtatcaaactactactcctacagtcaattccctaagcatattgttccttggacttaaaaaatcttgctcccttattcttttggataacttaaacatttcctttgaaagacaacttaaacctcacctccaggaggtcattcctgacacaccaaccagtttcagcagccacctatgtactcccacacattacatcatctacaaaactccaccacactgccctgtctcagggtactatctcatccctatctcagggtactatcaccatatagtcattgggcttgtctttttttttttttttttgagatggagtctcactctgttaccttggctggagtgcagtggtgcgatctcggctcactgcaagctctgtctcctgggttcaagtgattctcctgcctcagcctcccgagtatctgggattacaggcatgcaccaccaggcctggctaatttttatatttttagtacagatggggtttcaccatgttggccaggctggtcttcaacccctgacctcaggtgatccaccctcctcagtgcttatgtcttctatactgttccataaattctgggaaggcagaaacctatagtatgatttcctaccccagcattaggacaatgaccagtacataataggtgctcaataagcctttgttaggatggatgtactaaaccatttccactccttgttagcttttaaccaatacctgtttaaaacattcatttaatttacgtcgtaccttcaccaccattacccaccattccctgccacatacaccttcacggtcttctgcaacaaccaggattgtcatgtctattgctttcctgttccatgaaaatgctgatggtagcgctgctggaactcttctctgtcaaatcatggaactcaagacccataagatgataaagttttagtacttcagcttttgatcccctctaaactaacctcaaaatctcttgttacaacactattaggtggtgttgtgtttattttctgatgtttatttttatgtatttatttaaatatatgctgtcaaaaggcttctaaaacagtagaggtctcacgtaagtgtgccactattaaaaacggaaataatgacctgaacaccatgagaataagaataggtgaaaagaaaatacttagaaactaaacaagtgcatatacacaatgggaaacacacaggaaagagtaaaggtagcagaaaaatatcaggagctcagcctgctctccctccccaaaaggggcatcagtcagcaggaggtgaggaaccagcctcagagctcagggttccggagacacttattttcacaatgggctcacacaaacacgtgggaaaaaatagacacacaataaaaacgcacaggtagcaagacagcctgattgcaattgagagcctttcaacacagagggtaggaagctgaaaggccagacaggaagaaaggccagacaggagaaaacctgtcctggggaggcttctcctcttccgttacttgctgtcaagttggacaattgctcccacaacaccaaagtgtccttcttcggagaacatgaaaaacattttttccattccatttcacaatatttggatttttaggagagtatggtgtttgttatttttaatcacagtatattgtgtgaaaaatgtacatctcaagttcctacacaaatctccaagatagttttaaaataggattttcttaaaatgacaaagggattggtgattttagtgtgactatgagaaaagttcagaagaagaaaaatagctattgccatatttggggaacactgtaagaagctgactatgaaaaggaatcaggagacttggcagaaaaatgggctgtttcttagtcccccgcattgctcaaagagggaatgtcagagtgttccggaaggcgctgtccacgtatgtgggatgccactgacctgcagaattacctggcaaaatgaaatctccccagcagtgcttctcagacatcagcgtgcatcgtaaacaatgggcgaacttgctgagacacagatggctggacttcagtactagagtttctgattcagtcggtcttgggcaagaatctgcatttctagcaagttccaggcagcgctgaggttgcatccctgccattctgagcagcattgcccttggcattagcgtccttgaggcatcatagaaagagcctgcactttggcatcacacagatcgggattcacatcctgtctctggtgttcagtatgtgcaggataactttggcctgagattctccttcagcaaaacagagacaagaacatctacctgatgttggagggaatgtgaggatataatgatcaatgacgccacagacatggtagttaagtgtctaggctttagattctgacagatctgagctgggtcagttctaccacttactagctgtgtggtcagaaggaaagtgaatcaccaaaagccttggatttctcttatgttaaatgggggataatagcagcaatttggcaggagtgctgtgtgatgcgtgtagaacagcacctggcaccataaaagcccaatcaatggtagtttatgatgggttgggcaatattataattaatagcatagcattcagcacagaaagacgctcgctaaaagttaggctgccctttcctcaattttattaacattagttggaagggggaaagaagcataatattagttatactaaccttgcaataattaggaggaaagatagtaacaactggaatgaagtaaaaataaacttgataaccattttaaaaagtatctctaagcatatgatttgtacaaaaaatattaaaaatatctttcctccatgacttccagggatttggaaggcaatagaataaagtatctcacaaattctacgtttctgtcgtgcgattcgctcacagtgctgtaagtatacaatggacttcactaaatgaggggaaaccctatatatttggaagttaaaaagaaaacattgacaaaaaattttaaagtagtgttttgtttacagccttggtctgacactgcagtgctagaaaatgcacacactgatttattgatttggatgttgggactgagcctcaagttaaggtgcccaccctttagggacatcatgtgccatctttatttccgtgcaccttctcagctgaactgggacctgaaagttccagtttcctaaccccatggtcaccaaggaagggaaataatgtatgtgaaaggggttagctgtacaatgattagctttacaatgattagccaatgactcttaccatttgatgtctttctccctaaagaaaaaaaaaatcataatttcatctaaaaggaaaaacatctaatgcattctgattggccaaagattctgcctcatgattctgatcgctgtttatattttttatgggggcgggaaggcagatggtttggtcaatcagtgcattcatgctggaaagcttcaaaacatcagtgttttggttttgttttaatgatagttttccacatttagtaagcacttagtgatgtttgttgattggatggatgattggaaaaaagaatggaaaaggaaaattaaaagagacattttctaaaataattagatccaaacaaaatgcagctttctagaccgcactcaggacctcaaattgctcatgacagcacttcctgaagagaacatggggatgtccacggtgaaaaagtcctgccttagtttccactccaaaagatgcctcccttgaagacttcaaaggaggcttataaaattctgcctggatcagtggcctctcccaatgagaactgattactacagcagacgcaaacccacatgctgattctcgccatgtcttacaggtttctgcctagaaatcaaattggttttgttccagagaagacattttcttcattaaaaaatttaggagaactgtaagtagcatcgtctactaggaaaatatgattgcttcttccgagattataaatttaaatgactagtgagactgctttgccactagtagcaatcaaaatcctgtagactattggatattaaaaatcaattaagaaaaccaacattatcctgaagtccaaagcacattcaaatcagacagtgggctaaatatggatttaacctaccctagtttctctacttgttttctttgggtgatttcttatttatgtgtgtttgggagtaaatgagttttccatggcttcttaaacacagggatcatttctttctactgactggagtatagttaattcccaataaatgtttgataatgaataactgactaactgaaataatattaattccttataactgaacaaaggaacaaatatgcttactagtccttgagaaattatgacttatatagcaggtgaagcaaatcccaatgctgagaatgagggttaggctcacggaaaaaatattcagagagctcatgtgaattttttctgttcaaatatttgttttatggatctaagccttttaaaatcatttctctcgctattaattcattgctccccacataattgtgtatcagtggaagttaaaactaagtctgttacattacacatagcagtgattaggatagaaaactcatctttctgattgaggccttaaaatggaaattaatttctgaattaatctctccccattctttacaccttattttgaaatccagaaaggattggagaaaataataagagtaatctaaaaaataactcatgaatagttaaggtaattcaatctaattaatgagcatcataaatcaaatccacacatatttatgaagtgcctggtatgtgcaaggtactgcattagaactgaaagtatgatcattttataggcaaaaacttaaaggcagctcattcagaaaagacttcctcccagggcattcctgcccaggctgtggaggatgactgtggacttgggttgcatggtggggtggaggaataacccaggacaaacagaggggttttttgtttgtttgtttgttttgttttgttttgttttgagatggatttttttgctcttgtcacccaggctggagtgcaatggcatgatctccactcactgcaacctctgcctcctgggttcaagtgatcctcctgcctcagcctcctgagtagttgggattccaggtacctgccaccatgcctggctaatttttttttttttttgtatttttagtagagacagggtttcaccatgttggccaggctggtcttgaactcctggcctcaagtgatccacccgcctcagcctcccaaaatgctgggattacaagtgtgagccaccacgcccaacccagaggggtattttatatataaacttaaggaaacagtggtacagagtccatatttttaaaattttcctaaccctcttcgcatcctacatataggcagaggcacaccaaaaataagagcccacttaagagatgccagcttgctattaagatctatagtgatccattgcaattcacttagcctcagaaagctaaaagaaattcagaagctggtaggcttaactagaacaaggcattcatatgtcttgagtttacaaatgttaagtagttttactgtgccttcatggcaacaaacccatccagggaggaataagcacaagtacttgagacccccaaagtcctttcctccaaaagagtgtgctttatttttctgggtaaccctttgaaaggcattttctaggtgtatgaaatcatcatcatattgctttattgtcaggctctctctggcctgtgtgcacctgtggtctcccttctgggctgagatctaggtgtgctcctctcatctggaggaccagatgagacatctcacttggcaggacttcagactttggtgtcatgacagcacctcaaaagcaacccatttgaaacagaactaacaagagaccccaacctgatggccagcttcttcacctggacttgccatctcagtgcctccttcctggtagccaggcttgaagaccattccgtttccctccaactttctcttaatacatgttcagccagaccctgagccctgctgctgtcccccttaaccctcatttgctctcacctggtccatgtagaagctcctgcctggtcttcctcccccaactcccaggccttgttgcctgtctttcatgcttctgacagaataatcattccataacccggagtaaatgatgccattgccctatttaatgttcttacttcttgttgcctggtgtttagcaaagtccttgacacagttctcaaacattaatgggccgaagaatcacatgggatattggcttaaatgcatgttaccaggctccctcccagaaagtctgatgtgatagttccaaggtgggtcccggggatgtgctctttttataagcatccttggggacttggatgcttggactctactatgaaaactactgccttgaagtgcacgcatggctttcccattttgtctccacgcactctccatgacgtcctctacctctccctacatcttgcatcctccacccatgttggatcacttcctgactcctgaaagtgtcactgaattccaagcatctgtggttcagatcattttttacacccacctgagaagctgttcttcttttaccccacctaaaatcatcaagctttcttcaaacacttcctaatgtcccaggccaagactgatgactctttcctctatgttttctctgcacttctataatagcacctgtttgattgtttccttgtttgtatctagttgctactctaaatgtaagcttctttacaaaaagagctaagtcatagttatttgtaactcccacataaccatcagcagttccagagtatcaaaagagatcatttttgtttgactcttagttaggcaactgtatatctgttttaacatcttctctggctcagaaatatactctggactcttaaagattcatttcttctgattttaacaggtctcttttccacattttatagagtcactttcttaggattctgtctggattggacagtcctattatatttaattctaaacttgcaatttcttctgcaaaaatagtcttgtagaagaacatattaaaagcgtgtgaacttattcaagattatctgggcagatactgagtggacaatattgtcttggttggaatgcaaaacaaatcaaagatgcaagacttgacctcgaaaagtgtagttggataaacaagagaccacgtatatgaagcaagtggcaatcacagaagcatgaagagtagaagtgtacaaagagtatctagagcaagggaaattaaccaaattagatatgaaagccaggttgggaatgtgtttgagagagggtaagaggaaattccagataggaactggacgagcaaagtgttacatgtaagtgttggaaaccgtatccatttggctgactcatacggccctgttgtgtaacaagttatcaggttggttaaattggattcatattttctgttacatcaaatgggatgatgataattgtgaggagtaataagtctgtcatttacttccaaagtaattgctttgggttttcattgtcgtcaacagggatctgtctagcaatacgataacggaactatcacctcacctttttaaagacttgaagcttctacaaaagctgtaagttctacttctcaccataatcagatttaaagggcaatattttgagctttcaaaataataataccttcaaacttcttttcctctctcatctaatggtaaaaaaaaaaggaacctgtcatccaatcctcttatgtatcttcacaagaaccagtttgaaagtcttaaacaacttcagtctctgtaagtgaaatattacaattatattgattataattttagtggatgtacttagagacacatttatttttaaatgggtattttgcacacaggagcatgcatttcagacaactgtctgaatcacagatcccatcaagtacatactgaatgacaaataagcctcattatttaccattcgacatgtatgaagtccatttctgtacttgaagaaggtttcaggaatgtccttcttgaaaactgggttcatgtggcaaaatctcatcctacagttttcacaaagaattaaatttgcaatagttttgtttctaaaagtttggttaaaacaaattatgtaagacttgcctgcttttcccctttgccctttcctacaaggatctacttgatattagtgtacagtgcattgttttacttttaaataagtttttaaaaaactgtcccacaaatatgcacattcagaaaattaatgtacagtatttttacatttcaaccatattaagtttcagtggtatcaagaactctgccacttttcctttgaacttcatgatttctttccaatggatggcaattgctggctaaaggttgtttgttttcacacagacagcagactacgctgcctgactgcagcctaaagcatttcctcctttaattccaaagaccaattcttagtatcatcttttattcttgctagttttctatcagaaattaatgcaagatttaggtttctctcttaccagatattagtgagcatccactgatgaaaaagatctggtccctattcttaagaagccataatattaaacatatatgtttattttttaaaatataaggacagacctgaggatgtggacagcatgattcttctctttgcttaccgcatactgcatttctgaaagccaaaataccaagtcactacataatgccttcctgaaagtcaaagtagtaattatttattacatacttttctttattcatttctactttttttctttagtgtttttctttctttctttctttctttcttttgagacagagtctcgccctgtcgcccaggctagagtgcaatggcacaagcttggctcactgcaacctccgcctcccggcttcaagcaattctcctgcctcagcctcccaagtagctgggattacaggcgaacgccgccatgccaggctactttttttgtattttagtagagacagggtttcattgtgttgcccaggctggtctcaaactcctgagctcaggcaattcacctgccttggcctcccaaagtgctaggattataggcgtgagccaccgtgcctgcccagtctttctttttttcctgtgattcatttacccatttatttcacaaacatatcttagccaccaacttacacaaagcattgttttagcacttgggatacagtggcccctgctcttcaggatgctataggttagtaatcaaataatcacagaatccacataaagctaaaactgtgtaagtcaaggacagagccagagagaaaaaaaaaaaaaggaaaattaaacttttagaaagggcttagagtctcctgctagaggggccatgcaattactcagtagtataacagctttcccagatttcatttttgacttccaaaaagcaagaactccttgggcaaaggaaaactcagaaccatgttgagaaatctttattcggattagtcaaaaagaaaccaagtgagaatcagacatatttcaaaataaacattaaaagcaaaaggcctctgtctttttagattatctctctccatctgcttcctaagaacatggcagctcttaattcataccatcctaaagagatcttcaaagtgtccacatttgtagaagcaagcattgaggtcaactaagagaacaggagtgatccttggatccctttgaggacattttatggggcctgaaggatttaaaggaatttaattaaatttaacttaaatttaattaaaggaattctaagacataccactggtgtcttagaagactcctgaattggagttcctcttgctaccttcatggttttccatcctaaagacacataggccaggaagaaatgatcatatttaaatccagattctcacaaaactcacttcagtgatgctctccggttggaaagatcatctcctgaattaaaccctctaattcctatggcattacttatattaataaaatcaaactacagagccaatttcataatacacaaatcaccactgccattcttaaatcaaagaaatgaatgaatatgttctattagaatgtaattctgcatgtgaaatgacacaatcagcgccaaactgcaggaggcataaatagaaacagccattttctaagatagtgtactgtaaaactttcattctaatctgcattggtaacataagatcttgaagcattatatttcggatatgatgaagaatgcaattattaaaacgtttcatctcaacaccattaaacctatcgtgtgtattttccagagacctggaaaggatagagattccaaatataaacacacgaatgtttcaacccatgaagaatctttctcacatgtacgtatgtataaaaaatggaggaggaagcatggtaaaatgcttcaaattatctcctgtaaactgtctaatgtatcactgcaatgtgtttctatgcaacaaaagtcattttattgagaactttttaattttgtcacctttggtccctgttcaaatagagttcaatattatgatgtgccgacatgaatgacccttctctctggaaacacgctgtttatccaattgaggcccaataagagatcagggtaccagaatgccacatattacacaagatgaagtcactggctaaatggtactcaggcgacctggaaacattaattcacctctcatgaatgagcagtcggctgctctaagatttgagcccttaggaagaaaggtgctatataaattccaggtgttgttactgttactaagtgcactacaaaatggaggtaattaatctttatagtagtttttgataagtcactttagtatatttggctaaagtgcactgtgtaagttgtgttaatatatgtgttcataattatttctttatcaactgtgtaatctatgtgttcatgacttcaaaaattaaccattgttatctacaaaaatagggagaattcaatgtaagattacaagttgggtacagcaagtggatgaaatggtggctgtgaaggtgctcttttgggagaacattttgtttatgtctgtgcagtaggtgtgattactaaaagacaagtgtttgatgcatttccacatggttttgttcattttcttctgtggcactattagataaatgtttaatgagggtatcatttccttgttgtaggcaggatatggggtcttcttagtatagagaaattcaaactatttagaacttgatggagaaactgctgtgttaaatatagacctcaggccaaggtcaagaacaggtcaacaattaagagaaaacacattagcttagttacttccctactaagtaacctacttactcttctttcatattccttgtcctttatttattgaaacatccccaccttgtcaccccaatccctttcacctgacaacgagtagtgtggtcacagcgcaagggggccctgaaccactgagagatgctagacggttctatctgaagatagcagacataatggaatcctaaaaggaccaagaagtcaagccatgtgtgtgccagggactccagggaaggagaagaaaagagttcattatagttcaggttcctttaattggatgccagatattaggaagctgaactgtaagctacttgaaggcaagaattgcctcctgtttctcttcctgacacacccagtgctaaattattcatcatccacttgctgatccaagaagtatttgttgagtacctacacgtgccaggcactgcgttagacaccagggacataaagatgaacaaaagagaggatgtctgtgcctgagagcttccatttagctttgggaaccagagagtaaaggagcaagtgagtaaatagtgaataagtgctacaaatttaaataaagcaaggtaagggatagaaggaggattgaggattaccactgaggtggggtggatggaagttggagtgaagtgacatttgagcagacctgagcggagggagaaagcagccctggcagtatccaggggaagaatcttccaggcaggggcataagaaaaagcaaagctctgagtagggcatgagcatggcttgtctgagggtgtgtgtctgggtggagtaagcattgcagggcaagaggcgaggtggtgcaggcagccaggggtctgataccaggcagccttggtctagaaactgaattgagaaataacaaaaaatgaattaaactgacagcaaagagcagaaaagtgaactgaaagaagtagcaaacgaataaaaatagagcaagttttatgagagaaaattctaaacacacaggtttgagggatggcaatggccagatgacctcacccattccagcacttccagatgccttgtgcccactgaccacaaacaaacttattttcccatagaaactaactccttccagaccctggtaagaaatctgtgtttaaggcagctgcttctcttcccagatccagtgagaatgcattttcctagtgtcagaggtcctcccttcctgccagtgtcagggaagaggaggctagttaaagtcagtagacctcggtgtttaaaactcaggacaagacagaaatgttctaggtgagcgacaataggcttttcccatcccaagcccaagcccctgaaagtctgctggagatcactttgacaaggataatccacttttcataataccttacagaataatcaataaaccaatgtgaccagggaacatacagcccctgagatttcaaattttcatgtcctcccaaactctcctcatccaagttactgaattcctatgttctttaggttcctcatctttaaaaggatactgcctagtgtttcatgaagaactctttaattatataaacactactaaacaaaaataaacaaacctagtgaagttgtatacctagcatggagttgcagccccgataggactgcaactgtaggttctgtatcattgctgcaaagtgacactttttttccctttgactttagttatttcaaaaactttcgatactgctcctatgctccccatgtccgaatatgtatgcccttgacggacggcatttcttcatttgaggacctcttggctaacaatatcctcagaatatttgtctgggttatagctttcattacctgctttggaaatctttttgtcattggcatgagatctttcattaaagctgaaaatacaactcacgctatgtccatcaaaatcctttgttgtaagtatgtttccagtataagtagattaaggatatcttctgtgagttgtgcactagacatatatatgtatttattggctttcaacaaatggcatttaatgtgaattatacatcctgggcacatttttttttctaaatataaaagttctggctctttgtggctttgttttaggttgtatgaccttacagtggcctgctctcaggagtatgtcttgggaatgggctaataggcaaccaatgagtcaagtgacagattataaagttttgtgggtgataaaactaatctgaacttcaattacaatgatacctatgctcattaggcctggaaaatgattccctttattaactatgaagatactatatgttaactgtttaacaactagtccttcctccttccagaaaattcccattccgatttttttaaactacaaaataaaaacatagtgtagtactttagaaatattacagatttttaagtccactcgcttcttggtactcagatgtttacattagttcatttgatataagatgaaaggaactagatctaattagaaaattaaaatgctggaaatagacttaatcagaaaactaaaacagggacattggaaactgatgacatacactgtttcaattcttccacaggtgctgattgcctgatgggtgtttacttgttctttgttggcattttcgatataaaataccgagggcagtatcagaagtatgccttgctgtggatggagagcgtgcagtgccgcctcatggggttcctggccatgctgtccaccgaagtctctgttctgctactgacctacttgactttggagaagttcctggtcattgtcttccccttcagtaacattcgacctggaaaacggcagacctcagtcatcctcatttgcatctggatggcgggatttttaatagctgtaattccattttggaataaggattattttggaaacttttatgggaaaaatggagtatgtttcccactttattatgaccaaacagaagatattggaagcaaagggtattctcttggaattttcctaggtaaattatattttttcatttcctggaaaaacataattttgctagaaatacgttaaatttcagcaaaggtggatttgtttgtttcagaaagtgagataacatagtcaagactgtgtcctttttcacacaaaaaagtttttactattgtgtttattgaagttttattaaactttttattagacaatatttagtgtggaaaataaagacatactaccaggatctctggatgatatttttattatccataagatcctttgatttcatgtttatatgaaatgactatgagctgaaggaattccagtttagtgcctcatcctgtaaacctaccaagttatttaaactcttttttttttttttacaatctagttatgagttaagtaaataataataaaactcaggaaactgacaagtaagagatatctgaatggaaataccaggaaggtttattgcctttgttaaatgcagctgttaagtcagcaatgtaagggtgcttaataaagctctttcctttccagttttctcaattccttctaatattgtaaaagaagactctgtgttctttagaaatgaatgacaaatttagccctttaaagttaaaaacactttttttctattttctaatatgtatccctcctgcttagaattaaggcctttcctatatcctctctttggggcgatcttcttttgactctctcttctaatcttttcttcccatccaaggagccaacaagctcttctgtcctttctttttcttcaaaatttgcttctgcttctgctccttccagtctctacccactgctgttgccttagttggaaaccttactccctcaaccctgaattattaccttatcccttactggtctcgtaacctctgggaccttccccttcctctcatttatctattcactaccattgttatattctctgactatcaaaaggactgtgtacacctccactcagagaccttcagtggctccctagtactatcaaggtcaagtttaaattagtcacttaaaactcatcatgacatgaccctaaccatcatgcccagttcttctccattactccttctcttcctcctctgaaaaacagaacatttagtttgcaccactttagtaatacccctcacacactaccctatttggtagttatttggtcatagatatgtcattcccaggatccagagtattacaggctgttctttgtatttccttatcattcattccctcattactcctaacataggtgcacttaatagagactctccctgaaacacacaccacacacacacacacacacacacacacacacacacacacaccatgacatgcattgttcaaataggcatttattcagcactcactataggctgtgcactatatactatattaggtacgggagaaacaacagatccagcctcaaaggccttacagaccacagaggaggaggcagacaagtcaacatgtcctcacatcacacacaggctgataaatgccatcaaggaagagtacagaatgttctaggagccccagatctgagtaacagggaaggcttcccaaaagaaatgaattcaaactgaggcccaaaggatgaggaggtattagccaagcgaaggcagaggagggtggggtggggtctgtgttccaggaagacatagtggattcccaggctcaaagccagggaacagggtaagatgaaggactgaagaaactcatttggtggagcataccatgcaggcatggagctcggcccaaaggagttaagtatctgggatatattccagatagacaaagagatcgtcacacacacacacaaacacacactcacaaaatcatcatcatcatcaatttgcatatgagaggaagagtcccagagctctaaagtacaattttttttctgtttgaagaatataagaatacataatttttaattaattttttatttgaaaatagttttcattttaggaaaggtgcaaagataatacaattttccacatatgccccacctggtttcccctattgttaacatctttcttatattactatcgtgcatttagagcatacacttttttttttttttgagacagagtcttgccctgtctcccaggctggagtgcagtagcgccatctcggctccctgcaacctccgcctcccaggttcaagtgattatttcgcctcagactcccaagtagctgggattacaggtgcccaccaccatgccccgctaatttttatatttttagtagagtccaggtttcaccacgttggccaggctggtctcaaactcctgacctcaagcgatccgcccacctcggtttcccaaagtgctgggattacaggtgtgagtgaccacacccagcctagaacatacacttttgatcctttctgtaagtctgctatcagaatttggggcaggggagcattttctaacagagtgattatcttttacgcttaactaaattttttggaaagaggcctaagacaactagttttataaaattttaccgtatggctttatactatgatttcattgaatacgaaatgatttggataaaaataacagatcaccttgaatttaaagtatttttaccctagacttcaccaatcttacatacagtctaggttcagattcatattttttaacaactttgaaaatatatgcaagtcttattttcactgtgagaaatgagatgatcactcaggattttagcgacagcaagaataaagcaaagagtgactaagaagtcagcatgaaaggtaatagtgatgttaggtgggaatcttgtgaatatatttgggcccaaaagaataattcacatagttgaatttttaacttttttcttttttttaataaaattagtctaaaggttctgaaccacagtagtttaatttactgtaagaaacatgaagaaaaataaacaaaaatacatttttgttctatgtgttattctttttttttttttttttttttttttttttgagacggagtcttgctctgtcgcccaggctggagtgcagtggcgcaatctcggctcactgcaagctccgcttcccgggttcacgccattctcctgcctcagcctcccgagtagctgggactacaggcgcccgccaccgcgcccggctaattttttgtatttttagtagagacggggtttcaccttgttagccaggatggtctcgatctcctgacctcatgatccacccgcctcggcctcccaactatgtgttattcttaagaccaaaaacattaggaataatgtttctcagacaattatattcatgataaattccaaggttattttattcatttattaaaattatttttatttatttttattcttttattattcatgtttataggataagaaaatggggttgtttttattttttgagatgtgcatatgattacagtaatcccttaaggtttgaatctgcagagagctgaaaacaaaaatagcttcttttcatgctttaaaagagctagagtttacttcatgatatgcctagatctgaattttagaagtctataattcctcataagggtttatgtatttgaaatctctttttcatctggtgaacccaatttctttgtttttattcccttgaacctgggttttacctaacaccactgggcttatataaaagaatgcttcctggaagtgcccgtggaagaggcactgtatttaacatctaagtacaggttaagcatttgtaatttgaaaatccaaaatttgaaatgctctaaaatatggaactttttgagcatcaacatgatgccacaagtggaaaattccacacctgaagcttttgctgtctgatggttcaatgtatgcaaactttgtttcatgcccaaaattatttaaaatattgtacaaaattactttcagactatgtgtataaggtgtatatgaaacataaataaattttgtgtttagacttgggaaccatttccaagatatatcattatgaatgtgtaaatattccgaaatccgaaatccaaaacatttctggtttcaaacattttgggtaagggatactcaacctgtaccacagtaattttactgttgacttttacgcctgagatgttaaaagtgtgcttttcccaacaggtgtgaacttgctggcttttctcatcattgtgttttcctatattactatgttctgttccattcaaaaaaccgccttgcagaccacagaagtaaggaattgttttggaagagaggtggctgttgcaaatcgtttcttttttatagtgttctctgatgccatctgctggattcctgtatttgtagttaaaatcctttccctcttccgggtggaaataccaggtcagtctcttctatcattcccaagtataatacatcgtgccttcttacgtccttcttttgacaaggccagagtctaggacacataataaattattcataaaaaccaatacaaagttatttccctccatgttttataatcagtattataaaatagaaactgagtagtggtgcaatccaaccaggaataataaaaagcaggagctacagagaaactaagtctgagtatcttgcttctatctgagcaagacattggttcttcactaggagtatgcataaaacaatcaaaatatacatgcccaggttccacccgggactgttttgtctctagaggctaaaacctatagatggatgttatgtaaaaattcccctgtgattctgatgcacactcatctggctagaaccaccattctattccatggtcctagccataaaatgtcatgctgggctctgcggagcacgagatatttcctgaaagagtctcctccaaaaggccaaattccctgaacacacctctacttcaaccagagaaaatcacctttccttagcagaatttcatctgaagccccttctggaatctagagatcacagctatttaggggccaccacccagggctttaacctaactctcagtaaaatagtttggaatcatcgtcaacctactgttccagccgatagcagatctacttgggagttgatccaagacagtaattgtgtcttatacatcttgactcctcagtgtcaagcaggatgcctgatactttgatagcccttatgaaagagtgatgaatgcacagacgataaacagctgtaacaacctatgtccctcctgtgcactcagttgtgaggctatgtcaaatatcttgctgcaaaataccacacaacattcacaacatcctcttaagctatcagttctgtctccacatggcacagatgctcctcaggccgtgtaggatacgaaagtgaaaattaggaaggagatcaggtcagggctgaatacttggaagcctttgctgggtggtgaaagaagaagccataagagggttttgtgggaggtcatgtggggagacccagttgcacgtgaagaacagagataattaaatgttaatagtcacagttgttcacttgatgaacagcctccaatctattactgctacctggacatctcaattttacaccctaacctttcaaattcagcaggacaaaagtgtccgttggcctccattgctcatggaacaaagtccaagtgctgggatgagcattataatatttcttacctcccaccctcgtacactgtgatccaggcccactggaatgattgggctttgttttctatgcttttctgagaagacaccagcctttcctgaagctgtccccccaacctggattatactttcaccttctaagattttagcgtactaaacaccacttcccatcctccaaggctcaacccaaatactccctcttctatggtgcagtgccattttcgatctcttctcaccccactttcatgcaatccagttgcttaaacatccatgatggtttgtttacaccaggtttattggcctcatgtgaactgcctcatagcgacactatttcttagtgtgtccattgtgtccttcagatgataagcttggggaggcgtgtatgtcttattcttctgtgcattttccacagtgtttttcacatagtgcttttgagtaaatgattagtcaactaaagaaggtgagctggtccaagagtgatggaataggggatcagtctcatcaaccccctccccactactgtctccacactttcttcaaaaaaaaaaaaaatggagtctcgctctgttgcccaggctggagtgcagtggtgtgatcccaactgactgcaacctctgcctccctggttcaagcgattctcatgcctcagcctcccgagtagctgggattacagaagtgcaccaccacacctcgttaatttttgtatttttagtagagacagggtttcaccatgttggccaggctggtctcgaactcctgaccccaagtgatctgccccctgctttggcctcctaaagtgctgggattacaagcgtgaaccaccaagcctgaccccgtctccacaccttttgatgtgctttcccacttgtagggggacgcagcctagtgtggtggaagaaggacccagcaacaagtaaggcggaggtcctgggttcctctcctgcccctgccactgacttgttgagtgatctcagggagaccatctcacctcacctcaatgagactacctctagatggtccctcaaattcctgcctgttttaatcttctttgaggctttttctgtctgtatgaggccactaggactgctataacaaaggacgtccagttctggaggctggaagtccaagatcaaagtgtcagcaggtttgatttctcctgagcccttctcattgcctcacaggaggcgtccgctctgctgtgtcctcacatggcagcagaactcatcatcctcagcgagtctacgacacctcagatcatgataagcttagtaaatacccccatgaagggaactagaagagtagaacattgtcttgtggaaacattattgagccacacaccagtctttctttacatgtatagttcaatagtctgaggtttgtcttgaacacctcagtggaaccaggaaaaatgtcatgatcacagttgacaaagcttcttctcgcttgcccagcttcccatggcgttgtaagaaatgctgccttcactgacctaaaccaaccctgtccccaccctccaagaagtctggcatttactggttatggcatgccactgacagtacctggggtcacccaaaagataggccagagttagcctatctcagaactcagctgctgctaatcttataagaagtctcatcccagcactttgggaggccgaggtgggcagatcacgagatcaggagatcaagaccatcctggctaacacggtgaaaccccgtctctactgaaaatatataaaaaattagccgggcatggtggcaggtgcctgtagtcccagctactcaggaggctgaggcaggagaatggcatgaacataagaggtagagcttgcagtgagccgagatcgtgccactgcactccagcctgggcgacagagtgagactccatttcaaaaacaaaacaaaacaaaaacaaaaagaagtctcattcagagtagaacttaagtctatggccataccaccctgaacatgcctgatttcattcagagtggaacttacgtggcctatttgcctttgcctaattgaaagcaggcactatcaggcattgtttttctgtgagattggggtgggattcgtgatcacaattccctttgtgggcacaacagaaaaaggccacttattttgtttttcttcaatcactaactgttcagattgtctaatttttttaaattagggacaaataatataaaacttaatttaagacaggctaaaacataatttttttctttcatattcctttcagttaaaaaataaggacaaggaagagaagataggataggaagagaggaaggtaaatatagaaaaggagaggaaagagatcaaaggaaaagaagaaggaaggtcagataagcagtcagagaagaaatggaaaaggaagaagacatagagaggaagaacagaaagatacaagaaataaggcagggtcaagagaagaacaaaataacagtggctgaaggataaaaaaaattatgagattgcgaaggaggagagcagaggatgatgagagaaagcatcatgggtcttactagccacctcttcacctgaatggggagttccttgaaattgtgaagatgtgagaggaagtagcgtcctgtggtaaggtttgaggatctcaagtcttagtaccaaaaaagcacatcagcagagctgactctggcccagcccgctggattcagtgagcaagttatcaccagccccctttaacagagagagcagatgaagttgaggaagcataagtgattcgctcacactcaacctagctaagtgtccggccacaggatcaggccacgtgtaaagggaaagatgcattttgtgctaaccaagcaaatgaaatgatgctctcaggaaggacactatcattccaaatttcacctcacaaagaacttcttgtgacctctttccctgaatattctattagcatttgtagggctgcacacaagagaatttcatcaagtttagggaatgcattcctctttgctcttcaaagcttttaataggataacaggataaccagaacaccagggcagggcaataagctttgagaactggatggagttaagaccaaggtcagatctggcttggtccaggggaccagaagttttgtgaacctcactctattgactaaagattatttctttatttttttattttcctataaaggaaggtgataaaataggaaaaaatgcattatatagcaatttatagtttacaaaatgttttcacatatttcctgttaatatcacaatgaccttcacattatttactgaaactcagaaaagttaaatcgttaagaccttgaattcatagcttctgtgctcttccaacaaagattttccttcaggtgagagaaaacttaaaatgtactatgtctccctctcataaatagcattgactgcaaagtgttatttgtattttatgtctatttaaaacttcaacttttttttcacactttgcttccttttccagacacaatgacttcctggatagtgatttttttccttccagttaacagtgctttgaatccaatcctctatactctcacaaccaacttttttaaggacaagttgaaacagctgctgcacaaacatcagaggaaatcaattttcaaaattaaaaaaaaaagtttatctacatccattgtgtggatagaggactcctcttccctgaaacttggggttttgaacaaaataacacttggagacagtataatgaaaccagtttcctagcaatcattttggatcactggactttcagtggactacctaaaacaggggacagcttttggaagatgacatctgcaatgcttttcatctttaccaacggcaagcctttctgcacagagagcacagcagaatggctcctgtcactgcattccaatggcagctgtactatctaccaaccatgctgaggacagcaccaaaggttc

SEQ ID NO: 1090 - protein, 735 aa, Homo sapiens
MVTLCFCPFFHVDFALTQGSMITPSCQKGYFPCGNLTKCLPRAFHCDGKDDCGNGADEENCGDTSGWATIFGTVHGNANSVALTQECFLKQYPQCCDCKETELECVNGDLKSVPMISNNVTLLSLKKNKIHSLPDKVFIKYTKLKKIFLQHNCIRHISRKAFFGLCNLQILYLNHNCITTLRPGIFKDLHQLTWLILDDNPITRISQRLFTGLNSLFFLSMVNNYLEALPKQMCAQMPQLNWVDLEGNRIKYLTNSTFLSCDSLTVLFLPRNQIGFVPEKTFSSLKNLGELDLSSNTITELSPHLFKDLKLLQKLNLSSNPLMYLHKNQFESLKQLQSLDLERIEIPNINTRMFQPMKNLSHIYFKNFRYCSYAPHVRICMPLTDGISSFEDLLANNILRIFVWVIAFITCFGNLFVIGMRSFIKAENTTHAMSIKILCCADCLMGVYLFFVGIFDIKYRGQYQKYALLWMESVQCRLMGFLAMLSTEVSVLLLTYLTLEKFLVIVFPFSNIRPGKRQTSVILICIWMAGFLIAVIPFWNKDYFGNFYGKNGVCFPLYYDQTEDIGSKGYSLGIFLGVNLLAFLIIVFSYITMFCSIQKTALQTTEVRNCFGREVAVANRFFFIVFSDAICWIPVFVVKILSLFRVEIPDTMTSWIVIFFLPVNSALNPILYTLTTNFFKDKLKQLLHKHQRKSIFKIKKKSLSTSIVWIEDSSSLKLGVLNKITLGDSIMKPVS

SEQ ID NO: 1091 - DNA, 901 bp, Homo sapiens
  source
  (1)..(901)
  CDS (201)..(701)
ctctgtctctctctctctctctctctatccatctatctatcttgcaaagcataaaggcaaaagtaaataataattcatataattatctaagtgagcccagggaaaatattaattcctaacaatcatgtgaatactctttgtcttatagcctcaccattttatttttatattagaatcaaagcatctatttgatttgcaaaatggtaaaaagcttattcttaatccatcttaattatcttttcttccctctagataacttcagcagctcagattcagttaatggatggagtaataaatcagtggttactgaattcaatttgttggggctgtctagctcttgggaactccaagtcttctttttctttatcttctctgtgttttatggagctgcagtgttgggaaacatccttatcatcatcacagtaattatagactctcatttgcattccccaatgtactttcttcttagcaatctctcttccatcgatgtgtgtcaggctacatttgccactcccaagatgattgcagacttcctcaacgaacacaagaccaccactttccagggatgcatgtcacaaatctttttcttgcatgtttttgggggtagtgagatggtgcttcttgttgccatggcctatgatagatacattgctatatgcaaacctctgcactacatgaccatcatgaaccggagggtgtgaactgttctggtgggggtttcctgggccattggcatctcacactcagccacccacctggcattcaaagtcaatctgcctttctgtggacccaacagggtagacaattttttctgtgacctcctcctagtgatcaagcttgcctgcttagacacctatggttttgagatactggtgctcactaacagtggtctgctctcact

SEQ ID NO: 1092 - protein, 166 aa, Homo sapiens [sequence omitted]

SEQ ID NO: 1093 - DNA, 979 bp, Homo sapiens
  source
  (1)..(979)
  CDS (201)..(779)
acccgaagctccgtgctcgccccatgtacattcttctgggagtgctctcattcctggacatgtggctctcctcagtcatcgttccttgaattattttaaacttcactcctgccaacaaggctatcccgtttggtggctgtgtggctcaactgtatttctttcacttcctgggcagcacccagtgcttcctctacaccttgatggcctatgacaggtacctggcaatatgtcagcccctgcgctacccagtgctcatgaatgggaggttatgcacagtccttgtggctggagcttgggtcgccggctccatgcatgggtctatccaggccaccctgaccttccgcctgccctactgtgggcccaatcaggtagattactttatctgtgacatccccgcagtattgagactggcctgtgctgacacaactgtcaatgagcttgtgacctttgtggacatcggggtagtggccgccagttgcttcatgttaattctgctctcgtatgccaacatagtaaatgccatcctgaagatacgcaccactgatgggaggcgccgggccttctccacctgtggctcccacctaatcgtggtcacagtctactatgtcccctgtattttcatctaccttagggctggctccaaaggccccctggatggggcagcggctgtgttttacactgttgtcactccattactgaaccccctcatctatacactgaggaaccaggaagtgaagtctgccctgaagaggataacagcaggtcaagggactgaatgaaaataagtaactatctacggccataccaccctgaacacgcccgatctcgtctgatctcagaacctaagcagggtcgggcctggttattacttgggtgggaaaataagtaactacagccacataaccatcgctaccactctcttcagctactgctgcacgtgacaaatgttcaataaatagatgttagtttcagcagaaat

SEQ ID NO: 1094 - protein, 192 aa, Homo sapiens
MAYDRYLAICQPLRYPVLMNGRLCTVLVAGAWVAGSMHGSIQATLTFRLPYCGPNQVDYFICDIPAVLRLACADTTVNELVTFVDIGVVAASCFMLILLSYANIVNAILKIRTTDGRRRAFSTCGSHLIVVTVYYVPCIFIYLRAGSKGPLDGAAAVFYTVVTPLLNPLIYTLRNQEVKSALKRITAGQGTE

SEQ ID NO: 1095 - DNA, 358246 bp, Homo sapiens
  source
  (1)..(358246)
  CDS (201)..(326)
  CDS (605)..(1294)
  CDS (29165)..(29206)
  CDS (39051)..(39221)
  CDS (72539)..(72763)
  CDS (133049)..(133353)
  CDS (261460)..(261526)
  CDS (291173)..(291325)
  CDS (291513)..(291770)
  CDS (302538)..(302800)
  CDS (325058)..(325316)
  CDS (330441)..(330609)
  CDS (337750)..(337828)
  CDS (343822)..(344071)
  CDS (358008)..(358046)
  modified_base (547)..(646): a, t, c, g, unknown or other
  modified_base (1659)..(1758): a, t, c, g, unknown or other
  modified_base (2818)..(2917): a, t, c, g, unknown or other
  modified_base (17179)..(17278): a, t, c, g, unknown or other
  modified_base (17497)..(17497): a, t, c, g, unknown or other
  modified_base (17499)..(17499): a, t, c, g, unknown or other
  modified_base (17518)..(17518): a, t, c, g, unknown or other
  modified_base (51382)..(51481): a, t, c, g, unknown or other
  modified_base (64360)..(64459): a, t, c, g, unknown or other
  modified_base (71021)..(71120): a, t, c, g, unknown or other
  modified_base (77979)..(78078): a, t, c, g, unknown or other
  modified_base (81210)..(81309): a, t, c, g, unknown or other
  modified_base (103441)..(103540): a, t, c, g, unknown or other
  modified_base (130963)..(130964): a, t, c, g, unknown or other
  modified_base (130976)..(130977): a, t, c, g, unknown or other
  modified_base (130979)..(130979): a, t, c, g, unknown or other
  modified_base (130984)..(130984): a, t, c, g, unknown or other
  modified_base (130987)..(130987): a, t, c, g, unknown or other
  modified_base (130997)..(130999): a, t, c, g, unknown or other
  modified_base (131002)..(131002): a, t, c, g, unknown or other
  modified_base (131019)..(131020): a, t, c, g, unknown or other
  modified_base (131022)..(131022): a, t, c, g, unknown or other
  modified_base (131025)..(131025): a, t, c, g, unknown or other
  modified_base (131031)..(131031): a, t, c, g, unknown or other
  modified_base (131034)..(131034): a, t, c, g, unknown or other
  modified_base (131048)..(131049): a, t, c, g, unknown or other
  modified_base (131059)..(131060): a, t, c, g, unknown or other
  modified_base (131063)..(131063): a, t, c, g, unknown or other
  modified_base (131065)..(131065): a, t, c, g, unknown or other
  modified_base (131070)..(131070): a, t, c, g, unknown or other
  modified_base (131090)..(131091): a, t, c, g, unknown or other
  modified_base (131127)..(131129): a, t, c, g, unknown or other
  modified_base (131142)..(131143): a, t, c, g, unknown or other
  modified_base (131151)..(131151): a, t, c, g, unknown or other
  modified_base (131159)..(131160): a, t, c, g, unknown or other
  modified_base (131163)..(131163): a, t, c, g, unknown or other
  modified_base (131187)..(131188): a, t, c, g, unknown or other
  modified_base (131195)..(131195): a, t, c, g, unknown or other
  modified_base (131206)..(131206): a, t, c, g, unknown or other
  modified_base (132875)..(132974): a, t, c, g, unknown or other
  modified_base (275553)..(275553): a, t, c, g, unknown or other
  modified_base (275707)..(275806): a, t, c, g, unknown or other
  modified_base (296059)..(296059): a, t, c, g, unknown or other
  modified_base (296073)..(296172): a, t, c, g, unknown or other
  modified_base (313282)..(313381): a, t, c, g, unknown or other
  modified_base (329478)..(329577): a, t, c, g, unknown or other
  modified_base (338423)..(338423): a, t, c, g, unknown or other
  modified_base (338528)..(338627): a, t, c, g, unknown or other
  modified_base (348900)..(348999): a, t, c, g, unknown or other
  modified_base (353710)..(353809): a, t, c, g, unknown or other
  modified_base (356522)..(356621): a, t, c, g, unknown or other
cggctcctttcccaggcaccgcgtccagctcccgtgcccgccccagcgccgccttcgccagcggccggagcccggcaaccgcttgcccgtggcctcggcaggttgtgggggtctctagggtctggggtctccctgcagccccaggacttcagggtcaggctctctccggacactcgggaccgtccctccccgggaccgtgatgaacctgcgcgtctacgcggccgccgggcgagcggaccggcagtggtctctgtgtgtgcatgtgtgtacgcgcgtgtgtgctgggggtccccgctccggggtcggtcttccccggcgctcgcaggtgggaggcgtctcctccccgcgcgggggcggggccgggaggtggaggcctcgactgcgagaggcgcccccgcaccagggcggtctgaggctgtttgtgctgacatggggcaccaccctcggcggcggcagggagtcctgagcccgaacgtacgagcgccccctgcccctaggccttgagtgacatgccgtcctcagactttgcccgcctgtccggagagnnnnnnnnnnnnnnnnnnnnnnnnnnnnnnnnnnnnnnnnnnnnnnnnnnnnnnnnnnnnnnnnnnnnnnnnnnnnnnnnnnnnnnnnnnnnnnnnnnnnggcctgttcccggtgcatggccggggctcagagggcaagccctgtggagaacttaagaaggaaaagggcatccaccggctggaggccatgctgttcgccctggatcgcatcaacaacgacccggacctgctgcctaacatcacgctgggcgcccgcattctggacacctgctccagggacacccatgccctcgagcagtcgctgacctttgtgcaggcgctcatcgagaaggatggcacagaggtccgctgtggcagtggcggcccacccatcatcaccaagcctgaacgtgtggtgggtgtcatcggtgcttcagggagctcggtctccatcatggtggccaacatccttcgcctcttcaaggtcagtgccttggttggtcccctgaggtgctcttcccccaacggactctgcccgccccacttcagggtgccaggcctggccgaccagcccctttttcctccttttttcctcactctaagggacagttttttcctcagagcagtgtctgagaatttggggcagctcttcctggtttcagtatgttgtcttgtggtctcagcacaggcacagcagatgaaaggcatcgggacccagccttgtggcgctgaccgaggtgctgaaacagcacctgccgctggaggctcggtgagcaactccactcctctctggggaattctgtaccaggaggaaaaggatgttctggagaacgacagagggaggaggagataggcagacagacagataaaaagatacgcaggtggatagacagacagacagacagataagaagaatggaaatatgaatgctggagattgccagggagaaaaagcaagacttttgttttgacactgttttcatataattgcaattcccaagaaagatgtttttcttctgggtagttgaggaagctccctgtggccctcctgccctacccgagattatggttggagaatgtgtcctcattttttggatggggtgtggggctgctgagcctgcagagaatgcagatnnnnnnnnnnnnnnnnnnnnnnnnnnnnnnnnnnnnnnnnnnnnnnnnnnnnnnnnnnnnnnnnnnnnnnnnnnnnnnnnnnnnnnnnnnnnnnnnnnnngggagagaagccaggggccacgagatcactctctggcagcctcgtgtggggttggtgatcctaattaaaagttcagatgcaaaaggcttgatgatggaatttctaattaaatcaatttcatctcgtctgggagacaggtttgcctataataagcatgaaattaataattatgtatagaaactagctattgctcaaagcagagccgttttacacaaccttccagggctcctgcccgatcttttgtgttggagacgagtgggccacttcagcccttagtttgacagccaggagtggaggcgggggctcagcaaggagaggaagcagggctggtctcccagctgctgccctgaggatcctgccccacaggatgggggcggccttctcactagaggctgcagtgtcaccctcagattctcagtgtgtgtgtgtagatgttgcatgtgtgtgtgtaaatgcatatgcatgtgtaggcccaccgtgtacgcaggagacaggttttacctgacagcagcatgggctctgcagctagttcgagttcaaatcctggctcagccactcactagctgtgtgagcttgggcaagtgacttaacatctctgtacctcagtttcagaaaaatggggagaataagagggcccacctcataggactatggtaagattgaaggtgttaaggtgcatgaagctacttaggacagttcttggcacatagtaagcacccagtaagtgttaggtctcatgatgatgaggattgcatgtgtgtgtgtgaatctaattcaatacaattccgcccaaaccagcctgtgatgagtgtgaacttgacacatccatgcccttgaggtggaaataaataagagtcattcctggctctcccagaggtggagcctaatgtttaccgctccctgtgtctgtcagcataggtgaggtgatgctgccataacaaaaaaccctcaaagctccgtggcttaaaatagcgtcagcttaactcttgcagtgtgacatgtctatggaggttggctaggcactctactcagggacccgggctgggctggaacagtgctnnnnnnnnnnnnnnnnnnnnnnnnnnnnnnnnnnnnnnnnnnnnnnnnnnnnnnnnnnnnnnnnnnnnnnnnnnnnnnnnnnnnnnnnnnnnnnnnnnnngaattcatctggtcttggactttttttttattagcagtttttaaaattactgtttcagtctcgctgcttgttattggtccatgcagagtttttatttcttcctcatttaacctaggcaggttgtatatttccaggaatttatccatctcctctagattttctagtatatttttccacccctttactttatgtgagtccttacatgttaggtgagtgtgttgaagacagcagatacttggtggatttttaaccattctgccattctgtatattttaagtggaacatttaggccatttatattcaacgttaatattgagatgtgaggtactattttattaatcattgtgttagttgttgcctgaataccttttttttcattgtgctgttgttttatgggccctgtgagatttatgatttaaggagggtgtattttcaggttttgtttcaagatttagaactccttttagcatttcttggttgtgctggcttagtagtggtgaattctctcagcatttgtttgtctgaaaaagactctctcttcttcattcatgaaggttagttttgctgggtacagaactcttgaccggcaattattttgtttgaggaagctaaagataggaccccaatctcttctggcttgtagggtttctggagagaaatctgctgttaatctgttaagttttcctttgttggttacctgatgcttttgcctctcagctcttaagattcttccctttgtcttcactttagataatctgattactgtgtgcctgggtgacaatctttttgcaatgaatttcccaggtctttgagctttttgtatttggatttctagatctctagtgaggccagggaagttttcctcaattattttctcaaatatgttttccagacttttagatttctcttcttcctcaagaacaccacttattcttaggtttggctgtttagcgtaatctcaaattttttggaggctttgttcatttttgttttttgattttttttttaatttgtctttgttcgattggattaattctgtcacctaggctggaatgtggtggcgtggtcttggctcactgcaacctctgcctcctgggctcacctcagcctccttagtttctgggacttacaggtgcacaccaccatgtcctattaatttttcttttttcttttttttttttttttttgtagagacggggtttcaccatgttgcccaggctggttttgaactgggctcaagcgatctgcccacctcagcctcccaaagttctgggattacaggcatcagctaccacatctgacccagaggcaaaccattttacgtctcagaatgcagtcttgtcaggatgagattattaggacgaattttagaccagtgttaagcacacagcagacactcagtttttgttagtccttgcacgtgtattaatacaggggtgtgtgggtgtgtgtgtgtatttgtaacacctagtgtctgcttatttttcgtgaattctgaagttttctttttggctttatactagaatgaaaggagcagaacaaatacagctactttttccttctgatggtccctgaagctgtggattatccaggcttatctgctctgccattcctcactcacaccttgttcattcgtgctttaacgtgtttttctcacatttatccataatgcctgccttctcttttcttctgttcttctctcatttcagactgctcagtagttaatcccacaaaggctttcctaattaagctgatagatttgttatcagtgctttctatttcattgtaaattttgtgtggttacctctagtttgcccatattgtgagtataattttggtatattcatgcctatgtgatatgcctgctcttgctaactagatgaaaagctacttgaagacctgtaggctttttatggtttctctacatataccctcccaggggcacagtactgtatacataatagatatttgaatttttttaatttccaaatagtaaaggtacttctatgatttccaattttaggcagttgctagtcttaatgacatgtgaatgctgagtcctccccagagaacttaagaggcctgtttggctcatcaggaacctctggttcactattctgaatattttgttctttgccagctttgtaataaacacttatcttttattcttctctgctttatttgtgatttactttgaaattgaaataccacactgtaatctctgttttataaatgcacattatatgtttctgtacactggttacttatctactttttacttgtcattatctctgctgttggactgcaagctggtgaataatagctgtttctattaggatagtatcagttgcaactaacagaaaactacctcaggcttaaattgtataggggatgtattaacttacatgtaaccgaaagatccagaagtggtacagactacaagcatggtttaatcagggattttacatcatttgtttgctgttctcctttttgtatcagctttttcctcattctggccttcttctgagtctcaaaatgacttaataaaatgctggccggacacgttggctcatgcctgtaatcccagcactttgagaggccgaggcgggcagatcatgaggtcaggagatcaagaccatcctggctaacacggtgaaaccctgtctctggtaataccacaaaaaattagccgggcgtggtggcgggcgcctgtagtcccagctactcaggaggctgaggcaggagaatggcgtgaacccaggaggtggagcttgcagtgagccgagatcgcgctgctgcactccagcctgggcaacagggcaagtctccgtctgaaaaataaataaataaataaataaaaataaaatgcttcctcaggcacagtttagggaatgtgagagcctcctgataatcatggaagagttgttttacccgggttctgattggtcattaccacatccagtcactgtggtgagcgagaatgacctgagtcaaatgcctatcactaagttcatctgggggctggagggagggttgcagagagtcagccccacccagtccacgtggttgctatacatgggaagaagtagaatgactgactacagtattcatgaaaacaggatggtttcatacttattttatatctcaactagtacccaaaagtattatatacatagagcatatatcacaatgtgcatttttcctcatttcattaagggagatggaaggttctgttagggaaagtttaggaataagatgattaaagtgagataaatcagaaatatttaataaggacctcagtgaagctgaagaaacagactcagtagaagtagagccataaggaagaagtacgtggtgaaaacggggcattagaaatgagtgctgaataagctgcagttaagaagctgctctgatacctagttcactactcagaacttagtggtagcagtgcctttgctctcacaagagtgaatgaataggctggtctcagacatttttctataatacctccattattttagtccccagtatgagatgccctcttagaaatgtggtcttttgcttgtttgtttctttgagacacagtttcactctgtcacccacgctgtagtgcaggggcatgatctcagctcatggcaacctccgtctcccgggttcaagtgattctcctgcctcagcctcctgagtagctgggatcacaggcgggcgccaccacatccagctaatttttgtattattagtagagacggggtttcaacatgttggccaagctggtctcaaacacctgacctcaagtgattcaccctcctcggcataccgaagtgctgggattacaggcgtgagccactgcacctggccagaaatgtgttgtgtgttaaatctctttcagcaggtccaaggagtaatgctgtacaagtatcattagtcttaagctttatatgtatttcagactttgcttgtcttcctttgcttatttttaagatatcccaaggtacttcattagttaccacaggttgagtatcccaaatacaaaatgctctaaaatctgaaacattttgagcactgacgtgattctcagaagtgtcaattggaggattttggattttcaggtttagggatgctcagccaataagtatacaagtattccaaaatcagaaacacttctggtcccaagcatttcggacaagggatactcaaacctgtagtgagttttgttataaaatttatttgcaactcagactggggaaaacttgatttgtttgtgccaaagtattttaataactcttctcactttattgaatgatatttttccccccagggaatggatttgtaaactcaagagcttctccaaatttgattggagctactggtgcaaatagcttaggcaaagtcatgcctacaaagtctccccctccaccaggtggtggtaatcttggaatgaacagtaggaaaccagatcttcgagttgtcatccccccttcaagcaagggcatgatgcctccactagtaagttgaacctttcttcaacttcattctttaaaacacatattttatacatagtcaatctgtagcttcctttggaattttctgtgccaccgtagaatctacacctattcctaataaatatttccattcaaaattagtatttgaagagacaagtctatttcaaatacacaaaaatcagattatggaaatttgcttaacagttacttaaaattaaagctaaatacgaacgtggttggaactggaggttattgtgttaagtgaaataagccaggcacagaaagatagatactgcaaggtctcactcatgtgggacctaaaaaaattggtcttgtggagatagagaatagaatgatagcagaggctgggaagggtgtgtgggtgggagacgggatgaagagcagttgattcgtgggtaaaaacatacacttagatacaataaatatacccctgtatttgataggagagaagggtgactatagttagcaacattgcagatggagtatatttcagagtagctagaaacgaggacttgaaatgttccccacaaataggaaggataaatactcaaggtaatagatgccccaaacacccttacctggatcattacgcattctatgaatgtaacaaatattcacatgtaccccattaatatgtaacacctttcgaatcaggttttttttttttttttttttgagtcgttttaaggagtgaaatttagtagccaagaaagaaggaaggaaggaaggagaaaacagctccctccaacagagacagagggaggggggattcaaacaaagagaaaacccctcgaatgagtttttaaaaagtaaaatacagagagattattatgtttaattttaattttaccaggctagaagcattaaccatgacttatttattctctgtactttgtatactttcattaatcaattaaacatgcttttctgtgagagaagcactaaactatttgttagaaaattctacataccaggcagggtacagtggctcacacctgtaatcccagcactttgggatgccagggcgggcggatcacctgaggtcaggagttcaagaccagcctggccaacatggtgaaaccccatctctactaaaaatacgaaaattagccgggcgtggtggcgcgtgcctgtaatcccagctactcaggaggctgaggcaggagaatcgtttgaacccaagaggtggaggttgcagtgagccgagatcacaccactgcactccagcctgggtgacagagcaagactctgtctcaagaaaaaaaaaagaaaaaattctgcataccacagaactattgtaggatagggaagaaagcacacaaacttgagtgagttattctccaattaattttatttgcttattccttctcaaataacctatttaactgtataaagaatgcaggtagcctctattccactccttgatgacggctttagggttctagtctcatttgtttttgagtcttaagtctgtttgtaaagaacaggagaatctatttatcgcccttagcttcctgtagaaaaaaaactagaatatataatcaagttttaaaacttcttagtttagcaactgtttgactactaccatactaaatgatatgccaggtgttctctctgctgagcagttgctaaactcaccattagagtttttgctaagtgaaagtgatgctgtcaggcttagataataattccactttggtataatgctttatagattccatagcaccttcatgtgtatattgtctcatttaattctcaattagcctgtgtcattgcaaggtagagatgtggaaactgagttaaaggttattacttgtccaagatagttcaaaatagagctaggaccaaatctctaagtcttacagtccaggtcaaaaaacaagtacttttttatctggttatacagaaatctggaaacagtcactcccagcctcacaattaaaaaaacttggatatacagaaagttcatagttttccttgaactcattatagtgctgagatttcacggcaaccaactggcccagatactccagagtcaaagacactgtaaggagagttgacatttgagcattagacaagacacagatggtaagagttaagctagggtgattggtgaattgctggaggccaggtgtacactgacagaactgtgtgaaactcctgggggccgcagtataacacagggtgagtctgtgttctcttgtatacttttttactccgtgaatcccatggggtgctcagaagctcctgaaaaggtctcgctgtggtacacaactgggagaggggaagagtagccactacactaggggcaaaaagttttgccaggatctttttgtcttctttctctaatatgaaacaaaagctttaatctctgagaagacgaacaacaaacattatcactcttagggcactgttgaaatcctgtttaatggaaaaggcaaaatatctcaaccagtggtgaaggaacaggaagacatgctcggtatggagcgatgccaggagagtggcaggatgactgagaaggccacagcctgaggcacaacaagagaggggatgacttaaagctgagagtggagcaggcactaggggaaaacctggcatgcagatccccacccccagagggatatgaagcttgtggtaggtgccctgatggtaaccagagcaacagtaaggctcaaacccagtccagcttctaatgaaattaactcgattcttgcactaatagcttagcaggagggaaaaacctgtaggtctattagtaggaattacccatgctgaaatacaaagagaaagaagagtgaaaacaagacaaaataaacagaattaagtatccaagagctatgcaccattatcaaatggtataacatatttataattggacttccaaaaagagaagagagaacagattaggagtaatattttaaataataaccagtaccaagtaggataattactactgccaacacacacatgcacgcatgcacacacacacacagatgtatgcacgcacacacactctcactcctagactgctaaaagcaaaagatcaagagaaaaatcttagagatacattacagaaaaacaaagataaggattagtaacatacttttttcttcacaaactaaactattcaagcgagaaaaagggagtaacattatttaatgtgctgaaattttttaaaaattcctcaccccaaaattctctacccaccaaaaatatctttgagaaatgaagatttcctcaaacaaaagtcatgggaatttattgccagcagacctgctctacaagaaatgttaaaggaagcccttcagcaggactgtgatcccagcaaaaactcgagtctacacaaagaaatgaacagtggaaatggaataaatgaagataaaataagtaaactctggttttccctgcattttataaacgttttatttttagaacaattttagatttatagaaagattgcaaacatagtacaggaagttttcatacaccccacacatcattttttctattaacattagtatggtgtatttgtcacaactattgaaccactactgatacgttattattaactgaaattcgcaatttattcagatttacttatttttaaccttgtgtctttttctattctaggatccaatccaggataccacattatatttagcaatcatgtctctttagcctcctcttgactgtgagagtttctaagactttccttgctttaatgaccttgacagttttgaggagtactagtcaggtatttttatagaatgtctctagttaagatttgtctgatgtttttctcatgcttatactgtggttgttggtttgactgaggtaggccatagaattaagatgccgttttcatcacatcatatcaagagtgcctactacatttattatcccttatctgatactcaggaccagaagtattccagatttcagattttttcaagttttggaatatttcccttatactaataagtagaacatcccaaatccaaaaatctgaaatccaaaatgatccaatgagtactacatgcgagtgtcatgttggtgctcaacaggttttagatcttggagcatttcagatttcagattttcagatttgggatgaccaacctgtatcgtcataactattgctgatgttcatttggtcacctggctgatgtttaacaggtatttaccaggtttcttttctgtgaagttactctttctcccgcttttcatactgtagcctttgggtaggaaattaccatgttcagcccacacttttaaggagtggggagttaaggcttcactttcttaagagaaggatatctacataaattatttggaattcttctgcacgggagatttatctcttctctctcatttattcaaccatttatttctatcaatatggactcgtgggcatttattttaatactttggtttataatacaataccacgtttttctgttgctttgttctagcttcagcttttgagggctatctacttgattcctatgtccctttgatatatccttatttttgtgggttttttttttcagggggagcaggcgcttttttattttccggcactataatatattctaggcttatcttgtgtattttctgccccagtcctagaatcaggcatttctccaaggaacattatttttatggagaatgaaagaaaccaagatccgagtgctttccctctttttaattgctccaaaaggtatctgactatgtaaggcaaaaatagtaactgtattttgtttctgtagcacatgtaaaaataaaatatatgacaacaaaagatgggagggaggaattgactctacacatgatgtaaatattatttgaagatgaactcaaggtaactaaaggtgtatattataaaccctagtgcaactacagaagaaaattttaaagaagtataaataagtcagtagaatagataaaatagaaatataaaaaatgctctactaagtagcccaagaaatgggagaaaagaagacaaaaagcaagataatggtagcttttaatccagtcatataagtaatcacattgaatgtggtgagaaagcgtcagttaaaagattgtcagatttgtgtgtgtgtgtgtgtgtgtgtgtgtgtgtgtgtgtgtgtgtgtgtgtgtgtttcttaaaaagcaatgtggtggctcatgcctgtaatcccagcactttgggaggctgagacaggcagatcacctgaggtcgagagttcgagaccagcctgaccaacatggagaaaccctgtctctactaaaaatacagaattagctgggcatggtagcacacgtctgtaatcccagctacttggtaggctgaggcaggagaatcacttgaacccgggaggcggaggttgcagtgagccaagatcatgctattgcgctccagcctgggcaacaagagtgaaactccatctcaaaaaaaaaaaagaaaaatgctgcttacaagaaatccactttaaatataaagacatagataaaagaagggagaaaatttaccattgcaaacaccaaaaagaaagctaaagcagacctattaatttcagacaatataagcttcacaacaaggaagagtatcagcgataaggagggacgtgacatagtccactttccaagaaataactgtctttaatgtgtatgcacctaacagcaaccttcaaaatacataaagtgaagactgatagaactaaaaggtgagtagaaaaatccacaattgtagttggagacttctatatccctctcagtaactgatagaacaagtaggcagaaaaatcagtaaggatctagatgatttgagcaacactcgaccaacatgacctaagagacatttatagaacacatcactcgacaacagcagaacacacacttttcacaagtgcacatggaacattcaccaagatcacatcctgtgccaggaaacaaactggcaaatttcagtgaattgaaatcaggcatattatattctctggccataaggaaatcaaactagaaatcagtaacagaaaggtagtaggaaaatggccatatatttagacattaaacaacatattttaacccaaggaccagagaagaaatctcaaaggaaatttaaaaatacatatagccaaatgaaaatggaaatacagcatcaaaattttgaggcccaactagagtagtgatgaggtgagatttatagcaacaaatgcctatatttgaaaagagggatcccaaatcagtaatctaagctcttaccttaagaaactcaaaaaagaagagcaaacttaaccccaatcaagcagaagaaaggaaaatgtaaagtgataccaattctacacagtctctttcagaaaaaattaggagagaacactttccaacttatttttttaggtcagcattaccccggtgcaaaaccaaagtaagccaacacaagaaaaaaagtctacaaatccatattcctcatgaactctagacacaaaaatcctcagtaaaaagtaagtaaattgagcaatatataaaaaggataatacatcaagaccaagttggttttatcccaggaatgcaaggctgagtctacatttgaaaatttattagtataatcagtatattaacaattgaacatctattcatcatttaaaaaaaaaatctcaatgaactagtaatagaaaggaacttaataaagagcatctacaaaaaatatacagctaaaatacttcataaggggaaagcattcagtcttctagcatttggagctaggtaatgatatttttttttctcaccagtcatatttaccatggtagtaaaagtcctagccagtacagttaggcaaaaataaatgaataaaatgcatatatatcgggaagagagaaattaaacttcctctattcataggagatagattctttcatgtagaaaagtgtaaagaaattataaaaaaaactcctcggaccaatcagtgagtttagcaaggttgcagggtacaaagttaatatataaaaatcgattatatgccagcagtgaacaattggagtttgaaattaaaaaaaaaaaatgatagcaccccaaataaaggaaggaaaagaaacatctaggtaaaattctgacaaaatatgtacagtctgtatgttgaagactgcaaaacactgatgaaagaaatgaaagaagacctagatgaatagatagatacatcatgttaatggatttcaagactcagtattgtcaagatgtcatttcttcccagattgatctgtagattaaacacaatttcaaaatcccagcaagctcttttgtagttactaacaagctgattctaaaatatataggtaaagacgaactacaatagctagaatgattttaagaaggaacaaaattttaaaaaaatactactactacccgatttcaagacctactacaaagctatagtaatccagaaagtgtgatattgacaaaaggatgggcacatagatcagtggacaaaacggctcagaaaatttacacctatacgtatatattcagctgggtttttggcagaggtagtaaggcaattcaacagagaaaggatggtggttacaacgaatggtgttgaaacaattctacatccatacacaaaacaaaaacaacccaaagtctgaaaataactcaaactttattaaaaaattaactaaaattggattatagacccaaatttaaaacaggaaactgaaatttagaggagaaaatccaacacaaaaagcaggatccataaagaaaaaactgatgtattggaggttgaacttaagttttgctctgtgaaaggcactgttcagagagtataggacaacctacagattagaagaaggtatttgcaagtcacatatccaataaagagtttgtatccagaatattttaagaattcttaaaacccaacagtaagaaaacatttttaaaagggcacaagatctgaacagatacttcaaaaagaagatacatggatggcaaataagtgtatgaaaatatgctcaatattatcaggcttagggaattgaaaattaaaacctaatgagatataactgcacatctagtaaaatggctaaaatttaagaaaacgcaacggctgggcgcggtggctcacacctgtaatcccagcactttgggaggctgaggcaggcagataacctgaggttgggagttcgagaccagcctgatcaacatggagaaaccccatctctactaaaaatacaaaattagccaggggtggtggcgcatgcctgtaatcccagctactcaggaggctgaggcaggagaatcgcttgaacccaggaggcaaaggttgcagtgagccaagatcataccattgcactccagcctgggcaacaagagtgaaactctgtctcaaaaaaaaaaacaaaaacgcaaaaactagaaatgctggtgaggatgcaaagcagaaaatctctcccatatctttggaatgcaaaatggtacagccactttgaagagttggtcagttcttatgaatttaaatatacacttgctggccaggcagggtggctcatgcctataatccctgcactttgggaggccaaggcaggaagactgcttgagcccaggagttcaagaccagcctgggcaacacagcaagaccctgtcttaaaaattaaaaaaaaaaaaacaaaaaaaacttgctgtacaatccggtaatgccactctttgagtatttacgcacatgaattgaaaactatacttataagaaacccgtatctttcataattgtgaacactgaaactagcctagatgtccttcaacagatgaatggataaacacactgtacatccatataaagaaatgctactcagcaataaactgtttattcacccagcaatacagatgaatcctaagtgaattttgctaagtaaaagaagcagtagtgtatgattccatttatatttcattctggaaaatgcaaaactccactggctgccatgggttgggagtggagagaggagttgactataaagggttaatagggaatttttgaggtgatggaactaatctgtgtgatgctgttttgttagatgcatgggtctgtgtttgttgaaactcatgaaactgtacctacaaagagtgacttttactaaatgcaatttagtaaaaaaagattccgggggagcccaagatggaatgcatattgtcacacatgaatataactttattacagataagtaacatgatattgaaggggtgaggaagcaagaacctggtctaagtaactttggaaacttttgactggatactgtaaggttagagaccaacgaaattgtagcaaatcactgtgctctagatggtaaattcatccctcacatacacaaacacaaagggttgaacatataaataaatataaaatgtaaataaacaaatggacattgtagataaaggcagccaggtttctcatggttggaggagaaagttgcagataacccagggggttgggggtggggtctagaatgagcctgtgtttcagggttatagttgaaggattcagtaagagtttatatgtgtgtgtgtgtgtgtgtgtgtgtgtgtgtgtatatatatatataatttttgtatttttagtggagactaatttttgtatttttagtagagacggggtttcccatgttggccaggctggtctcaaactcctgagctcaacatctgccccctcagcctcccgaagtgctgggttacgagcatgagccactgtgcccagccagacacatannnnnnnnnnnnnnnnnnnnnnnnnnnnnnnnnnnnnnnnnnnnnnnnnnnnnnnnnnnnnnnnnnnnnnnnnnnnnnnnnnnnnnnnnnnnnnnnnnnngtgtttcagggttatagttgaaggattcagtaagagtttatatgtgtgtgtgtgtgtgtgtgtgtgtgtgtgtgtatatatacacacatatatacgtatgtgtctggctgggcacagtggctcatgcctgtaatcccagcacttcgggaggctgaggcgggcagatgttgagctcaggagtttgagaccagcctggccaacatggcgaaaccccgtctntnctaaaaaatccaaaaaatntagtcgagtgtggtaggatgcccccatagtcccagctacttgggaggctgaggtgagaggatcgcttgagcccaggaagtcgaggctgcagtggcctatgattgtaccactgcactccagcctggctgacacagcgagaccctgtcacacacacacaaaaaaggtacagttgtgtgtacatatgaattagtatacatcatatatttcctagctctgtttgctgagaggtctgtgaggcaatagcatccagtaactgaacatacctggtgctcagattttagtttcagaacaccattttctaatacaaggactcagggctgcttggaaaaaaatggtttgttgtagagctggggcagggaaacgggatgagccggggttgtcagaggttaagaaagtgcgtatcaaaagtcacgggagctggcctttcaaaagagtttccagtggccaaaactagaacaatttgagtaacaaaataacaatagtattggattatagcccagggaataaaaaacattgagtccattactgatataaataaatgatagaataaataaggggaaaaagggacaactcttccttagaaaataactaattaataaatgtagaaagaatgagagagagtaaatcagcattagaacaccacagtacaatggtaattgttgcaggcaaagtcagtggataaatgctaacataagtgggcaaaaagtttaagtaaaaagctattttgctttgtctcagaatgtctcttccccaatattcatttcttacaaagggaaaaattagagaattagaaataagagaatcctggaaaacactgccttaaccggaggatcaaggttaacatcaccagtaatgggacataaagacaacatgtgccttccaatatgacatgctaagaaagccatgtctctttgtggtattcttgcaaaaatccatgcccttctatctgattatgaatgaaaatcagacccaaattgagagacattctataagataactgatcagcactctttcaaaacaagttgtcaaggtcatgcaaaacaagttgtcaaggtcatgaaaaggaaagactgaggaactgtcacagagcagaggagacgaaggagatgtgagaactaaaggcttgtgggatccaggatctgatcctgggtcaggaaaaaggacatcagttgaaagactggtgaaatccaagtaaagtccaaagctttaattggtgctgtattatttttattagtttcgacaactgcattgtatttccttgtgatgttaacaatgtggaaagctgagtgagatgtgagggagctctctttgtaaatgctgtctaaaattatttcagaataaatagtttaaaatatatacatacatacataacaaagaaatacaccccaaaagggagccaagaaaaaatggcatttaggatggtcccatagctcacctttcaggtactggatatgcaatacttgctactgtctttcagaaataaactctacaaaatgtcatgtagggtacagaaatgtttacaagaattgttagtaaactgccaatttagagacaaactccatttaagcattttagcaattgcttaataaagttatgtctgattgttaggagagcatgaaggatctccatggaaaactcaaaatgtgtcgtatgaactatttacacgcttattcctgtatattaaagtgaaaaccatatgttttacacatacacagctataatgttagacagtatattttggtgtgtaccttgtgtttggagatatgtaaagatatctataacaaaacagttgaatagcatcttgcccacattggagatagcagttgtagatcaagtgattgtttttcagagtaagtaatcggtcccacctactttacacacaccatttacagagaaaccttcttccagattagggcttcatgtatcagtggcacttacaatgacacttttcacagactgacagagaagcttaacttactcaagtaaaacaagtaaaaactgattagactgtttctagcatgttaatattttctaaatgttatggagaaaaggagcaaaaatgtttctttttttttttttttttggacggagtctcactctgtcacccaggctggagtgcagtggcgtgatctcagctcactgtaacctctgccgcccgggttcaagcaattctcctgcctcagtctcctgagtagctgggattataggcacctgccaccgcacctggctaatttttgtagttttagtagagacaaggtttcaccatcttggccaggctggtcttgaactcctgacgtgagccaccgtgcccagccttatttcttttctttacatgacttatgaattcatttctccttcagtctcattttcttcaaatatgtggtttttctccattgaagtcattttattcacatgaaaatatatttgcaaatgataaacatatataaaactggtatttaaaactcatgtatttattaacaaatgtttgtgttcctgttgttttataactgctagctcctgcgggaaataaaacatacagcagtttctttctgccaagaagcagaattcagtaggagatagataacatgtatcaccaggtggggtaatagtagggtgattaagatacagagttacaagtacagagttgatattctcacagttccaaatacagatcgatagcatgatgaggaaccccttttaaatactgttgcagtagcatgactatgtataagaggccagcatgagagcagaccaagttggggtaggagggtgtctttgaatactggccctagagaatttaaaataatttttctagtcttttgaaaactcaacaagtagagacaagtaatttatatttctatctgttgtgtatataatcgtctctttagagttccagacagctgctagtgtccaaatatgttttttctaaagaaatattttgtttgtgagtaccaacagtcttagtaactctcttatccctcttatgtgctgagtacagtcggaggaagaggaattggagttggtgagtgtgggtttctgcttgaaggaagttgaaaaagatgtagaaagtactaattctcttacgtgttgttatctaaccaatgttccctttgttacacaaatttttttaaacactattcaaacactttgaataaagcaatctactggtactacagactctagtttttctatttataattgtatgtgttgacccattttatttgttggagggaacattggaatagagcctttaaaaacagtagctgtccatgagcataggatacttgttaattttttttttaaggaaagatacaaaataccttatatagctctccaaattattgaaatatttttagaaaatgacttcaccctcgaagttcctcagattgtaacacacgatgttgtgttgtttctctttcaaaaagattacatcatttttggtgaggtcacctttttcagcgttggaattatttcatcctgcatgatacagcctgaaccacaagggggttccctgtttactaaaaggaatgtctgtaattgaatgtgtatataagtttacttttctatcagaaggcgctcttttcttaaaagcaactattgccctttttccaaaacaaacgttttctgttggcttttcctctagaaaataaacttgactaaaagcagcttgcagttgatctatttcttctttaggaactaaaaccaaaacctcacaggagtcatcatataatttcaaagtcagctgctaattaaaggactttaaggggaataaaaacttgaaaatgtttcttagcatggacaaaggttaagagtgcatgaaagcatgggggaggaaggcatccgttggttttaatattccatgtttatgcatgctggtgtgttttgcacagtttgttttcttttcaaagaaggttatctgttccccttaaaatacgagattgttctttatttagctttgtgatcactcacagttttgggtgtagttttgtattggccaactgaaatattctagtcagctgtaaatgttttgaattatattatgaatatcttttggagaaacactttacttaatgataccataatgatcagtaaatgagagtttataattcaagctaaaataattcaccttaggttagacctcactgttcaaggagttgtgaatgcgtccatgaattatctagcactatactgccctcttgtggttctgaaaatcactcactcttgtagaactcagtgccgttgagatgaggagcttagatgagtggaactagtgtttgaagtcttcactgcttttgaagacatgccaggagattgcatgaagatgatgccatggagtaggtagggtccaggccaaactatgtcatactgtattctttcacctagtgattggacttatgaagttccagactaaatattaaagaagaaattaagtccaaagtagatctctatctcgaaaagtcattaaatttataaacttgatgctgagactaaaatatattccgaactggcatacattgattttccacattcctcagagtacatctgtaattacagaacctcagagataaatatattaggtccttgaagactttaaaatacatacctaaaaacttataaacagccatttatattatttaaaacttaatcaattaaaaatgcagaactttatgtgccagaaccaaaatataatcagaagcacagtccgttacaacttagaaagttgttcagcttgccttgagctctaaagtataattgtggatgactctgatccgaagtgcagaaggacaggtgccctggggcctgcactaaagactgtactgttaagaccagcgacagattcctttagaagccgagcaatactagaacaacttgacttcatgaaagctgcagtagactaggctatggattagaaggaataaaaatatgtatcttttttcccaccagttatatagaaatttgggacagagggtttcttaggacaataaggatattatcttatatttgtgtagtacttcagttatgaaagcacttctgacatagtaacctcatttgattctcacagtagctgtgcaaggcagccaggacaaagattgctatatcttctttatttgacaatgaagaagttcagagaggtcaaattattttcccaatgcctaggaaatggtgaatctgggacagaaactcaggcaatacatccacatccacatgatctttctcacatcttctaacctaggttagaaagtagaaattaaaaagaaataaactgagatcaggatcctcatcgaatgtttgtaagtgtctacatctagccaaaggcctttttgtctgatgtacccttttgaaaattgtgatagagaaaatggaatcacattctaactcttcataatctcaaaggcactgaattatactttactgatttggctcagacccccgaatgtcagttatcaggctgtaacataatttataaaaaacaaatagagttgtgctgtggctttcttatgtgctagtgacacagagtctgttgtgttcctctgatctttgattttcaaaaaccgttaccttaagccagtttggcgagaaactgcttctgtcgtactcctacacgttaaggacaatgactgtcttagactaactggattatttaatagttgaattttttttatccattcccagcatggataggatgctacacagatgcatccagttggcaaaaagcatttaatattgctcttccactgccctgtcggcagtacttgattcaaaattctctactcaaagcctctgctacagaaggccaggggactatgaagggatacatgtccgaatctgttgttaaaaaataggtcaactgcatgattggagagaaagaaataagaatacaagctgcacccaataagccatgacttcaaaccgtgttaacacgtaaataataccgcaaagaaaagtagttttgattcctatactcatagacgtacaatccctatatatacagatgacctttgccatcatcaggtatttaaaacctacacatacttcatttaggggagtctgacagtatttgtagtggcatcaagtcctcattttgtgcaacaaatagaagtgctaatgcctgtaacagaagttcctattttaacgtggggtgtctgacactaatcaactattttaaaagaattaatgtaaaaataggacccttcaaattaaatatttagttattctcactagtatttttgaagttttcacatcatcagtgcttcagaaaatgacattcatatgaaactgtgaaaaatgtcacttaaattgaaagtgatttttaagtcaacataaataccacatcagaacacattttctcttttttgatctcacagaatacccagaggatcagtagttctcaagccactcaacctcttgctaccccagtcgtgtctgtgacaaccccaagcttgcctccgcaaggacttgtgtactcagcaatgccgactgcctacaacactggtgagcctgctctggtgccttccgtaggttttaccgctctctgttttgtgatcaacgtgtgcttctgtgattttttttaagtatatttattgaaataaactatttccagttttttagatttaaattaggatgtatttttcaatgtgctagccttgaaaaaattacaaacaaaatggatagtgtggatagtgcgatgagtaagttattccggcttctccagtgtgaactttcacttaacccctgacacaaagccacgtggatgatagcaaaatggtgacatgcatcaagccaagaggggagcagcctgttgcttgagtattgctgatgtagtttctcttcatacagtatcacgcttttccaggcttttaaaataagatgtttgtctttatgctgtgttaacctgctttgggaaagacatgaatccctttggacctgagacttcaggaggtggccgacgtttggctgtgtcgaacaggctgttttcctccctgtaaccactagcttggtccatgtcatgtgcacctgaggggcaaaacaagggctgttctgatttctcctcggagccagtcactctgcctttgaggggagcttttccttcatttatgtttatttaggcatttcatcttaaaatgccctaatttggggttgtattaggaaagtttaagaatattacagtgatcgtaggagtgcttttagccaagcagactgtatggagaatcgagggcagctggtttcatttaaatttaccaatctaagaaggagtggaaaacacatgtggtttcgctttctcatcagctgagccaaacacctgatgcttcagaggaagacggcagtagttcaattctcccttgcccattactcagagactgcaatgcagagaagttattatgattctcctgagtgtcataagtagactgtggtaaagatggtctgattttagccttcagggtaaatgctttggcacagaactttgaaactgctgtccgcagctacgtgaggggacagagcgttgataacatttgattgccacttgaattctaagaagttcttttaaaacagaatcaacaataaaaggttttattgaaaaaaaaaaagtctcttaggaaatatccattacttttccaaccgttagtatgaaaaataatgcccaaatttgtcaactgcatactatcttagggattgtgaatcatagcctgttattagtgccttgcacagaacaaggttccagagtaaagccagggatgaagcattcatagaaattctgtttcgacgcattgatcacctgctctgtgagagactgtactagggacatagctttctccaagtttattccaagtgaggaggcaggacatacctaagtgggtaaccgtggaggggaagtcctgaattgttgtgattgtgaatttatactctgagaattgagaagggagggcaaagctatactgttcaaaggtgtattggctgagaagagggagcttgaactgggtgtcagattatggtttactgaccgtttcattacaggtttttcagtatacttagaaattccactatacttatttttagaaatgccattgaattgggaatttattttttaaaagtataaaagaaattaccaaagcatataaaaatggaggcaggctctcaaaatcatcagtcgcttagcgtcagtctcatgccaccttttgaccgactttatctttcttctctttctcgtaacacttactctgtttgaagtttaccatgttgtttttaacttatttccacatctattcagcaaatatttatcaggcagctgctgtgtggcaggcactgtgccaggcactggaaatgcaggagtgcagtcagcagtgaagcctggggggaaggcacaagacacacagctctagggataagctgctgcagttgtgtcaagggctgtgtctcagctcggacaggaaggaacatgcgtgactcagccaggcagaggaggcagagtgctcttgggagagggtgtgcctgtacaaaggctaggagtttgcgggcgggacggggctgaaggaatggggacagagcgtgggtggttagaattgagactagagaggtaagtaatgatttgtagactatgtcaaggattttggaaactgtccggagagcattggggagccataaaaaacttttgaagtagaggagtgccatgaccatatttgttattttaaaaagatgtctttgctgtatatagggttaaaaggcaatgccaggaagccacatcagaggctactgtagtggtccaagcaatgggtgctgatagcatagactagagaggtggcagtagagatggtgagacctgggcaggcttgagagagagcagatagaattgctcagacctggaaattgatgttgggagtgagagggaagggaagtagcaaggataacacccatgggcttctgcacgagctgctgggtgcatgttggtgccatgtactaagagtacttaaggaggaacaggtttgcaggaaaggatgggccatgtcagatgtgtggcgtttggagtggcgtccaaatggacatggcactaggtcgtttaaaagatctagaggtcgaaggagactgtgggccggagggagcactggggaaggcgtcagtgtgacgggtccttgccccagcccatgggagtgtatagaatgacaagggcagagtcaggacagccctgagcaccagctgtgtcgcttcaactccgttccttttttaaaatgttaattcactaggaagaccaatttctttaaacacctctcttgagacatgagaaagaagataaaagtagaagagttttgccacctctctttggaaccaagtgagaaagacaagtgttaatgatgagctgaaataactccccgtgtgagtgataactaacgtcctaaatcttggtcccagtgattacgactgaagcattcatatgatatgagctgggtatactctaggacaccgagttttttcatgaagttgaaactcttgcatgctgtcagggagtttgcgacagtctaggtactttaaacaaatgcgcttactaattgtgtaatgatgtcactgagcttggcaccccatgtagggattctgtctttcctgtcccctattccctgtcccccaaccccttgcttcattaagacttgctgattcaaactcactctggttgaggttgagtgtttctctttgttccaaagggtagtggcaggcatatttaaagtaacaattgtacagaacactctttaatgatggcctcttatttgaatcatcccagacaaagaaatattgctagatcctgtaaatcttccaagaaaagattttgcggattttagacccacatgtatgttgttttgttgtgaagtatctggcttctctcaatgtaggaactttttattttatttttttttgagaggaagtctgttgcccaggctggatggagtgcagtggtgctacctcggctcactgcagcctctgcctcccgggttcaagcagttctcctgcctcagcctcccaagtagctgggactacaggcatgcgccaccacgcctggataatttttgtatttttagcagatacggggtttcaccatgttgtccaggctggtctcaaactcctgacctcaagtgatccgcccatcttggcctcccaaagtgctgggattactggcatgagccagcatggctggcctcaatgtaggaacttttgcagtagctacgtaaaaaatagattccgtatggaccttccatcatatgcagagccctcttgtcttcctttgtagattattcactgaccagcgctgacctgtcagcccttcaaggcttcaactcgccaggaatgctgtcgctgggacaggtgtcggcctggcagcagcaccacctaggacaagcagccctcagctctcttgtgtgagtaactagaagttttccctgcatctttactcctggcctacacactctcttttcctatcagtgacagccttttgctctgttgagtttcgtgtgaggaatcctgtaatgattccttttcaggtagatacaagtgtcgggagaaaatattttcttacatggctctagacagtagcttggatactgacaaactaggcattccttgaagggatttggggagcaaggcttctcccatagggacatcctgaggtagagagactcaaccaggatctgaaggggtctgaaggcacagataccacccgcatgcaccatccttctgccctctgaccagtgatgaagctgcctactgcacccctgctcccaagcacctgcctctggctgcactgcttgaaaggcagcctgtaggcattcaggcctccctgccacccttgccattgactgctttggtgagtatctgtagacaagaataggaagacaagctggagcttttgctttctccctgggccacagggaaggaaaactggggacagggtgtcttatatatcagtcaggctccataggatttgtgtgactgatcccagcccaatgcacacaccaaacctcattcacaaagagaatgttccgtatgggcagggtgtaaggatataagcaaagaggatttacagtggcgcccagatgaggccagacatccctgacagccgggagaaagaacagggcttttgtggaaccaggatgacagcagacccatggagcagttggaggagagtgtcccaagagaggggacaacatagcagacccagctggcctccatgaagactggctgccttgcctgtgctctgggcagtaggaataccccaggcccctagcctctgcccaggaagtccccagagagcctgagctcagcagtccctttccctcatccattctgaagtaactgcacagtgaggattgttgtcagtggtcttcttaggaattatgtcatggaaaaagcagcagagtatctcagggaaatttgcctacacaggatttggccctcaggcctgtcctgagcatcctaaatgaatgcactaaaaatagtcctggaaaagcaagtggaaagggctcagagcccaggcccggggaacagcctgtttgcgtcctcctctactgctctcagccagcccctcatttcctcatctggaaaatggggatggtgcgacttgcaccttagaggtgttgcgaggatgagcgatgttgtgccctgtcacagggccagagcagatggggagcagatgctgaggaagaagaggcggtgagcagatgaggctgctgttcctctgtctttctggtccctgcacagcattaagacactgacattgttttgtatactttagctgcaaaagtaccaacgttgtgggtaacagaaccaagtaacgtaagggctcaacggtactgttttctttcctcctaggaagatgggatttccttttgtgccaagcactgaaggaaacgacccaaaccagtcttggggaactctgataagatttcagactctgggcccttttccatcaggcagtgtctctactgtatcatcccagttttgcagaggtacttgcaagccatctgacctctctcttttttttccttcagtgctggagggcagttatctcagggttccaatttatccattaataccaaccaaaacatcagcatcaagtccgaaccgatttcacctcctcgggatcgtatgaccccatcgggcttccagcagcagcagcagcagcagcagcagcagcagccgccgccaccaccgcagccccagccacaacccccgcagccccagccccgacaggaaatggggcgctcccctgtggacagtctgagcagctctagtagctcctatgatggcagtgatcgggaggatccacggggcgacttccattctccaattgtgcttggccgacccccaaacactgaggacagagaaagcccttctgtaaagcgaatgaggatggacgcgtgggtgacctaaggcttccaagctgatgtttgtacttttgtgttactgcagtgacctgccctacatatctaaatcggtaaataaggacatgagttaaatatatttatatgtacatacatatatatatccctttacatatatatgtatgtgggtgtgagtgtgtatgtgtgggtgtgtgttacatacacagaatcaggcacttacctgcaaactccttgtaggtctgcagatgtgtgtcccatggcagacaaagcaccctgtaggcacagacaagtctggcacttccttggactacttgtttcgtaaagataaccagtttttgcagagaaacgtgtacccatatataattctcccacactagcttgcagaaacctagagggccccctacttgttttatttaactgtgcagtgactgtagttacttaagagaaaatgctttgtagaacagagcagtagaaaagcaggaaccaagaaagcaatactgtacataaaatgtcatttatattttccaacctggcatgggtgtctgttgcaaaggggtgcatgggaaagggctgttgatattaaaaacaaacaaaacaaaaaagccccacacataactgttttgcacgtgcaaaaatgtattgggtcaagaagtgatctttagctaataaagaaagagaatagaaaacacgcatgagatattcagaaaatactagcctagaaatatagagcattaacaaagtaaaattaatatattaagttataattggaatatgtcagaagtttctttttacattcatatcttaaaaattaaagaaactgattttagctcatgtatattttatatgaaagaaaacacccttatgaattgatgactatatataaaattatattcactacttttgaacacattctgctatgaattatttatataagccaaagctatatgttgtaacttttttttagagaatagctttatcttggtttaactctttagttttattttaagaggggaaaacaaaaatatcttgcaagcagaaccttggaaaaaaaaagccatgaacacttattctaaatgtaaattaaaagttgagccaaactctttgtgtatatagcatcttaaatatattatcacctttgatgtaagtacctatgtattgtatggtcaccagattaaaaagtatatttttgtggattgccgccaatctggggggaaaaggcgaggtcctttattaagtattcactgtttaatatttactattttgttaaatatactgtactttggattttaattattagcccagttttttcagaggattgtataaaggggtttctcccctcactggtggtgaatgtgtgatgttacattgtaatctttgtgctgtatgggttgagcatcattatatattttgtatgtgtacataaatagcaaagtggcaaaaaaaattggtgttaagttcatcctgcataagtataaaatgtgttgtaacagattttgtaaggcattatttaaaacttgccttttgtgaggaaaaaatgtagtagaaaaagctgacctaatttaattaatattagagaaaatggcaaaatagtagatgagcacaaaggttttataagtggtaaatgattaggggaaaataatcatggggaaagggatcttttttccttgaccctctgaaaacagaacgatgcagctggttacaaaatcctaccgttatcagctcttctgcacattgcagtgatgctttggtatgcggggagaaacactcttagggtgctggtccttggcatgactcttgccattctaattggaattagtgccaccctcagcttggattttgaacaaggccttattctttcaggaagacaactaatggatgatagcaagttcatccacttactgggcttgtgccatgagcaaaattcaaagtcctgtatatctttcattgtagatttttaaatactccttttcctaaaaaactcaagggtttaaaaattgctattttatattttaaatgatattgagcagctacctacaatttctatgtacattttgttcccccccccccaccccccccccaaattacgttccttttgacattttcctcatctgctgtttgtgacaagtcatcagccagatttcctgactgacacataggtatgatcagtgcaggagagacctgcgcaccacaggctgcaaactggaggttctgttctcatggcagtttgggcagtaacttttgagagaggccaaaaaaaggaggatgacatgctgtctcctctcttcagtatagacattaggctcttattcagaaaggatttttctttaaaaatgtacttactttactgaactacttacaggcacatttcttcataaggccacacctaatccaaacaagacagtctcccaacactgaagttccaaaataatccttaccactttgtaaaccatttatagctttgaaagtgttaagtgattccttcgttattatttatgcatgttcatgaacttctgctgtacattggaataggagttaacacattcacatttactgtctattttcttgtgtgccttatgagatggcttttctgactgtatctcaatagtctttctttctatgcaggtttataatcagtacaactactgttttctaaaatactactactcaaggctcggagtttgtatttaaattacactgaccaagtaacaatgtattccatttcaggaactgaatatttgactgttaacctttttcccatacgtccagtgtggcatggagcatatggacttgacagacatctctcacccagacgcccacgtgtgaacacacccacatccacatctctgggtggaaaccagcctagagaggggacgacgctaatggtgttgctttagaaccgtcttttcttacccttttagactcgtgttttgtatgagacaccattgcaagaaaattttatccctccagaagtattttattactaaagaacaaaagcaaaaaaagcttaaattgcactggttaaagtacagtttccaacagctgtccttcctcagtactctaatggccactccaccgcgagtggaagtcactgttgtgtgtacacaggtggtcccaatcaaaactccatcttttgagcccaattatgtccattttgttatagactaaatcaggggtttgttctacaagaacaatacatgttttaccctttcctttaactagaaggataactagtaatgcatcaacataatttctgtattaaccatcatgcgcacaagaaatacatagtaaataaggaagctgaaaactcctggcattggatcttaagctagatgattagaatgtgaaaaagattttacaaatgtaaaacttctatttctctgtagaaactttcttcactttgctgtgcaagaagacactgctttgctatatttaaaatggcttttttaaaagagatttatgtatttggtaaatgtttgtagtcaacagttcacacaagaagctgtacacggtttgatcatgtaaaaccgtttggcggcacaagctggactttgttgccatccttgagatgaaccttttaagaaaaataagttaatctcaatttttccctgaatgtgttgtttttcttcattatacaataaatataatagtgaactttttatcaaatggtgaagacaatgctaaaggttgttgtaaactgtttgtctcccgcactcactccagtaaagacggactggctcttcctgtgcgtcgagactctgtcatgtttgcctggggacacaaggcgctggctttgccaccaggcagccccttcccctaaagccctctcctttttcattcctttcacgaagacctttttcacctgcaggcttctttctctgggttgagacagggtcaaggaaaccgtcccaacgcccccactggcctcccccttgtcggctcccgggtcatccctgctgggcagccctggagcccataggaagcagtgggccacgcagtcccaccggggcctaatctggctgttgcatgcacagtgctgtggatgagtggaatccattcggcctccagtaactgcttctcacaggaaatacgccaaagcctgttagagggggtgggtatgttagctatcattagattctgggtctctttaaagtctagggtgtgaaatgattagttttgcccaaaatacatacatgatgctgagctagatgcagcagaagacagatgtgctggcatgaattgagttttcagagtgttaggtgtacgtcccagtatgctggcaggcacttaatggtcatctccctttgtcataattcagctagaaaatgaaaaatcttcaactttcagtagaagatgttctctcctgatgtgccttctaagccagctcctagctaagcagattcctggtgttaaactgaaaactaaatttttgcgctggctacggtggggctcttattagcaggttttgaaagctggttgagtcctgtggctaaaaatactctaatcacagctgcagctacttaaagtcaattcattacattttcctgcttggctcccctgggtgccttgctctaggcagtatcctgttttcaggccgattctgtggcaccagccaagatgattttcagtcggagccctgtgccagctgattggctgcagcctgctcggtcggtcgtccggtgctcacaagcagcccgaggaccactcggttgtaaaactgagaggaagaggagtgtttcttcccatcttccacggggccaggaggtttcagacgttccaggtcaagtgggcttgtgtcctcatcccgcagaaagttgctgagccccgtctgtgagaggtaagccctgatcccagctgttgcaggctttgggctgaggacgagctcttcccaggcagccccagccccaaatgcacatagctggggtgtaaagctttggtgctcctcatttcatcagtcttgcttcccagaggacccagattgacagggcatcttactcggcttagacgccagggcctacactccagtcactttcttacagatgcatgatgggcctgctttctagctaaccaaagcaaacgcagctgtggaagaaagaaagcagttgtactgactggtttcactacacagtcccccctttttttactcttagtgtatacacttcattttgaactcacttttgacttacagaaaagttgggaaaataatgtggtttccacatatccctcagcgggctttccctaatgctaacatttacataaccatagtacaagtacgagaacccagaaattaatattgacacagcatttttaactaaataccttacttgaatctccccattttttccactcatgcctgttctaggatccaatccaggatcccacattccctttgtcacttgttacagcttttcttatataacctttgacacttttgaatactgatcggttattttgtctaataccgctcggtgtggatgtgtctaatgtgatgattggaaggaagttgtgcattttggcgggaaaaccacagaaatggtatgtccctaatgcatcatggggtccatgttggtgtcttattccaggcgatactgactttgatcacttggttcagtggtttttacagggtttcttcaatgtaaaaagtttctctccctttgtaattgatacatatattgggggagataccttgagactgcagggttatattttcacccactaattgtgcagcgtctatagctgtggtagctgcctgttttcttccacatttattcattggaattctgctgcgaggaacagctgtcccttctcatttcgttactcattatgtcattgtggactcggattttatttctcctgtgggctataatcctgtcattattttgctcctccacttgttccagctttggccatgaggagcttgatcaggtggccttccatgtgaaatctgagtctgtccacacccttagcatgtcctttctggcaccacaggtgctccacactcatcttgtggtgttgggtcaaccactttttccactattcctggttccctttattggagaatggtatttggaaaccagatctgggcaatagatgtgcttattgttaccagggtatcacctctttcggactctttctgcagacacaacaaggaaatacatgtagttatgcgcacacacacacacacacacacacacacacacatccatccatattcctaattacctaaacatgtcaaaagccatggtttacgcgaatgctttggattcatttgtaacttctttctcctgtggtggggaacccagctcttattatctacagtccttttacttattgttcagttccagtgtacacttattttcagaactgcccatacccgtgtagggaacacacattgactgactagatgagagcatttatgtggttttgtggtttttgcctttggccttacactatccagtcaagacagtggtttccagttacttgtagttcccagtcccttcagtgtggttatcttactatttgtaacatggttagcttcatctgttcgtgttttatttcactttcggcaccctccccatcctagttggttttaatgatttattttgaggggtgtatgaatagtatctgaaacattactgtgtttctaagctatacaaaaagatgctcagaaaagcattctctcttcacccctgctagcctcttcctatccccgcctctctcacccgcccctagagacaactagtctctttagtttctggtttaagccttcctgtacttgcacaaataggcagctttgctttttccacttaatagtctagctggaaatcactccatagagtgattagttcatagacgttttcatccatggtgtggatgtaccatggtgctaggcatttaggctgttcccaatattctgcagtcgtcaatgaatagccctacacatgcgtatatttgtatttttaaagatgtatcttcagggtagattcctagaagtgggattgctgagggagttcacctgtagttttgcaaggtatcgccaaatttgcctccagagatgtatcaatttgcatttcctccagcggtgtaggaggacatccttgccaacagagtgcagtcctattttttatttttaccagtctgagaagtgtatctcaatgttgtaatttgcctttctctattatgagtgagattgagcatttttttcatatgtttgagaacattttaatatctttcaagtgtgtgaatttctgttctttttctcatttttctattagattttttattttcatcctccaacttgtaagggttacttttatattagggatattgaccctttggtgtgtgtgctatgaataacttttttgtggtactttagtcacgcaaaattttatttttatggagtcaaatttatcaatctcattgcttaaagattttgagttacatttggaaatattttccgtacaccaaggttagagaggaagtcacccacgtactcttgttctagtatggtttcatcttttacttttagattgctgatgcatttggagtttgttcttgtatgtggatctaattttatgtgtttaccaaaggctctctatggccaggtgtggtggctcacatccataatcccagcactttgggaggctgaggtgggaggatcacttgagcccaggaattcgagaccagccgggcagcacagcaagacctcctctctacaaaaagaaaaatacacaagtttcaaggctctcaacttgtcccagtaccatttattagaaagatcatctttacttcactgagtaaaggggctaattctggactgttttcattcctcatgaccgtaaattgtaaatggctctcaacactgcccagagatgcagctgcagcttcctggcatgccggcttcctccctttgagacgtaactattttactgcatctcctctcctttcacacctccaagaccacttccttctcttctcagctggttacttcctctcacattttccattgagaaaatagatggaatctgatgagaccgacctcaccttctcacgtgatatccaggaatcttccctccaggcactgtcgagggaccttggtgcccttatctaagtccaagccttctgtgttgcatcctgggtctcatcatctccttctcaaggtcttcgcttctgtaactgtcccctctttctggcagcatcaatttctccctctctcctagatctttcctgtcagcacaaaagcatgcttttctatcacccgtttcaaaaacaaaccaaaatagaacaaaactaccactgccccctttgtctaagacactaaggttcatgtgaagatcatgagatcccctctggtttacctcggggtgctagacatatttgattcttttctatatgtgatacaacctgaaaaagatggggaagcattgacctgcaggggtatcaaggatgaagacaggtgctaaagtcatcagtggaggaaaggaagcgaccagaagatctgtagatgatgcaacaaggaaatggggcaggaactgtgttctgacaatacgtgcttcaaagaagcaggaggatttagggaggagggaggagcactgatctcaaagtgcccataaggagccagggtgacactgccactgcctggatgactggtacatgggctatccttcctttctaactactcagctgagctaagactctcagaaacagggagcctggcacttgacagggggaatgcagtcatgttgattgaactaagtcaacaacacacctccagagcagctgtttcacagtgcatggaatttagtggactccttcctaagcctttctaagaaaaatctgccccttttggcttcctgtcccatgatccagtccaggctcacaaatcagagtccactgacaggcctgctcccctggccctgcctcagaaccagtcttgccccgtcatgccaccattttggctgcccctcccctgaccctggcctatgatattctgtttctggccatattagaataacagcaaccaggtgtattctttcactttaaagaatccaagaaaatatgaggccttggacaacgggcagtgcaggacagtgatctctgagagaccagaaataaaccaggtgaaactgatgagtgccccagctcaccgcctgcagggtttgcaaaccataggacagagccaggtggtcttgccaagtagaggagatggagtttggagttcagggagtctgaggcatctagaatttgtgggggcacagtactggggagggggaagctggacagagattcccccaagtctttggctgggtactggcctgtacatgcatgtgagaaaaccgcagagtcaaggaaaagagccaacagaaaaaagtaggcgggacaattcccagagcttacccagggccaggaatcatctgtgttcccaccagatagattatgaggtgattattacctagtttattaatgctgtgtgtgttcggtggtgagacctcctaaagcacacagcattcggagaatcttaaaaaggcatcaccacaggagcaggactgaaaaaatcctcagaaggccttgccccgggagcagggccgaatgagtgctcactacatgctgctctacacctgccctaacatagcagaagagtgagcctcagaaggactgaactcattccaagtaaccatgccccaggacaaagcacaaactatttaaaggaagacaacaaaatccagcatccaacaacataaaattcaccatgtctagcatccaacaaaaaattaccacacatgtagaaaaacaagaacatacaatctataatgggaggcagatggagggagagatcaacaaatggacccagaatgacataaatgacggaattagcagataaggatgtgaaacagctattacaaatatcctccatgtgtcagaatatacaaacacaatgatgaaatagaagatatttaaaagactccaacagaacctttagagattaaaaagacctgtagtaaaagatgcgttgggccaggcccaacggctcatgcctctaatgccagcactttgggaggctggggcgggcggatcacttgaggtcagtttgagaccagcctgcgcaacatgacaaaaacccgtctctattaaaacacagaaatcagccaggcatgctggtgcacgcctgtaatcccagctgcttggaaaactgaggcaggagattcgcttgagcctgggaggcggaggttgcaatgagccaagatcacgccagtacactccagcctgggtgacagagcaagactctgttttgttttgttttttttttaaaaaaaggacgcactgaatggaattactatagattagacagatactacagaggaaaacagcaatagaaactatccaaaataaaacaggagacaataaaaaaatgaataaaatataaatgagctatataattggagggaaataatgaggaaaaagttttcaaagaaacaatggctaaaatttgtccaaattagatgaaactatacaaacccacagatccaagaaacaatgagccccaaacagaaatatgaagaaagccacaccgaggcccctcagaatcacacagccagttctgcaccgcctcctgttctgggctttcttagattctgcatttgtctgttgagcatcccttcatcacagggccaattgtattaactctttcttattgtggtaactgcttcttatcttctgtattcttgatgctctggctttgtgggccttgctgactgaggagagactgctgttcccaggactagcctgtttgccttgccctgccttccctttcccccagaaacacgacgaagcctctggcctgagcgtgcccctggctcccttctgcctcctgaccaacactggtgcatccctatggccctgtggggcctggtgtgctcccttctcttgggaattacaagtagtaaagcttcttgcgatgacaccaggaagaagcaatgtctccatgctgtcatgcatcgcctgtatcaattaaaatcccatgagtaaaaatcgagacatctcttaaggtctccactcctccaaccaagcctctccaaaactgtgaccagcattcttcacttcagtgctcatcaactcgctattgctccaagactttccgtagcttcccactgtccatcaaatcatgtccagatcacttaaatgtggaattcagcgttgcctagaacctagcctcaaactagtactgcagcattttcccacagctccgtttacatttccttcacgccaggccaccagactattcatagttccctgtctacatagtcccccgtttccagcctctaggccttcgctcacactggacagtcctctttgaaaagaaccatccactgccatattactaaatcccagccttctttcagatgtcgactaaggaaatgtcatctcctccagatgttttattagccacttgtcatatatttccctctgtgggccatcgtgtgttctaccgtatctctactctggcataggtcttttttaaaaattatcattatttctcctgagacagggtttggctccgatgcccaggctggagtgcagcaacacaatctcagctcactgtaacctccacctcccaggctcaagccattctcccacctcagcctcccaagtagccgggactacaggcgcatgctactgtgcctggctaatttttgtaatttttcattacagatggggtttcaccatgttcagcctaggctggtctcgaactcctgggctcaagcaatctgcccacctcagccttccaaagtgctgggattacaggcgtgagccactgcgcccagccctggcataggtcatatcccattaggttataagcaccttgaggacaggggccatgtcatgttatcccatcacctcttggtatataattggtgttctggcaggttatggatgaatagatggaaagtagcccatgttccttattcaggatagtgaaatggtgatgtacaacaacccagtgttttccaaaggtgtgagaaagtctcccccaggtgtggtaaggactccctgcctcctcactggcactgtggtggcagtctctgtgcaagttttgagcaggcatgggaaggggtacaggtcacaggttggagctgcacttcatcaccacactggtccttccaggggcagtggggtgtgactggcggtgcaggagcaaggaggctgcccttcctcacagcagctccactgcaccagacttggagaacaggcaagttggatgctatccacactctccgagccctgttcccccgcctggcctgagaccagccataacctgtctctggaaataagcttggaagacctgtcccaaggccttaagtgccgggaaggaagcaggtaagggaggctcctttcctgacggtctctgttactcaaaggcaaggtgttgggaagaaagctgaggcagtgcttgcatgtgcgacataatgtcctctagaatgtgtctagacttcctggctccttacttctagccctcctaggctcctagatcaattgtatttccattatctcaagtagcagaacatgttccttgtaaatgctaaaccataacagctatagatcatgtgtctgcccttttgacctccacattctcaccacctgtttctttgttggattaccaataaatagcatgggttcccaaagctcggagcctttgcggcctccacgatcgcgatggccccctagtcccactttacttctcaaactgtctttttctcaatcctttgactctgctggacttcgtggcccccacaacctggtgttgggtctgatcaccccaacacaaggggcctggttcactggctcagaggctaaatccagttgattctccaccaagaaaatgggcaggtaaatgctgattctacagttactgcgattcaggcaatggatctaacttttcttattgtgaggccagtaccccaagtgggccagtagaaattttctctgctgtcccctcctgaagtcctgccttgggagaccttaagcatcccccatgttctgtgagcctggatcatgccacaggtgccctaccccaagcccacagtggactgtcaagcaggtggcagagcagaaacggattaagagcacaggctcccaaacacccccatttaccagctgtgtggtcgtaagcagcttgctttttccatctgtaaactggggatagaagtgcctgcgtcgtagggaggtagtgagggtaaagtgggtgagcatataaagctcttagagcactgtggcatccaggaagcaccatggcttatatgattgttgttgctcctggggctgcagcccagtcttccccaaagaggaaatggtcatggctcgttgggcctttcccacagctgagcccaggcttccgctgtctcaagtggttttttttttttttttttttttcccgcctgagtctcgctttatctcccagatctcggcccgatctcggctcactgcaacctctgcctcctgggctcaagccattcccgtgccacagcctcccaagtaaccaggactacaggcccacatcaccaggcccagctaatttttgtatttttagtagagaggggattccaccatattggccaggctggtctcgaactcctaacctcaagtgatccatccgcctcggccttccaaagtgctgggactacaggcatgagccactgtgcctggccccaagtggcttttaattccatgacttcaggcacatctcctcccacccctcccctccacactccccctactgcagcgcagaaggccttgcatggcggggccttgactgtcctcccaacatgctcctaggccgggccacaccttcctcacctctgctgggcagtggcggttctgggtgaccctgaggtgtctgcctagtccctgcagctttgtctctccagagtaaaattaaagcatcatttgcttgacaatggagattccttgggcttcaacattcagcactatagttcaaccaaaaagactggagactagatagcaaacctatttctctaaaatattccctccccaaagacactgaaaacatagcaaaatgtggaataggaagtatcgtggttatttcttatatacacctaataaagcaatattaaagcctgtatacagatcaatcagtgatcaatcatccctagagcactggtcaccactttgtcctgcacctgtctgagtaacctcgggcacagtacaagccccaagttggtggccaggtgcagggaacaggcacagtcctcactcctgacagacacctccatcttctccagcagcatcccacatcttttaacgctaaattatcaatccccaaattttaaaaggttgaggcaggtgcagtggctcacgtctgtaatcctagcacttagggaggctgaggtgggcagattatctgaggtcaggagttcgaaatcagcctggccaacatggctaaaccccatctctactaaaaatgcaaaaatcagccaggcatggtgatgtgtgatagcaatcccagctactcaggaggctgaggcaggagaatcgcttgaacccgggaggtggaggttgcagtgagcccagatcgcaccactgcactccagcctgggggaaggagtgagactgtctccaaaaaaaaattaaataaaaagggggaatcaattttcctccacagaagaaataattttattccatttgagaaaagtaaaggatacattctttgtctgacaaaagtgattttgtcatggaactccaaggcctgcctggtgaagtgacagtgacagatgttagaggaacctgtggccctcagtgacacagagagcacagacatttggctgggaaagcacttgcatgatcgaaacatttcctattgcagagattcagaagttctttttatcctgaagatcattctggtttctaatttaagattgaagatgatttaatttgctaatggaacccaggccagctgttttttcacacaactgaaaggagagaaatcggaaatcactcttacatggtgagacctttgatacttttctccaggcctcatgagtcaaaggccatcactgtccctccaccgagcatctgggcagtgtctgcctcctgtccagaactcttggaggccgggccagcagccatctcagcccctcccacccctccatgccacagggcagcaccaactcccaagtagtagcaggctctgtcccgcagtccccagcccatccacagcaccactgctgccttggcagcgagaagggctgggaaaactgcaagccccttcctccctcaggtgttctgatcgccttttacaacaagggtcgcctctagcccctccatcaagtctttggtcctggaacattgtgagttacattgcatatagtgttattctaagggcatcacccagagaaaaaggacgaagcggccttctcactctggagctccgaagaactgagccagggaagcagcagggggagcgccctgtgttaggtgtgcacaggggctgcggctctcagcacaggcctgacgaccgcccagcttcagacgccaaccatagtgaggcctcagtgacaggcactcatcctcccctccaaacactggccagcaagagctccttccaaggaggacaagtgggagaatccagagagccacgctgtgggacggctcctgcggaactgggcgcagcctgtgtgtgcttggcctgggagatgcctgtgtgtcacactaagccactctaaaaggacaggagtaggactgccctttattcaacagtgccgcagtttgggtccagggctttttcaactctagaaatggcattgcctcaaaaaggctaactgagggggccaatatgaagtaggcttgttacaactgtaactgtcactctctaaaacagggtggcatgccaagcctattccacagcacctttgccaggcagacagagaacactccttctcagagccaatccccgctccacaggaagtgaggatacagcaagagccaggcaagccgcgcagatgccactggctctcacgctgcaggtccctcgacagaggccataaatctttccctccgagcacgtccaacttgggggtcctcacagtgctgctatgaactggccagtccactaaatgtcacagggaaatggctctcttgctgcacctctctggataggggccgaggtcgctgctgttttagatcctgccagcttagactgggtaaggccatgcccagggccagtgcaattgggaatactgcagtgacttctgaaaagtgtccatccttccccggaagcaaaatgcagcacccctaggacatcgccagtgacagctgaggcacatcaacagccaattgctaaagctgggcctagtctttaaaaacaaagcttagctccccgcttgggtggtctgactgaactggctgtctgcagaagtgacggctggcactgcaactgctagtctgggggcttgccctggaactgtacccattgccatcgagccattggggatgacagttgtgttcaagctattaggggtctcaccactagcttgtattttaaagtagaccaaataaaagacaggcaagacaataccaatcagcagcatgatgaaaacagcattccaccactgaatgccacaatctgcaccatccataggcgtcttcggaggtgccgggagcagtggctgatgggaggtgtccatgcagtaactttcatgtagaaagatttctgactgcactgcacgctcaatatcctggtcaatccccttaaagaagcccatcagttggccggcctgggcaccggtgcccgcgcctgctctgtctgcctctggcagttccacggtcactgtggtctcagaagacgggctcagaaggggtttcagttctttgtgggtctccatcaggatcccatggtttctcactggaatcttaacagatttcaaagcatataagtcttgttctctgatgaagttgttgactttcttgatatctgcaacctaggaaggcacgaagataaacatcataaaatatgcggagctccttaaaaataactttccaaaaagtggctcttaatctttctgggtgatgattcaagcccacttcactgacgaatctgatgaagactggaaaactgcagctgtacacaaagttagtttaggctgaaattttgtttttttggctttcactcaacctcaatatatagtttagtaatcagatattcctaaagatttacaggtttgaacaatttaagatcagttttgaaaaacagatctttcttaaactgtttaaagtgtgactgcaacaaatcgctttgggcgaaaccaccatggcactgaaaggaatgttgcagccttttccacctttcacttttgaggcaatagtgcccccatctgcctgccttccccctcatgccagaactcagtggctgccagatgttagcattcaccaaacacacagcctcagccagctctgcagacacactcaaaatccagtttacctgtaataaagttgacagatatgccctcggcattttctttcccagaaacactgtggggcatgtaaacttattaaataaaagtgacttacagttactgtacttaactgtcaggaaaaaggaataatgctgtgagttttatcaagtaacaaagttcatgacaaactcctctcataatcaaacacgaagatttaagaagcagggagaatgtaagtcaaagggtaacccctccctcaaactaatgtttgaaaactttccaaaagcatcagagatgaactccaaacttttaacacttaagtccacttaaactagaaagtgaatacagccaacagatctcaatcaaatcaatcatttccattattattcagcaactgctgttattgtaactgatttggggtaggggacatttttaattcactatgtcctgaatctaatgcatgagacccttgagatctttctgtctctgccttcaataaattaagagcaaatttatttacttcaaataggaaaactgatcacttatcaaaggctttatatattctttacggatttagacatcaccataccaagaagcctactccatctattccggtctttgtaggacaggcttcatttttcagcccatgttctgtaagccacacagtatgcctgcagaagctgcttatcggagccaaatataattgtcagtacaatttaaagaccactatgtgtccccggagaccaacctgtttatttccctgaaagaccgcaacaccccacacaacatgtttcagacatttggaccttgttagataagacacttgtaggagaaagagatttcttaaattaagtagcttatatacccctagagaaggccatacaaatctgtagcacagtgttagcaaagtgaaacagttgcaatctaggagaaaatgcagcaattctagaaatactttcctacttactttgccattgttaatcactctgaatgctgaaaacataattagagaaaaacagggttatatagatacacagcatacaaaagaccatgcagttctaaacgagagaaggtaaaactttaccaaaagtcaagtaagctaccaccaagaaaggttcagaaaaataagagcagcgagaaaagcaagcataccatagaaatccggaattaaattctgcctggtatctccagccccattaggtctaaaataaaatgtgctcgaaagaagaaaaaaggtttcagaatttcagtgtggagaaaacaggaaaaggagaagttccctgcagagaaagaaatgcgctaaccctccctctttgggggccagggttgggaactaaaggtactcccacctgcattccaattctggctaaataggggagtccttggctgctacagcaggcctctcctgacggcctggcagggttaagaagggcggcaagggcacccaccctgcagtgagttccccgtgttccttgaaacggagcggggcagggcccctgaggggtgtcttactttgcagccatactgcagcgccagcttgttgaggctgtcctcctgggccagctcccgctgcagcagcaccacgtcacctgctcccgcctggggaggctggtggacaccgctcttgtggcgctccttgccccggggccgcaaaaccacacggtgagactcttcttcagaagagtcccccgagtccccactgccattcttaaacatgtatacgtggctggtcggagtcccacacacaacagctgggccttggaaggtcttggttaacaattcctcgtgcctcattttcttcactgaaaatcaagccggagggttaattccacagaagacataatcatccctccaccgcctcgtttaaagagaagtgtcttgttagagagtattccttttcctaatcgctgcaaatactcagcatacatcatcaacagaaaaaaaagaatgtgcttatgctggctgagatggaagaagataggcagaataaaaaccctttgttttttctaatcgcatacgttttgtgcagaaaacgaaccccgcccctgttcctcatccatagctgtctcccctaaacccacatctgtaaagaaacaactacttttgctctcagagtagtaagttgagatccttgcaatggcaagtaagggctgccgccagcctccgcgcactcagaatcttcaactcagaagctttgcacaataattttgtattcaatattttacacattgcaaagtatcttcactaagaaggtcagcgctaaggactcttgctcagaactgtggggctaaactgctcttactttgacacagtttaactcacagtatgtggggcaagctacggggagaactcatgcctgtcagccggagaaaagcgtccagtttgctcacgggtcactttgcattcattacatccccattgtctggtttttattttccccttgagtcaacagccaaagccgcaagacccctgttcctctctccagattgttcgcgtgagattccagaaacgaaatctcaaacacgcgggctgacaacttcagaaaaaggtggcttcggagccacaggggagcagcccgtacggggacagcctgcggccccagctcgaccccctactccccgcccacgccttcgagggtcacaggcccacaccccgctccgcgcgctcctgagcctgcccggaggcgggaggcggccggcggtcctcggggggttgagggtcacctgcaggaccacggcggcagcccggggacggggccagccttcgcgtccgagctcaggggcggcggcagcagctccaggcccgcttccctccaagtcccttctgcgaaaagatggggcacctcaacaagagctgacaggaaaatggggagcggcccggccccagggctccacggctccacgggcggggccctaacattccagagggcagaacctctgacctctgacccccaaccctagccacctggggccagcccacgacagtcgcggtcaccgcccctccagctggagcgtccccctaggagcccggggaggggcggcccgcccgcgaaccctcgagcgaggccaggtcgccgtaccgccatgagcccgcgcggctccctagccagaccgcggccccctcgtccaggccccggtacctcagcgcccaggctccgccgcgaccggcgaccggcgactcgcgacccgcgacccgcgacccgcagctgccaccgcgcctgcggattggctacgaacatcagcagggcccccctgggggcgggactggggaggcagccaatgaagtcagcgctgggcgggcactggagcgagcctggctgcgcggagagctcatcccgggaccacagggcccggggcggggctcggggcggggctcggggcggggctcgacagggttccacaccccggaagtggccctcgccccgcccacccgcctaccaggtctacccgcgcgggccctggcttgttttcgcgtctgttcggagtaataaggcacctcagctcctccctcccaaagtgcttggctttctgctgagccgcagctttctcgcccgtaaagaggcctttgaccccacttgtgggtaatgatctgtagctgtgactcggggtggattccagtagcgtggggtcccctgagccctcctgcggggaagggctgggcgcagatgggcgaggggtctttctgcggcgggatctgcgctcctgggcctttgagggccgcaccaggggaggcattgccccaccccgagaagaaaacagaaatccacgagtgtaaaacatggatgcggacaacagggaccaagaaaacttaagtcgtgtttatcaaatgtcaggtggccgaggatttcttaagatgaaaagtggtggaagaattcactggccgggcgcggtggctcacgcccgtaatcccagcactttgggaggccgaggctggtggatcacgaggtcaggagttcgagaccagcctggccaagatggtgaaaccccgtctctactaaaaaaataaaaataaaaaaaaataannnnnnnnnnnnnnnnnnnnnnnnnnnnnnnnnnnnnnnnnnnnnnnnnnnnnnnnnnnnnnnnnnnnnnnnnnnnnnnnnnnnnnnnnnnnnnnnnnnncttgaacccggagcggaggttgcagtgagccgagatcgtgccacacactccagcctgggcaacaagagggagactccatctcaaaaaaaaacaaaaacaaaaacctcacacactaaggcacaaagttcagagcttctacttaaaaaggaaaaccaaaattaaaaagcagataacctagggaaaataaactgaacacaacaaaggattaaaatccttcgctgagagagacttcatatgaataggaaagatgctaagacctcagcaggtctgagggagacctcagagagacaggagcagataattcagcaaacaatgcaaatggtcaacaggttgaaaatgtttttaaccctcacttgcaatcagattaaacaacaaagcaaacattaaaacaagatctcacaaaccttttcccactaataggatttgactgtgtccacacccaaaactcatcttgaattgtagctcccacagtttccacctgttgtgggagggacctggtgggaggtgattgaatcatgggagcaggtgttttctgtgctgttctccagatagcgaatgagtctcactagatttgatggttttataaagggaagttgccctgcacaagttcttttcttctatctgctgccatgtgagatgcacctttcaccttcagccattattgtgaggcctccccagccaggtggaactgtgagtccattaaacctctttcttttgcccagtctcgggtatgtgtttatcagcaggatgaaaacggactaatacacccacttaaactaaaagtcaaattgttaatcttcgtggacaaagcccaaaatggtctggactccaggacttaccctcccctaacccccagggttctcaagactctggccttggaatgagagtgacatcatcagcttccctggttctgatgtttttggacctgcactgaaccatattatctgcatcccagggtctccagcttgcagacccacctgtcccgggactttcagtctccttaattgtgtgagccaagtctaatctcctctctctcactcactcactttgtgtctctctctataggtagaaatagatatatagatagatagacagatatctcctattggtaggtaggtaggtagatagatagatagatagatagatagatagatagatagatagatagatagattagatagctcctatcagttctgtctctctggaggacttgactctgtatcggtagataggtagatatctcctatcggttctgtctctctggaggacctgactctgtatctgtagatagataggtatctcctattggttctgtctctctggagaacctaatacaggcttcaaggctccttctctcaagctgcttgcattactggactgtctgagcctcaggcctcaaagtaagtcatcttctcagtgagttctcccctgtccagcgggtatatgtaggtgctcccttagtgctctgtgagaacacggtttcttcatagtacttcctagttcatttacttgtcatttattgccagaatactactgtccccatacaacttccaaggcccagctgagtggcggcgtctagaggtgctcattcaatgtgggctcattaggagagctgttctgatgacctgacccaggatacgggaaggcaaactaaaattaaaaagcatattatctggggaaaataaatgcatcccgacaaaggattaaaatcctgagttgagagcaccaaaatccaaatcctagtgtgtctattccagaggcctggctctcagccaccagctgtacttcgggcccaaggcacctggccatggcccggtgggtttggcaaatccaggagtcagaatttcaaagtgtgactaatggcaagaaaagtcacaacagaatttgtaaagctggattagtattgctgctttctgatcagttatggttgtttcattcattcagtgtgtccagtacaaaataaatccagacttaggataaagtttattccaaaagattattgcaaggtggtgggagggactattgcaatggggagaacttctgaccataagctctgtaacatctcaagagttagacagaaagttctcctttcacagcgaagtaacaaagctagaaagagcacggtatggggaagcgggatgaaagggtggtgggatctggtagtagatcagagaatgttctaccctggggtcagccaagtctcaggaagagcttatgctggctcaggttgtggtggagtcaaggtttattcagtgggctaggggaagagagaagcctaatcaaagtttggttagcaagcattttgttccaattgattactggggtcaagcagtttcactaattatttatgagataaaaggaatttggagggtctggggctggccttgtcataggtaaaccagggtggcatttgtgggtcttacctaagtcatatggagaagggagttctttgtagtaggtgttttccagaagacaaagggtggaggaatttcttaaaccccactgttttccaggagcacaaggtttgggtagagttcagcactgtcaagcttatgtctgtggcactccttccgtgtgctggggcacagtggcggacaaagctataaggtcaactttgattggctgtataaggctgataaggcctcatagccttacaattgccagaaggaagatggaaaatcaaagacatacacagaaaaggtcattacagatggtgcaagatcttccaaagaaacaaggtcatgcatgtgagcaaaaattatataaactttgtaaaggcaaaagaatggctgtgtcctttcaaggtcatatgaggacttggccggctggactgcccaggaattaagtgattgtcaaggcagcagttctccaagtgtgttctagggatcccggagtctgtgatgtccaaacgatgttcatagtaatgccaacattatttgccttttgcatttcactttctcctgatgtacaataatttagctaatgtttattgagtccttactgagtacaacacccgtgtgaggtgggaactattataatcctcaacttacagttggaaaaactcactaggggagaaattgcaagtttgccacctaatatcaattctcatcttttcctttagaaagagaaccccaacattattgggggcatcagcatgccaagccaagaccacatatcagccctccttgcagtgggttgtacgcatgtgaataagttctagacaatgaggtcaaagaagaaaatgtgagcgggactactgaagaagtccttaaaagggggagatctggaaaagctctgaaatgtgagtgccttttttttattctccctgcctctctgctgcctggaataaagatgtgatggccagagcacatgcagtcatcttgaccatgaggtggaatccatgtactaagtaaggatggcagagcagaatggtggatggggtgtaaaagagaaataaatgtcctcatgtttaagatgctgttaggatctctatcactagcagctgaataaattcctaatttatatgcttatgcacaaagatgaagttacttgctcaagatgtcatagctagtaagtacaggagacaggataaaaccccagactgtggctccatagccccaatcttgtgaaaacttctgagcagagcccatttttgctttcactgctgactcagccccacccaggaagcctgttcacctggtcaacattttccccagaaacatccccaagttctctccccaggccttggcttgactggctgagttatagtatctctggcctgagtttcctgaggccagatgagaagtgttaagagtgacatgacttgtctactgaagtgtgccaaggtcatgtccaccaaggactccactactgtggccccaagaaagctgggactaaacctgcacaagcagacatgccgcccaggtgccaaagctgtgtcacctcatgcctgtgcccgacctcccttggagccctagcaagggtagggagagaagaaaagtagcaggtgctcactgagtggctggctttcacaaaatgtgtcaaaaatccagtgggtggagagcagagaactgtgttatcaaagtcattagaatttcttaagctacaactgctcattttatagagaggaatttaagacccagagacgtgaggggacctgcctgaggctgcacagcaggttagcacgttgggagatgaggtgagtccaaagccagctctgcattcagtggctgtgtgaccttgactgagtcctgtaagccttctggactttggttttccactgccactgtgttgttccctatgcttggggtgaccatacattctttctgtccaaaacaatcccagagcatgcctatcgtcacagcacaattattagaaacactccttccctcctcgtagtgtctggacacaccctacacctctctgtgtgacagtgatatggtttggctctgtgtccccaccaaaatatcttgttgaattgtcattcccagtgttggggaagggatctgttaggaggtgattggatcatgggggcggatttcccccatgctcttttcatgatagtgagtgagttgtcatgagatctggtggtttaaatgtgtgtgtgatgttttaaatattcccctcactctctctctcctgctgccatatgaagaaggtgcttgcttcaccttctgccatgtttgtaagtttcctgaggcctcccagtcatgcttcctgttaagccttcagaactgtgagtcaattatacctcttttcttcataaattacccagtcgaaggtagctctttatagcagtgtaagaacggactaatagacaatttgcccatggactgtgtacctggcacctgctccccacggaccccccagcagactttgccagttcattgcagaggcccagatggccgtcagtatccaagacagccatgaccaatcaagcaatattgtcaggggaggggaaactgatttgccatccctgctctgcagtatctagtagtctggatttggttccttaagttgtgggttctctaatgactcaggaaaatccactggttattgccagtgtggaatttgcatttccatgaaatagaaagaagaaaacttcctgacttctgcttgttgtcaagtgactgtgagaagtgaagcccttggaagaaacatggctatgagtgtgagagctcatagctccagagatattgccaacttcaggaattcatgagaaagtagtagaaagaagaaaacaggaaatgtattgcatttggtacggcaaaaacaattattgaaagtttaacaggcttatgacaaatggggtaaaaatgtttgccatctttgatacattgatatccttaatatataaaaggcatacagatctcaataaaaaagcactttatagaaaaataaccaaatgatgcaaaaattcactaaagaaatacatataggaaaaaactgttaactttacagatagtcaagtaaatggaaattcaaaaaactacaagatattcattgtcacctacagacttggaaaaagtcgaacctaaaaggatgatagcgaacttggctgtgcacgtggggaaaggagtgtacttactcctgggcagtctcgtgggaatgtaaatttgggatgtttgtagcattatatagtagtaattttttaaatgttcatattgtttgattctgatctcctacatttaggagtttaccaaggaagcaatttggacatgtaaaaagatttagctacaggactgttcttaatggtgagaaatggtggaaaaactaaaaatgtccaagagtgggtgattaggttgagttcattaaactcatttattaaatggaatcaagtatgcttatttaaaataatcttgtaaaaatatagttattgacatggaaagatttttaggaacaagaaatactgttttaaaaatctctaggtgatggttcatgcctataatcccagcactttgagaggccaaggtgggcagatgacaaggtcaggagattgagaccatcctggccaacgtagtgaaaccccatctttactacaaatataaaaattagctgggtgtggtggcccgcacctgtaatcccagctactcaggaggctgaggcaggagaattgcttgaacctgggaggcagaggttgcagtgagccgagatcacaccactgcactccagcagagtgacagagcgagactccatcttaaaaaaaaaaaaaaaaaatctctaagtggattgaacctataatcccagcactttgagaggcctaggcaggagttcgagaccagcctgggcaatataatgagaacttatctctaccaaaaaaaaaaaaaaattacaaaaactagtaaggcatagtggtgtgcacctgtagtcccagctgcttgggaggttgaggtgagaggattgcttgagcccaggaggttgaggctgcagtgagctgtgatcaagccactgcactctagcctgtgacgccctgtctcaaaaagaaaaaaagaaataaaaaaaattttaaatgaaaataaaaatctctagaaaaaaagtgaggaagataaatcccacagcatcacctcacagacatccagagggttgtcaagctcataatgtctagtcccaggtgactttcattgccttatgtctgttcatttgcattgtttaaattgtctctatggcacacgtttactcttattataaagaggtggcataccataccgtggttaaaaccacagtttctgaaatcaggcattcaacattcaactttgaatccagagtcatcctttagtacctatgagaaaattctgtggtccctgcaagcccgaattttctcatctatgaaatgggatctgagatggttgctgctttgtgacaatgaaatggggtgatgcctgttgagtgtctgacaggcccctagcatacagtaagaactctgggaatgttagctatcattattatcaaggggaaacaataaaagcataaaagttaatttttcattaaacaaatgcattcctgcctgcaatgagctgcacgttcgtttcctcctcaaattcgtatgttgaaatcccagctcccacagtgatgatattaagtggggcctctgtgcttgtggtctatgctactcagaaggctgagtcaggaggatccctggagcccaggagttggaggctgcagtgagctatgatggcaccactgcgctccagcctgggtgacagagtaagaccctgtctcaaaacaaaaaaaaagtggggcctttgtgaggtgattaggttataggggcagacccctcaagaatgggattagtaccattgtgaaagggactcgaaaaagccctctaaccctctctctgccttgtgaggatacagtgagaaggtggctatctgtttgcaccctggaagagggcctagccgtgctggtaccctggtctcagactgccagcctccagaactgagaaaccaatgtctgttgcttctaagctacccggtctatggtactttgttagagcagcctggactaaggcactgccccaacttacctggctggaggtagtttgcgaggctcttctggggcccatatctgctctgatctgaaaacaggtttgtgggggtgagttttaagtctgtctacagctttatttgtgtcagactcaatggtccccagggccagggtgtggggaggtgcctgcaaacaggaggttgatgaactgggcaagctgtcctaggcagatgtcagctggggccacccttcaaacctatgtgagactccacttgggaagtccagagccccacccaagcatcctggactccccacggggctcaccttcctgggctgacttcctcctgacaccttcccttcctcagagcctgggctgcttggtcacctccaccttgttggggaactgagtctcctttattggtttcaccagaaagacacagccaccagacctttgtgtatacagcagggtgtttagagttttcatactcacatcttaataccacctctcttttcctctcaggagcaaaaactcaattcctaatcctccccactcctctacctccattttccaatccccttggctcttttttttttctttttttttgtgatggggtctcactctgtcacccaggatggagtgtggtggtgcaattttggctcactgcaacctctgcctcccgggttcaagtgattcttgtgccacagcctccctagtatctgggattacagcacctgccaccatgcccggctaatctttgtatttttagtagagacggggtttcaccatgatgaccaggctggtctcgagctcctgacctcaagtgatcctcctgccttggcttcccaaagtgctgggattacaggtgtgagccaccacaacgggccccccttggctctttctattgccaacttttaaattcgtctctggccttcctgggcatacctgggaattatgcccagctctggagggcctaactcaacacttccatggtctccatctcttcccagtccctcaggatagggacaggggacatgcttctaattacagtgagccctctgaatccaggggtcccacatctgtggatcgaaaatgtaattaggctgcgatggttgaatctgtactgaacacatccagacctttttggggggtcattattccctaaacaatacagtctaacaactatttacatagcatttacattgtagcaggtattcaaaataatctagagatgatttaaagtatatggaaggatgggcataggttatatgcaaatactacaccattttatatcaggtattcattttggtattcgtgagaggccctagaatcgatcttctgaggcataactataccctttgaaaagctgccactggctgatcgtggtggctcacacctgtaatcccagcactttgggaggccgaggtgggcggatcacgaggtcaagagatcaagaccatcctgacaaacatggtgaaacccccgtctctactaaaaatacaaaaattagccgggcatggtggcatgcacctgtagtcccagctactcgggaggctgaggcaggagaatcacttgaatccaggaggcagaggttgcagtgagctgagattgcaccactgcactccagcctggcaacagagagagattctctctatctcaaaaaaaaaaaaaaaaaagaaaagaaaaaagaaaaagaaaagctgccactcttggaggaaatgtacagcctaactgttaagggctgatatatgtctctcccaaattcatatgtggaagtaccaacccccagtgcctcaaaagtggaagtaaggtctttaaagaggtgattaaattaaaatgaggcctgtaaggtggggacataatccaatctgactgttgtccttataagaagaggaaatttggatcaggcatggtggcttctgcccataatcccactgctttggaaggccaaggttggggatcacttgaggccaggggttcgagaccaacctgggcagcttagcaagacccctaactacaaaaaaattaaaaaaaatttatccaggcatgatggtgcacatctgtagtcccaggtatttgggaggctgagatgggaggatcacttgagcccaggagttccaggctgcagggacctatgatcacaccactgccctccagcctgggtgaaagactgagaccccatccctaaaaaaattttaagtaaaagagaacattttgccatgcggtgagacagcaggcatgtgagcacatagagggaaggctctgtgaggacacaggaagaaggcagccacctgcaagccagagagagaggcctcaccagaaaccaaccctgctgacatgatcttagacttccagctgccagaactgtgagaaactaaatttctgttgtttaagacgctcaatccatggtatttgttatggcagcccaagcagactaataacactgcccaagactctgttgctggtggagtcagaattcggaaaaatccaacccactgatggcagcacaaaaatgccacccagatgccgaaaggcgtcccctccacctctcccagatgcgcccctgctggccaggatggcagatgtgacagagagaaggctgtgtgccaatgtccttcatgatctctctctgtaacacacacacacacacacacacactacttgcgtgagatgggcacggaggtccctgacctatctccttcagactttaccagccttgccacagttgctgtgccatctactttcaggacagtctggctggctttgtcaggacttttcagacgtggtgacaaacactgaaatcacggggcagtgctcagttcagactgtcctaccagtgctagtgagaaggtctctgtgcctgggtcttcctgaagagtggcctcttgggaaccggcccagggaccttccatatcacctgcacatggctcaggggtcctgggtttatttttagggtttatacttaagggctcccgtctttgaaattggaaatcatctccccagtttgtgtgaatacaaatagtgtaattcctaaatcactccatcgacattcactttttttttgtggctttattgagatacatttcacataccataaaattcactgttcacattcccttaggaaaattttcttcagattcacttttgagcgaactacacgtagtgattaataatgggggcgaggggacaccatcctagtctctgggccaggtgagttggagaccggaacagagggaagccaccgggccctgtgcatccaaatcttgtcccacaggagggaagtggcaggacattgatgaatgagttttcggctgtagtcgtgttaagggaaacacttggaacacggatattttctaggcttcgtttagatttgatgtgtccagtcgatgcagcttttgtctcctccatgtgtgaatgcctcagtggcactgagcagctagctttggggtcggaaagctagggtttccactggaattcagggcagggaaagcaacaccccttcccctctcccttggcaatgcttacgactgagggggatgtcctcaacgtagtcaacgctttcatattttaaaatgagaaataagggacacacttcccgatttcttgagccatcttaaggacaagtgcccatgttggggtttgccgtatgatttagctgctcccagccaagatacttagaggtttcgtctccatctttccttgttgcaaggcatcatcactgtatgatcagaacctgagccagaacagattagatcctaatgcatgctggggagcggcccatatactgtcggagggaggtccaacatctcagattactgactcacatgaaagcagaaagagtggagaactagccttggctagtttttaaaagagagtatctatactgaaaagagaaggaagggagggtgcggctaagggccattctaaggaaaagacatgaagatactgacatctgggattccctaatgattggcccagccaggtcactttagagcagtggttcctaacggggatgattttgctcacaaagggacatttggggatgtctgaagacacagactggagagtgtgtgtgtgcagtgtgtgtatgtgtgtgtttgcgtgtgtgtgtgtgtagtgtgtgtttgtgtgtgtgtgtgtagtgtgtgtagtgtatgtgtgtttgcatgtgtgtgtgtgtgtgtgtgtgtgtgcatgtgctgctgctatctgtggatgctgctaaacatcctacattgcacaggaatatccccattcccaccccaaaaaacaattgtccacgccacaatgtcaacagagctaaggctgagaaacctgcccttcagtgaacttcagcgtctataagcctgccatgcacttgactatccgagcaggcttttaatcatttacccttgaacatgagcagacaatgatcaattagcagacaattgaagaaagcccctaacacgaatgatagtgatcagaacacacagaaaaaaggtaacttgagtgaaatagattatacagggagaataaaacgtgagagatagatagagacagaaaaaacaaacctaaatacgtgaaataagaacaagatgctatttaaaaagtagcaaaaagtggctgggggctgggtgtggtggctcacacctgtaatctcagcactttgggaggccaagatgggaggattgcttgaagcgaggagtttgagatcagcctggtcaaccagcctggtcttttcaagatgccatctcaagaaaaaaagtagcaaaaaaataagcagacaaataagaacttttaaaaatgaaaaatatgatagtagaaataacaaacactaaacagcttagaatataaagttgagaaaaatcttccaaaaagtaaggcaaaaaatcagagtgaagacagaagagaaggtatgagaaaattaggggaccagcctaagaaaatagtaggagttttacaaaaagaggacagggaaaatgcaggaggagaaatcattgataagtatttcaagaggccgggtgcagtggctcattcctgtaatctcagtactttgggaggtgggtggatcacgaggtcaggagttcgagaccaggctgaccaacatggtgaaatcccggctctactaaaaatacaaaaaaaattagccaggcgtggtggcgcatgcctgtaatcccagctactcaggaggctgaggcaggagaattgcttgaatccaggaggcggaggttgcagtgagccgagatcgcgccactcactgcagcctgggcgacaaagcaagactccatctcaaaaaaaaaaaaaaaaaaaaagtcaagaaaatccccacaacaagaacatgagtattcattctgaaggggtgaatagacccacacgcaggcatatcatggggaaattttcaagtactggtgacaaagagnnnnnnnnnnnnnnnnnnnnnnnnnnnnnnnnnnnnnnnnnnnnnnnnnnnnnnnnnnnnnnnnnnnnnnnnnnnnnnnnnnnnnnnnnnnnnnnnnnnnggcgctgtgctccgccgaggtcggcggcacattggctgatgtcgaaacatcgatcccgaaggtcggcttgcggaacgctagctcagaacccgtgggcataggcctatcggacatctcggcccgcggcgaactcacgtagaagatcggtcgacggcccagagcccacgcgggcggggagaattcccctcgccggcgaggcggcgcacaagcgggcggagcgccggggcgccagaggggcgtgaagcccgccccaaggtatgcgtcgcgaatggctagtcatgcattcggcgtcaacgacatggtttgtcacagcggtagacgaggtgggacccggataatcaccaccggcctgaagtagatttggctgtgagcatcacgaggctgggagctggatgcccacgctggcagcgtgactcggacgtcaaaacaggctacagcgtgcccaggatgacattgccatactctgacagcctcagagtacagccgtgcacacaaccccctcccaagctctcagcccttacaccataaaccacgagctctctgacagctccagagagagcccatgtctgccagcttgggcacagagcctgttccaagagcccacaagctcagccatggaggctagggggctttggggctaggggggccagccctggtacctgggtccagccgggacgctctgtacctgcagctaggcgtcgtccacgggcccccgtagctgtgctgacggtgttcgtgttgatgttgccgatgatgctgagagcctctttcacgacgtggtgcatgcgcagcatctcgtcgcgccgctgtgcctgctccgccaactcctccaggagtgtcttctcgttcccacgcgagtgcaggttggacagcagctctgagaagatgaactccttggtctgcctgctccgccgactcctgcaggagtgtcttcttgtccctacgcgagtgcaggttggacagcagctccgagaagatgaactccttggtctgcctgctctgccgactcctccacgagtgtcttctcgttcccacgcgagtctcgtcgcgccgctgtgcctgctctgccgactcctccaggagtgtctatttcttcccacgcgagtctcgtcgcgccgctgtgcctgctctgccgactcctccacgagtgtcttctggttcccaagcgagtgcaggttggacagcagctctgagaagcagcatctcgtcgcgccgctgtgcctgctctgccgactcctccacgagtgtcttctcgttcccacgcgagtgcaggttggacagcagctctgagaagcagcatctcgtcgcgccgctgtgcctactctgccgactcctccacgagtgtcttctcgttcccacgcgagtgcaggttggacagcagctccgagaagatgaactccttggtctgcctgctctgccgacgcctccaggagtgtcttctcgttcccacgcgagtctcgtcgcgccgctgtgcctgctctgccgactcctccaggagtgtctatttcttcccacgcgagtctcgtcgcgccgctgtgcctgctctgccgactcctccacgagtgtcttctggttcccacgcgagtgcaggttggacagcagctctgagaagcagcatctcgtcgcgccgctgtgcctactctgccgactcctccatgagtgtcttctcgttcccacgcgagcgcaggttggacagcagctccgagaagatgaactccttggtctgagagtgggcaaagaaggaaggagtttgggtcctgatgcccgtgctgccctggcctcccgctggcccctgctgggactgtgtgctggagttgaagccctgagtatggcttttcacatgcggcttctacacagcttaaactcaaagatctgcctccccattgcccttttctcactcagatagggacactgaggtccagaggaaaggtcgcctgtgcaagtcacagatctgggagggcaccctggacctatcatgctaccaggacaactgtctactcaggtttttcaaattttttttggagataggatcttactctgtcgctaggctggagtatagagggcaagatcactgctcactgcatcctcaacctcttgggctcaaagtgatcctctaatgtcagcctgtcgagtagctaggactataggcacgtgccaccaccaagcccagctatttttaaaatttttgtgtagaggccaggtctcactatgttgcccaggctggtctcaaactcctgggttcaagctatcctcccgccttggcctcccaaagtgctgggattacaggcatggaccactgtcctcagtcccatgttatatttctatgagacagctctggtctggaccatgcctccctccctggacctggtcccatagggctggtcagcatctcccccaggccaacatggccacctgcatcctcagtgccacaggagccgcctacccccatgaggcggtgcatgcacattgtagatcatgatatgcatggtggtcttgggcttcgcaccaaccatgaggtcccacacggtcttgttgacaatggccatgtaggagtccaccaggttctgggtggtttccatttgccgctccagctgtgggtccatggagtgcatgaagctgtgggagccattctcctcagccttgctgtcctgtcacggagaacgcaagggcatcagggtggccaggccatgcagccaggctccagcaatccctaggatctcagtccctccaagggtacctggaacattgaagcacagagaaaggcaactggcctgaacacacacccagctccccacatgctctagatggtttcaggcctctgcctctcaggaccccagactcccctgattcatgtctcgtcttagttctgattctagtgcccagaatttgcctcaagttaccaatccagaaattggaaaagaacatctccaggtaccttgcttgaagacctggccagagcttgcgccaggctgcagatgcctggcaggaggcaaaaaaagggcatactcactttccccttgtcctgggaggcccatgcaccaacactgccaccgccgctgccaccagggaacagagcaaagtagacacacacagacaagaaaacgggaagggttgagtgaacctgggacactgcaccccaactttaatgtgttgttgaattcaattagctaatattttgttgaggatttttgcatcaatattcatcagtgatactggcctgtagttttcttttttggatgtatctttagttttggtatcagggtaatattagccttgtagaatgagtttggaagtattctctccttctctatttttggaatcgtttgggtaaggttggtattagttcttctttaaatgtttgctagaattcagcagtgaatcatcaggtcccaggcttttctttgctgagagacttttcattaccacttcgatcccattatttgttattggtctgttctggttttggatttcatcctggttcagtcttggtagtctggatgtgtctggaaattcatccatttttagtaggttttcctatttgtttgcatatagttgctgataatagccactagtgatcctttgagtttttgtggtatcagttgtcatgtttccttttgtttgtcaatgttgtttatctttttaaaaaaataatttttttttttgagatggaatcttgctttgtcacccaggctggagtgcaatggcacaatcctggctcactgcaacctctgcctcccaggttcaagtgattctcctgcctcagcctcctgagtagctgggattacaggtgcgtaccaccaccctgggtaatttttctatttttagtagagacatggtttcaccatgttgatcaggctggtattgaactcctgacctcataaggtacccacttcggccctgcaaagtgctggggttacaggcttgagaatccgtgcccagcccacattttgtttttaaattttacttaatttacttgtttttttcttttgcaaacagggtctcattctgttgcccaggctggagtgcagtggtgcaatcatgggctcactgtaaccttgaacacctaaactcaagagatcctcccatctcagcctcatgagtagctaggactacatgcctgcaccaccacacctggctaatttttctagtttttgtagagaaagggttttgctatgttgcccaggctggtcttgaactcctggcctcaagcaatcctcctgccttggcctcccaaagtgccaggattacaggcatgagccaccatgctgggtctatatatacattttcttttccatgttatataaagtattctgtatgcatcctcctggaatttgtttttctcacaatattatattgctaaagttcttattgttgtttattgctggccttcattctttttgactgcttgtgaaatcaccagaagatagacatcctgagatctcttaagaactgctgctgggagtatacactggtatgaccactttggaaaacagtttggctccatctcataaggttcaatattcacactcctcccagcccagtaattctactctacatggaagagaaattcttgcctatataaaacaggtgatgtggacaaggaatgttcctaacagctctgttcaaaatagcaaaaacctattgcccatcaactggagagtaggtgactaaattgtgctttttattccctttgatttcctgtagtcttacgatgcaagtggctttcccatggctagcttggggagggggatactcttggcaactgagtctgtggtggcagtcctgcttagccctagggcaatcggtgctgaccaaaacaagagtaaacagaacaaggtgccccattgagccaatgccttgagtccctggaggtacagtcttgtatctgtaggaaatagccatcatacaaatcagtcttttcaaatgctctgtcactgggctgagtccaaaggacattctcctttaaaacattataaagtttactgaggctaccatttatcgagcagttatcatgtgcctgatcacgtactagtgtactaattgcatgcattattttattattttatttatttacttattcatttatttgagatagggtctctctctgtttcctgggcgggagtgcagtggtgcaatcacagctcactgcagcctcaagctcctgggctcaagtggtctcacctcagcctctcgagtagctggactgtaggcctaagccaccaagtccagctaattttttaaaaaaacattttcatagaaatgtggtctggctttgttgcccaggctagtctcaaactcctggcttcaagcgatcctcctccttcagccttattattgcatttaatcgtcaccatcaccctgtgagagtggctgggggtaggtgctccactcagtagcaacgtagcaacctccactcataggtgacaatgagactcagtgtagtcaagcaacttctcaaaggtcacacagctggagggtggctgagccaggatgaagacctaggactcgaaagctggtgcaccagtaaatgagaaaatctctgggggttcaggatcgcttcctcccaagaaatctttctccaaaggttctaaaaacaataacaacagatccatctttcataaagcaaacaaaactagcagccccttcattttagaggggggaggggggataaaggttagctaagctccagggcatcccattttaatcctacacatttatcaggcaactgccagcacagcaccccaaacctaaagaaccatgcacagctgtctctgtggggcatggcgtgtccacggacgtaaagattttccaatgtgtgtttacaggccggtggcatcaccctcagtcacaggttaaacggcagctaggcctggcctgctaggcaccaccgtgagaatctgctgagttttccaactagtttatctgctgtttgcaatgaaagacgccctgaaaagaaggggtgtgggtgggaagagttctgatttgaggtgccctgatccggcacgatctccttccccagtcacaggaatcagaggactccatctgtaaacacagcctcaagctctgtcccccaaccccctctttcaaccaggtgccaccctctgcttctcttccatagacagcctaggctgccagcattcccttaggatctgtgccctcgggcctagcttaattttttcctctccaaagagccatctgtagggccagaagccagcaaagcctaactcattactggacggcagttcctctgcctttcactgattcctaccttaccctggggttttacgtttcttgtctcaacactaacatttctcactcctccacaagttgaattgctcactccagccaactgaagcatgctcttcttgacacagttagctctcggcacatggtcggtgctaaaaaaaaaatgatcattatgtcaatttcattgatcaacaaaagtgatgcctccactgcaaagtcaagttgatagtgcctgggcctctgagttcaagagccttctagacaaagcgctctgagctgaaacatgagcatgcacacatatgcatctctctcggtnnnnnnnnnnnnnnnnnnnnnnnnnnnnnnnnnnnnnnnnnnnnnnnnnnnnnnnnnnnnnnnnnnnnnnnnnnnnnnnnnnnnnnnnnnnnnnnnnnnngaaagaccccgggtgcacgtgtagccaacacaataattatcttagctaataacggctaaagctgaggactctcctgagccaggcagtggcttaaaaacttaatgttttcacatagactctcattgaataatttctgtttttcagatcaagaaactgagacttactatcacatttgggattaagtttaaaaaaaaaaaaaagaaactgaggcttaaagttgtctagtatttcacagccagcaaatggcaaagttggaaattgaaccaggcagtagagccccaggatcctgtgcctttacccattacctagtgttggctacacaaaactagtgtgtacacaacttcaactatagtttaagctatagtttaagtgggtgacatatttttcactacattttatgtaggtgactttcagtttgggggtattctacttatgcaatctattgaggtggatattaactgagaacaaatagaaactaatgaactctgaaaaacataaaacatgagcaacatgatgtcaccgcaaaacacaaaacagcccacagccttcttgtgactgcattttgctgacagtccacgacctaataatcaacctgaactcagcagtgctctgttcccttgggagacacacacacacacactcgggagaaacacacacactacagttggtggttgtgccgccctgagcctccagtaggcgagtgtgaggaatgtagggactagatgggtcgggcagaaaggtgctgggtcaaggggaggagggggcagccgggagctcgcgcacgctcatggactcgtgcaaccgccaaaacgggtgcgcgccgggttgaggggtgacagggaaggtggcagggttggggcagcctttcccaggcggtacggggacggtggtgctgttgtcctttttcttttttttttttttttttgagacagtctcactctgtcgcccaggctggagtgcagtggcgggatctcggctcactgcagcctatgtcccttgacagtccacgggttaaagagattctcctgcctcagcctccccagtagctggattacaggccccgccaccaaggctggctaacttttgtgtttttagtagagagggggtttcaccgtgttggccaggctggtctcgaactcctgacctcaaatgacccacctctgcctcccaaagtgctgggattccaggcgtgagccaccgcgccgggacccaaggcccttaagttttaaggcctcattcttcagtcaggttttccctgttcccgcgtgttcggccaattttttgttgttgttgttttgtttttgtttttgtttttgagtcaattttccagacatctttaattagcaatatgtttaagtagttacaagcctttccttcttttcttgtgacagtttgggttgaatttctatcgtttgcagcctgtcactgtaaggcacaaacatgatcacgcaagatgcgatagtagatttaagccagttgtttttaagtttgtgtttaaggagaaactaacaatgaaaacggcctcgttgacggaggaaaagttggaatgcagcctctggtgctgtttgagcgatccctctccccggggcctggccgcgcgctgctgtgttctggaagggctcattgtacagtcaaggcggcaggtaagagtcccgtacaggtgtcttcgcgcttttcctttcaggcttctgtgtgagctgtttttcccctgtaggatgcgtccctgacctccaccccttcaccctacccaatttgtctttacatgtctgaccatcaaggctctcctgggtcgtattcagttcatgctgatattttcccttcctcccctctttggtcctcactgtttttgctttggtcatgttatgctatattctgtaggcctttttaattttttttttatggtggcaggggaaaatattttataattatgctttgtgctttttatcttccagtcagtaaatgcttggtaaatatttgttttattgagtatatgaccctattctagctatatcgtgcttgaacagaaatcttaactgccttgaaagttaactgctaagaatttgtcaaaagtgcagagctacatcaagaacttgtcatggatagtacaaaaaggtctctaagggcttgaaggaagtctgtaaattgatttcatatgaaagagagcgtaagaagtgaaaatgtaaagcatgactggagagccagagagataaagcaagggtccctttctccagatcctttgtaacagtattatgtgatctcttttagaaatcactctgaaagataatgccaactcggaacctaggaatccatccagcgggtgtctgcaggttaggtgggtcaattcctcatcagcaccgttgttttctctgcctcagtttgcttacagtgatgttctcagtagctgtaagtactgtctgtctttgaaagcattttttttagctcacaggggtatatgtgcatttttatttaaccaagtgttagaatttctactctgctgttgtgggctctgggttagctactttggttgtttagttgtaaaatgattagcagggaaaaccgtgtgtgtgtgtgtgtgtgtgtgtgtgtgtgtgtgtgttttaagtttcttttgttgtcagagcacttagaattttattttatatggtaattctgtcagtttactttattctccaccccacatttattgaacagcaaagtatgaaagtagtgtcccataactagctttcagaagaattacaattgctgtatatctgaagttcttttcttttcttttcttttcgacggattctcactctgtcacccaggctggagtgcagtggcacgatctggtctcactgcaacctccgccacccaggttcaagcgattctcctgcctcagcctcccgagtagctgggattacaggcacctgccaccccacctggctaagttttgtggttttagtagagacggggttcaccatcttggccaggctggttttgaactcctgacctcgtgatccacctgcctcggcctcctaaaatcctgggattacaggtgtgagccactgtgcctggctgaactttcaagaagaagtttgtgtatcaattttcaaaaaactatcatatcaaaagagagctgtgtcctacatttggaaagatacaaaaactgaaccttctggcaggcagttttgcttgctggagcttgagatagagccacacattggcctcagtggatttatggagaaaaatagatacagaaagttatttataaataagaccaaaaaatccttttcttgagcagtgacaggtaaagaggttgtcttggttaaccttgaaatgtgttgcccttgatcaagacagttttatggtggggatggtagtggagataaacttgtttgacatttgtccacttatggtaacctttgtggtggctgtcacagacaacttcatcctcacagaccttaaaattactgtaaaactaatagaatggaggagaaacaagggacctgaataattagatgcttagataattgtaatgtgttttcataactggtgaaaaacagcagtgttagaagcacttaaacattctatgtaaggaacactgcctgaatttatattgtgatttttgagcaccattcactgtttaaaaactggcatattgtaggtcatattttaaagacaaatagaaaacttatcttttcaagattgatataaagcttaaccttatcaaaattacaaaatttaaaaaatatgattgaaaaatattaatgcataggtttaaatattggtcatcattttagatgtctttcaaaatagattgtcttttaaatattaaactgaacaaactttgaacatgttgtagagtttgtgctgaaggttaagtttcctgtggtggtggtggtggatattttataatatggataacaaaaccttcttattttaagaaatttagaaaatttttaggcaaaactagaaaatattactgataattctaccactcagaaggtaccactatcagaattttgtattttttcagtcatctgcgcatctcttttctcctgtgtttgtatatgttccctctcccttgaaaaatcagatttttcttgtaatctgctttttcactcaacaatattgtagatccgtgtcataacttactcctctgcagtggcttcagttattgtacactttctgttagatgattataccatctagtcagtcatgtttcctggtactgaatacataggctgtatgtgtgtgtgtgtgtgtgtgtttctaccttaactaatgctttagacatcaataggtagagctgaatacttgaaaccttccaagtggtggctttcagttctcattgctgaattggtttctagagatggaacaaattatattgtatggaaagttttttttgtttttttttttgagacttagtcttgctcttgtcacccaggctggagtgcaatggcatgatctcagctcactgcaacatctgcctcctgggttcaagcgattctcctgcctcagcctcccaagtagctgggattacaggtgcctgccaccacgccggctaatttttctagttttagtagagatggggtttcaccatgttggccaggctgatctcgaactcctgacctcaggtgatccacctgctttggcctcccaaaatgctgggattacaggtgtgagccaccatgcccggcctttttttcttctaggtaccagcttgtatttatcagtttggtaagaatgttagaaagtgtgcaataaaatgggcagtctcacagtcatggcacaaagtataattatctttgactttctagaaagcagtttggctttctagaaacttgcctaacctctccgcatttaggcaagatgaattctgactaccccaaggtggccaaccttgtccctgtgattccagatctcccagaaagagaggtttagtctcagggaaaacccacattttcttggcttagcccaccttgacagctaatcactggaaatcgggtgggctggtcagattttgtgtcaagagagggaggtggaaagatgggagggaggtagcaaaaccggcctcagtggaactctgtaagttaatatggaatggcaaagggatgtttcttccaaggaagaagttctagggaaggaaggtaagtggaggggaaggcagcagttctcaaagttttggaatcaggactcctttatactcttaaaaatatattgagggcccaaggagctttggtttatgtaggttatatctattggtatttatcactagaaattaaatcagaaatatttaaactattctttaaaagctcatcacatattgttataaatgcttttatgaaaacatttctaaacccaaagtagcacagtcttacgttttttgcaaatttctttgatgtttggtatgtcgttttcatctgcattcaatttattgtgtgatatttgcttgaaaaaatgtgaacaatgtccaatctcatacagatagccattttagattattgtggagatatatatatatatatatatataaaataatatatatatattttttagatggggtcttgctctgttgcccaggctggaatgcagtggtgtaatcacagctcactgcagtctcagtctctggggactcaggtgattctcccacctcagcctccagagtagttgggactacaggtgtgtatcaccacacctggctaattttttctatctttttatagagacaaggttttgccatgttgcctaggcttcttttttgatactccatcaaaacttggtttttcttgaactttggatcttttacccttgcatgatattataacatcgtgcattggtcatttagaaaataatggttcaccaagatcttctacgtgttgatacatttgattatataatatcaaaatacattcatcaatatcaccatcaatctcatcagaatacttttggaaagctatggtgtatataagttttctaaaattctaattttttgttcaaaagcttgaattttattattgaattttattatggcctgtctgttgtttttcttgaattgacaaaatctcattttttgagaaaatgtctcccaaaaacccaagttgaaataacattgtttgtcagtcatcctttcaagtaaaaatggtattccattaaagtggttaattcacttcacaacttagtcacatgagggttttttctcaggcagtctgtagaaatgctcatgtgtacttccaatttcatcacttgaaatattaaaaagatatattcaaggatgaagatgtagtacaattttcactgcttcatcatagacattctttttattttccaacagggccttcttctgtcacccatgctggagtgcagtagcatgatcacagctcacggtagcctccaccttctgggctcaatcctcctacctcagccttccaagtagctgggactacaggtatgcaaccaccatgtccagctaaattttgtactttttgtagagatggagtttcaccatgttggccagactggtctcaaactcctgacctcaagtgatccacctgcctcggcttcccaaagtgctggggtcacaggcgtgagacaccatgcccagcctgcccttcctttttaaacctttcctgtgcatagtgaagaataccatgactagtttggtgttactgcctttgtttgtgctgaagtaccagcatttttacccactattgtatttgcaccgttacagcaaatgtcaccatgttagtattcacgttaaaatagtttggacctgggcgtctgagggccccactttgggaaccgttgaaataggtacttaaacctactatatatcatatcttgtcatctacaagatttttaaaaacatgatttcagttannnnnnnnnnnnnnnnnnnnnnnnnnnnnnnnnnnnnnnnnnnnnnnnnnnnnnnnnnnnnnnnnnnnnnnnnnnnnnnnnnnnnnnnnnnnnnnnnnnnatttctcctatttttaacatcttatggtatttttaacattagcatgttacatttgttacaagtgataagccaatgttgataaattatttttatctaaagttcataattatattagggttcactctttgtggtgtccattttatggattttaacagggtgtaataagatgtacccaccatgacaatgttacacagaataatagtttcactgccttaaaaatcccctgggctctacctagttattcctcctttctttcctccccaggaacccctggaaatgactgatctttttaccgtctccacagttttgcctttttcaaaatgtcatatacttgaaaccacatagtgtgtaggctttcatattggcttctttcactcagtaatatgcatttaaggttcttccatgcctttttgtggcttgatagctctttttctatacagaactgattaatattccattgtatggctacaccatagagtattggtccatttgcctgttgaaaggtatcttggttgtttgttttggtaattatgaataacactgctacaaacatttgtgtgcatgttttatgtgggcataagttttcaactcatttggcaaataccaaggagcacaattatggaatcataggctaagagtgtgctttgtttcataagaaactgctaagctgtcttccaaagtggatgttccatttcgcatccccactagcaatgagtaagttatttctgctcattgtttttaccagctctcagtagtgttggtattttggattttggccattataatagctatgcagtggcatctcattgtttgagtttgcaattttctaatgacatatgatattgagcatcttttcatgtgcttatttaccattagtaatatgttgccatcagtaactttcctttccctttccattgccgctgagatccagcacttttttttttttttgagacacagtctcactctgtcacccatgctggagtgtagtggtgcaatctcagctcactgcaacctccacctcccaggttcaagtgattctccctgcctcagcctcctgagtagctaggattgtaggcacccgccaccacgcctggctaattttttttttttttttttttttaatagagaggggctttcgccatgttggcagggctggtcttgaactcctaacctcagatgatctgccctcctcagcctcccaaagtgctgggattacaggcatgagccaccgcacccggccatatccagtatttcttaatggaaactaaaacttcaccagttaccacatttttccccatatatttgtaataagttccaatgtctgataaggcaagtccaaccctctgcatttttaaaaattaatcaagttatttattaaaaatattctatgcacgttttagaatcaaatattttattaaaatcaatgatcatattagatttattggaaaaataatgtaatttaatattaagttatcacattcatgaacatgataattttctacttatttggatttcctttaagatcaattcctaaaattttctatatagatggttttagggttttttttttgtagcttaactacaagatactttgtagtgtctgaatttttattacagttttacaccttcaattcaattattgctgatatggatgaacttttttttcagaatctattttagatttagtgggtacatatgtaggtttgttactgcatatgggatactgcttgatgctcagatttggagtacaaatgtatcgattaaccagatggtgaacatagcatgcaatactttttcaacccttgtccttctccttccatccctcatctaatagtctgttactttgtactgtttgctattataaattggggggaagccattattattatatattagcttcagaacaactagattcaagtcacaaaaacaatttcgcacaaacaactttaggaaacactgctttgaaaacagtaatctgaattatacctgaagccacagaagccaaatatttactaaaggttcttttaagaaaaacaagttggccgggcacggtggctcacgcctataatcccagcactttgggaggccagggtgggtggatcacgaggtcaggagattgagaccaccctggccaacatggtgaaaccctgtctctactaaaataaaatataaaaattagccgggcatggtggcacgagcctgtagtcccagctactcaggaggctgacgcaggggaatggcttgaaccagggaggcggaggttgcagtgagctgagactgcaccactgcactccagcctggtgacagagcaagactttgtctcaaaaaaaaaaaaagaaaaaaacaagttgtatggaaggaggacatcattaacagtatatctcttcaataatggtttattttactattctcattcttctcattcctctcttactatgtcccaaatcccttcacaggctaaaagaaactcttcagaattaatcctattcataaagaacaccacttactgagtattgcattttcttcttcaaattcttcagcatacattgggaatacaccctatggaccatttttatgcttttagttttgggtttttttttttttttggctaaagaaactgcaaaaaaagatttaggacctcattctattaggttagtacctatctcgtaaccttcagcataagctaaccaaaacccatgttgctgatccggactgacaccaatcccaaacccatatgccccaattaccccaaaaattccactgccaaaaaccgcctatccccaaactcgccgatgccccagatcccgatacaccagccggtatcccgtaacccccccaaaacggccaaaaccccgaagggcgccaacccccatgccccacagaacccccacaacaccccaaaagcccccccacaaacacccgaaaacccccaatacccccaaaagcccaaaaaaccccaaaaacccgaaaaccccccaaaccccccaaaaccccaaaaaccccccccaaaaaaccccccaaaacccccaaaaccccccaacacccccccaaaaaaccccccaataaccccccaaacacccccaaaaacccccccccaaacccccccaataacccccccatacaacaaaaaannnnnnnnnnnnnnnnnnnnnnnnnnnnnnnnnnnnnnnnnnnnnnnnnnnnnnnnnnnnnnnnnnnnnnnnnnnnnnnnnnnnnnnnnnnnnnnnnnnnagaggtcctgggctttctgactgcccaaaaggggctccggcaatcactccagccatccatcccttttagcttcatcatcctggttcaagcagtgttccttctgtatcaggcctggtggctgttgttttgggttcccaaaagcaagaggtggccccgggccagtgggttcaaagacagggtgaccagagaagagggacactggagggggctgagcattgctctgaacggtgggtgcactgccctgggtgccctgaaagatgccagcgtgtgtggggtggggagggccgccgcagcccccaggcactaactgtggagctctgcctccctccttcttcctcccctttcctttccagccccactttcccaggagccttgccatacccgcacctgcgccctccccgccccagccctcccacagctgctgtggcacgcctgtgctctgcacttgcctcatcagctctctgctcgcttttctctctcctgcttctctctgctttctctccaactgccagctgattgggtcaggcaagaccatcccatcctcagagccccagcccccacttcgacctctaaacagatccctcctcttctcagagacctccctttccaagcctgcctgagcggctgttctgtgacttgacagtgctcccccagcctcaaagccagccccctacatctgtgacttagtctgttgtggtgagctgacacatccaggtgtgaccactgctgaaaacttgtgccccctttgtgatatgccccgtcctgctctataaatatctataaatacatatatatatatatatacacacacacacacacacacacacacacacatgcagcaacacctggccgaccgcctcgtctctagcgctgggaatcagtcaccctgctgtccttttggagtcttgtggcccaacaagagaaagctgtcccctgacattgctcctccaaagtgcgccacctccagtgagcctccctgtcatgcccagcctgtggacagccagccccgccatccctcccaccccccaccaagcatgggggtgctgtgcagcctctgtgtggcctgacagtctctaccagtcctgctgtcccttggctgagaatcaaacccatttctggatggcagggaagtgtgtcctctgctggctgtgttctgtgtggagctcagaggacgggaaaggccaagccatttctagggtgctgttgggagctgtgaaaaggtcacaccctttccaagggacacttttcctggaaagcccctggagcttagctggctcttatcctgtgaagccggctctggccaccagggggcagggccgtgaactcagcctggagggagcctgaggggcagccggcactctggagggacacagacataacaggccaccaggtgcagacaggagagggaggcaaggggatggaacggaagacacctggggtgggtggaagtcagtgccgttaggtgctggtgcctgtcttcccggccatggctagatcacgcttctgagcctgttggctgtcagggccgggctgcgccccataggtgccatggcagtccccgtggactcccccaggcgtcaccaggcagcatacaggtaacaggcctggaaggtccccaacagcccagctggacacgctcagacactccagggcttctcgttcagtggcacaaacaccaggacccagtgagggaaatgggaacacaccaggctgagcagtatggctaaatccgtttattccaaaataaaaagcaaaataaacaggagtcgcatcaccaggagccatgaccccatccccgcctcctttctttgtcctatgctagcaatacataagtttcccagccacaaataatgatcagaccctcctccccatgtgccagctccaacctcctctaggtacgatacaggggcggccctaccctctggaatatacaaaacgttacatagatacaatatgtacaccggggaaggggggccaccccagcagcccgtgccctcacctggtccacagttagccccactgtcccgcctcagctgcctctctgaataagaagatgggagcccccccgagggaaaagttactatggtgagagtaaggaggccatcagacctcctccaaacaaaccacctctgccagcctctggctcttaaataacaatcatcatcatccagaaatttaaggactcagccctggtcaaggcggcaaagggtctgtctttccccattagacagaggtcttgtgtggctaccctaattgtaaaggggtgcctgggaaggggtggtagggtcatggtggcagtggagactccagccctacttctccaggctttgctgacagaggcctgcttttaatttttgtttttatcccatgactttttttaaaatcccgtaacttctttttcataactttttttgtaacttttcataaaatttttttctacttttttgccacaacttttttacatttttttaatcccataactttttcactccataacattttttaatcctgtaactttattttgtgttcttttaacaaacacttgcatagctatattacaattttgtaaaaatgaaacagattatctcatgccaagcatgcccagcattcgcacagtatcaacacctttaatactatagtttttcaagacatgcaaaacaaaattttaaggcaaaaacagcactttgtaacaatttaataatttattacattacagtagcatcacactagcagtcaataatgccactttaggcaaaagtttttcagtatttccattataccttctgtttacaagaattcataaattggtaaaattcattctaagaaaacttggcaaataaagctttggactggaattggcatttctttctctacttttccttcccaccgtttctttcttttaaactatagtattcatattttaaaatgttttatttcagaactttaagatagcagttacattttttagtagttacattatttttaaatgactctttaagataatgttttagagaaactatattatggatagggctgatttaccttttcaaattttctaaaaatcagctttggttttagaactgatttttttttcatttctggaaaacctatcaggtttaatcaaatacttctttaaaaataattattatatattgcaatctttaaataggtgttttgattcttcctgcagaaattcaaatttattcagctgaactagcattttgaaattccttggctcaatgaggtatcgcaaaagactgtatgcactttgaagaaagacaagttagtcatacgatttccattctttttagctttctcttaaatatatgacaaatacctacacaaagagtggtatttcagttaatatagtaaatttatttccagactgacattcagcttaaatatgccaatatgtgatttaatccataggcacctgatgaacacattattgtcagattggttacagatgctaaatgctatctgaaggtcattcctagtcattgatatttatcagggtaaaagtgaagtgatttcaacaataaaagtacctttgaaataatttaccaatgtattagataaacccagtttcagaatgataaagaaaaaacgttagaccaaatagatgtggctaattaacagtggtatgatttctagcctgagggtttaaaatggacttaaagtaactgtctttaaattgaactcaaagaatgcaaaagcagcaagttcagaaaataaaaggcaagaacaggactttaggtccattttaaacccacgggctagaaatcgtaccactgttaattagctgtgttatttggtctaacattttttctttatcattctgaaactgggtttatctaatacattgatacattcatacaatttggaagagtcagttgaagtcacaaggacccaatatttgcgctctttcagtgaatgcaggcaaatctgttattccatcggtaaaatcgtattgttgctctcctgttaatgtcatatttagaaaagtatcatgaggacgccaaatgctaaaaatggagatggtctagtaactagaaatccccaccccagggagcgcatatacacatctccctacatcctaataatgtgatgtgttttggaacacagacattagaacttcatgaagtttgaactgttgagtctttcccaagcatcatcaagttatgatttaggcaatgtatgactgaaatcatttgttcatcatgcataggcacaatcacataaatattgcacaaaatatgtccctaactgaaactgagaggtacaaaaacatatttcactcttagtaaacaagtttgtgaggaaatataactctgtgattgtatagacacatttcctgataatacattgacattcacaaacagtagactgcactgcagtttataaacattttaaattgcataaacatctccttgattatcaaatatagtataatactgtctactaaaactcctttttgtttcaactaagtactctcacatatattagtttataataatgtttgttattattttttaaagtgttttccattcaaggaaaagaagtaaattcctatgtcagagtaaccaaggtggttgaagaataggtattagccagagaggtgtagatggtaaaaatcaatcttcaagcctcaaagaagctccatgaacagagaggaatgccaggtgtcacaagctttccttcactctaattcattcttgactagagcctgtatgcctgttccagggacatttaaactcctaaaggatttcttatgatctttactaaataagaagaatgccagccagcactcttttgtgtactgggacatgtggtcatgtgattaaaacaggtaacatcaactctgactttaaaatgtattatagacacaaatgctctaagctaggaaaggttttccacatctacagtcaatgaagggagcctttcgttcctcagaaatgatcagtttttaggtcatcgagaaagagtacaactgctgcagctcatgatgcaatatcttcatgagcccagagcacatacaaatccgaagggaactaccatagtacagcgctaattgttggcaccggaacaaatgaaacacactctatcctgcacaaacctgccacagcaggccactttcctcttctgtgagattttaaaagctcccccaaaatgttattactcccatcaccaatacacagaaaataggggaaaggctgtttccagttctcggcctttaaacaactctaaatgtcagtactcatagtggcatattacaaagtaataaacagtgcacacctgggggcaaaccacatattgagctaatgaagagctcactgtgattaagattagatcaaacaatagcagaacataagcaaattttatctgaattccgtaatgaacatacatgctgcgataacattaaaaaagcatggcagcctattccaaaccagcaataataattttgtgcaaatagtgggtctttgtgtatttgaactcccaccacgtaagggcaaactcgatatgcatgctaatgacctacaactatgaaactaaaaaagaaaaatgctgaaggatgccagagtaaacatcagtgaaagccacagagacccactctcctttaactttttacaaataaactataaattacaaataatcatgagtggctctaacattcaaatgaagtaaatgaattgggtaggagatgaaccccataactttgtttccttttttaaaatttcttgagcagctctttgatgatggtgatgtttatctccttcttctcagcagccaagcccagcaaaagaatggcatacgggagttgctgcacaagcctgggtgctccacgctgtcagtgaggctcacctcacaaagatctttggagagaaggaggtggggatccgagtgcagtgagagcctcccctgcccctgcctgcccaccctgcctgaggactctactcaccaccatgcttatcagcacccacaagctcctggggggctggggctcctggaccaggctcatcagcaagcttcagggcagtggccgggaatttgctgtgtccctcgttgtagtcaccacaagccgcaacatcttctccagcagctccagcagcttcacctggagggaggggtgctcagctgttatgcatctaccggcgcccaccctcacgcccacccccacccctgcagagatgttgcacaccctaccttcatctcctccatgtcctgggccagcctgatgatgtcctcctccagttgccgcatctttggcactgccccctggctgtgttctagggtgatgaactttcctgcaggaggacagggctcagacgctgaggtccctccgacggccctgcagctccccctgccgtgccctggcctcccactaactgatgacttctgtctttccagtactggatgaatcgaagttctagtttctccgctcgctccctcaggtccaccttctcctccaggaggtccataaggccactctggagccaaaataatggggtcacatctcggcagcaacacccacccctgcccttcttggcccatgccaggactcagtcacctccagcttctccatgacctcctgcatggcccggtgggtctccccactcacagactggcccctagtcactggggctgggaccgctgcctctggcttctgctgggccgaggccaccaggtgagccatgcgctggcagcacaccctctgctctttcacctgctctcataaccgtgcctgctcctcctgggcattggctccagcggagttgaaaaatgcaacctgagggcaagaggtgagcattcttgtaggggcatacacagaacgaacggggcagagaggtggagtgcagcctcttcccttggggcctcagagagtgcatctgttggtcacaggtgaaatggtgtctgaccactggctcctggaagggatgagggtccagagaaatcagaaggcagggaaaccaagagcataaaggggtcttggagggaccacagaggaaggtggcaaaatgggtacagggggagtcaggctcaccgtggcctcccagctctccaggtcctctgggttgcttggcatgggccgaggtgcctcctcctcactgtccagatgtcctcctctatctcctgtggggggtggccagaagggtcctcagacagcccaataagggaggtactgtgggcccacctctgcctccaccctcactgtgtaacactgagccagccactacccagagagcagctgctgttctttatttttacttttaagaaccaagatcaggcatagtcccactaccagtcgatgtgggagttctgacccgctccctttctgacctgggccagttcagccatccttaggcaacttggtggccccccgctcccaggaggacatcatattgatgccaaacttagtgcgggcacccggtcggcatagggaccagctgttctaaaggtctcttccaacctttgcctttttctttgctgcggccaatttgctctgttgagtttcttctgccattgcggggtggggagggaggcggggttggggccacgtgagcaaaatcccagtgagcactgatgaacacctccacttgcctaccaggcagctgtgtgactgagcccgaggaggcacaactagggcccccatagaatgcagaacaggggcgtggccttaatgctccaagcccattggtcaatgacaaagatgaaagggaaagggggtgtggccaggcagcagtatgtccagagggacctgtggctcacaaggaaagctgtccatgcaactgctgtccccgcctactctgaggggaggggccgccccctctgggagaggggaggggccggcttttgctttaaaagctttaaaactttaaaaaatatatgtgtgtatactttatgtatatgtgtgtgtgtgtgtatctatgtgttcctccagagctgtcttcattatccagcttctatgcaaggtctacgattttggcctatatttttcatcttcaaacacagtacaaaaattaccagtattaccataactgagataaagatcctataaaaatggaaaatccatagcatgcttgatgattaacgaagcagactatattatccaacattccaataagataaaataatcacaagtttcttttttttggaaaaaggtttctcttattctcctatgttattgttaaaaaattttttcttaaacaagaaacatgtctaatatctgtaacaacacaaagcttttgggccagatgcggtggcttgcgcctgtaatcccagcactttgggagcccgaggcgggtggatcacctgaagtcaggagttcgagaccagcctggccaacatggtgaaaccccatctctactaataatacaaaaactagccaggtgaggtagtgggtgcctgtaatcccagctattcaggaggctgaggcagtagaatcacttgaacccgggagacggagtttgcagtgagccaagctcacaccactgcagtccagcctgggtgacagagcgaaactccatctcaaaagaaataaaataaaataaaatacaaaataaatttaaagagctttcaatttaataagcactcaaagctctttactggtttaaaacaaatacaaggctcatttttctagaatcacctggcctctctaagccttgcaaatgaaactgaatttctcacttgatacttgcctgtgacttgcaatcatgaaaaccaagaattgtgttatgtcactgtgtactgcttgttacctgaattccacactaggctgggctcaagggttgaatctttcagattagctccataacctgtatgcttcttatcccagaccaaaccaagtttttgtctagagttctgcaatttacagttagtagagaagagtaatgtagtctctggactagcagcaccagcagcacctgagaactctttataagtgcaaattcccaggccctaccctggacctggcgaatcagaaactctggagtagggctcagcaatctttgctgcagtaatccctccagctgtttaagaacctctgccatacagcaggtagaaaaatgtgtttccttctctaggtccaaagccagggataccatatgttctgtcttgatacgaaacaatgacatgcaattaaaacacataacacgtaactctcctacctactcccaccctccatccaatatgttttatttttatgagttccataagaaaacaagcagcaatcagaggtttactctaaaaagtatgtttacaagtatcagttctcatccagcctgatctcatacaaaaccatttacatcctcttactgctaaagttttaaaaaagtatcttcacaatgtaagactcaggcacactaggagttctataataaaacaccaagtagattggaatgtccaaacttactagagaagaaaagtggaatcattggctatattttcaaattgcattcaaaggaaatttaagttccaaatttattcaccttcatacttccaagttaatagaattcaaccagaacactccattccttcaaagcctctagccaggcaaagttttactgtattacttcttgctttcaatggatataaagcagagtcctggtaggcattttgtatacctgcagagatgcagaactaaacagttccatctgttccatattaaaacaaaagtcctgtaaaccttgggtggtgagtttaatacttcagcactagcaccaaagcctcaaataggaaaagataccaagaacaccgctagcaaacaaaactaaactctcggtcaggagcagtagttcgcacctgtaatcccagcactttgacaagccaaggcgggaggattacttgaagtcaggagttcaagacaagcctaggcagcatagcaaattcacatctccacaaaaaattttaaaaaatagctgggcagggtggcacacacctgtagtcctagctactcggcaggctgaggtgggaaaattgcttctgcccaggaatttgaggttgcagtagctatgattatggcactgcactcccagcctgggtgacagagcaagacctagataattacattctctcctcctcctgtttacactaaaatcactaagctaaaatgctttgaaatttggcaggataaaagttaagtgaaatgtgactttggagtttggaaggagaaagaaagaaggaaggaagaaagggagggagggaagaaaggaaggaaggaagaaaggaaggaaagaaggagaaaaggaaaaggaaaagaaaggaaaggaagaaggaaggaagaagaaatggagggaggggagggacagagggagggaaggaggaaaggaaagaagcaaagaaggaaggaagcagaaaaggaaaaggaaggaaggaaaaggaaagaaaggaaggaaacgaaggaaaggaaggaaacaaaggaaagaaaaaggaaaggaaaagaaagtaaagaaaaaaaggaaaggaattaatatacatccaaccattaaaaatgatgacgccagaaaatatttactgcaacagaaatatgcccaaaatatagtaagtgacaaaaggctatctattatgattctactttttaaaatgtttatatgcataaaaaagtataaaaagcaacaaaccagaatgttttgaatggcaagttaaagatttttcttaatatttgtcatccaaattattataatcagggagaagtgttttcatttatttatatttatatctcttttctttttcttattttttctcccatgtgtatcccatgtaggctagaatccccgcctcttgagggaaaccagcccatttttgggaagtgcactacataaagctgcccatcttcctttgaagagatctggaaacatttttgtttcaaattgttttattgttctcagaatatatacatatatatatatgtttttaatatatggaattgaggaaaagacaaaggaaaggctgactccctaccaccctcctggggctactcttccaatttttgctgctattgttatgtattaatattcactgggtactaagaagatgggcagccccttagatccttttttcttatctctttctcataatcctacttcattccttcattcactcatttttaaaagcgtcatatgtacaaatatatagtccagaaaatttttaaatataactgtctataaaagtatgtggcaaaatcccattcacagtcttattctccttccacagccaaacacttttaattcatttcttatatatcatttcagaatttatctttgcaaatacacatgtatattcttattctacccttctctctcaacacaaaaagtagcataccacacatacgataccattccttctcccttttaaaaaacacacagaatatatccgagttctacgtgagtacagagtctttctcattcttttcagctacacagtatgcatcatttggatgtaccacagtttacttaaccagttcccatttggcagacactgaaatcatccctatcatactattacaggcagtaatgccaagcataaccacctatacacaccaagttcattgctgaatctgcctttgatgaagcctctgtttgaatcaccataatgtcacaaggctgaaaagttagccccttttttagttttcattatgtactgcagtatgtagcaaaagactccctcgggcaaaggaaatgtactctttggggatttacttcataacaataaatggataaacagaacaccaaggataactgtttatatttaaccatgaacatgtatgtatacaatacatgcatatgcgtagaaagtataaaataaataaatccatcaaagcattaagtgttgtctcagtatggtggatctagggagtgctttgtagaccgccctctttgcctatcctttctaatttcacaacggtaaatacgtatacttttgcaatataaaatttcaaaaaatgttaactcaaattaagctgcatgtattccttcagtctgtcctatatttgtatgatgctccagaatgctcaaataacacttcattaaaaaaatttatttcttcaaaaacttacttttgtgaagatttctgtgaatgtctatgtgttagatcacagtgaagaagctcaggcatttgcatgcttgactcacaaggagactccaaatgtggagctggagggtgaaagaagctctcacctgttcccagacttgccacaataggtggttctgtttttacagaaagtgagtgatgcagaaatattttgacagctcatttgttcaatcattgtgttcctttggacttagattccagataattgggaccctcttagctggtggctagcatgaatgaagtattgttgtaaaaatgcgaacggaggtacatatatgaatggaagcatattttgcacagaaaccatcggtttgggattctgaaagatcaggaatgaaatgctaggcccataacttcctcctgtgtgatcctggacatattactccttctgtatttattttagatttttcaaccttaaaatgagtacgataatatcatcttaatctttcctttcacttctatccccttctctttctaggaatatttattggaagtttgttctctttccactttgctggctgctttaagatacaagttgagtaaaaccagtgctactcctggtctgctggaaatttcaggctagtaaggttgttatgaagattaaataagatagcatacgtaagttagttcatgtgcagtgtttcaataagtattgagaccctttcttcttctgaaaggtttatgaatctcttagggcattctattcagaagatccaaatacctcttgccagttgcccaaatagaacaacttgttcagagcctaggagagcagggtcaatagatgaatactttacaacacctaagaagtttgacacttaattctggtctttaaatgactttattttgttgcttatttgtagatgactatatagagtgacaaaaaagtggaatgcactatccgagctataataagatagatcttgtaagtgtaagcattttagacatcaactcagtataaagtttgacttgaatggaaatgttatgtctgagggttcccagttttgctaatgacacacttaattgacaatataattgtgacactgaagagtgtgaaattaaaatcttaggaagtatgcaaactaatagcatgattctttgtgtgaacaaagcagtttaactgaatagtaccttatttatgattggcttttcatacctagataattctgtctggtatctaatggaaaaactgatctaaaaatgattaacgaccatttgccactttaataaaaattgtcaaaaacagatattgatgatatttctaaaaattattaaggagaatagagcagcatttcacaactagattccaacgattgtggtctggacagcacaaaccacatattttcatccattgtctagatctttattaggtctaatgcatttataatatttttgcaagtttatatttttaattattgctagtacctcaatgcccaatagagatgatacaactaaccaataaccaataagatacagactttgagttttgtgtttcagaagttatgggttgcaatgttttatttatactcggtgacactgtttctcttcagctccagtgtagtgattgaagccttctaccaggtagaggactgggtgactaagtatgtatggcatgggccacagaatagacaagacttagtcctgtgcttttggactaatggtctggtgtgctgaccaaataagcatttcaaaacaagtgattctcatcagtatcatgatgtgttctcttaacagattgaggattttatttttcaaataggaaatggctaatttattttaaactatgtatcacagtttcaaattccaaacagtgtcttaaaatgatatgaataattaagtttataatttagctttaaaaacttatgtaaattgtatattgacactgacgggatagaaatctacaatggaacttttaattcctttatgtttttatagtgtcatcataatacaataaaattactgctctattgcattggaagtatatgctcattaaggaaatggccaggaaaaaagtattcacctattcagggaaattttaacatgagatattttgccttagtgtgtatatcacttgaacttcctttgaactctgtgcactacttgctatttatgacaaagaaagccattgctcacaaagtattgggtttgcctttgaagcggtatcaggagatcattgacaaaaggcagggctgagattagatgttgagggtcattgccttgctatagtcccaaagctatgtgaaatgtcagctaattgaaaatggtaattattctaaataacagcacaaactgtttctttctaggatatgtgttgctttcaaattaatagccactgatctgtttttttttgtttttttgttttttttccacaatctttccctgtccttttgtcaaattatctagccatcggtccttgggacaaaacccgttgcaccatttatattgaccatggtttaatgagtgacctggtcttcctgtttgcatagattgtaataggcccacccacctgagagtctgtcagccagactgagatgtgtaacctctatgtataacttagtttctaagtggaaagactttaaaatggaaaccaagtaattgtgttacagtggccatttgcatttatttcagatactggtcgggagaagtcctattaatcacagtcataatagatcttcaaattatgacctactgagcaaggtcatcccgtatgagatgaataatatatattcaaaatgttcagcttgcttctaatgggcagtacttcataccaaatgtttttgagggaaatatgtatggtataatttttcagacaaagaattaaaattcctagttgtgatggttaaaaaaaaaccctctaaagtggaaattagaaatacatattctccatagctataaaatgaactacaagtacactttgattctgtaaaattgagttactttggaaaatatttcagagtaacctaatcccaaatcaagactctcttttggaattggtagacaacccaaaaatacttgggcttgatctgtttcaacaaagtgaagaagacaggaagagtatgagaaattattcaaatatattcagaaaaaatatctgctgaggttggaagactactatacagtgattacagaaaagttatgttccgtccgtagatcaagccttgccacaaaatcatcaaaccaatgttctttatgagtgtgaaggaaatgagtacctgtctttctaattgtagtaaaaatagtaccattagtgcttctctttttttttttttttttttgagatggagtcttgctgtgttgcccaggctggagtgcagtggcgcgatctcggctcactgcaagctccgcctcccgggttcacgccattctcctgcctcagcctcccgagtagctgggactacaggcaactgccaccatgccctgctagttttttgcatttttagtagagacggggtttcaccgtgttagccaggatcgtctcaatctcctgatctcgtgatctgcccacctcgacctcccaaagtgctaggattacaggtgtgagccaccatgccaggccaactttatttttaactagtaaattgtaaccaggaagtatactcacaaactgtggaggcaaggacacaggaacaaatgtagcattgaaaataaacagtagaagatagtgaatctgacacatttaataacgagcaaatgctgttgtgttccacaatatttaggcacacctatgcaaaaaatcatttcaggaaaccacggctttacatcttaggaagcaaaagtggagggaaagggttggcagtgaagaacaacttgttcacatgccttgttaaagcaattccacataatcttattccatttcaaaccaagactgtttagaatcttacgtcctgttgccacaagaactgagctcaatactttagaatcctaagcccaatatctgagagtgggtgaaggtatttttggaagaacccaggcatgtatctataggaccttagtaaacctcctgttttgcataattctctcctgcctccccagtctgtctgagggctatgctttctttctcctctcctaagtgaaggtaattgactgatgcttaattgttatttctttctaaaattcataacataaaatgagggcattaggtttcttccttgaaaatcttgtgtttttataataaaagtagctctagccaaaacctgccccatgtaaaaaagtatctgttaacaattacaaaaataggcatatgcatctgttttttaaactcaatgaagtcccagaaatctttttagtgctctgataccttgtaataaaggacctctagaggttactgaaatgaaagcatgcagagttactgtagcggtatgttgttacaggggaaaagaaaaccagcagccattcactgtacagcctacattgctgtaaccggtgttgcccagtaaactatctggcatgcaaaatgctaagtattcaaagtacctggcattcatgatcattgtgatagcaaactgttgacatttggtttatttcccaaagccggaccattcgtacttctcttaaatattttggctttagagctttgttgttgatacagataatgtatctccttgttgccctgtttcccttcttgctgccctgcatttagctgcaatttgctttaatggagtcatccccatgatcatggagaatttgttcagtattttgatgtttagctttcatctcattttggatcgtttatcttgataattaacattattgcatgaagacccagttgagaaaaaatattctgtaggaaattcattctttaatagttaatataagccttcacatgctgagtgtcaaaacctgcaattcctcttgatccttaaaaggcttgtaaataaagacagttcagttgaagaaactatactgttaaagtcaaatatttttggaaatcagctttgagtcttggggatttagaaatttacgaaaacgatctgactcccagcaagctctaaataaaccataactatttgatgggataattgaaagagagcctcccatcacagtgatcactatctgcaaaagtgataactcactaaaaacttatgtctcactttgtaataacttaatatcacagtggtaatttctaatcaataaactggaatataatcagattggggaatatgtaaatctatatcagtccagtgaaacctaccagcagggagagaaaagataaaaatgtaaaaatcagattgaattttgggggaaagctgacaagaaatgcagttatgcctctgctgccatactcagcatgggacataaagagccccaccacagggcttgaatttacaggagtctgtccagcacagctttatccgacactgaagcttcctaacaaacagaaagaaatcttatactcttgcttgttggtatttaatacctgcattatgtgctttttaattttttggtcctactaaagagtagctgatagcgctgtttcgaaggcatatctactctgcctctgactagcaataggaaaccggttaagttattcaacctctctacatttcagtttcaggaaatgaagtggacaaagaagatcatcattaggcaatatgtacctccaatattctgtattatgtggagatatcaagtccgtatgtgattacacaaatcctagttccaaaagagttcagaatgagacacatagaattgaaagtcctatttatacagatactggttaaagcccagggattagatgggtttaaaatgctttacctctatatagaaaggagtacaggaccaggaaagggcccaggggcataccatgattgagccgaggagacagtaagagagtttcagtgacaaaggagatgcaaggagacgatggggtttctgaaaccaggagaagaaagccttcatcatagaagcaagtgataaacttcactgaacacttctaagacatttcggacaagaatagaagagcgacctttggatttcactgcacatagcttaacaaacgttcataaaggcagtgaaaacggaagctcggttagggtggtcttaggagagaatccaggtgatgacgtagagaatgcgactatagatggctctctctagaagttttacttttaagggtagcagagaactagagtagagctgcagacatagttccccctcctccctctcctccatctccagtttcttcttctttccatgagtgtaacagaatgaaatttagggcataatcctgtagaaggtaagaaattaatgatgcaggaaagagactggataagtgtccaaaataaataagtcctcagacgatgcaaggcagtgggctctagcacacaaaggggctgacatctgataggaatgtagttgttttatccacataacagttatttttttagagaaaaatctaattgtgaaaatatagctgaaaaccaaacattacccctatgtgtgtggtaacttgtgatgtaaaatgcatttctcaataaaggtcctggtcataaattttaaaagtaaaataccttgagggagctacagttagaggacagcaggatgaaggataatcatcagaaagaatacaaagtgggccaggcatggtggttcatgcctgtaaacccagagctttaggaggtgttgttgggaggatcacttgaagtcaggagtttgagaccagcctgggcaacctagacccccatctctacaaaaataataattaaaaaaagactacagagtagaaaaagcagagtgaaacagaatcttcaatacaaacagtagggggattttagcaaagagtagctgacttagatggtgctaagatttgtatggagttcagtgctgagaagtctttttaacaagtgatttaaatgggaatattgccttgtttacatagctcaaataaaatgcagtataatgtgcagaaaacaaaaaaaaacagtaaaaagcttaaataatctttattcttaggacaatgtttttcaaataaggattatggctcactattgggtcataacataaaatacgtgtcttattgtggatggctccaagaaaaagaaaacccaagtttaagcaggctcaccaatagagagtttacctatgtcatataagaagtcccagttatacatccactagtaatagctccatggccaggtacatgctagtatttgcattttggaacggtctttctctcccgtttgttgtctcatggtcacaagatgaccgattatcccaggcctcacgtttacattcgaagactaaaaaccactgtggtgagtaggaaatgcccccccacagagatgactcccaagccctcattcccagacctgtgactgtgttgccttacattgcagatgtactccgcagatgtgattaaattaaggagctcgacatgaagggattaacctgtcttatctggttgagttcaatggaatcataagagtcgagtgagccaggagattcagatagggaggtgtgaccatggaagcagaatgatgtggagtgagaaagactcacctagcgattgctcgttataaagatggaagggtatcacgagccaagacacgtgagtggcctcttgaagttggaaaaggcaaaggaacaggttctccgctggaacatccagatgatttcactcactgggttctacttcaggcttctgacctccagaactgtaaggtcactaatttttgtattattttaagacaccaagcttgtagtaatttgtaatagcagcaatgggaaactaacaaacatgtatgggcaaaaaggggaaaagaatcgtgccagttgagtttgtcactttctatctggaaagcaaaaaccttcagagaaaccctactgagctttcacttgcttatatccccctttccagaattaggctgcatgaccactctgaaccaaccacaaacaaaaagaattcaattgtcatggcactgttcaattagacaatcacagttcaccccttggagctgagacagggtatcatttcctttctaagatctactgaactctcattagctggaaaaaaaatcaaatcctactggaatagaagaagggggttgaagacaagtggatttttaatacctagctgatgttgggaggctaagtataaaaagatattctgatgttgggtgtgtagcagattgtgcctgacacactgccccatattctttccactaacaagtctcattgttttctttcaaaaatacatttcaaatttgtcttatatccacatgtccacaaccaccattctcttttaatctaacaacatccctcttttgaattacttaaatgaccagttaattcacctcctagaaactgttttgcttcccactcacccttatcttatttttttccattaggcagccagaagaaactcctaaaaaattaacttatccattctctgctttttatattacctaaccacttcttgttgaagttaggattaagctcaaaatccttaagtgaattacctcttttccaacattgctggaagagtaaaaggttccttaacaacattcttctttccagttttggccaggttttttttccccctgaagtaccactttttatataattaaaattcagtttatgcaccaatttgaatgaatacttgataaatgtctctacttctaaattataacttccattagagcggaagtcaggtacacttttacccactattgtattgcacttaaactagaactgctgctgagtgagtgaaaaattaatcaataaaacaagagcaaacagttctcatcctcaagaacattctaattcagtaggaagaaagaatgagtaactacagttgtgcctagcttaatgatggggatactgtattagtctgttctcacgctgctaataaagatatatctgagactgggtaatttataaaggaaagaggtttaatggactcatagttccacatgtttggggaggcctcacaatcatggcagaaggcaaaggcacatcttacatggcagcaggcaagagaagcttttgcaggggaactcccatttacaaaaccaccagatctcctgagacttatttactatcacaagaatagtatgggggaaacctccctcatgattccattatctccacctggccctgcctttggcttgtggggattattacaattcaaggtgagatttgggtgaggacacagcccaaccataccagacacattgtgagaaatgcatgtttctgtgatttcataattgtgtgaacatcatgggcagacttacaccaacctagatgatatacaggccgctccccacctaaggctccatggtggagccttttgtcctcaggctacaaacctgtatggcaggttactgtactgaatagtgtaggcaactgtaacacaatggtaagtatttgtgtctctaaatatagagaagatactgcaaaaatacagtgtaaaagataaaaaatggtaccttatagggaaattaccatgaatggagttttcaggccaaaaagttgctgtgggtgagtcagtgagtggtgagtgaacgtgaaggcctagaacactattgtatactactgcagactttataaatactgtacacttagaataccctacaattattgaaaatatttctttttctttaataataaatttaccttagcttactgtaactttttactttataattttgtttttttaaacattttgactcttctataataaatgtagcttaaaacacattgtactgttatacacgatttttttgttgttatattcttattctataagcttttatctactttttttttttttgaggtggagtctctctgttgccgaggctggatggcagtggcacgttctcggctcaccgcaagctccgcctcccgagttcatgcagttttcctgcctcagcctccagagtagctgggaccacaggcgcccaccaccacgcccggctaatttttttgtttttgtgtttttagtagagacggggtttcaccgtgttagccaggatggtctggatctcctgacctcgtgatctgcccgcctcggcctctcaaagtgctgggattacaggcgtgaggcccctcaccnnnnnnnnnnnnnnnnnnnnnnnnnnnnnnnnnnnnnnnnnnnnnnnnnnnnnnnnnnnnnnnnnnnnnnnnnnnnnnnnnnnnnnnnnnnnnnnnnnnnctatttcataagcttcaggagagcaattaaaaaaccaggccacattcaaataattggaaataagaatgacttcagatttctcatgatcacaccagaagccagaagacaattgtcccagaagacaattgggacattgccttcgaacttcagaaaattggttttcaatctggaatttttatatccagacacactgtcaatgaaatgagaagatggaataaaggcatttttagatatgcagaatcccctagaatttgccttccatatgccttttcttaggatgctactgaaggacgtgcttcttcaaaacaaaggaatacagcaaaaggcatccaggacacagagtcccacacaggaaaaacagtggtggtgaagggcgtgcacgaggtgtgggggcaccctgtccagactgaggcaagtcaggtaaagtgtgtctgaatatattcagatagattgacggagagtttagaattcaattagtttgtttattttattttattttattttattttattttattttattttatttttgagacagagtctcgctctgtcacccaggctggagtgcggtggtgcgatctcggctcactgcaagctccgccttccgggttcacgccattctcctgcctcagcctcccgagtagctgggactacaggtgcctgccaccacgcctggctaattatttgtatttttagtggagacggggtttcaccatgttagccaggatggtcttgatctcctgacctcgtgatctgcccacctcggcctcccaaagtgctgggattacaggtgtgagccaccgcgcccggccaagtagctcaattattgacaaaaactgaaaactacaagtttttagaaatccaacaattatgactccaggaaaagtaaaacgtagtgtagaatctaaacttaagagtgttatactacatgacttggttgtaaagagtgcgctgacctaacccagtctgaacactacttgaggagtgggaaggaggggtgtctatggtgtggtggggtatgcaagaccctgcattgcacacctggtaccccaactgccttatgtggcagccagtgggcatgatattttatgaattaaattgtgtcctcctcggaaaagatacgttggagtcctaacccccaataccttagacgtgacctaatttggagataaggtctttgtagaggtaaccacgttgagatcactagagcaggccctgactcagtgtggctggtgtccttataagatctggacacaaagacagatacacagggaagatgacagagaagacggccatctacaagccaaggagaggggctggaacagatctttctctcacagccttagaaagaaccagtcctgccaccaccttcatcttgaacgtccagtatccagaacagtgggacaatacatttctgtttaacctgtccagtttatggtactttgttatggcagccccagaaaattaatgcatgacttgagggggcaaaaccgagcagttttgtgtgtatgtacgtgtgtgtttgtgtgtatgtgtgtgtgtaggtgtgtgtgtgcacgcatgcgctgctggtatctgtggatgctgctaagcatcccgcattgcacaggaccatgcccattcctgctaaactgctcacctgctaaactgagaaatccgcaggtggtatctgacgctagaaaatcaagaggagcagcagaggcagtgactgagagatagaaaggaaaatacggaataattcggatgaaagagttgaatggattttcccctaggggagagggaaatgggacgacagatgattgctattgtttttaaaaagccttatagaatgttttaactccaaaacagatgcttgtatgcctttgataaaaatggaaatttaaaaaaattaagggaaggatagtagggaggtgggaggaagggagatgtgctttttacagctggtgcttcctgactagtaactagggggaaatgcttgggctgaagtgtacccttctgaatgctgagctccttaacagaacccaggagggagaagcctgggaaagcgtcaggccccggcccaggaggacacttcattctcgcaggtcataaaggtttcaaatgttcaaccccagaactgatattgtcatgaaggaatgaagccaaagaggtaggtttctattagggcaatctgacccagcaaagggggcttgatggaggtttctggtgctaagacagagggaactgtttaacatcccctccccggtagcccgcaccctggcacactctaagttgatgaacttggtcccacccacgggcacacggccatgactgtctggacagaggacagtgctttcatttgggtggttcacttccaggaagtgtttgtatttgatctcatgataacctagagaggccggctagatgagttttcttctcattttcagacaagggaagcaggagacaatgatgtcatagaataaactttgggatgacacaggttggggttcttggctgctgcctacttcctttgtggccttggcaagttgcttagcctctctgagcctcagtgttctctgttcctcttctatgtcaagtgattcccacttcatagactggtggccgggattacctaagacaaagtatgtaaagcctgaaatccagtacgtcataagcaccagtgggtgttctcactcctcttctagcaataagatgcttattttatatgcaaaataatgtatctgttgtcctgactcagagcatgatacccctaggtgaagtatggcatcttgacaagctaggtacttcgaactgaaggacattggaagggcctcagaagtgagacctccctgacctccttctaccctcccatctctcccaaagcaggtcgtagaaaccagaattcctcttccccaaggtgggtcatagaaactggaatccttctcccccaaagcaagccacagaacctagaaaggtcaccctctcccttctcccgtgaagatcctcattccagaggggtcctggaatatatatctgggaggacgcaatgctacccagagaggccaagatgaatctggacagacaggccttgcagggttcccccttcagcctgtcaccattagatcacactctgtccattcttcatcgaatccaagcatatagacagttctccctgggttttggggttgtgaaaggaaaataaaatctcaggaccccagttcactatgtcaaagggaaaaatgaagctggaagctgagtcaggcaagaagctgcctttccttttgttgcccagcagacagcgaaagatgaaaaggccaggcagaggccagccatctccacaggtggctgccgtgtttatcttgtgtaaagtgccgacttgccgagcgtttgatgaatatataatcaactatgcctatatcccctcctcttcacatgtaacatgtggattcagtgacgtgaccgcaccctccctccttcccctccaacatgtggattcagtgacgtgaccgcaccctccctccttcccctccaacatgtggattcagtgacgtgaccgcaccctccctccttcccctccaacatgtggattcagtgatgtgaccgaaccctccctccttcccctcctgcctgcttttcccatttaaatacggaagccctcaaaattctcttggggaaaagtagggatcgcagattttttcctgcagttttgtgtttctttttccctggtgcgtccttaaccttcgctaaataaacctctaaattgcttgaggcctgtttcagagaccttttggtttatagactcattgctgaggcctcctgtattacataacactatgagtaaatacatttgataggcatttctcttgttaacctctcttttgttaggagtgccagccatgaccattgtgatggtatcacatctttcttcccctacactgtgctccatttctttttacattttaatttgaaaaactattttataatttctaaaaataatagagatggagtcttactatattgcccaggctggtcttgaattcctgggctcaagtgatcttcctgccttggcctcccaaagtgctaggattataggtgtgagccactgcacctgacccatttcttttctttcttttttttcttttgatacagagtcttgctctgtcgcccaggctggagtgcagtggtgcaatctcagctcactgcaacctctgcttcccaggttcaagcaattctcctgcctcagtcttcccagtagctgcgactacaggtgtgtgccactatgcctggctaatttttgtatttttagtagaggtcaggtttcaccatgttagccaggttggtcttgaattcctgacctcatgatctgtccgcctcggcctcccaaagtgctgggattacaggcgtgagccactgcacccagcccatttcttatttttaaaatgtcttctaagttgcttatcactttaaatagcttatctaggctctgggatacagcagccattaagacaggcacaaaacacttctgcagctcatattccggtatagagaagacagggttaaaaactattacgttggtgcaaaagtagttgaggtttttgtaattaaaagtaatggcaaaaaccacaactacttttgcaccaaactaaataagtaagcaaaacagttgacatggtaaagtgattcagaataatccaatagggagataagcagatttctaaggagtggggtgattgctatttattataaaataggagagtgaggaaaggatttgttcaggcgacattggaataaaaggaagtaaatatatgatgtcaatggcaacgaatgctatgcaggaagataaagctggtggagggaggaagactgctgtattctagaagtctggggagagatggcatcttactatattgcccaggctggtcttgaactcttgggctcaagccatcctcctgccttggcctcccaaagtgtcaggattacaggcgtgagtgataagtggcatttgaataaagtgttaggattacaggcgttaccaatgagtggcatttgaacaaagatggtgggaattagtggagtgaggcacatagatttcttgtggaaggaagtcccggcagaggaagaaggggctgaggctgtgagcaagtgcctggcctgcagaatggcagggccagggaggtgctgtcgtggggtcagatggccagcagtgggaggttgcgtgtgtacatatgtatgtgacagacacaggcacaccaggaccttttgggtttttctgtcttgcttttctcacccaacagctctgcatgtcaattcctctgtctcattcatgttacagccacctaattgtagtggatgctggggtgtgccacacagatcacccccttagagaaggaacttgttcccccagtgccaagaggggctcgacacaccccagtccttcccttgggatttccctcggcccaggaagctgccttgcctgtggtgactgtcccgcctgaggacagcctggattcaatgcctgctcagtacagggctacatagacacaaaggggctccttttgcctcagttagggacacttgaaggccattccagctccaactctgcctggggctgagcctttgatgcaaatgtctaaacctgcctcccttatcccaagagcattcccctgtaaatgtcttgccagaagtctctatctgaagcctgtcaccaggaacctgccctagggcagtgggtgccagggggtgtctcaggaagctgagtccaaagtaagagtttggagctggatgcgctgctgcccagcaatgcaaagccacttcctggcaggaggtggaacacctgtcacctctgtggtgcccctgggatgcaatgggcaactctcatgggtcttggctctggctgtcataacaaaacactagagacctgtggcttaaacaacagatctttatttctgacagttccaaagcctgagagtccaagatcaaggtgctggatgatctggtgtctagtgaaagcaagcttcctagtgaaggcttgcagatggctgccttcctgctgtgtcctcaccttatggagagaaaccatctcttttgtgtcttttctgataaggacgctaatcccagcatgaggctccaccctcgtgacctaatcacctcccaaaggccccaccgcctaacaccatcccactgggcgttaggcttcaacatatgcacttagagaggacacagacattctgtccatagcaggtggggtattggtggaaagaaattcagcagctggtgcagtatttcaggatctggggagctgcagataaactcgtaattataaggatcgtagaatcaaatggctatttcagagggcaaatgatgcattaaaaaagacaaaaggtgagggtggttactcagctatagaaggctcagtgtggaagcccgagggcctccttgacagcgcaggcagagaatctcatctcacgcagctgatgggaagaaaaaatgtagagtcaggccctagacttagtacagggaagcaagcgccgagaaggttgaatgctcttggtcaaccctagtaagcttcaccctgagtcatggggtggggagaactgggttgatacacctggaaaccctaaaacctcagaacctcctgagcctctggcctgcagtgggctagcactgaccccttgcttgaagacaattgcagatgcttctgcttgtgattctgtatgcacctccctcactcctggggatctgcctccttctccttggaccacctgactagtaactagggtccagactcaacatacctcagctgggggagtgtgaagccaattaattgaccctcacagagaggaggtggacgctgctggtaaaccgtggggcagggaacaatgcctttggtccccaggttaaccacagaggtgtcatttgccacttccctagcagaggcaggcctgggcagggcatgatgaccaggggctcagacccctgggccatctgccgtagtggaggagttattgagcccaagggggaaaccagaatgggctatagaggaggaaaaccatatgcatccactggggcctcgtgaccagtggcagctgtggggattggagtttgtcccactggacttcccctgtgagtttctccaggaccggagaccaaccagaatcttaaaggagctgttctcagatcaggcagactggccacaggaatcacgtggaccctattaacgtgatgggtggacagtagtggaagctgcagtgccctacacagatccccccagctctaggattgctggtcactgtggctcatagctgagtctctctttgggaatcactgcctgctgcaggggccacttcactcaaggttaagactcatcctgggggcatccacagccaatgactggctaatgtatacatcccaatgcctggctcttgagctccactcaggaccactctgaaagcctgctcagctccagttctccatgggttggtaacgcctgtctcagaggagtgatgcccaaagcagttcccaataacctcactagtctcaatcttagagtctgtttctagtggaattgaaccagagatgctattattcagggtatgaatgaaacataattcatccaaccatttccccatcagcagcattcactttgtttcctattttttccaatgtaaacattgctatagttagcatccatgcagatatagcctgctgtattagcccattctcgcattgctgtaacgaaatacctgagactgggtaatttataaaaagaggtttaattggctcatggtcctgcaggctgtacaggaagcgtagtggcttctgctttgggggaggcttgggaagcttccaaacatggcggaaggcaaagagggagcaggcgtcttgcatggcagggacaggaccaagagtcggggtagggggaggtgccaaatttttactgaccacatctcatgagaactcattcactatcaggaggccagtaccaaggagatggtgctatagacatgtagtattttaaacaagagaagctttattatgaagaattattggccgggcgcagtggctcatgcctgtagtcccagcactttgggagtcggaagcaggtggatcacctgaggtcaggggttcgaaatcatcccggccaacatggtgaaaccccatctctactaaaaatacaaaattagccgggcatggtggcacatgtctgtaatcccagctgcttgggaggctgaggcaggagaatcacttgaacctgggaggtggaggttgcactgagccgaaagcatgccattgcactccagcctgggcaacaaaagcaaaactctgtctcgaaaaaaaaaaattattaagcaatgagaagaacataactacaaggtacaatggaaagctaaaaggtatcttaggcctgaggaagagtgatttaggaaagacaaacttggatacctccccagggcttgggttcaggccttggaggttggagaaggtgcgattgctgttcactggatgacacagaaggtcgttggtttgcccagaccagatgtgatgcacattcactaggccagcaagaagtccctcttcagggggcagttggactgcaactgggcaggtgtacagaaggcattggtgtgctgctgatgacaactggaatatgcatgtccacattgggagggctctaggaagggggttgctaggctggactgggatggcaaggttgcgagggcgcacacattttagccacatggtaggaactatcaccagttgtcttcacacatgctctgctgaccaagggtgcagcctccggaaccagcagaaaccctcttcctcctgcaatgtcactctatcgccctctaccgataaattttaacaatgtagtcactgttccggagaaatgcttaaaggaatcccattcattagcacagagcaaatattgaagaatgaatttaaagctgagaggcaagaaattgataaatataacagaatctaggaaatcatattggaaaaagattgtataattgaaagtcatctgccttcttgtccctggagtagtacaatgaggcagtaaatgttcagcactactgtttaaattttaattctgtcataactggactgctaatagctaacagtttagtgccagttacctttaaaaatggtttataggcatgaacctatcaaatgctcactataagcttttgagttaaataccgttattatgcacacctgaggaaactgacacatacattttatttaccataaattcccatcagaccaatagcaacaatctttaaaaccacctgctagtgaaggtttgagggagagatagtggtctacctggattaatgtcatgatagttttgataaaattcaacctctgtacacttataaaaaatctcaaaacttaagcattggtccagggagcagttattggtaaagttaaattcatcacatcaaagccaattaattttttattttttattttgaaaaatgaaaagtaacttgagagattatttgtactttatcgtctcaaagaagtcgatatctaaaaatctaatctttctgtgatagttataatagggaagtaccattttgttttttgttcgttttgggaagagctacgggaacagagaactgcaatccccatagtagaatggttgagtttttgttggtattttgctaacagatatttcttgctatcagttctatacagaataataaatcatgaagctagactttttgtgtcatatggtgaggtaatacattgaggaagaacaccttgggaaaaaaggttaatgtaaaaaagaattcttttttcattgtcttttattcctaaaggattattagagcttcattcttagcattgatcagggtataaagaaaccctaatgtcattttattttcaaaaagaaacccctctttttgcctaatgagcccaaccatatctaacagaaatgcttctgtgacatcagtgggccttccttgtcaagaggccagggtcaccacagcagtgtccatcttccttgccgaaaatggaacaaagaacgcgagaaagaatgatggtattcagctgatggagaaaggccaaaatgtcccaacaaaggtgataccattaaaaaacggacaacaatgcttgaacactcagaaaacttcctgacaaagaaggtcctttgggaaaattgtctctttttagcatagtatttttgctatgaaaatgaagagatgacagctctattatttaatcaacttggcccagatatttaattctgaagaaaaatcaatattatacaaaaacaaatgtattttcgaatatgcacatgcttattttcaaatatgtcaatcaaaaaaataaaagtttatcaataatcttatttaacctagatgaagtagatttatagcctgagaagatttcacatggcttattaagagcttacttttttttcttttttctttttttttcttttccagacaggggttcactctgttgtccaggctggagcgcagagttgggatcatggctcactgcagccttgacctcctgggctcaggtgatccttccacctcagcctcctgagtagctgggaccacaggcaccaccaaactcatttaatttttctagtttttgtagagatgggacctcgtcatgttgcccaggctggtcttgaacccctggtctcaagcaatccactcaccttggcctcccaaagtgctggcaagctcacatttttgtaataataaaagtaattctgataaagatgccttgaaataatggatgttccaaaatgaatttgccttatttggatttggaatgcagtttcatatttatattttaaatttggattcatctggttactggaattaaatatacaattaaaaggatcacaaagcgcactgataccagaaaggcactttaataacaccagggtgcatggcctgcctcctcctttcacttactgcttgtgtcatcctgttcaagtcatttaaccccaagtggtaagcctcaatttgctctcttatgaaatgcacgaagtcgctgtctctctatacttcaggattaccgtgagaatagaaccggaaccatgtatgtggcagcagtttatgaactgtgagatattagtctaatcattctcagagtcctcgcctcggctgtttgtatgcccctcccaagttttcaggaatggacaaaactagccccctctcaaatcatgtgtgcaacaaccgattgcatatttccccaagggaacatttagcgctggggatgtctccgaaactatgttagacatgagagtcaacagagatggcagtaagtcttggtgagaagggcctggaacttagaatcaaaagaaggaggagagaaacatggagcagtcactcaccagctacgtggctttgggcaatttgcttattgcgcagagcgtcggtttccatattggtaaaattaagatgatatttgaactcagcacttcatgtagctgtcgtgaggatccactctagcaatgcaggtaaaggtgccatcacatagatatcaattataaaaataatattaacaggcataattgtagttaaatttcaattcagacatactttcttttgaatgtctggtaggtctgctgtgttggttgtatgtgggttttcctccatatccacttttttggacttaatctcaccattttttacatgtaaacatatcacaatattaataacattaattaattgaaggttaattatataaactaagtgaaataaatctttaaccagaaataagaaaatttatttgtatttgagttacagaacaatatctgctaaaaggtttaaattaaacaatctttacttatatgttactaaaatgttttggaggaagcaaactaaattctgcatggccagggaaattatttaaaaacccttttagtaaactgaaaataaaaaattatctcaaatcataattgacttgatcagaataattttttaaatgttaatctaaattttttaaaatgttaatcacagatcatgacctgtgatgaattttttcttttcagtttgggaactaatatcttcaaattgtacttgaattgacttagaaattatagaaaatgcactgatattaactcttgggatttcaaacatatttttaggattttcatttttccttgcaattttacagctgactctgattttgctcttcttttatgattttcaagtattacctacagcaagcatgtaaaaacattgtctttctttaagcacatatggtgaaaatcattcaagcagatggctgtatacagtcattagtaatagaggattgagtgtcagctcagttactgctgaaatggagtccagtttaatagctcaaatgaggacaagaattaaattggaaattgcagactgaaatattctgcatttgatcataaagtgattataggaaggaaagaacacagtgtaactgtctatattttaaaaggagccaggctcctgatagttctgtgctatatcagttcataatcaaagtaagcaatataaatccatttttaaaacactaatgtgtcttagattttttttaaggaaaaggccaatttcttgcaggtgtacagtggcattaaaattctatttcctgacgtttataatcctggtgcactggacttgcaaaacagagtttagttttgctttgttaggggagagggtaatattgtctctgtcctggtccctgttcattctagccaggtgttcgggtgtgtttgatgacatcctctgctgttcccaagacccacatttagtggctgcaattttatttctcaccatcaagacttctaagatgaggcaaaggttgggttgctcatgagctcctctttgaataaccatattaggttctagctgtgtaactagtacagttagatcctggcgtgccgttagaataatgtaacatagaacacaagggcttatttggtggaataaaatatggtggaacacagtgattagagcaagtcacttcgcctcttgaagcctcaatttcctcctttgcaaacgagttaacagtagcacctacaggaggacactgtgagcattcattgaaacaatgcgtatgagacgtgtagtatagaatatgcctgacctagagggagagcagagacagtacataccttcctggtcccaccacttgcttgctgctggatgttgggcaaataacctctctctgccttgattttcctagttctaaagtgggattaatagtaacattgtgttcactgatttcctacgaggacgaaatgaactaatgtttataaagcacttagtacagggccagcccttagtgatattatcatgaacgcacagtcgtaagcacacaaatgcatgttatcatcagtatcatcatatatttattcaaaacaaatgaagtgttgtcagtaaaataaaaattgttgtattaagacattgtgaaacttagagacctaaatgggaatgttacaacaaactaaatattctgttggtacaaatatattttaaacaaaccaagctggaaatatccttgtcataaattgacactggacaaaaaaaaaagtattctgccatgctgagcaatactaaatctaattgtcttttttacttatagttttaaatttgttttttttttcttttagttttgtgcaaagaatattccattttcagttcagtacggtgaactgtcaagcaggcatacttagaattttctcatggtattttgaaattagtttgaacagattggttaacacattgttttttccaatttcaattttaataggcaaaatattatttgcattggtaataaatattagtcgtaacttgaacatttatttcttcttttttagagatggagtctcactacatggctcaggctggtctcaaacttctggcctcgtgcgattctcctgcctcagcctttcagagtgctgggatatgagcgtgagccactgtgctcagccaatattataacaaactaaactaaacactctgttagtctccattgctcagccaataacttgaatatttctttttccatttctaggctttttcttcctttcattatcattcctttaaatcatttgggctgaattaagaaatgccaagaaaccagtgtattagttttatagggctgccatgccacaaacttagtggcttaaacaataacaattttaataccttacagctctgtagatcacgaggccgacacaggctcagctggactagaagcaaaacaccaacagtgctgtgtttcccctggaagctctacgggaaaattcatgtacttgtcttttcagcttctagaggctgaccccgttccttggctgctgggcgccttcatctagtatctgagagtcctgtatgtcacacatctcatcactatgatactgacttcttacgatttgactgtgaatgctctgtacggttacattaggcacatacaattaatcgaggatagactctacattctaccatcagttgatacacaggcattattgccatttacaccctgaattccacttgatcatgtaactgaacatattcatagtttctaggattagaatatggacatctttggggaggaggcattattctgtccaccacagccagcaatcatattatcagcctgtgaaatctcgtgtctaactgggtcattacagtaccaattatgtgataaaagtgataaattcctctttgcctacaaatgctgaagaacagggtaaagatcatgggttttctatgcacaagttgaagcagacaatgccaaaagtattttatatatcattaaatctttaggaaattttgacctcgagaaatttatttcattttatttttgttttattttttgagacggagtcttgctctgtccccaggctggagtgcagtggcacgatctcggctccctgcaagttccgcctcctgggttcacgccattctcctgcctcagcctcccgagtagctgggactacaggcgccgccaccacgcccggctaattttttgtatttttagtagagagggggtttcaccgcgttagccaggatggtctcagtctcctgacctcgtgatccacccgcctcggcctcccaaagtgctgggatgacaggtgtgagccaccgcgccagccggcctcgggaaatttttagcactgggaacaaaactgaaagagtggattttcacatggcctttaaggaaataagcgtccatttggtgtgaatacttgatgtgggtaaagacctcctcatcctttcaaacaagaagcagccaagtgtcaagatttatcagcttctatgacagctgtatttgtggatggcatcaaacactccctgaaagttttgctaatatactagatcttaaagttcaatcatgaagaattttaatgtgtcatcaaatatttgttatatgttatcatcctctaggtcaaccatagcaaaaaagcaaaaaacctaaactcagaatgaaatggaataagtttgacaaatttggtaatctcttcaatattcttatttacatatttacattttttggcattgtgatatttagctcttgcagtttggcttttctgattgggaattggaaggtgggatcaaaatgcagcaatacaactgaagaacaaattcttaccttctaggtgaggacacagaatacactggagcattggtggatttgttatttagtctgttactgcagaagaccaaaccataacactagagccagattatcatgaaaatcaagaaaaagctaaaatatgtttaaggaaaattccatttatttgctaatggctggactgacttaaaatccattagcattttcaagggccaggatcaatacttttgaaactttcaactcccttggggccctgaaaacccctgggccgtgatgtaatgaattggctgcatcagcttattttcaatattcctctattcaatctccttgtcttcatgtgattcctttagctttaaaaatattaaaaggtaatttgagatattggaaacaatattctcttaaatcaagttgtgtatatctccaaacattttgatgtttactcatgagaagatgatgggtgccgatttctaagttgatagctactcaacaatttctgagcatagcatcatcttcccgctgaactgtcaataaattctgcttggaaaatcagtatttcaatagtgtataggacgtttagtgatgtgagacacgcctcttgagattaaatgataatatgttctaaactgaagaagacctctgatcccattagttgaattatagttatttcctcatcagtttgtattttatattgtgattatataatttaatttattaaaatgacttgacaaaaacaaatttgacttcataaacaatgtatagaatacattgtaatatctactaaatgttgatcactaaaaagttcatgtcaaattaggaatgagaaacacaattctaaatagaagggtaaaaaaatgtggactcattgctttaaaaaatctttaaaaaaaagaacttgaaagagaaatgtatttcctttatataaaaccaaaaatgaagtgaaacttcaatcaataggcccattctaaaaaaaacaaaaaaatcacttgctttagtcatgagtgtggcaaatgaatgtaaatttctacatatttaattgcagtaaaatgtaaatatatactgttatgattttttttttttacaactgtgctctaagtttcttaattaatggaaaaatcttgtggtcttagtctgagagatagggcaactttactgaaagtttttaactctttattttgactgtaactgcaaagccctaagaacccttgctcaccacactttatagcactgaaaaaaagctatatatgagacagtgtcatccaaggggaagaactatggccttgaggttaggttggcaggtttttatttgcatgaccctggacggagattgtaaccactttgattcagttcctttatttaacaagatagaacttagaaaactaatctttaagaaaagaaataaagaaaccaaggtgaaagtgcctggagtggtgtaatcacgcaataaatgttcatttctttttccttcagtagaataatatataacctgttttggaaaacttatgtagaaatgtattgatttccttcaaaatttattttccattaaaatatttacgtattcctttaaagcttgctatttcaggcaaaattatgcttagtttacaaatactttctccagaatggcttatgagtcttaaaaaggaaatgagtgcatattttaccttacagaaaaatcctgcttttcttgcctaaaagtgaatacaagaggagtagaagaggtgtcacaccttttacatctgggtgtttaatgcagttctccctttgatttgccagttgtaaaatttatctgattatttcctaaaattttctgattaggataagaaaagaataacatcttttatttggatttaaaccaattctatctgaagtaagttagcctcaaaataatagtgctagctggaggccattatcctaagcaaaattaatgcaggaacagagaaacaaataccacgtgttctcacttgccggtgtgagctaagccttaagtacacataaccataaagatgggaacaatagacagtggggtctgctagagggaggagagaagaaggggaacaaggactgaaaaactacccattgggtactctgctcactacctgggtgacggtaacatttgtatccccaacttcaatgtcctacaatatacccacgtaacaaacctgtatatgtatcccctgaatttaaaatagaaattgaaattttaaagtaattaattaatgaaacagcaaaaaataaaatgaagcaggaaaaatagacacaaaaataataacagtggggctagccatattgcattaaaacatccacacaaagcacatggacaactgtctttaatatctccatcttcattaggctagtgaataaagcaatagaaaaactccaagtgtgtaatttcattatctaggacactgatgacttagaatctcttgtttcacagacggatccaggcaaatcctattgacacagggaaaaattggttgctttgggttccatttacctgcagaaatggaaattattacttgctaagtgatcatttgaactactagccctggaaggcatatgtcggctcacatgtttaaagcatattttatctgacgaccgcttttattttaaagatatagaataatgttttacgtcttgaattatttctttctatatacttggcaatagcacagtaaaaatccaagacttttttctataactgggatgtatcttaattcctcttttttttaaaaaaaataattaagtgcatagtagttggaaataatgaaatgttgatgagtaattgatggatgatgacgaagcccaccacagactgttttcttcggagttaaatttctagatccacaagcgatatgttgcataaatgaatgaaagtgcttaggatgtagcaagactgtaataacaatactttaattaactgaaattaaacggtgatgtcagagaaaaacttatgtcagatcaccacaatcaattaaacacagtgataaatgtaacattcttctaataaaagaacttaatcctatttgccacttcagattgaataatcagtttttcactcactaaaatggaacccagaatacatcttctatcttactttgtcgtttgataaaatgttagtttttctatatttgttaacacagaccagtatatgttattaaaacactggccgtaaacagtgtaggtagtctagcatatattcataatttctttgtacaagctaagaaagaacacattgatcaagtccttttcaacataaattgtatttcatgcaagttaaaattaaacagaaaactgcatttaaataaatgtgaaagattcaaatagaaaatggcctttggaactctttttatatttagtcatctattatgtttcttttaaaaactattagataaagagcttagatagaacaattaacataaaatgctttttggggagaggggctcttttttaaaccctgtttagtatcatgatatcctattttattttacgtgagacatttgcatggacatattaattccaaaaagctaagtgatcttatagactttatagatgaaatacagcaagaaacagaaagcaaataattgcatgactgttactggctatattccgggtctttaagaatttaagaccgctatagataaatgatattgcttggtacctgcctgtcaccagattggagtggaggaatttagtatttagaaatcttttattttcttcttgctattatacagtgttattgagttggttatcagtgaaccatcttgggctttgaagcttcccttgtgttatgctaccctgctagggtacataatatgatggtttaccgttcagcaaaatcttttgttttcactcaaaaaaagcagtccccagatatatttaaactcatagtataaatgccatggttttaatgtacggtgccattttgtaggcataaaagacaaacaaggtgtgttactgtttttgataactttactcacttttataaaacctaagaatagttatctgaaaatatgtcattcccttggactggaatctagcccccagacctgtgacgaaataaggatgatttcagcacactgaagaaacaacgaagtgaaaggaagaggagcccacatagggtcctcttcattgtgttttagaaggtcaaattctctggttattaacagacagagtatttcagagtttgaagagacattaagaaaccaggaatctacctcctcccttttacagaaaatgatacaaaagataattctttgccatctcagtgcccacgaacggcttccacttcaccattcaaccttgtaggtggtagagctggagggcctgtgtgaggtgaacaggcaccaaaaggactgagagtggagagaatatggtggaaggagaacacaaacttcctggcaagagccgacttattgagggaatgacacaagaaggaagtggtgtgtctgggtgaaaaatgcacagggtaagggtgacattcataagagattttccgaggcttgtggaattgctgagagctggagagctggtgaggaggtgagaaccaatcttgataactcttgcctgtgtataccgtctggaccttattttaaatgttctttgaaggcacagtgaagaattatagttatttctgaattcctattggaggctaaaactgccttcttaaactgggcaacacatcagctactgtataaagtgggtctctaaaatgatagtttatagtcatataaagaaacagatatcaggaaagagaagatatttatctaatgagttgatctcttcagtcacaacagtcagtttggataatgttattcaccggtgcattcttctttcctttctaatcatccccaagtttatctcctctgaggctcacgctcagcagcacagattgatttactgaactatataaaagtagctgctctcctgccacaaaaactccaaaccttctttcttttaaactttctttcataataaaataatgcaaggcaacctttctaatgtgaagacaactttactaagtcagttgtagagacagaagagaagcttggctggtaatagtgataacactgcacagttacacattttacagaaatctaggagtttatttatgagcatgtgtggaaatgaataaatgacatttgtatagtgcttactatatgccaggtatttttttaactgtatcatacagttaaccattcgatatttacagtatgttcaggagacaggttctgttgggatcatttcattttacgtagaagaaactaaggcatcgagcgtttaagtgacttgttcaagttcacttctttggcaaatggcggagaggggatgttgagccagagaccacctgctcaaccactgcctacattgcttttattgacttaaaattacaaaatgtttaattaaaatacctgttaggtattcttcatatttacattatcttggccagtaatataatgatcatagctaaataaatgctgcataacttactgaaatgagaaaattgctttgagtatgttgaaaaatacagtagatcgtgcatattatgttacactattacttcactaacgaaggacttcactatggctagtcccatggataaccagccaaggtcatgtctcgaaagcaatgctctttccacaaatgtggtctgaatcacaaagctttacctgcataaattatattgtattttattttgaatgtacttcagaaatttggaattgtactttggtaccgtagacattgcctactctcgtatcctttatgacatggctgtgaggatgggatgtatatatataatatatatacacatcacactatatatgtagtatatataatatatatacatatgctgtatatgtatatatattatatatacatatactgtatatgtagtatatataatatatacacatactgtatatatagtatatgtacttatatatactaatatagtgtatatatagtaaatatactatatatactatactatatatactctatatacactatactatatatatactatacatatactctctatatagtatattttttatatatatactatacatatactctctatatagtatatatatcttttatatatacatatatgtgtgtatatatatgtagtctttacttctctaacatttatactcattgaggagagttggccttttcctgtctaaaggttcactataaaatggacacatcagctgggcacggtggctcatgcctgtaatcccagcactttgggaggctgaggcgtgcggatcacgaggtcgagaccatcctggctaacttggtgaaaccccgtctctactaagaatacaaaaaattagccgggcgtggtggtgggcgcctgtagtcccagctactcgggaggctgaggcaggagaagggcgtgaacctgggaggcggagcttgcagtgagccgagatcgcgccaccgcactccagcctgagtgacagagtgagactcagtctcagaaaaaaaaaacagaacaaaaaaacggacacatctttcctttgccttgtttaagagtggcatttcccagcagccagggaaatcattttaattctctgaggcagaaggaagatttcatgtgtaaaataaggtgagactgtttctaaactgggatctttccaccttttgcctggtatggagtctcatctatgagtgatgttgccagtgtatatgccagtgatacagagaaccattatgttctagactcgttccatttacccatctccttctctcactacttccactgccaacattaatgtgacagagaatcacaaatcttaactctttctgcttcggcccattcagagactctctggtttatctgcttattaaaaagagtgggacctggaaatatgtgtgaggtaggggccatattgatttgcagtattggtgttggcagaaatcatgcagcagaccttgtaggccaaaaaccacaattgttgtataaggttactgacgttgtcaccagtagaatccaatattctcatatcatagttatttgcagttatctcagtatatcatatacacatcaatattttgtaatcaaagtagttctgacacttactaatagattttatcatttcatatgtgaaaaaataaatataggttatatcacgatttgtttatattttgctaacaatatttaagataattggtttacttaataattgtccttcatttatgccagtaaggtcacattctgggtaacaaacaaaaaggtcaggaatccctgctataaagtgatatactgtggaaaaaggcagtagaaaaataaatggatccagagccttttccgcttgcatttttgaaattaatgctgaactcttgggtgcctgaagaaaggggacagagagtgtttcatgttctttcgtgtgatagtcagatgtggttatatgaggaggccgtggagaggctccagaaacaaactttactgtgctcacaggccctgtagacagtagacatgagataccacatgggaccatgtggaaaaaaacaccaggttagtcagaagacaaaagacaagagcaaggggaaagtttaggccgaacctttgtttgagtttctccctgacaaggtaaggcagggtgatcagcttaggattagctagtttgaataattttagtgggctctaagcaacagggtggtccttagtcacctggtacctggacctgaatgattcaggcaaaagaatattgcctgttggagtgtaagagccagataggggagggctggctctggattggttcacttgcaaatgaaaggtgtgctcctggctggctaggcccttctatctctaagaattgagtagctgcagaagggacagtctctccttagctagaaaggatttttaagatgtcagaacatcatagtatgcagaaaatagtacacttgccccaacccccccgccccccgccccgccaacacacagacatacacacacacacacacacacacacacacacacacacacacacacactacaaagagcatctgacagaagtcagggtagctgtccagaggctgatgtaccgttacttatacatgtatttttagctcacctctttcatcattgcattgtatgcttttctattaaatctaaagagtttccacttccttaaagacatcgtgttaaagttgtccctttcactttcttctgttgccgggtaatgtatgctcctgtagttctgaggggaaataagccaagcaccaagggtaagccttgttctcttgctggctgagcaggagttgaaagaggaggtcctagtcttttagacagaatgtccaatggaccagaatactgttactgtaagagtattttttgatgcttgctccctgctgatcatgcctgaaaaacactttctagaaatctgatgtgtcagaagggaactctgccatgcggacttcacagcaccaggatcacaagaagctctaagactttccgggggtttagtataccgctgcctgcatgtggtgagaagatatcaatatttattcaggtatttgttttatgtttttttctattactatgtgtgctaaataataatgttgttctatgttccaagggttagcaacagagttttctttgttttctaagtcttatatctacaatcttaagaagtgtacagaagaatcacctgtaacacttaaatatatatatatatcttccctgcttacatatatatatatatatatatatatatatatatatatatatatatatatcttccctgcttaccccagtgatattctgatttcagagacatcgaaggttttcaagaaaccatgtttttacaatggtgcatatataacaaacataaccccaactgagaaaactaccttactgaattcatgaataaataaacccttgtatcattttgactaggataataactgcacaaacacatataatacttggatggcattggttaatattttatgcagttatgtgcacttttgtgtaactttttttgaaaaagattaaaaaataaccaaccctgagatatgtcatttgcatatgttaatttcttttattagaaaatgcataaattaactttaaagaatgaagaacattgagatattgtaatttatgtattgcatttatagaccaagtctatataaaagtatagcttcctttaattgaaaggattatctttatcagctttcctgaagtcctgtgtgcttgatttactaccaattatgccacagatctctaaatagcagttatcttttctcaaatatttccattgctggtgttaatcttctcttgattttccagttacctgtttcttgatgatgtacgtaaatcttctttctttattttatttatttatttttttgagacagagtctctctctctcgcccaggctggagtgcagtgatgccatctcagctcactgcgatgccgcctccaggttcacgccattctcctgcctcagcctcgcaagtagctgggactacaggcacccgccaccacgcccggctaattttctgtatttttagtagagatggggtttcactgtgttagccaggagggtctggatctcctgacctcgtgatccgcccaccttggcctcccaaagtgctgggattacaggtgtgagccactgctcccggccttaaatcttcttttagtaccttggatcccatcttgttgctctcatgaactccaaactctttatatttatcatttcctttttcatctggatatagtatgtaattttatttctcaaatacagtctctattaaatgtcaaggaacattttctgatattccaggcactgttccagaccctggagatgtggagtcccagtcctctgagagcaaacaagcatagtaccatgtgacgattgccataatccaggtgagcctaagtgctgattgagggtgactctgtgcaggcttgccccaggatgtgattcctgagccagtttacaatcattagtggaagttaggcattcagaactatgacttatgcacctgtacattaccagccccttatatggtacttgtctctgacacagagtagctgttcaataaatgttagatttgactgaaggatgaggaaaacagagttgttagcaactgaaaataattatctgggtttgaggattgactgcaattcatgaaaaagtttaaaaatgtgtttgaaactatgccaggggctttaaaatgtatttctatgctatacaaggtgtttacattttattttaagacaatgaaattccaattagggtaaagtattatctaatttactttctataatgtgcatttgggcttcttatagaaagtttggtcttgtaaaaaggcctaccagtgcccttcccaaacccctactaaagaatctacatagcttttcaaaaaatcaaactttaaccacatcaacatggtaagacagaaaaacaaatttttcaaaatctgcaaaaattttgacgctgtcactgattgagctggattgagagaaacaattggtcgtctatttagacttacatgacaaaaaagacagacttggttcatcaaaaggggctaggaaagcactatatccctccacaagatcgcccccgtcctttttttttcctctcagagatcttaaaattgtgctaagaacaaaaaaacaaacatcgagagtagtcagtcctgttatctgatctctgatgactgttgcaaagattaaaacattccctgtgtctctcctttccttctctcttgttttagagctggcaatgagaaactcttttcctctcctgtttataggtgatactctttaaaaaacgcttatataccagactatgatacatagactatctcagcacattcaaaagagcagaaattgtacagatgacatttcagaccacagtgcaatacaatgaaagatgattaacaccgttgtaagaatacgtgatgatctataacaaaaggttagtacatatttaattactctctggatgggcaatggctttctaagaaggtaattttagaaagaaagaaaaaatactacattaaaaaatgtggttaaacgcttgtctttgctctctggcagctttcgcttgttatgaaagagcacctaccacattaatattaagactggatgttttcatgtgtgcattaactgacattctgtaagtttattgaagattgcaactgtgtaccttaggtctctatatcctgcctgttacataatggatattaataaatctctcatcaaagactttttctaaaattacacttaaaaataaagaaaatgtcgacaaatataaaaataatatttgcaagtcaaaaggaaaagactagtactctagtagaaaaatatttttaaaagtccagactattcagatatctgaattattaataaactatttctaaatgtttagtctcctgcatttaaaacaaagttaaaactagatcacacaaattttgtttaataagttggcagatgtatacattgctttacagggtgatagtgtgaatgtagattcattacaatcttcctcgaatacttgcaaaaagcaaaagcaggagatactttaccaccattagaaaacaaaaacaaaacagatacccaatcatattatttattgccccatataaattccaaatactcaatttacaggaaataaagaggagtataaaagtatctatgcattcacaaaatcaaataaagttactgaaagtgattcagtcacagcccaggaagattacttatattattcttcatgttctccactatagtatacacttgtatatgaaatacatttcctacttgtaaggttacagacttaatactctccttcttcttggctgcactctaatttattactctaatagatttcactaagtcaannggaatcaacccnnantgtancangatgtatttnnngcntaagtatattggaatannantantgtaantanaatatatttaacanntttattaaanntanantgtanttgtattaatgtataagttnntatatattcaatagattgtttatttgttttatcaannnatgtgctttcatnntctaaaangcccatanntcntacactcgtcctattttaaattannaattaanaataaaattantatagcatttactttatcttacattatacaattaattatatacggtaagatatatatttatatctttattaattatatatcttacagtatatatgtattattatatataatcttataaacatatgcaacaaaaacctacttaaaggacaaattttaataaagttggaaatgaagaattggtttactgttaccattgaaaatgttctctgtttatacaaataaaattatataatgtataattatataatgtaagatatataattacattatatatataatgtaagattacattatatatgtaatgtaagatatagttacattatatatgtaatgtaagatatagttacattatatatgtaatgtaagatatataattacattatataattgtatttgtataaacagaggacattttcaatggtaatggtaaatcatttcttcatttctgactttattaaaatttgtcctttttttaattaagtaggtttttgctgcatatgtttataagattaagtcatttccttttattctaaattgagttaaatgtttcattatcaaataaagaatggacatttacatttgcttttgctaagtaattttagatatctttcagaatatcatttaaatattgttttaagtatatttccattgaggatttctaaagttcatcattgcttgctttcctgagataaactctatttagtcaggatgtcttattctatcaataaattgctgctgttgagttggtagtactatctagtatttacatatatgttcatagtgagaatttggtagagacagataatgtgtatgtatcttctttcagttttattgggatataatttacattccatgatgttcacatgtttagtgttctttttcatgtttttagtatgtttttgcatgtctgcgaataccaccataatctatttttagaatatttttatagtcttaaaaaataaaccttgtaccaattagcagtaactccctatttcccacttctggattttaaacagtgccagaacatagagaaaaaataaactttctaaaaacttacaggaggttatgaagttgtaaagaaaacaaaaaattatccattaattgtagatttaacagatctcatctattcaaattactttgccttgtaacttcatatacacatatacattaattttattgacttatcaaatatatataatctatcaaattttcaaatgtatatgaataaaattttatttaacattttatataatgttttatctattttatctttagttgtatcattttcctctttcctcatagtaatagcatctcctttatttctgtcttgtttatatttgaaaaacaatttattatttatttactagtgtttttcaagtaaatagttttggggatgaatttttgtttcactaagtttgtttctttgtttgcttgtttgtttttgagacggagtctcgctctgtcgcccaggctggagtgcggtggtgcgatctcggctcactgcgagtccgctcccgggttcacgcccttctcctgcctcagcctcccgagtagctgggactacaggtagagacagggtttcaccgtgttagccaggatggtctcgatctcctgaccttgtgatccgcccgcctcggcctcccgagtagcggggatttctggcgtcccnnnnnnnnnnnnnnnnnnnnnnnnnnnnnnnnnnnnnnnnnnnnnnnnnnnnnnnnnnnnnnnnnnnnnnnnnnnnnnnnnnnnnnnnnnnnnnnnnnnngaggcagagctccacagttagtgcctgggggctgcggcggccctccccaccccacacacgctggcctctttcagggcacccagggcagtgcacccaccgttcagagcaatgctccacagttagtgcctgggggctgcggcggccctccccaccccacacacgctggcatctttcagggcacccagggcagtgcacccaccgttcagagcaatgctcagccccctccagtgtccctcttctctggtcaccctgtctttgaacccactggcccggggccacctcttgcttttgggaacccaaaacaacagccaccaggcctgatacagaaggaacactgcttgaaccaggatgatgaagctaaaagggatggatggctggagtgattgccggagccccttttgggcagtcagaaagcccaggaccctctgaggggaccctgggggaggtagggaggataggcagctggatgccactggctatagacttataagtctaagaggggagcctcagcttgttgggggttgcaggtcacaaaggtgaggctgggcccttcctgctgggaaaagcagaagagggagagtccatggcaagggaggtgggtgggcttgctgggtggagctcagccgggccagcatgcactatggtcccctcggctgaatagcagaggcaacctctagaagcaacaggccaaggtgcgtgagtctgctggctggcggtagtgcttcagtgggggccagggaccctgccttcagccacacgctatcagctatgatggtacctgggagggagggaaggggactgtgtgtccctgcctggcctgtgaggtgtgttgtgggttgaccgtgtgtatgggactctcaagtttttatcttagatcaccactggattgtcaacagatagaggaggtgggaccctgactatcacccctgctctgcagtagatttggctctcagcactcccaggctgggagctggatgcccgccctggcagcatgactcggacttcacaacagctacagcgtgcccaggatgacattcctaggcctctggccgcctcagagtacagccctgcacacaaccccctccaagctctcagcccttacaccataaaccacgagctctctgacagctccagagagagcccatgtctgccagcttgggcacagagcctgttccaagagcccacaagctcagccatggaggctagggggctttggggctagtgggggccagccctggtacctgggtccagccgggacgctctgtacctgcagctaggcgtcgtccacgggcccccgtagctgtgctgacggtgttcgtgttgatgttgccgatgatgctgagagcctctttcagcacgtggtgcatgcgcagcatctcgtcgcgccgctgtgcctgctccgccgactcctccaggagtgtcttctcgttcccacgcgagtgcaggttggacagcagctctgagaagatgaactccttggtctgcctgctccgccgactcctgcaggagtgtcttcttgtccctacgcgagtgcaggttggacagcagctccgagaagatgaactccttggtctgcctgctctgccgactcctccaggagtgtcttctcgttcccacgcgagtctcgtcgcgccgctgtgcctgctctgccgactcctccaggagtgtctatttcttcccacgcgagtctcgtcgcgccgctgtgcctgctctgccgactcctccacgagtgtcttctggttcccaagcgagtgcaggttggacagcagctctgagaagcagcatctcgtcgcgccgctgtgcctactctgccgactcctccatgagtgtcttctcgttcccacgcgagcgcaggttggacagcagctccgagaagatgaactccttggtctgagagtgggcaaagaaggaaggagtttgggtcctgatgcccgtgctgccctggcctcccgctggcccctgctgggactgtgtgctggagttgaagccctgagtatggcttttcacatgcggcttctacacagcttaaactcaaagatctgcctccccattgcccttttctcactcagatagggacactgaggtccagaggaaaggtcgcctgtgcaagtcacagatctgggagggcaccctggacctatcatgctaccaggacaactgtctactcaggtttttcaaattttttttggagataggatcttactctgtcgctaggctggagtatagagggcaagatcactgctcactgcatcctcaacctcttgggctcaaagtgatcctctaatgtcagcctgtcgagtagctaggactataggcacgtgccaccaccaagcccagctatttttaaaatttttgtgtagaggccaggtctcactatgttgcccaggctggtctcaaactcctgggttcaagctatcctcccgccttggcctcccaaagtgctgggattacaggcatggaccactgtcctcagtcccatgttatatttctatgagacagctctggtctggaccatgcctccctccctggacctggtcccatagggctggtcagcatctcccccaggccaacatggccacctgcatcctcagtgccacaggagccgcctacccccatgaggcggtgcatgcacattgtagatcatgatatgcatggtggtcttgggcttcgcaccaaccatgaggtcccacacggtcttgttgacaatggccatgtaggagtccaccaggttctgggtggtttccatttgccgctccagctgtgggtccatggagtgcatgaagctgtgggagccattctcctcagccttgctgtcctgtcacggagaacgcaagggcatcagggtggccaggccatgcagccaggctccagcaatccctaggatctcagtccctccaagggtacctggaacattgaagcacagagaaaggcaactggcctgaacacacacccagctccccacatgctctagatggtttcaggcctctgcctctcaggaccccagactcccctgattcatgtctcgtcttagttctgattctagtgcccagaatttgcctcaagttaccaatccagaaattggaaaagaacatctccaggtaccttgcttgaagacctggccagagcttgcgccaggctgcagatgcctggcaggaggcaaaaaaagggcatactcactttccccttgtcctgggaggcccatgcaccaacactgccaccgccgctgccaccagggaacagagcaaagtagacacacacagacaagaaaacgggaagggttgagtgaacctgggacactgcaccccaactttaatgtgttgttgaattcaattagctaatattttgttgaggatttttgcatcaatattcatcagtgatactggcctgtagttttcttttttggatgtatctttagttttggtatcagggtaatattagccttgtagaatgagtttggaagtattctctccttctctatttttggaatcgtttgggtaaggttggtattagttcttctttaaatgtttgctagaattcagcagtgaatcatcaggtcccaggcttttctttgctgagagacttttcattaccacttcgatcccattatttgttattggtctgttctggttttggatttcatcctggttcagtcttggtagtctggatgtgtctggaaattcatccatttttagtaggttttcctatttgtttgcatatagttgctgataatagccactagtgatcctttgagtttttgtggtatcagttgtcatgtttccttttgtttgtcaatgttgtttatctttttaaaaaaataatttttttttttgagatggaatcttgctttgtcacccaggctggagtgcaatggcacaatcctggctcactgcaacctctgcctcccaggttcaagtgattctcctgcctcagcctcctgagtagctgggattacaggtgcgtaccaccaccctgggtaatttttctatttttagtagagacatggtttcaccatgttgatcaggctggtattgaactcctgacctcataaggtacccacttcggccctgcaaagtgctggggttacaggcttgagaatccgtgcccagcccacattttgtttttaaattttacttaatttacttgtttttttcttttgcaaacagggtctcattctgttgcccaggctggagtgcagtggtgcaatcatgggctcactgtaaccttgaacacctaaactcaagagatcctcccatctcagcctcatgagtagctaggactacatgcctgcaccaccacacctggctaatttttctagtttttgtagagaaagggttttgctatgttgcccaggctggtcttgaactcctggcctcaagcaatcctcctgccttggcctcccaaagtgccaggattacaggcatgagccaccatgctgggtctatatatacattttcttttccatgttatataaagtattctgtatgcatcctcctggaatttgtttttctcacaatattatattgctaaagttcttattgttgtttattgctggccttcattctttttgactgcttgtgaaatcaccagaagatagacatcctgagatctcttaagaactgctgctgggagtatacactggtatgaccactttggaaaacagtttggctccatctcataaggttcaatattcacactcctcccagcccagtaattctactctacatggaagagaaattcttgcctatataaaacaggtgatgtggacaaggaatgttcctaacagctctgttcaaaatagcaaaaacctattgcccatcaactggagagtaggtgactaaattgtgctttttattccctttgatttcctgtagtcttacgatgcaagtggctttcccatggctagcttggggagggggatactcttggcaactgagtctgtggtggcagtcctgcttagccctagggcaatcggtgctgaccaaaacaagagtaaacagaacaaggtgccccattgagccaatgccttgagtccctggaggtacagtcttgtatctgtaggaaatagccatcatacaaatcagtcttttcaaatgctctgtcactgggctgagtccaaaggacattctcctttaaaacattataaagtttactgaggctaccatttatcgagcagttatcatgtgcctgatcacgtactagtgtactaattgcatgcattattttattattttatttatttacttattcatttatttgagatagggtctctctctgtttcctgggcgggagtgcagtggtgcaatcacagctcactgcagcctcaagctcctgggctcaagtggtctcacctcagcctctcgagtagctggactgtaggcctaagccaccaagtccagctaattttttaaaaaaacattttcatagaaatgtggtctggctttgttgcccaggctagtctcaaactcctggcttcaagcgatcctcctccttcagccttattattgcatttaatcgtcaccatcaccctgtgagagtggctgggggtaggtgctccactcagtagcaacgtagcaacctccactcataggtgacaatgagactcagtgtagtcaagcaacttctcaaaggtcacacagctggagggtggctgagccaggatgaagacctaggactcgaaagctggtgcaccagtaaatgagaaaatctctgggggttcaggatcgcttcctcccaagaaatctttctccaaaggttctaaaaacaataacaacagatccatctttcataaagcaaacaaaactagcagccccttcattttagaggggggaggggggataaaggttagctaagctccagggcatcccattttaatcctacacatttatcaggcaactgccagcacagcaccccaaacctaaagaaccatgcacagctgtctctgtggggcatggcgtgtccacggacgtaaagattttccaatgtgtgtttacaggccggtggcatcaccctcagtcacaggttaaacggcagctaggcctggcctgctaggcaccaccgtgagaatctgctgagttttccaactagtttatctgctgtttgcaatgaaagacgccctgaaaagaaggggtgtgggtgggaagagttctgatttgaggtgccctgatccggcacgatctccttccccagtcacaggaatcagaggactccatctgtaaacacagcctcaagctctgtcccccaaccccctctttcaaccaggtgccaccctctgcttctcttccatagacagcctaggctgccagcattcccttaggatctgtgccctcgggcctagcttaattttttcctctccaaagagccatctgtagggccagaagccagcaaagcctaactcattactggacggcagttcctctgcctttcactgattcctaccttaccctggggttttacgtttcttgtctcaacactaacatttctcactcctccacaagttgaattgctcactccagccaactgaagcatgctcttcttgacacagttagctctcggcacatggtcggtgctaaaaaaaaaatgatcattatgtcaatttcattgatcaacaaaagtgatgcctccactgcaaagtcaagttgatagtgcctgggcctctgagttcaagagccttctagacaaagcgctctgagctgaaacatgagcatgcacacatatgcatctctctcggtctcatgagataatctggatacttggttgttatccttgagcattttcctacctcattaatgcacgtgtagccaacacaataattatcatagctaataacggctaaagctgaggactttcctgagccaggcagtggctttaaaaactttaatgttttcacatagactctcattgaataatttctgtttttcagatcaagaaactgagacttactatcacatttgggattaagtttaaaaaaaaaaaaaagaaactgaggcttaaagttgtctagtatttcacagccagcaaatggcaaagttggaaattgaaccaggcagtagagccccaggatcctgtgcctttacccattacctagtgttggctacacaaaactagtgtgtacacaacttcaactatagtttaagctatagtttaagtgggtgacatatttttcactacattttatgtaggtgactttcagtttgggggtattctacttatgcaatctattgaggtggatattaactgagaacaaatagaaactaatgaactctgaaaaacataaaacatgagcaacatgatgtcaccgcaaaacacaaaacagcccacagccttcttgtgactgcattttgctgacagtccacgacctaataatcaacctgaactcagcagtgctctgttcccttgggagacacacacacacacactcgggagaaacacacacactacagttggtggttgtgccgccctgagcctccagtaggcgagtgtgaggaatgtagggactagatgggtcgggcagaaaggtgctgggtcaaggggaggagggggcagccgggagcgcgcgcacgctctggactcgtgcaaccgccaaaacgggtgcgcgccgggttgaggggtgacagggaaggtggcagggttggggcagccctttcccaggcggtagcggggacggtggtgctgttgtcctttttctttttcttttttttttttttttgagacggagtctcgctctgtcccccaggctggagtgcggtggcgcgatctcggctcactgcaagctccgcctcccgggttcacgccattctcctgcctcagcctcccgagtagctgggaccacaggcgcccgccaccgcgcccggctcattttttgtatttttagtagagatggggtttccccgtgttagccgggatggtctcgatctcctgacctcgtgatccgcccgcctcggcctcccaaagtgctgggatgacaggcgggagcccccgcgcccggctaattttttgtatttttagtggggacggggtttccccgtgttagccgggatggtctcgatctcctgacctcgtgatccgcccgcctcggcctcccaaagtgctgggatgacaggcgggagcccccgcgcccggccgctgttgcccttttaagctgaggcttgacaggagccgcccctcctatcggtggcgtcggtcgcaaagggagcagcccccgaggccgccgcgcagctccccgccgaggcctcggtgccccttcccattttccatccgcgctcccacgaaggttgaggcggcggggagaggcgaagccgcgagcgctcggccgggcggtcccgccgggtggtcgcagccatgacagcggctccccttccgcgcccctcccgccggagatgagggaagatgtccctgtcagggttaaggccaagctgaagttgctggcgtctaccttccacaagaaccaggagccgcagccgcggctcacgctccactgcaacagacggtggggcgcgcggcggcggcctcgcagggcagggcgggggcgcagatgggggagtctcgggaccaacggcagcctaacgggtagaggccccgggtccccgccccttcctccctcagctggccccgccccgcccccgggactgcgcgaggcttgggtgggaggaggcggagggcgcgtctctccggctcctggcgcggggctgactcgggggccgctggcccctcttggccgccgtcgccacgcaccgaggtgggagcccgcggcggccggagccctcttgggacccatggtcgccctcagtcagcgggactgctcccgggaccgcgacggggcggggcggggcgctccagcgttgtttgagcccaggcgcggaagggaaaaggcctctgagatgctcgcgtgttttgcctgggcgcggtggcgcacgcctgtaatcccagcactttgggaggccgaggcgggcggatctcctgaggtcaggagttcgagaccagcgtggccaacatggtcaaaccgcgtttctactaaaaactacaaaaattagccgggcgtggtggcaggcgccttagtcccggcccctgggacccccccgcggggccctggccccccccgggaggcggacggcccccgtgagccccgattccccccccgcccccccagccggggggcaagagcgagacttctcctcaaaaaaaaaaaaaaagtttttttttcttttcttttttttttttttttgagacagtctcactctgtcgcccaggctggagtgcagtggcgggatctcggctcactgcagcctatgtcccttgacagtccacgggttaaagagattctcctgcctcagcctccccagtagctggattacaggccccgccaccaaggctggctaacttttgtgtttttagtagagagggggtttcaccgtgttggccaggctggtctcgaactcctgacctcaaatgacccacctctgcctcccaaagtgctgggattccaggcgtgagccaccgcgccgggacccaaggcccttaagttttaaggcctcattcttcagtcaggttttccctgttcccgcgtgttcggccaattttttgttgttgttgttttgtttttgtttttgtttttgagtcaattttccagacatctttaattagcaatatgtttaagtagttacaagcctttccttcttttcttgtgacagtttgggttgaatttctatcgtttgcagcctgtcactgtaaggcacaaacatgatcacgcaagatgcgatagtagatttaagccagttgtttttaagtttgtgtttaaggagaaactaacaatgaaaacggcctcgttgacggaggaaaagttggaatgcagcctctggtgctgtttgagcgatccctctccccggggcctggccgcgcgctgctgtgttctggaagggctcattgtacagtcaaggcggcaggtaagagtcccgtacaggtgtcttcgcgcttttcctttcaggcttctgtgtgagctgtttttcccctgtaggatgcgtccctgacctccaccccttcaccctacccaatttgtctttacatgtctgaccatcaaggctctcctgggtcgtattcagttcatgctgatattttcccttcctcccctctttggtcctcactgtttttgctttggtcatgttatgctatattctgtaggcctttttaattttttttttatggtggcaggggaaaatattttataattatgctttgtgctttttatcttccagtcagtaaatgcttggtaaatatttgttttattgagtatatgaccctattctagctatatcgtgcttgaacagaaatcttaactgccttgaaagttaactgctaagaatttgtcaaaagtgcagagctacatcaagaacttgtcatggatagtacaaaaaggtctctaagggcttgaaggaagtctgtaaattgatttcatatgaaagagagcgtaagaagtgaaaatgtaaagcatgactggagagccagagagataaagcaagggtccctttctccagatcctttgtaacagtattatgtgatctcttttagaaatcactctgaaagataatgccaactcggaacctaggaaaccatccagtgggtttctgcaggttaggtggttcaattcctcatcagcaccgttgttttctctgcctcagtttgcttacagtgatgttctcagtagctgtaattactgtctgtctttgaaagcattttttttagctcacaggggtatatgtgcatttttatttaaccaagtgttagaatttctactctgctgttgtgggctctgggttagctactttggttgtttagttgtaaaatgattagcagggaaaaccgtgtgtgtgtgtgtgtgtgtgtgtgtgtgtgtgtgtgttttaagtttcttttgttgtcagagcacttagaattttattttatatggtaattctgtcagtttactttattctccaccccacatttattgaacagcaaagtatgaaagtagtgtcccataactagctttcagaagaattacaattgctgtatatctgaagttcttttcttttcttttcttttcgacggattctcactctgtcacccaggctggagtgcagtggcacgatctggtctcactgcaacctccgccacccaggttcaagcgattctcctgcctcagcctcccgagtagctgggattacaggcacctgccaccccacctggctaagttttgtggttttagtagagacggggttcaccatcttggccaggctggttttgaactcctgacctcgtgatccacctgcctcggcctcctaaaatcctgggattacaggtgtgagccactgtgcctggctgaactttcaagaagaagtttgtgtatcaattttcaaaaaactatcatatcaaaagagagctgtgtcctacatttggaaagatacaaaaactgaaccttctggcaggcagttttgcttgctggagcttgagatagagccacacattggcctcagtggatttatggagaaaaatagatacagaaagttatttataaataagaccaaaaaatccttttcttgagcagtgacaggtaaagaggttgtcttggttaaccttgaaatgtgttgcccttgatcaagacagttttatggtggggatggtagtggagataaacttgtttgacatttgtccacttatggtaacctttgtggtggctgtcacagacaacttcatcctcacagaccttaaaattactgtaaaactaatagaatggaggagaaacaagggacctgaataattagatgcttagataattgtaatgtgttttcataactggtgaaaaacagcagtgttagaagcacttaaacattctatgtaaggaacactgcctgaatttatattgtgatttttgagcaccattcactgtttaaaaactggcatattgtaggtcatattttaaagacaaatagaaaacttatcttttcaagattgatataaagcttaaccttatcaaaattacaaaatttaaaaaatatgattgaaaaatattaatgcataggtttaaatattggtcatcattttagatgtctttcaaaatagattgtcttttaaatattaaactgaacaaactttgaacatgttgtagagtttgtgctgaaggttaagtttcctgtggtggtggtggtggatattttataatatggataacaaaaccttcttattttaagaaatttagaaaatttttaggcaaaactagaaaatattactgataattctaccactcagaaggtaccactatcagaattttgtattttttcagtcatctgcgcatctcttttctcctgtgtttgtatatgttccctctcccttgaaaaatcagatttttcttgtaatctgctttttcactcaacaatattgtagatccgtgtcataacttactcctctgcagtggcttcagttattgtacactttctgttagatgattataccatctagtcagtcatgtttcctggtactgaatacataggctgtatgtgtgtgtgtgtgtgtgtgtttctaccttaactaatgctttagacatcaataggtagagctgaatacttgaaaccttccaagtggtggctttcagttctcattgctgaattggtttctagagatggaacaaattatattgtatggaaagttttttttgtttttttttttgagacttagtcttgctcttgtcacccaggctggagtgcaatggcatgatctcagctcactgcaacatctgcctcctgggttcaagcgattctcctgcctcagcctcccaagtagctgggattacaggtgcctgccaccacgccggctaatttttctagttttagtagagatggggtttcaccatgttggccaggctgatctcgaactcctgacctcaggtgatccacctgctttggcctcccaaaatgctgggattacaggtgtgagccaccatgcccggcctttttttcttctaggtaccagcttgtatttatcagtttggtaagaatgttagaaagtgtgcaataaaatgggcagtctcacagtcatggcacaaagtataattatctttgactttctagaaagcagtttggctttctagaaacttgcctaacctctccgcatttaggcaagatgaattctgactaccccaaggtggccaaccttgtccctgtgattccagatctcccagaaagagaggtttagtctcagggaaaacccacattttcttggcttagcccaccttgacagctaatcactggaaatcgggtgggctggtcagattttgtgtcaagagagggaggtggaaagatgggagggaggtagcaaaaccggcctcagtggaactctgtaagttaatatggaatggcaaagggatgtttcttccaaggaagaagttctagggaaggaaggtaagtggaggggaaggcagcagttctcaaagttttggaatcaggactcctttatactcttaaaaatatattgagggcccaaggagctttggtttatgtaggttatatctattggtatttatcactagaaattaaatcagaaatatttaaactattctttaaaagctcatcacatattgttataaatgcttttatgaaaacatttctaaacccaaagtagcacagtcttacgttttttgcaaatttctttgatgtttggtatgtcgttttcatctgcattcaatttattgtgtgatatttgcttgaaaaaatgtgaacaatgtccaatctcatacagatagccattttagattattgtggagatatatatatatatatatatataaaataatatatatatattttttagatggggtcttgctctgttgcccaggctggaatgcagtggtgtaatcacagctcactgcagtctcagtctctggggactcaggtgattctcccacctcagcctccagagtagttgggactacaggtgtgtatcaccacacctggctaattttttctatctttttatagagacaaggttttgccatgttgcctaggcttcttttttgatactccatcaaaacttggtttttcttgaactttggatcttttacccttgcatgatattataacatcgtgcattggtcatttagaaaataatggttcaccaagatcttctacgtgttgatacatttgattatataatatcaaaatacattcatcaatatcaccatcaatctcatcagaatacttttggaaagctatggtgtatataagttttctaaaattctaattttttgttcaaaagcttgaattttattattgaattttattatggcctgtctgttgtttttcttgaattgacaaaatctcattttttgagaaaatgtctcccaaaaacccaagttgaaataacattgtttgtcagtcatcctttcaagtaaaaatggtattccattaaagtggttaattcacttcacaacttagtcacatgagggttttttctcaggcagtctgtagaaatgctcatgtgtacttccaatttcatcacttgaaatattaaaaagatatattcaaggatgaagatgtagtacaattttcactgcttcatcatagacattctttttattttccaacagggccttcttctgtcacccatgctggagtgcagtagcatgatcacagctcacggtagcctccaccttctgggctcaatcctcctacctcagccttccaagtagctgggactacaggtatgcaaccaccatgtccagctaaattttgtactttttgtagagatggagtttcaccatgttggccagactggtctcaaactcctgacctcaagtgatccacctgcctcggcttcccaaagtgctggggtcacaggcgtgagacaccatgcccagcctgcccttcctttttaaacctttcctgtgcatagtgaagaataccatgactagtttggtgttactgcctttgtttgtgctgaagtaccagcatttttacccactattgtatttgcaccgttacagcaaatgtcaccatgttagtattcacgttaaaatagtttggacctgggcgtctgagggccccactttgggaaccgttgaaataggtacttaaacctactatatatcatatcttgtcatctacaagatttttaaaaacatgatttcagttaattttttttgtaatttttacaatatggttttgaggggtttcagtccagagcaacaacatgtattttatttagcttatgctgaagtttactagataaatactaacctaatagaatgaggtcctaaatctttttttgcagtttctttagccaaaaaaaaaaaaaaacccaaaactaaaagcataaaaatggtccatagggtgtattcccaatgtatgctgaagaatttgaagaagaaaatgcaatactcagtaagtggtgttctttatgaataggattaattctgaagagtttcttttagcctgtgaagggatttgggacatagtaagagaggaatgagaagaatgagaatagtaaaataaaccattattgaagagatatactgttaatgatgtcctccttccatacaacttgtttttttctttttttttttttgagacaaagtcttgctctgtcaccaggctggagtgcagtggtgcagtctcagctcactgcaacctccgcctccctggttcaagccattcccctgcgtcagcctcctgagtagctgggactacaggctcgtgccaccatgcccggctaatttttatattttattttagtagagacagggtttcaccatgttggccagggtggtctcaatctcctgacctcgtgatccacccaccctggcctcccaaagtgctgggattataggcgtgagccaccgtgcccggccaacttgtttttcttaaaagaacctttagtaaatatttggcttctgtggcttcaggtataattcagattactgttttcaaagcagtgtttcctaaagttgtttgtgcgaaattgtttttgtgacttgaatctagttgttctgaagctaatatataataataatggcttccccccaatttataatagcaaacagtacaaagtaacagactattagatgagggatggaaggagaaggacaagggttgaaaaagtattgcatgctatgttcaccatctggttaatcgatacatttgtactccaaatctgagcatcaagcagtatcccatatgcagtaacaaacctgcatatgtacccactaaatctaaaatagattctgaaaaaaaagttcatccatatcagcaataattgaattgaaggtgtaaaactgtaataaaaattcagacactacaaagtatcttgtagttaagctacaaaaaaaaaaccctaaaaccatctatatagaaaattttaggaattgatcttaaaggaaatccaaataagtagaaaattatcatgttcatgaatgtgataacttaatattaaattacattatttttccaataaatctaatatgatcattgattttaataaaatatttgattctaaaacgtgcatagaatatttttaataaataacttgattaatttttaaaaatgcagagggttggacttgccttatcagacattggaacttattacaaatatatggggaaaaatgtggtaactggtgaagttttagtttccattaagaaatactggatatggccgggtgcggtggctcatgcctgtaatcccagcactttgggaggctgaggagggcagatcatctgaggttaggagttcaagaccagccctgccaacatggcgaaagcccctctctattaaaaaaaaaaaaaaaaaaaaaattagccaggcgtggtggcgggtgcctacaatcctagctactcaggaggctgaggcagggagaatcacttgaacctgggaggtggaggttgcagtgagctgagattgcaccactacactccagcatgggtgacagagtgagactgtgtctcaaaaaaaaaaaaaagtgctggatctcagcggcaatggaaagggaaaggaaagttactgatggcaacatattactaatggtaaataagcacatgaaaagatgctcaatatcatatgtcattagaaaattgcaaactcaaacaatgagatgccactgcatagctattataatggccaaaatccaaaataccaacactactgagagctggtaaaaacaatgagcagaaataacttactcattgctagtggggatgcgaaatggaacatccactttggaagacagcttagcagtttcttatgaaacaaagcacactcttagcctatgattccataattgtgctccttggtatttgccaaatgagttgaaaacttatgcccacataaaacatgcacacaaatgtttgtagcagtgttattcataattaccaaaacaaacaaccaagatacctttcaacaggcaaatggaccaatactctatggtgtagccatacaatggaatattaatcagttctgtatagaaaaagagctatcaagccacaaaaaggcatggaagaaccttaaatgcatattactgagtgaaagaagccaatatgaaagcctacacactatgtggtttcaagtatatgacattttgaaaaaggcaaaactgtggagacggtaaaaagatcagtcatttccaggggttcctggggaggaaagaaaggaggaataactaggtagagcccaggggatttttaaggcagtgaaactattattctgtgtaacattgtcatggtgggtacatcttattacaccctgttaaaatccataaaatggacaccacaaagagtgaaccctaatataattatgaactttagataaaaataatttatcaacattggcttatcacttgtaacaaatgtaacatgctaatgttaaaaataccataagatgttaaaaataggagaaatgggggtggggtgagagagtctatggacacgcactttaattttcactaataccgtctgtaaacctaaaacagctcaaaaagtaatgtctattaatttatatatatatataatatatatgtggttattgcaatgtcttattgcaattaatacacagtgagagattgtgtctaagaactcacatggtctttaatttgaataacaacattgaaatactatattagcgtatttataaattaagaaaaagtaaatttttcatatatgaattgtttgtaacactttattgaaataacacccacatcaatcctcatcagttctgatgcccacataataattaaaagcctccagcaggtccaatttcattcattcctagaaccaatgagtttcactctagcaggccatgagtagcagttcttcaactgacaatgatatctagaaagggaaaggtatgttctatttctttgtgactagtgtcctaagtcatggagacagaatcatgggcttggaagtaacatcatcttccaggctgctgtgtaactcacattcccaaggaacagactgtctgggaaaccctttggtctccatccttgggatttcttcttctcctctacatttggtttctctttctctctttttctaagtcattttttctttttccgaccaatgatgtttgtccttttgtcctaggactggatctcatttatctttctgggaatagcgccatctctaaagactccaagttaacccacttcatagctaatcattccagtctagacactaaatattgcagtgtcagtcaacattcccagggccagatcttacctcacacctcagggtcataactctcttgactacattgggttctgtcctacttttctcattcttggccatgtgtattttgtcctatcctgggaacaaggagaggaggcaagagctttctcttgcatttccatgttaaccttactaccacattcttcccagaaagccaggaaatacaatgccaatgttttccattcagtttatatttcatgtataattaacttttgtgttgaacatgaataaactgaaaatttcttgaaatagaaacaatttgatagaattttgtgggtacagtacatacaatccatgtccaataaattactgacatctaaacttgttatagatcttttgttccatcatgtactaattcagtaattctattgcaataaaactaacatttgtttgttataatttgttctcggtaagcctttttctgtgttttgcttgtggttccattagcttctagatgagcgcttttgtatatctaatttagaagctttacattaagaacagtaagagaaaatcctttaaactgtatttccacttaaagtaagattataataacatatgctccaccacatatagatgttcacaaaacataagcaagtatgaatattttttcataaccacttatgaagaaatagcagggctcctattacatgtactgtaacgaatgataaagtcataaacacatactatgcaaagtagcaataggcaaatcagagagagagagagaaagagagcacaatgttgcttccagaagacactgaatttattgctaccactgaagaaatttttggaaaggatgaagctttttgctaacgtatacgataacaacagcaaaaggaataggacctggaatcttcagttgaatcagtctatttataatctcgtgtaagaggtagagagaaaacataggtcattgctttctcatcattcattaattcactcactcattcaaaacacaaatagatgcatgctctgctagacactgtagatacaaatggttacaacaatctctcaagtttctcaaagccagtgggggaaataggcatataaacaacaaatatcatgcactgtcatattggacacttgaagactgcctattggactgtgggactacaatataagatactgtcaatttgtcctaagaaggtcactcacgggggagtgaaaactgaattccgccacaaaggaatagtcaaattttccaggccagtagggaaaatgctattccagatggcaggaacattgtgagcaaagttaaggatcaaggaaaaaatataagtatgaagagatgaaagtagaggcacgttgttcagtacaagggtggagtatttggtggagagaaatgagaattagggagagacagacagggtcagataaaaaatggtcatggtccacataaaactaaagagtttagaatttatcatgagacaaataggtgtcattcaaagatattataaggtacaacatgatgagatttgcacttcagaaccgcagccctgatagtggtttagaggctggattacaggtggggatggaggagctgtggtggaggccagggtaggagagaaaggagtgtgaggagtggtggggtgagtggggtggggatggatttcctaaaaaggtgatagaggaagagagattgggttgggacattcagaggtgagaacagaaggaaaaaaaaaaaaaacagatctaaaaggaaagagaagtgataggcctgtgtaccagtttgaataacaatactacaactgtttatcgagagctcatgatgtaccaaacatgatattttaatcctcactacaattaattttgtaaatttttttatttttacttttatcagttgatattcagaggagttaaatcgcttactgaaggccatgccaattttaagtgaagggatgaggttaaaactaaatgctactagatacagagctgatgtcctctcaactacattctttggccctcttaactggatcagcaacaggggagagggcggagactagaatagctcttcacagttctctggatctgcttggatactgtccagtttggaggaagaagatgaattaaatggagatatctgagggatattcaggtgcaaaagataaatacgcagttggatacatgggtctgaagaaggttcctggtgacactggttggtagatagactgagagctgaaattcacctgcagtaattgttactctgtgtcttcctgttgaatttatgagtcagatcaatatatattttcctctaccttttaaagttagaatttacaatacctacctaatagttacttcctgcagagtaaaaatattttgtattagtttttcattggttgtattatttattaatgatatcctcaacaaatatgtgttcattaaccattgggtgcattgtgcaaattacaccacactatttgatggaaagaatgaggtctcttcttgctaaatagttctagtcatctcccttttatagtttcctttactttgtctttagagcaatttatttttctattcattattcatcttattacatgttctttttggttcactttctctaatcctgttttgcaggagaaatattataaataaaaacatctgtatataactataaagcttacactctcatagctcgcacagagtttttgcaaaagcaaaaagataaaactttagctctttgtaggtatgatttttgagttgagatggcaggaaaatttagtgagattttgatataagagtaacaaaagggagcctctagggacaaagcagataatacattgagagtgaacagaaattatttctcagcctggctctgccatggcagttcttgtcccttccctataattaattattttctggtttaactgagaaaacatgagacaatctcaaatttcctcagagctagattacaatattccattttatcagccctagaacaacatgaacagaagctttagtggtagtgttatagtctatgctgaggtttgttagcagtgcatcattacctaagagatcgctgcttagttcagccagttaactggagctcaccaaaatgttctgctcttgaaagagaaagcgggggagaaagggtgggcagagagagagagcaagacagagctccttcacagagcaattcatgtaaatgcattgtccaatggccctgagatccattaattaaattaattagacttcatagcatttgctgatgaaacatgatgaaaaaagttggaagagaataggaaacacatacactgcagcatctggttttgccagagttgggcccttgagaattattaagtgatagtttgacataattcagaattaataaaatctgtctgccccctgaaagtgtgcattttcataatttaagtaatgcatgctaattagcttagatcaaaatgtgagctccattgttgcctacaagttagcatgacttcatgactggtgatataatagtatcatcaccccagggaaggatatttctgtgaaattaagtagtatagttctatctgaaaaatcctgctaataaatacaggccttattttgatattttggaattttatagggaattaaatacaatacaataatgcatcctactgaggtcagacagctgagaaaaacaggtcagtcaaatcctcattcctgtgaaatttaccagtgggcttttaaaatggccaaacgttaaagtatctagcatgatgcttgaaatataatctgtggaaatacactaaactaaaatgatcttgtccagtctcatggtttcaaatactagccccatgctaacgatcaaattttgtatgcattcaaaactcctgaactcagatttagatatctaacatcccgactggtttcttcaccttactgtttcccatgccaaacttctttcttttcttaatccatttcccccaccttttccattatattaaacgtaattaaatagggatgtttggctgaggctatgaaatttgactcacatcacatgccaaattcatcaccaaatcctgtcaactctactttaaaaatattttcaaagtatgaccacctcttactactaccactctagttcaaatcatcctagctctttcctaggtgactgcagtaacatctcactacctagatctaccctttgtcctatagtcaattcttatctcagcagacagcagactattaaagctgtgaaccatatcagcctccatttcaagtgccttcagtggcttccatttcacctccagcaaaatggaaatctccacaatgacatctaagactctccatggttggtcccccttcttgccttacaactaaaaactcttctaccatttccactgtatttactctgctgtagcagggagacctatttgctgtcccttaagtaaagcagtctttctcctctggtctttgcatttgctggtcctgttactgggagtgttctttttcccatccacttgatgacttccctcatctccttcaagtctttgttggaatgttcttacacagtgaggacttccctggccaccatatttaaaacagaatcttcagtcccatgtccagcactctttatgcaccttccctgttttataatagtttgagaaaatgagtaagtgttttggggacacagtacttactatcacctgatataattaggcataaaactgtatttctgaattattttctttcttatgtatttgtttgcctcctgtcataactaagcatttagtgaagattgtctattttatccacaatggtattcctaattccttaaaaagtgtttggtataaaacaaacatacattgaacatttgctgaataaaagaattatatgtaaaattatggtcaggcattatttgaggggaaaactcttagtctctaaacaaatttatttggatacctggtaaattatactataattaatttgggaaataaacttgttcctcttatgtcaattgaggaaagctttggcaggagcattctgcttcatctccaagtctttttcttcaaagcctattgttatttttttcaaatctgaccaccctatgagacccacccagctgaagattagctgggatgcccagttcctgttctcactgtggggtgcccgattttctgggcaatctgtgagtagataaagcaatgggatggggtgaggttacaggcatcagcccattctaagctttgctcttcaacacatactgtcctcctgagccagaatgcagaccgtggctacttttgcccctgcatgtctgttctgattcctttcttcacatgtgatgcctcactattcttctgcttttaatatggagcttcattctctaagctaaaaggccaagcacagattcacctgccaatgaagctctttaaattatctcttctttctcaggactcactggctgtaaagtccatggagcaaaaacagaatttgctacttttcattgacattgttgtagttgagttgtgtttaactaatttgttaaatgaactgacactgtacattctccctataaaataacagtgtgttttctattatgtctattgcctcaacttagcattatgttaacttatttacaagccagtttatttaggttgtattcaagttagtctttggtgacataaataaaatcagtgatgtggtcataatggagtggtgctatttatgtaaaaatatgttgggtcttgaaaagattagaaaaagctaagttgattaatgtgagggctaagcaatgtaaaaattttaagaaaaaattataaaattagaataataacaattttaataagctaaaaggtttttgcacttctgttactttaaatttttgttctactttaaacaaataaaaatttggaattctaattgacttgttatgataataatttatacaaagaagacaatgtatagaaactccagttaataaagtgataatcaaagggtcctgggcttatatcaaaatattggccaattaatttacatttgtggtttttttttaaccctgtgatcctcctccttaactcattttttagattaactatcaaaaaactggtctcaattatatttgaatagaaggtttctactgtattgttctctaacttgaccatgttcggtacccttaattaaaatatataattctttagtagttttcatagatgttttctttctaactggttatatgaaagctacccaaataatgggcaggttgaatagtcgtggggtaggctcaatgttgatctgtggaatgctaccataggtatccacaaacctaagacacaaaaacgcacccttagaattattatctgcttatcagtagaactgtgactgaacctgaggcttgcccgactccgtacttcttggtgttattcacagcaccacagcctaatcttgcttgtttctttatttgaagaaatcttgaaaaagaattgcattctttgatttttctagttaattaaaaatttcacctgaatcagcaatatcttactgtgatggcaattgcatcttctaaaaaagcacagtggagatatatttggaataaatatatccagatatttaagtagtacattctcaaatatcggagtagtatattctacgaattatgtctgcaggcttagaaataaccttcatataatgttaataaaaaccaaactaagtagctattcaaagtatactcacggcattggacatttgggggtaattttcaccaaccaacaatgtctgtattagtatctttatatgatggtattgttatttctatagtcttggtcaacaaaatttactcatgtttgatataatttccacatacccatagcatgtctttggaagtaatgcagtgcttgaaatttaaggaaaaaatatctggttaggattccaaaatataaactattaaataaaatagtgctatttacttttaagatgaggacagtattttgatggtacagattatttcatcatccaggtattgagtctagcacccattagttatttttcctgatgatctcccatctccctgtctccactctctgaaagtccccagtgtgtgttgttcccctctatgcgtccatgtgagttctcatcatttagctcctacttataagtgagaacatgtggtgtttggttttctgttcctgtgttagtttgctaaggataatggcctctagctccgtccatgtccctgcaaaagacatgatctctgttctttttcatggcttcatagtattccatggtgtatatgtaccacattttcttgatccagtgtgtcactgatcgccattttggttggttctatgtctttgctattgtgaatagtgctgcagtgaacatatgcatgcatgtgtctttataatagaatgatttatattcctttgagtatatacccagtaatgggattgctgggtcaaatgctatttctgtctttaggtttttgaagaattgccacactgtcttccacaatggatgaactaatttacactcccaccaacagtgtataagcattcctttttcttcacaactttgccagcatctgttatttttttgactttttagtaatagccattctgcctggtgtaagattgcatctcattgtggtcttgatttgtatttctctaattatcatgaatagacagttttgaaaattttacaatcttatgaagacaaattaatacagaattttctgagctagggtgtaaacggcttttctggggcaagattatagagattaagaaaatgaggtagggagaaattgagctacattattgtcaagtttagcttgctgggagttaaaacaaaacaaaaaaacaaaactgaagtcttggacttattaataactattcctggcttccttccctctgctaaacatggattgtcagatttctctctgtgagttgtcctcatccactactagagtcagtccctgcactgtattccctggcaatgattttgcaatgagtttcattcaggttcttaacactttaggataatgtgaacgttctcctttagcttctctctgcttccaatgtcttccatttctatcttccctgcacacagaacagtttatttatctttcttaaatacggcaactactctcaattgtctagaggataaagcacaacacttttaaactttacccaactagcctagaaaaaaatttctcatatttgttatctcacagatactagaatatattgatttatacctacttctttttcccacacaaattagcccactatgaataacctccacagtctcttttttgttgttgttgttatctatctgaattctgcccatttaaggtaaactgatgtctacaattactcctgctcaagtacttctagagccttctaacatctggtatccaattccgtctttaaagtacctacctactaccatggtttcagttttcttgactgtatcctaacagaaaaagtagtacaaagggatcacaaatgcagaataaaagctagaaacatagaatgattaatactcacaaattttagaggaatggatggatagtttcattgtaattgaaagtgcggaggatttctaagaattagtagactttaaagcattatttcagtgaatccgtggctgagcacctactctaatctgccatcagccataacgagaaaaggagaataaaccacggattacaaggccttcccttcaaggctggtcttgtttatttctgaatgtcttcacagagaactcagttctaattttgcagagttttatgttacatgcataggacagaaaatagtgactagggaagctctgagatttctagcatgcctgttgaataaataatactattttttcaactttcttactgctttcatcttaggatctacagcactctaaaatactagtcaaacttcagaatactcctgtactaagcttatgggtgatctttttctgagatttactaaggggaaaatttgatggatcgcaggctgccaagcaagttccctggaagatgcagatcagaccaaggagcagcctttttgccacaacaggtagtcatgttactgcttcaggactgcaagatggaatagatgaaaatgtgttcatgtaggtggccttaagaatgtcacacagaatttgaaaagtgagagcttatccttagaaaaagaaaaaggctaaaggctggtagacataagagataggactggagacttggagaacaggctgatatcttcttaaatgctgggcagactttaaaaaaaattctgtggtctgtttttgctaactagaccctatatactcttcttagtaacatccttacatggaaataaccatctttgtgccattagttcagtctcagatggaaagaatgagaaatcatctaaatagagatgcagaaaagatttagcaggatgaaaagaactgaacagcaccgagagatgggtgatatatagttctggaatcatacattcaaaacacaagctggtgagacatttagagaaaacactttgcatgcacttgtcttcagccctctagcccacgaatcaaagcagtgtttcaggacaaccaagggttctttgaatcatctctcgtattcctgtgggacttccctagtctttggatccctcacattgctcactgctctgtgtctcaagcctcgtctccttgacatccatatggattagctttctggctgccagtttagcaccatttccttgattctgagaactttacacataggtatcctgccatttacattccacatggctcctcacacatgcgtacaacatccatcaattcatttctttataaatctgaaattcagtgagttccaaccatatgctaaggactgtgctaggtgctggatatcagtagtgagcaacacactgatttttaggagtttatgtgttaagaggagagggactaaaatattaaaaattatttaaacaaaaagtatttgtataaacgtcatgtagaaaaacatagaatgtttgatggcaaataaaactccttatctagggcttcaggtgcattgtcccagaggtgtcacctctagactaagacctatggctattgaatttgaagggacatggggcggaatagagtggcgaggactcctgggtaggtgccttttgtgaaattctgagttaggaaggatctgttctctttgaggaatgagtgtaggctaatgccactggagcagattaagcatgagggaggaaggcttcgtcttgctctccaagaggacaaatgcctgggtagcagaaaggaaaatgaaggaaaggaaatggattcaactgctgatttggacctggggacaattcagttgagggtgtgaggaaagtgaggtggccagtatggctccatgtttctagatgaagaaaggacatctgggcagcatctgcctgatgttggccaagcctatgatatacagcaaacaggtgcccagtttcatctgtcaagaataatataaaatgtagcaatacttgttcccctattcacatatttctgaaaataagagtgtgtgtgtgtgcctgtgtgtgtaaggtgtggaagtcaagaaaaggctgctgtcatgatctctgggtagtttttgagaaaggaggaaaggcccaggaaataaaatgtaaatgagatgcatagtaatggtgaaattaaaaaatggagtcggaagtaaccatgaattagatcattaaggcagaatgttctggaagaacatggagaggataaacagcttagctgagttcttgattacatacagaagtgaaacccttgcatatgcacaaaattatattaatataagaagtctttgatgtgattaaagtcaagacattaaacttactgagcatatatgagtcattatttgaaatttttgtatattcaaattaagttgtattatttttctggatacaatttttttatatatatatttttattatactttaactttagggtacatgtgcacaatgtgcaggtttcttacataagtatacatgtgccatgttggtgtgctgcacccattaactcgtcatttacattaggtgtatctcctaatgctatccctcccccctccccccaccccacaacaggccccggtgtgtgatgttccccttcctgtgtccaagtgttctcattgttcaattcccacctatgagtgagaatatgtggtgtttggttttttgtccttgcgatagtttgctgagaatgatggtttccagcttcatccatgtccctacaaaggacatgaactcatccttttttatggctgcatagtattccatggtgtatatgtgccacattttctcaatccattctatcattgatggacatttgggttggttcctagtctttgctattgtgagtagtgccgcaataaatatacgtgtccatgtgtctttatagcagcatgatttatattcctttgggtatatacccagtaatgggattgctgggtcaaatgttatttctagttctggatccctgaggaatcgccacagtgtcctccacaatggttgaactagtttacggtcccaccaacagtgtaaaagtgttcctatttctccacattctctccagcacctgttgtttcctgactttttaatgattgccattctaactggtgtgagatggtatctcattgtggttttgatttgcatttctctgatggccagtgatgatgagcatttttttcatgtgtctgttggctgcataaatgtcttcttttgagaagtgtctgttcatatccttcgcccactttttgatagggttgtttgttttttctcttgtaaatttgtttaagttctttgtagattctggatattagccctttgtcagatgagtagattgcaaaaattttctcccattctgtaggttgcctgttcactctgatggtagtttcttttgctgtgcagaagttctttagtttaattagatcccatttgtcaattttggcttttgttgccattgcttttggtgttttagacatgaagtccttgcccatgcctatgtcctgaatggtattgcctaggttttcttctagggtttttatggttttaggtctaacatttaagtcttcaatccatcttgaattaatttttgtataaggtgtaaggaagggatccagtttcagctttctccatatggcaagccagttttccgagcaccatttgttaaataggtaatcctttccccatttcttgtttttgtcaggtttgtcaaagatcagatagttgtagatgtgtggtattatttctgagggctctgttctattccattggtctatatctctgttttggtaccagtaccatgctgtttcggttactgtagccttgtagtatagtttgaagtcaggtagcgtgatgcctccagctttgttcttttggcttaggattgacttggcaatgcgggctcttttttggttccatatgaactttaaagtagttttttccaattctgtgaagaaagtcattggtagcttgatgggggtggcattgaatctacaaattaccttgggcagtatggccattttcacgatattgattcttcctatccatgagcatggaatgttctttcgtttgcttgtgtcctgttttattttgttgagcagtggtttgtagttctccttgaggaggtccttcacatcccttgtaagttggattcctaggtattttattctctttgaagcaattgtgaatgggagttcactcatgatttgactgtttgtctgttattggtatataagaatgcttgtgatttttgcacattgattttgtatcctaaggctttgctgaagttatttatcagcttaaggagattttgggctgagacgatggggttttctggatatacaatcatgtcatctgcaaacagggacaatttgacttcctcttttcctaattgaataccctttatttctttctcctgcctaattgccctggccagaacttccaacactatgttgaataggagtggtgagagagggcatccctgtcttgtgccagttttcaaagggaatgcttccagtttttgcccattcagtatgatattggctgtgggtttgtcataaatagctcttattattttgagatacgtcccatcaatacctaatttattgagagttttttgcatgaagggctgttgaattttgccgaaggcgttttctgcatctattgagataatcatgtggtttttgtctttggttctgtttatatgctggattacgtttattgatttgtgtatgttgaaccagccttgcgtcccagggatgaagcccacttgatcatggtggataagcttttgatgtgctgctgtatttggtttgccagtattttattgaggatttttgcgttgatgttcttcagggatattggtctaaaattctctttttttgttgtgtctctgccaggctttggtatcaggatgatgctggcttcataaagtgagttagggaggattccctctttttctattgattggaatagtttcagaaggaatggtaccagctcctccttgtacctctggtagaattcggctgtgaatccatctggtcctggacttttctaggttggtaagctattaattattgcctcaatttcagagcctgttattggtctattcagagattcagcttcttcctggtttagtcttgggagggtgtatgtgtcgaggaatttatccatttcttctgtattttctagtttatttgcatagaggtgtttatagtattctctgatggtagtttgtatttctgtgggattggtggtgatattccctttatcattttgtattgcatctatttgattcttctctcttttcttctttattactcttgcaagcagtcgatcaattttgatgatcttttcaaaaaaccagctcctggattcattgattttttgaagggttttttgtatctctatctgcttcagttctgctctgatcttagttatttcttgccttctgctagcttttgaatgtgtttgctcttgcttctctggttcttttaattgtgatgttagggtgtcaattttagatctttgctgctttctcttgtgggcatttagtgctataaatttccctctacacactgctttaaatgtgtcccagagattctagtatgttgtgtctttgttctcattggtttcaaagaacatctttatttctgccttcatttcgttatgtacccagtagtcattcaggagcaggttgttcagtttccatgtagttgagcagttttaagtgagtttcttaatcctgagttctagtttgattgcactgtggtctcagagacagtttgtcataatttctattcttttacatttgctgaggagtgctttacttccaactatgtggtcaattttggaataggtgtggtgtagtgctgagaagaatgtatattctgttgatttggggtggagagttctgtagatgtctattgggtctgcttggtgcagagctgaattcaattcctggatatccttgttaactttctgtctcgttgatctgtctaatgttgacagtggggtgttaaagtctcccattattattgtgtgggagtctaagtctctttgtaggtctctaaggagttgctttatgaatctgggtgctcctgtattggatgcatatatatttaggatagttagctcttcttgttgaattgatccctttaccattatgtaatggccttctttgtctcttttgatctttgttggtttaaagtctgttttatcagagactaggattgcaacctctgccttttttttgttttccatttgcttggtagatcttcctccatccctttattttgagcctatgtgtgtctctgcatgtgggacgggtctcctgaatacagcacactgatgtgtcctgactctttctccaatttgccagtctgtgtcttttaattggagcatttagcccatttacatttaaggttaatattgttatgtgtggatttgatcctgtcattatgatgttagctggttattttgcttgttagttgatgcagtttcttcctagcatcgatggcctttacaatttggcatgattttgtagtggctggtaccgattgttcctttccatgtttagtgcttccttcaggtgctcttttagggcaggcctggtggtgacaaaatctctcagcatttgcttgtctgtatagtattttatttctccttcacttatgaagcttaatttggctggatatgaaattctgggttgaaaattcttttctttaagaatgttgaatattggtccccactctcttctggcttgtagagtttctgctgagagagctgctgttcgtctgatgggctttcctttgtgggtaacctgacctttctctctggctgcccttaacattttttccttcatttcaactttggtgaatctgacaattatgtgtcttggagttgctcttctcgaagagcatctttgtggcattctctgtgtttcctaatttgaatgttggcctgccttgctaggttggggaagttctcctggataatatcctgcagagtgttttccaacttggttccattctccccgtcactttcaggtacaccaatcagacgtagatttggtcttttcacatagtcccatatttcttggaggctttcttcgtttctttttattcttttttttctacacttctcttcttgcttcatttcattcatttgatcttcaatcactgataccctttcttccagctgatcgaattggctactgaagcttgtgcattcgtcacatatttctcgtgccatggttttcagctccatcgggtcctttaaggacttctttgcattggtcattctagttagccatttgtctaatcttttctcaaggtttttaacttctttgtgatgggttcgaacttcctcctttagctcagagaagtttgatcatctgaagccttcttctctcaactcatcaaagtcattatccgtccagctttgttccattgctggtgaggagctgcgttcctttggaggaggagaggcactctgatttttagaattttcaatttttctgttctgttttttccccatctttgtggttttatcttcctttggtctttgatgatggtgacgtacagatggggttttggtgtggatgtcctttctgtttgttagttttccttctaactgtcaggaccctcagctgcaggtctgttggattgtgctggaggtccactccagaccctgtttgcctgggtatcagcagcggagtctgcagaacagcgaatattgctgaacagcaaatgttgctgtctgatcgttcctctggaggtttcaaatcagaggggtacctgcctatgtgaggtgtcagtctgcccctactggggggtgcctcccagttaggctactcgggggtcagggacccacttgaggagacagtctgtccattctcagatctcaaaatccatgctgggagaaccactaccctcttcaaagctcagttggaaatgcaaaaatcacctgtcttctgcatcgttcacactgggagctgtagactggagctgttcctattcagccatcttggaaccgcgcctctggatacaagtttattaaaatgaagacaaacttacatgggaatattgcctggaaagtagaatcaaatatgcaataaatttctagaaattaacaaatggtttcatttacattataagcaattattgatttataaccattaatcttttcatttgttttctgatcttataaacacttcaaataacatttatttaaaaactttttaattgattaaaaattaatctcaataattataataatttttggataaagtttacgtaatcatcattattattaaaaatgtaaaaagtccaactatataaagttaaacctgtacagaagaccacaaacttattcaagcatatttttgctttgtcaaaaatctttttcccttaacgtcaaacaaaagattatagagctaagtagtacgtttctatgaaaagaaaaataacaatgacaacaatgaaaataaaagtcaggacttaagctaagaaagaatagaaaaccttaaggaatataatagtgacaggcaattttagcattaattatataatctcttatttaaagttaaacatcgctatgaaaaaactgaaacagtctcttgctgaatgtgatatgccagctgaataatgaggtttggcttctaagtagcttaaacttagcctggaaatgcagattgttggtattttctctgccctccaaaattgtgataatgaaatcttttagtctttccatttctgttatacataaatatgataaaacaagaacaagaaaatatgttttcattgccttaggatgatgcatttcaactcagagtcttcatataattatcatactatcagaacttctacaatggcagtagtcaatactgagagcaaaaggaatcccaaaattcttccataacgaaatgtattattagcaaagatttatttaacaatttcaaagtattttatagtctaaaatcacatacattcacacctttgtatatttgaataaatgcctaagaaaatgaaaccaatgtttaaagaaaacacatttttaaattttaaagcaaagataatttatagctctaattaaaatgttaaatacctcttaagtgtgtctacgattcatgggcaaagcagtcagtactcttgacggattttatttcttgacaatttttgctcacttgaaatccatagaaaatatgcccacaaggttaacaacaattttagaataacttatgaattggcttttaggtaaagtttctgaatattccttcttgagctacatcctgcttcacacataaattatgatataaattgttctaaatgtaatatatattatcgttacatgtgatcaagtgtcaaacatgtccccaaatacctgttcacctcatctgcatgactgaatggtagaagttttagagttattaccccaagcaacaatgtcagccatctctaatcttccctacacttcccacagttctctcatagatgacaatatgcccttcaccaagatccatcctttcttaattatatggaaaacctcaatttcataacccatgaacagaaaggagaaaaatctctcattcttttactctctacagtgccaaatatactgtttgatttttctctttctgcctctctgactctgttttcctgtgtctttttctttatcttctctcttttttagtgatcaggtaattgcttctggtccatactgtggcctcttttccatagttttattttccaagcgcgctctgcattatcgattcctctccctctctagattataccagttctctattttttagtagcttcattttggaaacaccagcagtgacatttttatgaacacactacatttccgtacacacacacgcacacacatacatacacacctctgtttaagaccttgaaacccagaaaattctaaaaaagtagatcagagatgtacttcctttcaacaaattcaaccaaattttggccaaaaatatctttttgtgaatactttgtaaatgtataccctcatctattgaaaattatgcataatgtttccagttctgttgatatgcttcggtatagggtggcattttttcctattttcagttaagaactgaatagaacccaattttgagaaggattgacaaatgagatcccttcctgaagcaactatgaggggaatataaggtccacaatgtagctcctttttgaaatatttgtgattaaccactgaattacactaatctctttgtaaaatcctgcattatcatgtagcatatgcagtattggaaatttaaaaaatatatgtaattcttctatacacttcgaatttttagtccaaatgtcaaatgataaattataaatgctgagcactaatgttctccctccaaattgcattaaaagtgctctgcagcataggaaatggaaattttaattcactagtctacttacaacctcaaattaatcttcttacaacattttctgtcttacaagtatatttacatatcaatttactcaactgaaattagaacatttgtaagaattgatatatgcataaaaatgttgattctgtataattagcatttttattattgatagcattttttaaattagaagaaaaaacaaggtttattatgttatgaaaagccagcagaaacatgcaattgcgagattatatccttaaatattcacggatgtcctgtttccgttttatttaccccagcttcttgacttagtaatcttgaattcagcaaatatttatatatgttggctaggtatcctttacaatacgtagtaaaaatcactgataacttgaatgaagcattgcaggaagtatcctaaacaacactaggaaaaaaatctattgttaatatattgaaaattacaaaagtaaatccatccctcttatgctaaaataatgaaatttgttctttgtaatttcctagaagtagatggataatttacaaatttttgattagtatattatttaacttattttttatttatttcatttttaaaattttgttgagagggaggctctctgtgtcaccaggctggagtgcagtggcatgatctcagctcactgcaacctccgcctcccaggttcaagcaattctcctgcctcagcctcccgagtagctggaactacaggtgtacgtcaccatgcccagctaatttttgtatttttagtagagacagggtttcaccatgttggccaggatggtctcaatctcttgaccttatgatctgcccgcctcagtctcccagagtgaatttattttttcaatgtgaagcaatttaacgtatagaaaagggaagcacgtaatattcttttcactcacatgctagtgatgccttctcattttcagtagagcactgcttggaattttatatgattgggcatttgcactttatagcaacaaactgatcagttggtggggtgctgagataatatgtgctaatatttcatttataccgtaattaggaggaaaattattggagacatgtcagcttatgtgtgaaatacattcagggtcagaatacaaaaatcacaagtacacataaggcatttggcataagcttcctgaccaagcttcgaagtgttacaacatagattatttgcctccaattcaaaatgtctcttcccttaaattagggacataaatggaaccatatttttcagtgcttgagaaagcatccttttagagcaatggtattgaattaagaaattctggttcagaatacagtggaactttagtgtcccatggacaacccttcaatatttcttatttatttatgaactcataatcaatcctgtatattcagagaagacagaaataatggctgagatcttttccacctcagttggcttgattttctaggcatagatatactgttgcttaggatcatagaaagagcactggggcaagggtcaggagagctgaatcctagtccttggtttgacacttataggatgtgggattagcctctattctcctgtctgtaagtacctttcctttcttagagttgtgactataaggattttatttttattttaagttttaatttctcatctcctccttccacaaacatataaaaactcgacaccgtccctcaattatcttgttaatgcctctttcttttcactaattttatggccaaattactgttgttcctggggaaaaaaataaatgacaagagcaaatctctatcattttcaagccccagtggtaaataatgttagcagttttgggtggatcctttcagaaattttcagtgtatatatattctcattatatggtgatgaaattattctctacaaactcaatttctactcttctttttgtaatgcaatacttattgaccacatttatattaacatatcctttataacatctgcataatattccatggaacggtcactttgtagtgtagctaataagtttatattaatggatttttttactattataaataatactgtaataagcatcttcatatatattcatctagattgattcttagtgtaaattattagtggtgccattgctggatgaaaggaagtgagtgttttaatttgccagatatttgtaatggctcttcgaaaatttggaactattacagtctcgcaggtagtgcattagcatgtttctttcctttatctttgccaaaattgaatgttttacagctaaaatttttgttaatctgatattcttattgtttcaattgacattttttaaaaagttatgattgaggttggacttttttcatatgtatattaattatcaacatgctttttctgattaactcaataatttttagtaagttgtttatatgctatgatttcatttttaccacctaccccactttacaaataaaagaataatgtattgtcaatatggataatttggaaaatgtacaaaagttagcaaaacaatcgaacaggaagctgaagaaggaaggaaaatgctgctatcttgataaagtaagtaaaaaaaaaaaaaaatctattggatttgatgactggcagggtgatccaaagcctagaatcttaccacagacccaatcaatcaccaactaccaccaatttcttcttctcgtatctcacattatctctcttctcagccctttgtgttcaccatggtatttgatttctgattattctttctccagactagccctgcttgcaacttccacgtgcagtcctccgcaatgctgccagagcggcagctacaactctatgattgaaggcatcgccctcctggttctccatattgtttgccatcttggacagataaactagatgagctcttttttcaacactcagagaatgttttgaattcacatttctgccatcttactcacctattcgaatcagttccctccccctcccttgtatcaaatattgtctctgataataatacattgagttatttgtagttcctgaagaatttcatgttcttataacatgaaattttttcccacactatttgttataactagtttacctatttctgcctaaataaaatcttctccaaatttcagatcagacattactttaggtgaagactttccagtctgacttcccttacccgaggtaggtatttattctttcctcatttcacaggactttgcaaatcccactattatggtagatagaatattaaaatctaaattgctggcttgcgtgtctattttttctactcaggatgagttcattctcagtagtgatcatgtctttggttttcaacaaaagtggttttctttggattttccagaaacagaacctaagagaagaattcatgtgaaaataatttattaaggaagagctccagggtagataaataaggcaactagtgaagtagggcaagaaagagaaggaagtcaggcaagtgtgtgatcgccatgcaaagcccaagaacagcctttagcctgactccacagggaaactttggagcgtaaactaagcttcagggctattccagactatggatctgggtctttcgtcagtatctttcagtcactggttagtggaaaccttacggggatttaaactcccaggcccttcacgccctttgtaagcaaggcccaggtagctgcagtagctgaatggcatttctccaaaggaaaaaaaaccatgtaggcactcagtaaattttgaatggctggctggcgggacgaatggataaatgacgaattatgcaacttggggtggcttgaaagacaacagggggacattgaagacttttcacgaagacagtggtaccctcaaaatgataacttgagtagataagtttagaagcattgagtagaatagattaatggaaggaaagctaaatgcaggaacagtgtttaacagaaaattgccatggcgataaaggcctgttctagcatggaagcagcggtatgcaagataagacatgccttggattcatattggaaatgaaaatttaatcattcttgatgactgtcggcatttgtgagataaaggaaaagagacagagtgggggttttgtgttcaagtgacagtgggattccttacagaaaaggaaaatctgaacacattgggagttgagttattaggataggctgggggcagagataatgttaaaaattcagctctagatgtgatgagagtcagtagggacaagcacacacatatatagcagacatattggaaaagtgggacttgatcttggaagacatgacagattggaaatatggatgtgagatttagtgtttaagacaggagagctgaatatggaatagggagagggaacctttaaaacagaggttatggaataaagttattgaagaagaacaggactatgacaaatgtcatatggtgatacagaaaaagaggagataggaaaaggtagaggagaaacaggacttaaattcacactgcattcttatcttactctaatgacaacttaagctggtataacttttctgaacaacagtttgacaataaataccaaaaatgttttaatatttggatattttattccagcaatcctactttaatctcaataagcctaagaaatcagctagagataatcatgttagcaacagtatcaaaatagtagtctaaatgttgagcaataagagaatattattatagaaccaaagggtgaaattttacataatcattacagtcgatgattttagacactatttaatgccataaaattcttttataaatattgtttgaaaaaataggctataaaatatataaaccaaaattactaaaatttattttgtttatattatgtgcatgtgtgtagatatggataggtatgtacacaatctcatttagtgtatataatttatacactaaatatgaatgttgacaattgagtcttgattgattgtctatttttttttcaaatttttccgattgagcatgttttttttttgtgtgtgttttttgagagagggtctcgttctgttgcccaggtcagagtgcattggcatgatatggttcactgcagcctttacctctccggctcaagtgatcctcccatctcagcctccctagtagctgggagcataggcgtatgccaatactccaagctaattattattattattttagttattattattattagagatggggtttttctttgttgcccaggctggtctcaaactcctgaatcaagcaaccctcctgcctcggcctcccaaagtgctgtgattacaggcatgagccaccatgcctgccctgagcgagttaggttttgttttttttttttccttttaagtgtaagtggatggtgaaaatggaatcataggagaacttctgtctaatataaaagttgctagaaatgttaactttaaaataattataaataaatatataaaaataaaagttcaattctttaattagccatgtttcaagagctgaatagctacgtgtggttggttaatactttattgtgcagtactgatttatagaatatttccatcataatagaaaattgtgttagattgtgtttatatagactaagagatctgtcaggcagatttttcagaaaagaaagtaatagaaattctataactaaaacaatgtaatatgtgaaatagcctaaattaagaattcaatggataagatgcagagagatcattaaatggaagagagggaagaagaaaccatcaataatgatgaaaagagagacacaaacagaaaatatgtgaaaggagatagaaaagtacataattttatattagtattatgcatgaacttgtgtttgcatatgttcacattcatatatatatatatatatttcttgctgtttattctagagaaatgacgtgcatatgtgtgtctggatgtttaatcatatatgatttgtgatcactagaaatacagaaacatcaaaaatgttcatcatcaaagcattaggttcatgaattattgtatattcatacaaagaatcctatcgagcatccaaaatgaatgaaatatgtgactcaagaacataaaaaaattggaaaaacaaaatgtactgtaggtaaaatcatacacgaagactatatgctttatggttccatttatatacacttaaaaggaaattcttaagagtggtaattaatataataaggaattattgccataaatatttgaacagtgtagttactattcctttagtggaagaaaaggggctgtgactggaggagcagacagaaggcttctagagggttaacaatgatggtttcatatacaagcagtggctccttggctttctttccacacaggtttctttcagtttctgtgatgcctcccactctgccttgccacaggggttttgcacatgctcgttcccattctgatagccttccttcctttccttttcaccctcatatcccagatcagctatcacttcctcagggaacatcagccccaccagatgtgggaaagcttgctgcttacataccctctgagaaggacattcattccttccatcagagtatgcttcagtttgtaattttgtaatgtttgacattattgaagtaattgtaccaaaaattcaattggtatgactttcaccattgaacctccaatgtcttatacattggctaataatggcttgttaaattaatggatgaatatggttagacaaattgaatttagtgtctatagaacatgcacatctagtaagcagcgagatatagggactagttgttcctcagagttttctgtctagaggtagggagtcatgaataagtaagggctagcatggctaatagtgtatttaattgttctggaagaggcaaaaaaaaaaaaaaaaaagccaaatgaaaagacaacccagggagtgaaataaaatatttgcaaaccagatgtctgttaaggggttaatatccaaattatatatgaaactacaactcaatagcaaaaaaaaaaaaaaaaacctgattaaagatgagcaaaggactggaatgacatttttctaaagaaaacataaaaatggccaataggtacatgaaaaaatgcttaatatcacaaaccatcatggaaattcaaatgaaaaccataatgagatatcatttcacacacgttaggatgcctattatttaaaaagagacaagagatagcaagcattggcaagggcatggagaaagaggaatctttgtacactattggtgagaatttaattgggtatggtcatcatggaaaaccatatggaggttccttaaaaacaaataagtaaataaaaagtgaactaccgtatgatccagcaatctcacttcttggtatataggcagaggaaaatatatcagtatcttgaagagacatctgcacgcccatgttcacagcagtgttattcataatagccaagatatggaaacagactaaagtatctgctaacagatgaacgggtgacgaaaatgtggtatacatacagtacaatattggctatgaaaaagatgaaatcttgccacttgtgacaacatggataaacctggagaatattatgctaggtgaaataaggtagacacagaaagacaaatactatttggtctcacttacatgtggaagctaaagaggtcgaattcacagaggcagagagtagaatggtgtttgccaggggctaggaagttgggaaaatggggagaaatcggccaaaggatataaacttccagttataagattaataggttggagtgatgtaatgtacagtctggtgactatagttagtgacactgtgttgtatagttgaaattggccaagaatagatctcaagtgttctcaccacacacaaaaatccagtaactatgtgaggtgatgggtgttttaattagcttgattgtggtaatcgcttcacaacacataaacatattaactcattatgttgtataccttaaacatatacaacttttatttgtcaattttgtctcaataaagccggaaaaataataggagcaaaacatatatctcctataattcaaccctgatgccttgctccagctgtaatgcacttgaccccttttcaagatctacactcccagctctctgggttacatgtcttttctgaagtgtttcttttcttttcttttttttcctcattctattttcttacgctttatgtcattttcctgaaatgcctatctcttccttctttggatcgctgtttgtctgacaatgtgttccacagtttaaaattctgaaagaacagcaacaacaataaaaccggaataccagctcttaaagctagaagattttaaaatattgcattatgcaacaaaacttgacacagcttgaactcgtttggttgcaaaacctgatctggaaacacgggaggcaaaacgtggtgctgtccagtgctggaacaggtgtgagtttaaaacggggtacacgtcacattatcattctcaaatccaaataaatagaattctcaatgttgcaacatagatgtccccaaatgctctgtataagatagaatatacactttgtgttgtgtcttgcacttcataatgattgataaatatcgccatgtagaatgccaaaccagtgagtgattatatggttttataaagctctgtcagtttcaaacaacagataaaatacctatctcatgtatgatgctggaagctagctgatataattaggaatattgggattttttttaccccaagaagtttctagtctagtgactaatgcccacatagatgataagaaagacagtgaaaatctgatgagggctgtatgtagaataaaagtaatagaattggggtaaatgtataataaacacagagtaaagttctgtgatattataaattagagtaggtagttttagagttttcaaaataagaaaagtaatacagtaaggaacatatttgcttacagaagtatgattcataccagtgtgcaaagaaatagaaaaatagaaaagcaattcagatgatctcaaatttattagttttctaggaaacactcagaatgtggcacagactgtagtaacagtctgaaaagttaaaagaatgtaaccttagaaataaaaaattgcagagtgaagaatccatttcctgttttctgcagacttatcttggaaaatttgaagtattcattgtgcagagcgtgtggttacattgaggttactattgccccactgcttcatggaacacacctgtccatacttcaatttttgaactaaaaaaaaataccttctagaaaactagtagttctgactcacactcttccgtgccagttgtttctctaatttagtcatagctattggtattttcccttttgattatatgcaatttgcaccctgggatctggatttggagtaaaacacacagggatccagtgttagaacaaacacttagaacgaaaagactttagaattgagagccaagctgaggccttgagtgagatcattaaagggttgcagttttatttctggaacaatgtttgtactttttatttacttagtatttccatgaaaaatatgacttttttcttttcatttaaataaatttatcgcacttaactttaatatatcttaaaataataaattgagttactacttcaagtcatcatgttcattattaacatgtgtctctgccatcaccagcaaagttcagttaaatatgaaccatctaatgagagcaaggactgttcatgtagattttcaaaatttacttaaaattatgtcttttacaattacctcaaattatttcttttctttttttaattatgttttgaaaatatctagctgtgtaatatcaaaaaaattttgcctttttttttttttttttttttgagacagggtctctctttgtcacccaggctggaatgcagtggtgagagcatagctcactgcagccttgaacacctgggctcaagccatcctctgtcctcagcctcttaagagtagctgggattacagatgcatgccaccacacatggatacttattgttgttgttgttttgtttttgtagaaaaagggatctcactatattgcctaggctggtctcaaactcctggcctcaagtgattctcccactttggcctgtttttgctgtttttgaaagttgactgaacttagtttagctaaataatgagctaaatcaaccaaatgctattcataaatagaagtaggctaattcatttgaaagaataaaaaagcgtgtttgtgagtgggtgggtatatacataatttgaatgtaaataacagaaaatctgttgtcttgaatgtagcccattgttcctacctctccattgtgtacctgggccctgcccttcatctcgggtgtccggcctggagaaaactgcaccgtgacgccactaacttccactaactggaatctgcctttccctccccgctgtctttccttcccatctctaccgccaattaaatccccaaactttgctgattaaccattgaaacaatccttttaatccgtccattttttcactttgattttttcattgctaactctctatgtgaagccacctcacctttttctcagaatgtcagctataatggcctagctgatctcccagtcattccaggcttgcatctgcccaaactaccctccactctaccccgtgctgttttctaaatgacaaattttatcctgttgcttcccaacttcaaactcctcaatgacttgcaaatgccttcaagcatatagctgaacatgatatgcctcattttatttctgtagcctcatgtttcccttttcactgtatatttcattgtatattacagtcatacttcgaactccttgaagtccgggaaattgtcttactcaatgttgtattcccaaacacagtgtttgctatgtagcaggttttcaagataatttttattttaaatttcagtttgatgagtttaaatcagaaaaatatatgactttttggcatcctgagtctatttctattctttcattttagagtttaagtaagcttgggctatgatgagagttacttgaaaactgttactcagatcctctggaggttgaaatactggtaatagaagcatctggtccgttgtcagttctaattttgctcaacccaaattggcagatagaaatacttgctaataaaggccgactcttgatactccaaaagtggcaattggctgggcacggtggctcacgcctgtaatcccagcactttgggaggccgaaggggggcggatcactggaggtcaggagtttgagaccagcctggccaacatggtgaaaccctgtttctactaaaaatacaaaaattagccaagcttggtggtgcacacctgtaatcccagctactcgggaggctgaagcaagagaatcacttgaacccatgaggcggaggttgcagtgagccaagattgtgccattgcactccagcctgggtgacaagagcaagactccatctcaaaaaaaaaaaaaaaaaaaaaaaaaggcaatcaactcttcatttccagaattaatattccaaaaaatttttcctggtggatgagaacggatctggtactgtgttttattctgtatatatttacttggactactgtaacaaacattgtgacttcaaacaacagatatttattctttcgtggttctggagtctgaacatttgaaatgaaggtgtggataggattggttccttctgagggctctgagggaaagtctaactcatgcttcttccctagattttggtggttgccagcaatctttggtactcttgccagtggcaacctaactccaacctctgtctccatctatacacgcatctcttctgtgtgcctgtgtctgtctccaaatttccctcttcttataagaacatctgtcatattggatttcagatctttagcaatccagtgtaaattcatcttaactttattatatttgaaaatgttctgttttcaaataaagtcacattcacagagcccaggtaaaaaagaattttggggagatacattcacttctattttttttttgatgaatataaggtaaaaaaaagttgagtataaaaaataaaattagaaaactatttttaacatgggatgagaatattattttcaatgaatcatgtttgttaaactatttcaataaaaaaagacaaaatccaaaattgtaataaatgtttaacagctaattaaatacaggatcctgaatcactgactgacagaaatattctcccaagttagaaatatagaaatgataaagtgtaatttaatatatttttttctgatatatggtcatccaatatcagcaccagccaatctcctacatatgccttttgttaacagtaatggtaaatactaataaaatatgccttatcaaatggaattattttgtgttcatggaagccaaacaattttcaaagcaggactttagcgacttaggaaaaccatttttattgcttcatttagaagaggaaatggaaatactgagttacaagagaagatggcattttttttaaaaccaatctttacatcatgattattagaagccgtgacactcccctatgatgaagctcttcaacattttaagggcattcattcacaatattgagatatcagtttgcacttttcggaaggcaaaagttaaacgaagtgcaatcctggaatactttacaatgaatagcacaagtgttgtgaacggactgaaacattcaacaaatatctatttagtactatgtgttactatgtgaggcactgttctatttgtgggggatagtgcaggaaacagagggacaaaagtcaggctttcatgcaagttgcgttgccctagtcatgctgaatattctccacctgctcctctggctctgcttctcacccttcagtgagctttgcgctctggccactgactcctaagtcctgcttcactttctatactctggctttgtgttgctttgaccaataaaagacaaagacagcagatcagaggttggaggagagatcaatctgagtgtgatttctcggatccttccctgccgaggcatagctcagcagtgcctgatttctgctacttaaggccacatctaaaagttcaagtgtctgttccttatccttgcttctttaggcaacagaaatagctttagtccatctagctttcttgtaacttgtgaaattcttcttgaaaactgcttacatattaataaatagccattttgttaaattctctttaattatcccctttgaatatgccttctgtttcctaaagaaccttaaatgatgcatagggttagaaaggaaatacaaatacatgagatatttgaaaaaaagacatttttgcagatgctgtcagcaacccatccatatttccttggctttcaccattcttgggtatgctccctattaacaactcttcaactgagcgctctctttggctgctacagtttgccaggcttaaagataaagtaaattgggcatgctagaaactaatgcattccttccatttccttccccaaagcagccatcaaccaataactggcagatggtgtggaccaaattttcagcttcttggaaccttggttggaatgactctgggtcatattcaccctatccttctgagtttcctactgagcctaggcacctggtgcccacagcagtacactgcttgataacaaaccttttattggcttgctttcttccctgccatatttttccactccagtgttggcgattcctaggattacctccacaaatacacattccctctcacacacacatatacacatgcccatacaaacgctacacaaactcacattcttgtgcaatagtaagctctggaaggttctgaggagaggagacatgcacactttttaggcttcaatgggcccactctggatattgtgttgacagagacttgaagggttgtgagggcagacacactgagactctttagggaggttagttcatctgtaacactaatagaccactgccagaatctagagaaaagatgatgagggattacatctttgccatgatgctatgatgaggttgctttttagatcatctgatcaatatttattaaaatatattatgtatcagtttctatactagaagttagcaagaaggatactgtcctcattttagatgtaaagaaattgagattaggaaagtaaagtaaaatatgcaagttctcagacacagagcccaaatctgcccagagctttaccctctccaccacactgtcaggaaggttgccatacactagactgagtagagaggtaaaggcggaagacagcctgcagtgaactgacagagaaaactacatagggaagtagaaataatgatgatagacaacaccttcaggaaatttggcagaaaaaaaatacggggtaagcttttatcgttttgttttgttttcttattttcctctttaacctgggagaaatttattcttgtttacatgcctagcaaaaagaagcattggagaagacactcgatgttacattaatgaaacagaataatggattaagtcaggcttggtagcaaaaagaagttaaaatacatctaagaaaagtattttatatcataagtaacttataagtatctgcaaatacatgtttattgtaaaatattcaaataagagaaatgtatagaaaaaaggtctatgcccacattcaccccattttctacaaccctcaatgttatcgctatctttaaccagactttagtgtgtacctcttcaaatatttgggtgtatgcatatgtgttcacatttttgcataaagtgagtcacaacaatgcaatgtttttgcaatttgcttttttttttacataatgtatccttgacttgcttccatatcagtacatgtgaatctagttatattcttattagtttaattatagcatcagctgcataattatactactgtaattatcaattacattttaaatttatttttaataagcttttaatttttaaagttttagatttaccaaaaaattactaagatagtacagagacttctatacagcccacatcaaatttctcctattaacatttttcattaatatggtacgttttttacaattaatgagtcaatattgatctattattaattaaagcccacactttattcagatttccttagtttttctctagtatcctctttctgttccaggatcccaaccacaataatatattacatttggttgtcatgtctctataggctcctcttggctgtgacagttttgctggtcttcgtgttattgatgaccgtgatagttctgagaagtacttgttaggtattttgtagaatgaccctcagttgggatttgactgatgtttctctcatgattagactgaggttatgtgttctggaaaagaccacagtggaaaaggaccattttcatcacaccattttaatgacatattatcaacaaggcatatcgctgttgattttcactttgattacttggctggggtagtgtttgtcaaatttctccactgcaaagttactctatttttttttcaattttcatatggtgtattggtcagtgttctcttagagggacacaactaataggatagataaacatatatataaaggggagtttattaagtattagattacacgatcacaaggtcccacaataggctgtctgtgccgagctgaggaacaaggagagccagtccgagtccccaaactgaagaacttggagtccagtgttcgaggccaggaagcatccagcatgggagaaagatgtaggctgggatgctaggcccgtctctcctttcatgtttctctgcctgctttatattcgctggcagttgattagatgttgccccccagattaagggtgggtctaccttccccagcccactgactcaaatgctaatctcctttggtaataccccacagacacacaggaatcaacaccctgcatccttcaattcaatcaagttgacactcagtattaaggatcacatatggcagtctttggaaagaggtccctatgcacagcccatacttaaaaaacaaggagttgtgccccatctcactgagggcagagtatccacataagctatttggacttcttctgaccagaatacttatctatttttcccatttatttatttacacatcatttattgttagtatgaattcatagttatttatactttgagttataatactactgtatttttttctgttgctcaaatttctatagcttttgttgagaactccttcagttggtttctttgtccccgacatatccccatcactgagggttttaggatattttgaggtttaggtttgttttgttttgctttgctttagcacttccttacttcagtgctcccatcctccccaccctcggagagcttgtaatatagttagatccttttgtcaaattctgcattctatccaggtatgcctttgacctttaaataattgatttttttcaaatttgcatataccaaggaacaatttttatgtttaatagttcaattggttttgacaaatacatagtattatgtatcaaaaattacagtatcatatagaagattttctgtacgctaaacaatgtcctgtgctttaccactctcaccctatgttgaaactctggacaccactgatccattaactagctctataattttgcctttttcaaaatgtcatgtaaactaaataatgcggtatgaagccatggccttttcagcctggtttatttatttacttatttatttttgagatggagtctcaccctgttgcccaaattggagttgcagtggtgtgatctcagctcactacaacctctgcttcccgggttcaagcaattcttctgcctcagcctccagagtagctgggattacaggcacatgccaccatgcccggctaattttttgtatctttagtagaaatggggtttcaccatgttggtcaggctggtctcgaactcctgacctcatgattcacccaccttggcctcccaaagtgctgggattacaggcgtgagtgcccggcccagcctggtttatttcacttaacaatatgtactttaagacttagctatgtgcttatgtggtttgataattccttactttttattgttgaataatattccgttgcatcgaaatataatagtgtgtttatttgcctaatgaagaacattttaattgattccaaatttggctattatgaatatagccacttataaacatttacctgtaggtttttgtgtggtcatgtgtttaaaaaacattcagtaaatacccagaagcatgactgctgggtcaaatgataatactatgtttacctttgttagaaactgccaagctgggtcttccaaagtgactgtatcattttacattactatcagcaatgaatgagatttcctgttgttccatatcatcagcaatttgtatttttggttttttggatattagccgttctaataagtgcataactggttgttgttttaatttgcacttccttaatgacaaattattagagtgtattttcatgtgcttatttgtcatctgtatatcatgttgggtaagaggtctattcagatcttttgcccacttttaaattaggatgtttgtttttttagtgttgacttttaagaagtatttgtatatcctgaataccagtcctttatcagatttttgctatgcaaacatgttttcctggtttgtggcttgtgtttccattttcttaacttgtcttttgcagaacaggcactttagttttaataaagcccaacatcaaacttttcttccacaaattgtgcttttggtattaaagctaaaagcataaccaaactcatgttcacgtagatttttctcaggtattttattctagaatgtttatagctttatattttacagttagatctgtgatctgttctgagttgattattgggacatgtataaggtttgttgttaggttgttttttgcatacagatgtataactgcttcagcatcatttgttaaaaatataattctttctccattgaattgtcttttccccctttttaaagatagctgactgtgtgtgctacttttagactctctcttctcttctgctgatctatgtatcttattttaaccaataccatgctgtcttgattatggtagctttatactaaatattaaaaccaggtagcatgagtcttcaaactttttttctcttcagtattatcttgcctattttaggtctttttcttttcaacatagactttagaatcaatttgctaagagctattaaatacaatttttatttttattgcttttattttgaatctatatattcagttgacatcaaacaatattgaatcttccaatccatgaatatggaatatttctccatttatttagatcttcttttagtcttttatcatgttttgtagatttctacatatagactgtatatatttatacataagtaattcattttttggtgctaatgaaaaagtttttggtgctattgtgactgtgtcattcttttttaaaattctgaaatgtttgtttatggaatataggaaagaaatttatttcatatattaaccttgtatcatattgaccttattgatcttggtggtatttttattttttaacatttctttggaattttctccatagccaaccatgtcatctacaaatgaagacatttgatttccttcctttccaatctataaacgttttccttctttttcacatattacatcagctatttcttccagtaaaatgttgaataggagttgtaagagagggcatcctggccttgtttctaaacctagcaaaaacacttccagttcctcaccattaagtacaatggaggatttttttgtagatgttgtttatcaaatcagttactttttaagaagacataacgcctaagaagctatgaattcaggtgagggatattatttatagacattaattccagttaatttttccgaaatcattcctgttatcatttacctcaatttagaagttatggttttagtaaaaatagatcttgatttacttatatgtggaaatattagcaaaaacaaacaaaacaaccagggaactggaggttgaaaaaaataaaagtaaaactggcaacaaactagtggtatcaactttggaaaagaaggatcgggaaaagtgaaggaggctgagatgagataacccttagctagctgatgaatgttgatgggaagagattggaattactctaatttgctatcacagttgagctagagggagtcaatatcagtaaatcctaaaattagagatggtctaagtatcgaaagaaatattacatgcatacaaaaatatctctaaacatatatattattctcagtaaagcaagatatcaacaaaacaatcagggaagtaatcttggaaagtttctggaaattaaaggaaggtaaataaaaattcactgtaagacaattctcaaaagaagatttttacacagccaacaaacacatgataaaaagctcaacatcactgatcattagagaaatgcaaatcaaaaccacagtgagatactatctcacaccagtcagaattgcaattattaaaaagtcaagaagcaatagatgctggcgaggttgtggagaaataggaatgctgttacactgttggtggggaatgtaaattagtttaaccattgtggatgacagtatggtgactcctcaaggatctagaaccagaaataccgtttgacctagcaatcccattactgggtatatacccaaaggaatataaatcattctactataaagacacatgcacacgtatgtttattgtagcactatttacaatagcaaagtcatggaaccaacccaaatgcccattgatgatagactggataaagaaaatgtggtacatttacaccatggaatactatgaagccataaaaaggaatgagatcatgtcctttgcagggacatggatgaagctggaagccatcatcctcagcaaactaacacagggacagaaaaccagacatcgcatgttctcactcataagtgggagttgaacaataataacacatgaacacagggaggggaacaacatacaccaaggcgaggggaggaaacttagaggatgggttaacagaagcagcagaccaccatggcacacgtatacctatgtaacaaacctccacgttctgcacatgtatcccaaaacttaaagtaaaatttaaaaaaaaaattaaaaaaggaaaccctaaaagaaaaatttcactgtacaccaccaaatattattattacaagaagtatgctgtctttttttaaagcccattaatgggcaaaacctccatagggactttcataaatgtatgcgaattttaatttatcagatttatttttcccagaagatcttaaactattcaagcatgagctctactattttgtcatttttcaagaatatctggcctgtatatgcaccgtattttcagcatagaacctaatactgatttataattgatgctttagtactagtattcataacacaattattaaaatattgaatttgaactaaaattggtaacatgtctaaaacatttggaagcatgtttgtattaagtgagattttcatttgcaggccatttgctctgaaaatcactggaaacagagacatttctgacagcagaatcctatagtgggtgaagggaatttccttatataattatatttgtaagatatcaaatggaaaatgagtccttttgcgtttcatttgttatcctgaaagccaacagcattgacttcaaaattctataggctttgaaaacttccaaaccctaaatgatcagcattcctacctgacatataaacaataataacactgaagaatcagatatattgtatactcagtgaaaaatgaaaaataaaagctgtaagtaaaatcaatgatactatgccacattgaaagtaaaatcttacaggtgaacttaatgagaaacagcgacaaaaaaccctcaaatcaacattgcatttttatacttaaagctctgcatgtttttctaaataagactaatccgtcaatggtgaattttttgaggcataaaatgagtacaatggccatgcctagcctagcatttttaaattattcaaagtattgccaataattaaagacaataatcataaactaaagtcatagtttcaaagtttaaggaaattaggttttaaaagtaataaactatttactgatagggagaataattaattcaattacttctgtcttactttactgacaaggagagagatgtcaatgaagccaagtttcttttacaaaattacaggcaggtggttgcttggccaggaggataatctaaatttcttgattcatatcaaggattgtttgctttttcctctactacaaagtttatttcaaagacattttgttatcccttgtaattctacttggaactgagtccatttagaagaaaagtgaattatacttatcatggctttaaaataaacactgagtgtcataccactggcagtttatacagtatgatttgaaactcaatgccaattttaaaacacaatttattagacaatcaaaaattaccaaggatttcagtggagatatacaaatagggttttgtgttaaataaacgtaaggcaatgtgaataacaaaagtctcacttaccatgatggacagatttattattggcaagaatcagattattgaagggagcttataagggaagcctatagctatctgaatttcctataaaactccacagcaactaaacaaaagctgatggaagaatttaagttgaacttggattaaatttttacatgtatcctaatgtcagcaacaggattatggaaataaatgtttgtggtgttcagttttcttagtaatttagaaatatgccattttctcctttggattagtgaggaaatagagtgcattttctggatattgttgtaatatatcaacaacattcagcaaaagctccagctttaaagaccactattacacacaaaggcagaaggaagcctcttgcatactgaaggttctagctggtgattatacacacttcaatcctcttgacatgaataaccaccctccatgagaaggcactcctactggaagctcacatgtgatggtgtcagaggaaagttacgcctaatgagcaattcagagccactcagttaactcttttgtcaaaaaatgacatgccctagtttgatcctcccttcatccaacaaaacttagtactaaatagcatgattttaacagggattaatgttttaatctatatatatagaataattagcaaaacaacttgagttttgttctattaaatatattaaagaatgaatataactttcttaatgtctgaaataaatctggaaacaacaacaaatctagacatctgcttagtttgtaacttaagtaaaaagtttaattagaaattaaatagttggacaaatcaaaatagggtaaaaacatggaaataactataattaatttggaaatatttgatagcagaggtgaatggtggttactcaaataaatctgcactaggaggaggctttactttgatggataaaataggagcaaaaaatatgcctaatattgaatatcagcaattaaatttcaaatatttttataaaatgattagtatggtgctatcaatataaactgaagcatgtatctttaaataactccagaagaatggatacattttaaagcctgaacatggcattatttgacaaaacagataatgtatagaaatggacttatttcatttgtagcaactcagcataattctatctaataagaggtgtatagaggataaataaatgcagaaatatcacaaagcaaagtaacttcctagaacaaagccagttttttgtattcttattgaaaataataacgaaatgaagatatatatataatcatttgtgtatatattttacattattagtgattacttaggaaaggtctcacaaacgttttaggatctaaaagtactttatatcctaagagaggctatcatgttatggtcaatcaatatgcactcaaataagatgaacacatttgcctgcagtaccatgcaaataataataatcatctccccttggaacaagacatggtttttcatgttttcctttcatcatatcagagcctgaaaaatgcttggacccctaacagacacattcaataaatatttgttgaatgaatgaaaacaatatatactctatcatacattctccttaaatttcaatacagtaagaagagtttagaagggttaacttccattattctcaattaaagataccatgtggcctgtatggcagaaatgtctcttcagaatatttagcctttgattccataatgaactcaaaaacaacttttatgttaatgtctgaaatcaggaactctattattataattgtatttcagattagagttcaaaatctacttgaggtgtgattatctgcttagtatccagaatcagagcagaaccaagattccttgtcatgtctctgactggagaggaggaattttctagtccccgtcaactgagagtacagcatttattcctgggcctatgtaggcagcttagattcagctttttgcttgaaaacacatacagtaaaacacaacaataaaatcgtattgcctggccctgcaacaggagcactgacatccaagcacctggaggatctcaatacatgcagaaatgcacttgataaaactcaacatttgttagttatagttataaagatcttagcaaatcagaaagataaggaacactttcaagctgacaaaacctaccatgaatataatactaaattgtgaaagactgatgaatacaccttaaggttgagaacaaggtaagcatgtctgttctcaccatttctattcaacattaggctgaggtcttagtgaaaataataagcgaagaaaaagagatagaggcatgcagactgggaaaaacaaaactgtctttattaacaaacgttataattagctatttagaaaatctcagaaaggctacaaaaatactaaactgatttaaacgtgaaatttacaaggtcatagaaagccaggttaacatatatattataaatgtctatgtatatatataatatatgtttatatttatataatcatacccttgtatatgagctaaaaatagctgaaaattgaaattaaaaaacataataccatttgcagtatatcaaaaacatgaaattattcagaatagatctagtaaaatatatgcaaggtttgtgtgctggaaattaaaaatcattgataaaaaatcaacataaaaataaagcaatcgagagatacactgtgtttatgcaataaaagactaaatattatttaaatctcaattctacccaaaattgatttataaattcatttcaatccctatcaaaatcccatcaggtatttttgttgaattgacaagttgattctaaaacacttgaaaatgcaaaccttgagaataactaaaacaatattttaaaagaacaaatgtggaggattcttacggtttgatttaaagtcacactataaagctatagtaatataaggttgcattgaggtaaagtatacaaatttacaaaataatttggaacagaatgtagtgtctaaacatagttccacacatatatagccagctagtattctacaatggttgattttcaatggtgaaagaacagactttttacaaatgatgcttgattaacttggtgatcaaatgaaaaaagatgagtcttgatcttcacctttcttgttatagaaaatattaagttgaaatagatcagaggcctgaatgtaacatgtaaaactctagaacttctagaagaaaatatttgagaaaatctttatgaacatggttaggaaaagatttcttagataaggtgagaaaatgggataaataataaaaataaaaatagaaaaattggactttataaaaattaagaacgcctgctcttaaaaaatcgccattaagaaaattaaaagataatccacagaatgggagaaaatatttgcaaatcatagatcagataaggaatttgtatccagaatatacaaagaattcttacaactcaatattaagaagccaaacaatttggttaaaaaaattaggtaaaatatttgaaaagacacttcaccaaaaaacaatgatagcgatgacaagtaaaaagatgatcaacattattaatcattaggggaatgcaaatttaaaccataagaaaatatcactatttattggaacatttaaaataaagataaggtaacaaaaccatgttgtggtaaggatgaacaaccaaacactcatatgtttttgatgagaatgtaaattactatagccactttggaaaacagattagcactttctgttataaattcatacatgcacttattgtatgactgagcaattccatttccaggtttttaccaaggaaaatgaaaatatgtctgcacagtatctgtacatgaatatttatagcaattttatatgggacaaccccaaactgaaaacaactatagtgtccattaattggtaaataaataaactcattggggcatatccatacaatgaaatgctacttaaccaaaaaaaaaaagaaaaaaaaaggaatgaagtactagcacatataaagacaagacttacttgaaaatgcattatgctaggtaaaaacattagtacttttctccttgtaatgaacagcagtctgtgaagagacactttgagaacatgcaagcagcctgcttctcatccagctcttcccaacgataaatattctcctgatatttcttgcttgaattattctttaccaccatggttgcaaatggtattccccaccccacctccctccacaccgccactccatgactcttcctttcacatgtatcagctggcacactaatttaaagaaatgttctcttttctcctctgcctatttatccatttatgtatgcatgtatctgtttgtttgcttatgataatagatgaataattttctactttaatcatcctgttttatttaatcgttactatctattgcagtcctcagttattttgatactcaaattgttcctagatttggtcagcaggaaccccttcaagctattgcctgtttctttttgacatgtccccattgttttcttgatcacttcctttctttctggcacaaaaaggtgttccagtttcatcatgtaccttctttgtcccagccctggaaccagacatttctccaagaggctcttgttcctttcagtagggacaggtattaaaaaccatctgtgcacaaaatttgcttatggctcttaaggtattagtgcttcttttgtgggtagaattaggagaaaaataatacatatatatgtgtatatatacatacacgtaaatatatatgtgtattgtgcatacatatatctctgtctcatactgagactctagtctgtttgcttagctacatttgacttagttgccaatttcagccagaattaggagagggaagagatgagggaggagggagagtgagagacagagatagagaaagaattcctcaggatcacttataaagcaatttctagaagaagtgagtaggagtggttgcattttacttctggattctgagcattaacttttcccattcgtgtctatgaagatgttttctgttcaaatgttaaccttcaactgggcttcgatgtggggagggaagagttttcaattcatctgcacccatttgcttttcagtttctcctgcattttactatatcctagaaaaccactacccaggtacaggtacctggtgtgtgctcacttagctttagaaataaaaattatagggtagaattgaaaagataatgtttgaataaatggcttaagaatgcccagaccacctaagagaaaaatgaacactgtatagatgatgttgtcacgcccacagatcactgtgatagacaagactccatgaacaaaccttgaatagtgtgcaccgttctgtggccaattcatttgccatttcaagttatccgccacttaaaggatttaaatcaggaaggatttcacaggatctatgatacagtcttttttaaaaccactttagatagtcattttattttttcattttatttttagcaagcacagaacaggtgggaaacacagcttagttggaatggaacaaaggcagatttgatacttttttaggagcttttacaatataatctattctttaatggatagcgttatgagagaaaataagattataatggaataaaaagtggtctaatgttcattattcaatttagtggatatgttacaagattatttctaaaatcttttgtagattaaactagatgcctttcttgattctgtgactggtattactctatcatgatttctgagacctttactaagaatgtttttctgaacatactaaagcatattatgtaaaagatagtgagctgtggtgcaagatcctatgcagcatggcccctggtattatgactacctctccaccgatttatacatagaatttacgtggtatacacaggttggcaaatactgtaattattataaaatgatttttcaaaatctgtatttgtatctaacaaaatactaaaaaagaactgtgtcaaaataaaatgttagaatttcataagtcttttgttcctagaaattgctgagatgtaaaccttttttcatgaatgctttctctactgactcctcctccccctaagttgacgagtactctgccccttgctctttgtactaaacacagacaggagtgagtggtggtggttatgattaaagcagaagatattttcactgcaatgagatggaaaagtattagcagagccctgggtcgtgagaatccttgatctggttcctatgactgtcacaggctcctgaaaaagttacatagtgaggacacagtgaacaaggagacactttttataattaaggctttgacacatgtgaccgcctcaccctggcatacttggtgacatcacctttgagtctcaaggttacctctgtcccttggaccaaaagcttagatactgtgtcctatgcctacacttaattttgacttttgggtgttaaccactctaggatgaaaaaaggcaagtagaaattacttcaaggaaaagactgctgaaggaagtagagttttcttattaaagctgggagcagctgaattatgttcactaagaatatcctcccaaatcttgtaaggtcttggttagttgaatagggggaagttggcagaaggctcagcattaaattgcaccaggataaatttacttgttcttttccactgaactccacattgatagcccaaagtttctatctttgacttgtatcatctttcttctcttgatttcacactatacattaaaatgtacaacttatttttatagctatttcctaaaagtatttcatcattaatcagttttcaactcagatgttatatcgtcaataacaatttcctggtggtcctctgcaacatttttttaaatgaccaaaatagtcatatgtcccaacggaggtacaatttacagcattgtgcgttctatttctggacatataactatataatctgagttatgaaaatcaaagaaactaatttaatatgtgaatttctatcactgaacattttaaatacttgtattcaagataatatcacagattatatatgcaaattaatgtaaattcgcagtggacaatattatattgtcaaaatcacactgacacagactctcagaagtagaagcttcctatcagaaggttaatattttctggatataacacagcaataataaaaagcaagctctggattagatagaaatccagggatttagatcctggggattgtgaatctaaatttatgttaaatgtaagtacatgctattgtgagacagttattcatgtgttccttgcaattctgcacatcttacaagtagggacactgactgccctttgaactacctcatcatggatatgtgcacagtaagccctggaaagcggagtgtatttctccagaacaaagaccaagttggcttggagccttagagattgtgatagtgtctccctgccgagaagaagcaggtgtgcctcctgttataaaagctgtgggttccctaaactcagggtttctttcctgtaatcaaactcattgtgtcagcatgtgccatctgaccatcttcatactgacttgtgtaaagtgggcttggagaaccaatgcaaaacgtgctggtattctggctactgttattgttgtgagagaactgtatcatcttctgccatcattcctaaatctgtggttggataacttgcaagaaaggtaaaaaaatctcagaatattcacattttatatgtgcatcatactgaaaaatgtgtgaatggacatggcagaaataaacatttggaaaagtttccattaaagggtttgcctagattcaaggacctttttcactagatttaaatttgaacaggctgggcacggtggctcacgcctgtaatcccagcactttgggaggccaaggcaggtggatcgcctgaggtcaggagtttgagaccagtgtggccaacatggcgaaaccccgtctctactaaaaatacaaaaattagctggtcatggtggcgcgtgcctgtaatcccagctattaaggggactgaggcaggaggatcacttgaacctggggggcagaggttgcaatgagccaagatcgcgccactgcactccaccttgggcaacagagtgagactccgtctaaaaaaaacaatttactagcctagccaacatggtgaatctccatctgtactaaaaatacaaaaaaattagctgagcatggtggcagccacctgtaatcccagctacttggggggctgagacaggggtattgcttgaacctgggaggcagaggttgcagtgagccaagatcgcaccactgcactccagcctgggcaacaagagcaaacctgcttctcaaaataaataaataaataaattgaacactatcaataaactttctaagggaaatgactatgaataattgcattcctgaaaaatttacaatgctcagaagcaactgtttcactcattttttttaatttggaaactatttttatatgtttagttatgcaacatttctttctttctttctttctttttttgagacagagtctcactctgtcgcccaggctggagtgcgttggcacagtctcagctcattgcaacccctgcctcccaggatcaagccatcctcccacctcagcctccctagtagctgggaccatataactttttacttttctgttatctcagaagaaaaaatatttctcctcattttcttgccggaacatttcattcctttcttcttctctcagacctcattattttctcttttttgccacattctcactgaggtgctaactcacttctgccaagtgtttttagagttatacaactggttcttcaagcattaggccatcatctactttcaggttagataagactataatttatcattaaatttggtaagactctgatgaggattttttaaaagagagtagttggcatattaatatggattagtaagggccagacatggtggctcattcctgtaatcccagctacttggaagactaaggaaggaggattgcttgagcccaggcgttcgagactatagtggagccaggatcgcaccactgcactccagcctgagtgacagagcgagaacctgtctcaaaaaaaaataaaaataaaaaatcaatcaatggaatagtacaaaatgttagagagcagcatggagagagtagggtgcctcgtctcgttaatccaagcacagcagtggaggccctagtagggaacagataacacactgagttttcatttaaaatgttaatagaggaacgatttataaagttgtggagaagatgtgggaaaacaaaaatggagcgtgcagcatctggtgtgagcaacagagcaactgcaaccatccctgaacctcaagagggaaacagaaatggaggtttcggaacccagacctgtggcgacacagctgaggacaggcctccaggaggagctgggtctttcagacaggaacagtgccactgccaacccagagcctggcggggacagggtcagaaccaccagtgcctcagctcctatttcctccacactttcttctcccggtggtgctagacagaaccagagccagaggactggacgccgtgacaaaccatcccaggagcaaacaggaagggttggagccagatagagaatggcggtggaggggaaaagagaaggtactggaagcatcagccgaggggagctttcaggaagatactcagagagcttggtgtatgttctactattattattgttgttgttgacattgttgttgggtaatatgtagggacttggacctgagtcatgctttaaaagcctaaaggccagagactggcttgagctggagagtgcagaaatattttatttatttatttatttgtttatttatttatttagagacagagtcttgctctgccacccaggctggagtgtagtggtgccatctctgctcactgcaacctcggcatcctgggttcaagcaattcccgtgcctcagcccccatgtagctgggattacaggcgcctgccaccacacccagctaattttggaattttattagagacagggcttccatcatgttggccaggctggtcttgaactcctaacctcaggtgacccccaaccttggcctcccaaagtgctgggattacaggtgtgagccaccatgcctggccaagaaatatttccttaggagtgaaatgcttcagtatctccagaagtctgggcagaagttcagtcacgttttctgtgggctagatgttggcctcacagaagaaatatggttgaatttatctttactaaaaggaattttacccaaggaggtgattggagataactgtaacagagggacgacctctggcagctaaggcttgaggccaattcataaacatcttgccagatatgggggctgagggtgggagtggaggctttggtgggtaccatcaggggtgggtttcccaggacctcacatggccaatggcagagttggttttggacagttgcctcagccagaggatcacattgtctgatgacaactctgcttacataaaacattatcttttctcattcttacaacttcattccctgggcccaagcagtagccagtgagtgtgacataagaagaggcaagagaaagagatgttgaccgcaccccagcttcccactataggtttcccagactctataaagataaaatggtgaaatgataattttacattgactgtgttttgatttacaagactggattggaatatttagtctttcagaatgacactataaattcatgcctgagcacaacaaagacagctatactatctacctgagatttcatctagaattggtatagaataagtccacagacctcttttaaagatagtgatatgggaagagaaagccatcttgtaacttcctctctaacaagtcccattccttcaataaagtgtaacatttacacgaatatattgtaaatttgcattctgccttccctgacttcccactctgcctacaatcatgcttaagtttcgcacattctaaaaatcttcccagctgttgacactggtaatgcatttagccatcagtttcagcttcttttctttgtcaaatacttgaaatagtagctttcggtagtatttctagttttatcttttgaaactattttgatttaattgttttaatattttaatctttaagtcacttttagaattacttctatgtgagcatcaccagtgactttatattgcaaaatgtaaaacaaaaaacaaaaaacctggtggaactcctgaagatctccttcctggagaaccttgatgtgtgttatctaagatggtttttttaggccagctgcattacttagttgataatcgtggaactccccttaccaaatgatgaacaacctggattgatcctctaaatattttgttttttgcctctttaattttctttattcttatctttgtattagatattttttctgaaagttttttcttaagtttctagttctgtaatccttttctttcttccacttatttcttcagttattctcttagttgtgtaaaattttaataaaattatacatgcattttaaaaataaaatcaactggtatgaaagattaataataaaaagtgatcattgttcatcctcaaaccattatgctcccagggctaataatactaactctgatagctatttttctggtatttattgccatctgtctaaataaaattgattgttgtgatatcttgacttatttattttagcattatatactgtcctctgattgtggattagtgataaggttaaacaatattcaagtgattcaataaatcaattttagcataatcttgactagcaaatattatttgtttcagttagtatattatttccttttcactttggtacaactttagcttttcctagaaataaaaaaaaatctactttttgtttctcattgttttaaacatagttttctaattaccaaccaacccttgtcatacttcaaatgattgatctatcagctatttgtctaggatcttccctacatctcatctggatgtcacacaatcatttttatcattaatagcaatcattttatccttcgttttagaattttgtatatatggttaatttatactatcaaactgaaattatttaagagaagaatcttatcatcatcatctttgacctcttcagtgtttagaaaatgcatgttacttgaatttaaatgaatttgattaagtatatgctatatttgcaaagaatgtgttaacctaaaaaaaattggtgaattatttcataaaattgcttatacaacaaatgttattttaaaatttgcggttctattttaaataataaatacattttagtgtatgcaatatgaagccattcataataaaaatgcagttatcgaggctatgaagaaataaaatatgacataaaaattaaatattccacttcaaaaataaataaaacacattagtagtgattattaatttgttagaagtaatcttgactcctagttctcagaaaattatctctgtgcataaacaatgtgtttattgatatgctaaaacaattgcttgacaggaagccccttaagtattttattattttaaatacaaagtgagtgatttagttttgagaaaattaatgatcattattctgcagttacttttgcatttgttattataaagtgacagttgtgacttagaaaactactttttaatgtagatgtgactaaatttatttttggttactaaatatgtgagtcaatatagaaagttaaatttaataaagtattcatttgttttacttcaatatcttaataccattactagatagtgagacttgtattattgtgataaaaggttgttaatattttgtagggacatacacattgcctaacatcacccatctttatttcacatgatcctctatggttatgtcgtgttagtggtcaatctaatcattagagcctgaatactaaacttcattcagtcacagtgttttgtttttactctttttaaacattttcttacaacataatttggagttattcaacttgtcagcgacatctttattaatatgtaagttgaaatcagcaaacatttcttgcgaaaatctttagaataaaagcgaggaaagaattaaaatgccctgtttgtaatcactggtatagatgtccgcaccgatgtcatccgaagtgtatcttagtgcgtttttaatcactggtgtatctacttaccttttccccatcattagtattaagagcacttagctatttactttttaattttctgtagtttctcagatcatcaagagtgactaaagttaagtatttggggagcagaagtcaaattaacctaaataatttttttctacttttccttgtaataatatatcagattgtcagtgaccagattatttatgacaatcaattgtaagagaagaataccatgttagtttggcttgaaagatatatgtcaaaaaatcttacagagtcatttgtgcaaataactatgtaattaagatatccaagaaaatttgccttaatttttagaggttacttagtaaaaatcaagaggggaaaaaaaggatgcaaagtctagctgctgttcttaatttcactggtgcaccatttgcataagttttattaatttcacaatggcaattaccatgggaagagtacttaagagctgcacataaatgaagcattagatgttatttccttttagctattgttcaaaatgagggtggtgcctttgtcagtttaaattcctgtaagtatgtaactcctagactatgagtatacattttgtaaatccttgaaaagtatagtaattatattcattgttatgttactaccagtcattgcaatttataaaaatgccctgaaataatacataaagtaaaatttttacattatcaattttagtgcagtagtgaataacatatgtctgatgcctagaaagagaaaaaaatcataaatacatatcaagttaggtgaatctttggtgagaattacacaaggtgggaaatacagtggcagtcaagagactcgggtgagaaatttagttacaaatggaactaggagcttctcggtggaaaaagaagtaagcaaatgtaaggaatacaaaccctggagaatagcagaagggagaaagattaaactgatatctattagagcagaaatctatagtaaaatgtgggtgttctgatgaataaaaggagatttagaatggaaagaagagctaaaggaactgaatgctggattgttgattgctgtttattatgataccaccggcttctatgcagagcatgatttctaggtggcaatacttgatgtgaggggatcaggtagaagaagttacagcagatgacctctgatcgaatctttgaggaaggagtaacttggttctgaggctgcttcagagatgttccaaagtccttcaggataaagtactcagcaagccaaatcaccatgcactgggtatcattttctaagcccaagagcattacatgtcttctttttctagtttcaaatttattgtctgatttatttaaatatcccataacatttgaaataagggtctctttttaatataatgaaacatttcagtgtatatgtttatgtgtatgtattatattcaatattttattgacattttccttatctgtttgaatattttgtgtatttcatctttcatggccttagagagggaagaaagtctttagcatcactttgggtctgtcttttcctgtttgtcatttctacagttaatgcagttcttgctttatgcatgttgaagctgtgttatttcatacatgaagtttcacaagagataatcctatgttatagcgttttccttttataccatgtttcccataaaatgcccgtctttaaagttggacacctgagcaataagtattgtaatcctttgtataaacatgtccaatattatcagcaattggatgtatccagattgtggtagtgtaaaaacacggttcctaaaatatattatagtaaaataggaagaacaaagttatataatacttccttgctaattttattcaatatttgggtaccagaagtattttgtagtgtcataaatcaccgcacaatctgtttcacatttaccagttatgtcccccataacttctctacacatccagacttttctacacattattacatacttccaaggtatgctatagtcttattaactaagcatatttgatttcaagatgccacttctgatcactatacattggcaaaagattaaaatattgaaaactctctatgtatttctatagtggaagcacaaacataaatttttatattaaaatgccctgtaggtatcaagttattaaatcttctttagaaaacttaagttttatctcactgtccctctagattattctattttactggggaaaaacataaatccttatttttatcagccttttcatttgctttacatactttttgggtgtaggtgttgttggtaggggaagttttattggtcaaaaaagtttgggaaatgttgcattgctcatagcctttataccccttcttggagacttaaacttaacattagcatatttaagaccataagaagtctattttactgcctttgcaatagtttttgacatctaaggaacacaatttggtaattttactgtagatacatttattttaaaagcaggttcaggaaggctatataacttcttaatgccaatgaaagatcaacttttgttgtaaattcacataaacaggaatattccaagggcaagctccttctgtggtcactgtgtgtgttccctcccagggatcctgctaaaccacatgttctatggaaacgggggcacattgacaggtttgcattttccaccttatacttcacacactgctggaaatgcaagcttctctttttgtggttcaagtgattaacacatttgattttatgcctattgtctttctagctctatctgaaataaaatattcctatgcttatgaaactgtctataatgctaagccttaactgtcatcataagaacaactgttgtggtaaagtaagcagtggacttcccattagacaacagaggtttagcgtctggcctcaccactgctgaaatatgtgatgtgtgaaaagttatttcaattacgtgactctgcttccttaaatgtgaaattgaggtaatcatatgcataagactattcttacagatttaattgtatgacccttttaaggagaaaagcattactgttttgtcattttgctttctatatttaacaaaatatctcctgttaaatgtttggaggttatacaaaagttttagctgctcacatcaatatgttgcccttctggagagttaacactattttgtaaaagatatttctagagaaatctcgctctgcaattagaacttgctttttgaataggtcaagattagtgtcatagaatgaagatgtaagaatttgaaaaggtatttgaaataaccttgcttttcagtgtctctcctcctacccattccattgctgagaaaatggatgactagagaagctaaaagaagctaaattacttgcaacaagtgagtgacagacctggacattgaatccagaggcccctaatgtgctactctcccaactttcttgtaaccaaccatttgaattattcacaggagtaagaaaatggcttctctgccgaaaagcaactcacgattctgccaagtgacctgaaatgccaatgcagatgatctctgacttaccctggtttgaattaggatttttttacttttatgttggatttatcaggacataattccatcctcagtggaggaacatctggacttaaaatggttcaacttacaacttttcagttttacaatgggtttttcagggtattaaatgcattttcaacttaggatatttttgatttccagtggatttattgggacatagccacatcataagtctagaaacatctgtcttagaaacttgaaggctttgtaatcttcaaatatatcttaatgaaatttaagtatctttgaaaaaataatactttagtgaatattcatctacatccaattatttttcatggtattagacaaggagagccatagcaaaaaaaaagggataataataaattatattttgtgagagttgatagggtggagattcattcttttgctgaatatcttaaaaattcctgtataaaatcaagcttcttagcagagcacacagaaccattcataggctgataattctctggcttcattcctttccttcccattcagtcttaaattctaggcaaattgaatactgacttggtactttccaaatctggcatatattctcacatctgtgtgactttttcaccttttgttcctttttttttttattttaaaagaattttttagagacaggctctcactcttttacccaggtgggagtgtagtggcaccatcctagctcactgccgccttgacctcctgggctcgagtgatcctcctgtctcagccttctgagtagctggttctataggcatgcaccaccatatgtacatttatatatgtaaatatatatttatatatataatatatatatttaatgtggatatgatatcttgctattttttccatacttcgtatattgtgaacacagttcgtgtttgattattttttctttgtcgttgcaaacctaatcattttggaagtttaattcaggcttatcgcttctataaagcctctcttaatcaatgtctgaatcatttaggtcaagttagatgtcctcttccttggcaataacccatttgcacttaattgctttgcatcgtagtttcctcatttataaaatgggggtatcgacagtgcctactaggagtgttgtaaggattaatacatgtaaagtgtttcaaagggttcctgaaaaataaatgttattttgtatgttatttttattgtagtatgcattatttacctgtccatcttttccattagactatgaactattatagggcaaagaatgtttacaaacatcttatttaagtgattatccctgttcctatcataatgtctggcacagaacaggcaatattgttttttcactgattagaaaggtgaattctgttgggagaatgaatgcaccttttgtctatcagggtctctgtagtgcaatgtgagcactatgagaacaacataagggtcctgaaattccaaaggaagttgtgtttgtttgtctttgatgcaaaagttgccaagaaacaacactaactgtggaaatgtgatggtatcaaaaacaagtttcgtgactttatagtttttctcagaaatagccctctccataaaatacgttttactggcctcattgaataacttattcctttatttgtatcatatgtataaagaatataatagagacaaaagaagatagtgtaagatttgaatcattttccatatggattcaagtctccaagaagttaacaataaattatactaataataatgactgaaactcaatatttatggaaaacttatacaaatgtagataacagcacaattcatgatgtgctttgattggtctgaaatggcagttttcaataaatattgaaattaggtgataatcactagcattatgtattgtttatcagcattcagatttccatgaatagggatgcccttttacacattaacctcccttcaaagaacttggagaaaagacctaattccaaatgcagtaatatttttcatgctttttcattcttcgttatttattgtagaaatgtatgcatactcttgggatagtaagagagttcatttttacccagtcatgtctaaaataactctgagctaaaaatattctccctgatacataatgcaaataagcctaccatgcaattttcatggttgattctttgaaacttttgtaaaacttaagctctaaaatatttggaatcttgtggcagtaaaaatagtgggaacatcctgttttacatactgctataaagtattcaccagaatgatgtttttctgtattagaaatactttcttagtttgattgcctgagagaaagagaaatctttttaaaagaaaagagagaatatttttagtattttaataacaattaaaattttcgcttcaaaattcattaaataagtgtttggaataaatcctataactagaacatagtcctgagcattaaacagtcatttgcaaaggggaaggcaagtgggctgataaatatgaaaaaaaaaaaatcttgaggactactagcagattccgttttatagacacttgagaacaaaactatagatttttgaaggtgaattttcatcaaagaaaatactttgaatacattatgttactggaatttaaacatggattatcttttagtcttgaggatccattttctgagacggtgatgggaaagatgttggttgtcaagtggaatctcagcagtcattttcagacaaagttagagaaaacaagtatggaagatgcctgattctcaaagagtcatccagtcttgggattaccgcctacgtccatggaagtgaaagtcctctttttctttgtaccacttactgaggtaagtgataagtctgctgcagttaattttattagttacattctattcattggttataactacatatatactccgcctcccgggttcacgccattctcctgcctcagcctcccgggtagctgggactacagatgcccaccaccgcgcccggctaattttttgtatttttagtagagacagggtttcactgtgttagccaggatggtcttgatctcctaaccttgtgatccacctgcctcggcctcccaaagtgctgggattacaggcatgagccactgtgcccggccggttataactatattttaaatatacctggtttataagaatttaacctatatgccataccatagttattgcttcagaagccaaatgtgattttattatggtcataaaattattttagatacccttatacctcttatatatctgaactgcccaggaagtttcatgattataatgtactacatagatgatcactcagcagagaagtctacctagatttagcaaaaaatgtattgagattgatatggttagtctttgtgtgcccactcaggtctcatcttgaattgtaatcgccataatccccatgtgtcaagggagggatcaggtggaggtaattgaatcacgggggtgatagtgagtgagttctcacaaaatctgacggttttataagggtctctctccttcacttggcacttctacttcctgccaccctgtgaagaaggtgcttgcttccccttcaccttccgttataattgtaagcttcctgaggcttccgcagtcatgctgaactgtgagtcaattaaactctttcctttataaattgcccagtctcaggcagttctttatagcagtatgaaaacagactaatacagagattaatcttaatttttcctttcagacatgctgaatgctgtttctagatttgtaaaagtgcagtgtgcattagctgcctcagtgtgacactttccttttgtgagactaaagaaattgaggtagtactatatggtacctcagaattgtcatcaagaagttttgaaagctaacttgagtgcatttctttgatgctcctcctagctgaaattagaacatgtataaactattatcgatatttcattagggaaatcttgaaatatatgataaattaagtttgtgaaattgttctgaagcaatgaatgaactctctagattaactctactaggataaaataaaatattcctatttattttcattcacaaaatagttgttctctagataatcaaatatccataacaatgatgaacccaaaaagttttaattttacctgatatgtattctagttagttcaaagttcagtagaaatctttctctttttaaatttttgttcacaaagtttaactttacctaaggaaatgttaaggctatttttacactgaacttcatttttttttctttttttgagatggagtctcactctgttgcccaggctggagtgcagtggtgctgtctcagctcactgcaagctccacctcccgggttcaagtgattctcttgcctcagcctcctgagtagctgagactacaggcctgcgccaccatgtctggataatttttgtattttcagtagagatggggtttcactatgttggccaggctggtctcgaactcctgacctcgttatctgcccaccttggcctcccaaagtgctgggatttcaggcgtgagccaccgtgcccagcctgaacttcaattttaataccacttgggtctttatatattttagctagtatgaatcttatgtttttcttacttaaaagcatcaataaaatgcattttaagattagctgcctgtgcctcataaggttttcattgcatgaaagctggtcaacacagcgggaacataaaactcattattggcactagttcaggtctgttacattaactggccccatcacaaagcactctattttttgcttacacattgaatagtaaatgaaggttaaagttttaaatagtgaagcaagatatctggccatttccagtgttttctttttacttttcttttgaatcttagaacaaacctgccagataggtattacttttcctccaaaaaactgaaaagaagggaggtaataacttatctaaggtaataagtcagcacctatgtattccccaaccaaccccctctcacttactctctcttccttttttcctttattccctcttcctgattcacttgttaaatacctactgtatgctgagcatttttattgttcctagggtttcaaagatttggcacgttccttcgtacacaagttgctggaagataccaatattcaaatacaaaccataagctagaatgtagtatgataacacagattcatgcacagaatcctctgcaaagaggagtaaataagtagcattttgagggttgtggtggaagaattggggaaaactgcgtataggagactttgacgtataagtaaaataataacagattttcaagacaggaaaaaaagacaaggcgagaaaggatattcatgacaaagagaattcagaagcaaattcacagaggcataaattaggttatatatttagaatagcacaattgccccctatacattatggtcggagcacagaaaagaatggaaaaaaaaatagtctaggcagagtgcacagagctaagtcacgaagatcatgacgattgtgtataacaaacaaatgagtgattggataactctatacaacatcttcacaaatggagtcacggggaggaactaagctcagattcagcacatgcaaacacgtacatgcacagggataggtgagtgcttttctactttaatatgaatttgaatattaattggagcattctttcttgatattggacagttcttcctattatatctgttccaaaataatccatttatattacaagttttccccttgtatgcatttaagtttaaaaattctctatagacaaagggagacaatttaagatttcaaacgaatatggctagaactatgtcttagaattgcctaccattataggatactgttttatagacaataaagtactcctagacaagagcaatgggtgggggaagaagtagcatattccaagctcagttggtcaaatacatggctaagtgtttttagataagtaaagtttcacagctcttggaaaggactgtgcacaattaacagttaataacaatgtacagttgacgctcaaacaatgtaagcgttggaggtgctagccatccacacagctgaaaacccaaatataatttttgactctctcccaacttaactgctaattgcctactgttgacaagaagcctttccaataacataagtggtcgatgaacacatattttgtatgttgtatgtattatatacagtatatacagtattcttacaataaagtaagctagagaaaaagaaaatgttattaagaaaatcataaggtaaagaaaatatatttgctattaagtggaagtaaatcatcataaaggtcttcatcctcattatcttcatgttgattaggctgaagaggaagaggaagagcaggtgttggtcttgatgtctcagggcaggcagaggtggaagagaatctgtgtgtaaagcacctgcacagttcaaacccatgctgttcgagggtcaactgcattcttgaaaattgctaaaagactccattgtaagtgttgtcaccacaaaaaatagtaagcatgtaatgtcatgcatatgttaaatcagctcaatttagccattccacaatgtatacatttttgaaaacgtaatgtacacaatatatataattttgtcaattaaaatgggtaaataccttaattaatttaaataactgtacacaatctcatagacaatttgaggctcaccatggtggactggaattgaaaatctcctaacttattatccatctcttctattagaaagagaaggagaaaagaagtctgttcttatttttatgtctgatattttaaatgttttttctgtccttttccattctcttagggagactagaatataggcaatatattaaacaaaagtcttcttcctaaataaaaattattatttctctaatgcaagccattgtaaacagaattgtaggtgccactaatgagcctgaacatgttactcttctccagggaacaatcattaaaagtaattaagttggtcttggggaagagtagggtaaaatgggaaagagagctttacatttcttctcatattactttattttcaaataaataaagtcacctgggtgacaagagtgaaattctgtctcaaagaataaataaataaatgaacaaactggaaaaaaaaaaaaacccacacatgggaatactttctttactggcagaatcttgctagatatatgctaaataatattctctttaaaaggctccagaaataagacataaaatgggagaaataacttccaataaattgctgtgccagtaagaaagttaaaacaaacaaaccagcaaaatatccagaagccaaaaataagatcaaagcacatacaagatgatgaaatatattctaatatatccatacttccctaaatataaatggactacactctatggttgtattggtggagaaaaaagcaaatccatctacaggagatttacaaagacacttgaaaaatgcatggatttgtataaggtgtaaggaagggatccagttccagctttctacatatggctagccagttttcccaacactatttattaaatagggaattctttccccattccttgtttttgtcaggtttgtcaaagatcagatagttgtagatatgtgacattatttctgagggctctattctgttccattcgtctatatctctgttttggtaccagtaccatgctgttttggttactgtagccttgtagtatagtttgaagtcaggtagcatgatgcctccagctttgttcttttggcttagaattgatttggtgatgcgggctcttttttggttccatatgaactttaaagtggtttttttccagttctgtgaagaaagtcattggtagcttgatggggatggcattgaatctataaattaccttgggcagtatggccattttcacgatattgattcttcctatccatgagcatggaatgtcctttcatttgtttgtgtcctttttttattctgttgagcagtggtttgtagttctccttgaagaggtccttcacaccccttgtaagttggattcctaggtattttattctctttgaagcaattgtgaatgggagttcactcatgatttgactctctgtttctctgttactggtgtagaagaatgcttgtgatttttgcacattgattttgtatcctgagactttggtgaagttagttatcagcttaaggagattttgggctgagatgatggggttttctagatatacaatcatgtcatctgcaaacagggacaatttgacttcctcttttcctaattgaataccctttatttctttctcctgcctgattgccctggccagaacttctaacactatgttgaataggagtggtgagagagggcatccctgtcttgtgccagttttcaaggaatgcttccagtttttgcccattccatatgatattggctgtgggtttgtcataaatagctcttattattttgagatacgtcccatcaatacctaatttattgagagttttttgcatgaagggctgttgaattttgccaaaggccttttctgcatctattgagataatcatgtggtttttgtctttggttctgtttatatgctggattacgtttattgatttgcgtatgttgaaccagccttgcatcccagggatgaagcccacttgatcatggtggataagctgtttgatgtgctgctggattcggtttgccagtattttattgaggatttttgcatcgatgttcatcacattaattcaagatggattaaagacttaaatgttagacctaaaaccataaaaaccctagaagaaaacctaggcaataccattcaggacataggcatgggcaaggacttcctgtctaaaacaccaaaagcaatggcaacaaaagccaaaattgacaaatgggatctaattaaactaaataacttctgcacagcaaaagaaactaccatcagagtgaacaggcaacctacagaatgggagaaaattgttgtaatctactcatctgacaaagggctaatatccagaatctacaatgaactcaaacaaatttacaagaaaaaaacaaacaaccccatcaaaaagtgggcgaaggatatgaacagacacttctgaaaagaagacatttatgcagccaaaagacacatgaaaaaatgctcatcatcactggccatcagagaaatgcaaatcaaaaccgcaatgagataccatctcacaccaattagaatggcaatcattaaaaagtcaggaaacaacaagtgctggagaggatgtggagaaataggaacacttttacactgttggtgggactgtaaactagttcaaccattgtggaagacagtgcggcgattcctcagggatctagaactagaaataacatttgacccagccatcccattactgggtatatacccaaaggattacaaatcatgctgctataaagacacaagcacatgaatgcttgtttattgtggcactattcacaatagcaaagacttggaaccaacccagatgtccaacaatgatagactggatcaagaaaatgtggcacatagacaccatggaatactatgcagccataaaaaaggatgagttcatgtcctttgtagggacatggatgaagctggaaaccatcattctcagcaaactttcacaaagacaaaaaaccaaacaccgcatgttctcactcataggtggcaattgaacaatgagaacacatggacacaggaaggggaacatcacacaccggggcctgttgtggggttggggtcgggggagggatagcattaggagatatacctaatgttaaatgacgagttaatgggtgcagcacaccaacatggcacatgtatacctatgtaacaaacctgcacgttgtgcacatgtaccctaaaacttaaagtataataatgaaaaaaagaaaaacccatggatttgaaatgttgacagtgacagcgcagaaagttcaaggaaatattaaataaaaaaattgaaagccatgatagcaacagtaataacaagtgcctttgacatcattttttactgcttctgccactcgatctcctataagtcaccaagtcctgtgttaaatgtctcttaaatgtttcttgtttgggatgattaaaatcttttggaaatagtggcgattattgtacattataaatgtaatcaatgccactgaattgtacccttaataaggcaaaaagggcaaactttctgttgtatatattttaccagaataaatttttttacaagaaaaaaaaaaagtcttaatttaaccctctctcttaatccaggaaaattctccattagtgaatgttccttccatggataacttattacttcctaactggtcttcttgctctccctgttttgtccttcaaccccttatcagcaaggaagccagagtcaaccttatgccattaccctgtttagtaagggcccccgaccatcagtagttctactctgtcagcaggttaaactccaaaccaattaatacggcttcatcatcagcccgttcattttccacaccctgcacatctttgcacactcatcctttaatgtatcctgcttgacatcttgccttgaactgtgttcagctctgcaaacacatgctttctttaaaatcaaggcctttttcaggctcatccttctatttagaacaccctttaccttccccatcttccatcttcaagccaacctctcccatttctcttgctaatcctttccaagtcttcaaattttagcataggtatcccttcctgcagaagccttttctggttccctaaatatagttcaggtgcatatctacctaataattgcactcactgcacagtattaaaatcatctgcctgtaagtctgtatatctcattatattataagcagtaaggtcaagaaatatgtctgtgatatcaaacatttaacatctgggtttacaactatgttaaataattgtcgagttacaatgaaaatgttatttattgttttgtaaacaatacaagaaaatctcttggatgataataataattgtgtctattactagatagtactaaatagatacagtgtcacaactatggaatagtctacaattgaggttaaaggttttttgttgtttttgttgtttgtttgtttgtttgtgacagagtcttgctctgttgcccaggctggagtgcaatgacacgatcttggttcactgcaatctccacctcccaggttcaagcgattctcatgcctcaacctcccgagtagctggaattacaggcgcctgccaccacatccagctaatttttgtatttttagtagggacggggtttcaccttgttggtcaggctggtctcaaactcctgacctcaggtgatccactggcctcatcctcccaaagtgctgggattacaggcgtttaaagtccttcctggtattgatcaataggtagaaagatgataaattctaaattgtttccccttaacatgacagtttgttcggtgtacatttattttgaaatgctatcgaaaattttctttaaactcgttctacatgagatgttagttaaaaacaaacactaaattcatgttaaacctgcctttgttttttttatttcatagttatctaacatagaataaaaaggattaaataagaggggatcagagcaacaaaaatcttcataatctagaagctaaatttcccatgaaaagctgaaaagcttttaaggagagaaaagcaacaccgaaggataccagagtcagagacaacgttaaaaaaaaaattggggccaggcacggtggatcacgccggtaatcccagcactttgggaggccaaggtgggcggatcatgaggtcaggagattgagaccgtctctctggctaacgcggtgaaaccccgtcgctactaaaaatacaaaaaaattagccgggcctggtggcgggcgcctgtagtcccagctactggggaggctgaggcgggagaatggcatgaacccgggaggcggagcttgcagtgagctgagatcgcgccattgcactccagcctggggacagagcgagactctgtctcaaacaaaaaacaaacaaacaaaaaaattgatctgacattccaaacacatgagaaattagtgagagaaaattaaaaattaatgcaacaaaacacattctgctacagtccaacctccctagcaacaatttgcaccatatgcattttatattccataccttgactgtgaaatttaattaaaaataattataaatacagctccttgaggctactgaggatttcacagtttgaattttattttcacaaaatatcatgcatcactaatggtcttgtcagaatttgtcttcagaagaaatgacaactcatccagttcaaatatatccaagtaagctaaatttagatggaatgacctgggaaccttgactcagggttcagtcaatatataaagtgaataaactgaaaactgtccctgtagttccaaatttggccttgatgttcattcatttcagatggaagctctcaagggaacacagaaatagagctatcttcagcactactgaagtgttaattctgcaagaaaataactggataaacaacaacagtaaaatgaatgaatgaatgaatgaatgctggatgcaatagtaaaaagtattttagggatagagaagggttaacataaagatagattcatttatcctattaagttttggttcctattttttctcttttctctgtcttcttttgaccccaaagtaagcttgcatgcaaaaatgtcagtgaatgaagtggatgcctacactaaaaatgcgatctagtttgtttcctcggcattatttggaaaaattgcagtccatagtttttattcggcattatcttagattttctatgaaaagggggaaaagcctcattctgattcctccactcaccacccagaagcactcagtaattttgtgaaaatgtaattgatttatttttgtttacttgataaactcagtgctttagctgggaggatgtcagacttaaatgcaattttacagtctcttcgaaggatacagttagtcaaacatcaggcagctaaagtatctgtctggctcctgaatgtcttcaggtcatggaagtaagtgccctggttacaggtttctccaaatgaacgttaggaatatttccttttctctacgtccatgttgaaagttttttctgttttgttttgttttgtttttactttttcctggcattatatactgaactccagaagatgaggatgtggatggttgagatatgcttttggaacttggaattaataaaggcagatgctaaattgctgaaagcattaaaacctgacactgcgtgttaaatcattgtaagcaaggtcctaacagagcgtttgtgattcgtaaaataaaaattaaaaaaaaaatagtgttctgggctccctggatattttacatcaaagaggcggaaatgaacaacaaacagctgaagcatttgtctctccatattgtagctgctggtaatcttcagcgctgcagatcatgccaaataaggtggaaaatctgtgtactttctgagtactctttaaattattaaatattattttaatgttgtcaccaaacatgtatacaaagaattcataaagaggctgttttagaattaaattgttttatcagttttatgactttagagttatactgaatatatctacatgcatatatatatgtatatgtatatatatataaaccttgtgtaaaagtatatttaggagaaaatcttcactttagatttttctaatatcttagttggggcattgttgggagcaagctccccaaaatctgtccataaactggccccaaaactggccataaacaaaatgtctgcagcactgtgatatgtccacaatggccctaacgcccaagctggaaggttgtgggtttacgggaatgagggcagggaccacctggcctgcccagggtagaaaactgcttaaaggcattcttaagccacaaacaaaagatgagcgatctgtgtcttaagggcgtgttcattcggcctatcccttcgtttcccataagggatacttttagttaatttaatatctatagaaacaatgctaatgactggtttgctgttaataaatatgtgggtaaatctctgtttgggggtctcagctctgaaggctgtgagacccttgatttcccacttcacacgtctatatttctgtgtgtgtgtgtgtctttaattcctctagcgcccctgggttagggtatccctgaccaagctggtctcagcagggcatattatatgccatctgaatatttatttattttaattattattgtactttaagttctagggtacatgtgcacaacgtgcaggtttgttacatatgtatacatgtgccatgatggtgtgctgtacctgttaactcatcatttacattaggtatatctcttaatgctatccctcccccctcccccaaccccacgacaggccccagtgtgtgatgttccccttcctgtgtccaagtgttctcattgttcagttcccacctatgagtgagaatattcggtgtttggttttctgtccttgcgatagtttgctgagaatgatggtttccagcttcatccatgtccctacaaaggacatgaactcatccttttttatggctgcatagtattccatggtgtatatgtgccacattttcttaatccagtctatcattggccatctgaatatttaaacacggtgttttatttttcatttatgtctcactttattttgtgtttacatcttagcaacgtttctttcaatacttcccaaagtaggtgatattttctgagaaatgaatatggatgtaagtgaaaagactagaggcctggagttttagtttggggactgccaccagttataggtgtggccttggtttgtcacttaaattttctgggtgaacaacgtttcttcatctgaaaaattaagagtgttaattaaattaagtgattcaaggtcctcacaacatctctatctgaatgacaatggatgtgtatacttagagacaagtatgaaagtttcatgtaagaatagcaaataagagcagtgacaaataagtgaactagatgaaataaactgacaaaagtaacaatatattttcacattgtcacctttgattttatgatgattttgagagagctcaggagcaggattctattttacagtaagcaagaataaggttcactaaaaatatatgactttctcaaaattaccgaaaagattattccataaaacaaagtgaatactatcttttgacttccagacaaggtctatgcacaactcataattgtaggtctacatatggtaggtgattcttactacaaccattgtttatgacagtataataataagctaatataattgtgcataaatgcgtgagagaatgatttagattatcattgacagaacactggctaattttatcgatgtctacattggcctggagcgaataggtatttggtctgctttgtttttagatccccatttaaactttgaaaagggggcataaagctttctctggttaattatgaaagtcttctatgacagtttacttacaaagaatagttaagacgtgaatttaataatgaggtgcagaaaatatggtaaagcatctggatctctgcctccttgaatctagataatgatttggaaaactgagattttaaaaaaattatgccatcaaatatcattaaacacctagaggcatgtgttattgaaccaggtcttatatccactacactggaccatatgttttcacataaatacctgcttagctacattacgataatatttgcacacattttaatcacatccaaattacataaaaacacaataagatgcaccgggtgaagtaaagcagcgacgattacaaatgtttgcatgttaatggcctcttgtgtttgacataatattcaatttaaggttggaagtagatgggaatggggacatttcatttcaagcgatttttttttctcctttttttgtaaacatgacagagtcctttagctaaatttgaaggagggcttttccaaatacaggaagcagcctgagacatgtttcaccattggttgcagaaaaaattggatgatgtcaatgatgagagggttatcaaagatgcagaagaggaaacgggttattgctataggatcacaaccctcaaaactgaaggtgaactttttagaatgctttacagtggaagggcgctgatgcaggcctggcagccatctttgtgaaggtaaagcagagaaacagacaaggaagcagggtaaggagtgtcttacccttcattcaagaattttacttaaaatctccccatgtcagtaaggcactgcacatttgctctcacctgtgtctgccatccccatgttcagagccttttaaccccttgtcaaacctttccagagagtaatactcccatgcctgcttgcaccgagctgggaagtaaagtgtggtatctggtagctacttaaaagatcttcaatcaaccctgtttttagctccatttcacactcctcccatctaaggaagctggttctccactttctgagccttcttggggtttagcagtaaatagaactatatctttctggcaacctgaatatagggttacatttccccttctctggcctactgagtcagttactaccataccagattataaaattttgtcgatgtgggttttctgcctgttgtttccttttctacactctttgtccttgtagtttatgccaaaaaaaattccattacatacattttattggtgttttgggaggatggggagataaatgtatttaagtggaagttctccccactctctctttaatcctctccaatcagaccttcatccctacaaatccactgaaatacctttgtcaaggttacgtacgtcttacttgccatttcagggcatttgatgctgttggttatctctttcttgaaatactttctttctttgacttcttagacacacacactgtacaggtgttcatctgattagttgcgtcttcttggtctccttcaccgtgtccttcttctcaagaaagtctgggtacttatgggctcaattctagaacatcttctcttccaattctaaacatatttcctggttgaaaaaatccagtcctctaatgccgagtgccatctctgctgatgattgccatatttattcgtctagttctgacatctatcctgagctcctgattgttttatctaactgcgtacttaacatgattctccagatgtctaataaacattcagaaaagaactcttgaacccccatacttcaacctacaatcttccttatctcagtacatagcatcgacactcactcaacatttacacattcatctcatcagcagtctccttcctccctgccttcaatatataacccagatgcaatcacatttccaccatggaaccagccactgtcatgcactcctgcaaatattgtcatcttttcttcttatttctccctttttttctctaccgttagttctcaacagacagagatggtttaaaaacttatattagtctctgtatccattcatacttaaatcaccccagtagtgctgaatctctctgatctgctctctcttggcttctcagttcatccccatccctcaacctcacttactgcactctagtcacacaggccatcttgctttccctccattgagccacgcttgttccaatattgggactttttgtaatcactgtttatctccgaccagaagatactctctgctgcttatgaaccacttactccctcataacatgtagacattttctctcaattgacacttcttcaaggagctttcctatgatcaaatctacctcgtttacagtcctttcatttttctccatgccgcttatcatctcctgatgttcaacatatttacttgtttattttctatttctatttcttgaatgtaagctccatgaagggcgaagaatttttctgtggtccttaccattccatccccagtacttagaacacatgcctggcagggagtagacatttgttgaatataagggtgagagaagaaaaaatggaagagaggaaagcaggaggaagacctgtatgctccaatccactctctctaaccttcatctaggaggggatgtggatgactgaaatataagtaaaggttacatgggttgaccggagcaatggtgggatatgatctttataaacttggtgtactctttcataaattgatatagaagagaattccactgatgtgtggttttcatagcctgtcttcagttcttgcttgacatagatatatcagcaggcctagcatagtgccagccacttcagggaaatgtgaaccttagccggaattaagggtggactccctggtcaatggcttgggtgaaggacttagcaggtgctcacatttattaacgaagagagcttcttggagcttgagccagttctctgcactatcactgactaagacaaagatctcactcataggtagaatctgaaaaagttgatctcatagaattagagagtaggatggtggttaccaatgactagggtggttggggggtgggggagttgaggaaatgttggtaaaaggatatataattacagttaggggaaatgaattcaagagctctattctacatcatggtgactataatgaataacacagtggcatgatcgtaaaatctcatgaattattcttctactcactaacaattttatgatgtttaggaagaaaaaaagttttttatgattttaaaataaaagaaatcaagatctgatcagaaatgttgggcaaaacgaggcaggatccaattctgtagaataaagctggtgaataaaatggacctttgtgaattagagaatattgtctgtagcctcagggatgaaaaacaacagtagaaaattgcagcactatgtgtaaatgcatgatgattccttgctgcactgagctcatgattctcaagatttcaactaagtcttctcatttgaaagtacaagagaaaaggaatattttctaggcctcttccaagttttggtacagccggtaggtggaaatctttctagtgttcctcaaggttgcaaacagcttcacaggaagagaacatcgttagtgctaactaatcaggacctacgatgaatgcatttggtaaccaaagtcaagaaaggtttactcaactgacttgaagaatgggtcctctagtagagatacaaagaaactgccacatctttttcttctcttgagatataactctggaaagcacccctgtcacctttacttgaagcctctcattacttgcacattttctcccaatgttagtgagagagagatttccatgcaccttggttaggatgacacttctacatagaataacaataattagaaatctgagcaacaatttctttagagatcaaagcaatttctttaattgctttatgacccaggatgccaactgaatggagctaatgcctcttctatcaggaaccaggacaatttccagataattatataaaatgtgctattgtaaatagtgctgcaataaacatacatgtgcatgtgtctttatagtagaatgatttatagtcctttgggtatcccatcaatgatagactggataaagaaaatgtgatacatttacaccacagaatactatgcagccataaaaaaggatgagttcatgtcctttgcagggacatgaatgaagctggaaaccatcatcctcagcaaactaacacaggaacagaaaaccaaacaccgcatgttctcactcataagtgggagttgaacaatgagaacacatggacacagggagggaataccacacaccagggcctgtcaggaggtcgggggaaagaggagggagagtattaggacaaatacctaatgcatgtggggcttaaaacctagatgacaggttgatgggtgcagcaaaccaccatgacacatgtatacctatgtaacaaacctgcacgttcagcacatgtatcccagaacttaaagtaacaaaagaataggcctttcaaaaaacaaacaaacaaagaatgtgatctacacctggtaattccaaccagcatattaaccctaaccacagagaatatccaacacgactccagagggtggagacctgggtagagagcatggctgcctccaggagtgaatgcccaggaagctgggcatttaaggagatcagaattagtggctggaatggtgatggaaagactgtatctatatatttttctttttttttagcaaataataggctcaataattttaaacattaaatttttattgagactagacaatatgttctcttccttacataagccattctctcaaatattcttctgcaggagtaccgtaaataatgtacaataagatttttctctttttctttttaattttgttttaacaaaatactgcctattagacaatggggtggtataataaaaaccatcctcactttggagacagaagatgaaggttcaagtcctggctatgacatttacttgtaaaccttgagagagtcacataattccatgaattttcattgcttagtaaaataaaagaatacttattcccatgtacctctagagctttgtaaggataaattaaaatggagtatgtattatcatttataattttatagatttacaaatgtaagtagttattaactttatattttagttctttatatagaatgtcagttcatattattgaaggaaaacataattttttattccatttattaatacaagatatgatattcaatattttacttaaaagtacaataacagtcatcttctcaaaccacatgtatttactaattctcaactaattaggagatgttgatagagatgtttttgatcaatggttcctgtgtatgtgtgtgtgtgtgtgtgtttgtgtatatgtgagaaagacatacagacaagtgtactgtgatgtcttcaagaactggttcagaaatgctgaaagctctggggaactccgtaagccccaggagttggtactggccttgctgataaagaatggtcatgcttgacctctttcaccttcatttctgttcctcttctagctctctgctcccagggcacttggagaaattgcctttctctcctataagctcttctggggcagggcaggattgtgtcatattcacaaccatccatttgccaggaatcagcactgactggcaactcataaatgtgaagcttaactaagtaaagctgaactcactgggtgtctttcttcagctttctttgttggttccgcttactctgctcattgcttcagttcattctgtacactgacatcaaagtggctgcttaaatgcaaaatttcatcatgacaactcatggctaaaaacccaacttcacatgctcggcttctaggtttttcattatctaaatgcatcctgctttactggacctatttctcacactgttgttctcacctgttatgctttctgttcatattgtaggtacttgcaattctaagaatagtgcatggtcttttatttctctagatatttgcacatgctatgccttacgcatgaatatctttcagcctcacctatgagaatttgctcttcacttcagaattttcagaaatttccttgcagtttctctaaccataatgttttcagggaagacactggaaaatatttggcaagcttgacaccgttatgtcttctaatattgaaagcagacatgactgatccgtcactacagtcttcacaagtttcatgttcacaatacatttaagcacccattaccaaatattaacatccgcatataaactaagctctgttaacctagccaggcatattagtcagttctcacgctgctgataaagacatacctgagactgggcaatttacaaaagaaagaggtataattggacttacagttacacttggctagggaaacctcacagtcatggcagaaggcaaggacgagcaagtcaggtcttaagtggatagcagcaggcaaacagagagcttatgcaggaaaacttccccttaccatcagatcttgtgagacttcctctcatgagaacagcacgggaaagacctgcaccatgattcaattacctgccaccaggtccctcccacaacacgtgggaattcaagataagattttggtggggacacagccaaaccatataattctgcccctggcccctcccaaatctcatgtcctcacatttcaaagccaatcatgccttcccatcagtcctgcaaagtcttaactcatttcagcattactcaaaagtcaatagtccaaagtctcatctgagacaagagaattgccttctgcctatgagcctgtaaaatcaaaagcaagttagttacttcctagataagatgtgggtataagcattggataaatacagccattccaaatgggagacattggccaaaacaaaggggctacaggccccatgcaaatctgaaatccagcaaggcagtcaaatcttcaagctgtgaaatgatttcctttggctctgtgtctcacatccaggtcacactgatgcaagatgtgggttcccatggtcttgggcagctccacccctgaggctttggtgggtacagcctctctcttggctgcttctgtcggctggcattgagtatctgtgacttttccaggtggatggtacaagctgtcagtgaatctgccattctggggtctggaggatggtggccctcttctcatagcatccctagatggcgccccagtaaggactctgtgtgggggctctgaccccacatttccctttcacactgccctagctgaggttctccatgagccccccactcccaccctggccacagcaaacttttgcctgggcatccaggcattttcatacatctgaaatctaggccgaggttcctaaacctcaattcttgacttctgtgcacctgcagactcaacaccacgtggaagctgccaaggcttggggcttccaccttctgaagcaaagcccaagctgtactttggccctttttagtcatggctggggtggctgggatgcagggcaccaagtccttagattgcacacagcacagggaccctgggcctggcccaggaaaccattttatcctaggcctctgagcctgtgatggaaggggctaccatgaagacctctgacatgccctggagacattgtccccattgttttggggattaacattgggctcctagttacttatgcaaatttctgcaatccactcataaaatggattttcttttctatcacattgttaggctgcaaattttctcaacctttatgctctgcttcccttataaaactgagtgcctttaacagcacccaagtcatctcttgaatgttttgctgcttaaaaatttcttccaccagatgcactaaatcatctctctcaagttcaaagatccacaaatctctagggcagggacaaaatgctgccagtctttttactaaaacataacaagagtcacctttgctccagttcccaacaagttcctcatctctatctgagaccacatcagcctggcccttattgtccatatcactatcaggcttttggttaaagccattcagcaagtctctaggaagttccacactttcccacattttcctgtctttttctgagccctccaaagtgttccaacctctgcctgttacccagttccaaagttgcttctacatttttgggtattttttcagtaatgccccactctactggtaccaatttcctgtattagcctcttttcatgcttctaataaagacatacctgagactggacaatttacaaaagaggtttaattagacttacagttccatgtggctgggaaagcctcacaatcatggtggaaggcaaagaggagcaaatcacatcttacatggatggcagcaggcaaagagagagcttgtgaaggaaaattcccccttatattaaccatcagatcttgtgagacttcctctcatgagaacagcacaggaaagacttgccctcatgattcaattacctgccaccaggtccctcccacaacacatgggaattcaagatgagatttgggtggggacaaagccaaaccatatcaccaggtttcagaagatgagaggaaactcacccagcactgactcttctggatagcttcttgcctggtaacctcagactgaatgtgtccttcacaggcccaagctcctctcaagatggccctttccttacaacgtctcatgctaggttccagaaactcctcctctagcctgttctggccaagacagtaatggctccactgtcactagaatagggcatttcactaacctctgttcttttcctatacactgttcttccctttgtaaataggttctttattcaatcttctgcaattacctttatttgtttgtgacagctgctttctgctggtaaactgactgacacagtaggaattttgaagctaccagtttaaatagcaatataattttcataattaagtgggatttatccctgggatgcaggaatggttcaacatacacaaatcaatatatactatctaccacattaaaagaatgaaagacagaattaatatgatcatttccatagatgcagaaaatgtgtttgacaaaattcaacatccattcatgatagatactctcaataaggaacagaatgaatgtaccttaacacaacaaaggccatatatgacaatcccaaagctaacatcatacttaacagtgaaaagttgaaagcttttcctctaagatcaggaacaagataaggacgtgtccgctctcaccactttcatttaacatgttactgaaagtcctagccagagcagttaggtaagagaaagaaataaaaggcatccaaataggaaggaaaaaagttaaatcgtcactgcttgcagatgatatgatcttatatagagaaaaccataaagactccaccaagaaactgttagaactaataaagaatacagtaaagttgcaggataaaaaaattaacatatgtaccctaaaacttaaagtataataataataaaaaataaaaaaattaacatacaaaaataaggatgtttctacagtaacaaggaactatctgaaagaaattaagactacaaccccctttacaatagttacaaaaaattatataagaataaatttaaccagggatatgaaagatccacacactgaaaagcacaaaacattgatgaaagaaattgtagaagacataactaaatggaaagatatctcatgctcatgaactagaagacttaatattgttaaaagtttatgccacccaaaacaatctacagattctgtgtaatccatatcaaaattccaatgattttttatagaaatagaaaaatcaatcctaaaatttgtgtggaatctcaaatagcctaagtaacttgatcaaaatgaacaaagctgacagcatcacataacccaatttcaaaatctactctcaagctataggaatcaaaagagtatggtacaagcataaacaaataaatacatcatttttggtcaatttattttcaataaaggtgccaagaacacacaatggaaaaagaatagtctcttcaataagaggttgtaggaaaagtggataaccacacacagaagaatgaaattcaacttttatattacactaaatacaaaagtcaactcaaaatggattaaagacttaaacctaaaaccaaaaactataaaactactagaagaaagtttaggggcaaaactatagaacattgatataggcaataatttttttagatttgacctcaaaagcacaaagctaaaatagacaaagaggattgcatcaaactaaaaagcttctgcacagccaaggaaacattcaacagagtgaagagacaacctacagaatatgagaaaatattggcaaaccatgaatatggtaaggagttgatatccaaaatatataaagaactcaaaagtaagaaaacaaaatacctgattaaaagtaagcaaaggatgtgaatagacatttttcaaaagaagttatacaaatagccaacaggtataaaaatgctcaacaccacctatcaccagggaaatgcgaatcacaaccacagtaaggtatcatctcacatttgctagaagggctattatcaaaaacttgaatgacaacaagtattggtgagaatgtgaagaaaagggaaatctttttaactgtttgtgggaatgtagattggtacagtcattatggaaaacagtatggaactccctcaaaaattaaaaatagaactaccatatgatccagtaattctaccacttggatatatttccaaaggatatgaaattggtatgtcaaagagatatctgcactgtcctgttcattgcagcactatcacaagagctaaaatagatttagctgtttagctattagaatcaacctaagcgttcattagtggatgaatggataaagaaaatgtggtatatatacacaatggaatagctttaaaaatgaaggaaatcttgtcatttgcaccaacatgaatagacatggaggacattgcattacgtaaaataagctaggcacagaaagacgaataccacatgatctcacttacacgtggagtataaaacagtccaacttatagaaataagaaataaaatggtggttaccagaggctaggaaatggagggactgaggacgtgagggtcaaagggagaaaacttcagttaggggaagcaagctcaagcgctctattatacaccatgctgacgacaatcaatgcaaatgtattgcatatttcaaaattgctaagaaagtagattctaagtgttgtccccacaacagataaaaatgtgatgtaaggtatatgttatatagcttgatttaatcattctacaatgtatacatatatcaaaaacatcatgttgtacaacataaatatatataattttacttgtcaattaaaagagatactattggttgtttctgtacatatgtatatgcatatttatatcgtttggatatttgtcctcactcaaatcacatgttgaaatataacccccaatattgcaggtggggcctggtgggaggtgactggatcgtggaggtggatttctcatgaacagtttagcaccatcctcttggtgctggcctcctgatagtgagtgacttctcagaaaatttcgttgtttaaaagtgtgtcacctctgtctctctcttgctcctgcttttgccatgtgatgtgtcttcccccgctttgccttccaccattagtaaaagctccctgaggcctctccaaaagccaagtagatgctggtgccgtgtctcctgtaaagcccgcagaacctgagctaattagacctattttacttatcaattattcagtctcaggtatttctttatagcaatgcaagaatggcctaatatacatataaacatatatttacatattttttacatttaattgtgtttatatgtatactatacataattattaaaatataaaatactttttctgatgacacacatgttacttcagtgtgcaactcattggactaatttgggagactagaaaccacagttcctgcagtgaataattatccttttatttacatttgccagtctttgcaaaatgtcactcttttggatttgtgcttagcctgaaattttgctcaacatgggtcattccattcttgagatatttttatgttttatttaatgtttagttgtcacctttcttcaatttgaatttctttgatttgcccacagccttttccccttgaacatattgtccttaacaaaggttgcacacagcagttacacttccactttaaaatgtacagttatcctaagtgagtaataaaagtgacagaggtctctttcacctctacaataaagtcctgtcattgaaacatggagaaagtttttagaatatatgcttgctttcttatttgagaatattcaatgcttttacaaaaagaaaataaacaggagtgatacaactgataaagaatgttaagcatagatagtgagaaagctatcttacaataaagagagagagagagagaaaccttataggatgtgttaagtctgggtatgaataagcaagtagtttttgctatgtaggcagaattcaaaagagatgttagctagatgatgtatgatgataatctctaagaatgttaaagatagaaagaataaatgggttacatgatgtaacaaatacaagactttcttctgaaaaaagacaatatgaaaaggccgaatcataagacatgattctctcaattcacagctatttctaaattcactgcccattggtagcacatgcaatagtcccctgatggctccacatacactatgcccaataaatacagataaaacccacatctgttcagcaagctaactggtgatgtcatctgcagtcaggaatacttgcctgattatctcaaatacagcaagtgtattctgttgccccaagcatcatctattggcccccaacatcagctgggaagggtgatgaagcagagagagagagagggagagagcataaatatggtaatgtgttaatctaaaatctataattcagggaggatggcccttcaacctgcttgaatcccaccttacctcttttttctttcttcttgtttcttgctatgtatttaaaatagatttgataagtgtgtgattgaagaatattaattttaacagtgagcttttctcttctatgacctctgaataactttcctagaagtgtcctgcgaagctacgattgcattaattttcctacatgactgttgcaaaaaaattctagtcttctacttgaattctgtgagattatcacttactgggatcatgtgatgtatttttaagatgactggataatgccattcatccatgtggttatcaagcctattacttgaatccatgtattcttctaggccaagtcactatgctgacagcatttgtgatggttaattttagtcatcaccttgactggtttcaaggaatatacagatagctgctaaaacattatttctgggtatgtctgtgagggtgtttctggaagagattagcatttgaatcagtagactgagtgaagaagatctgcccttaccaatccgtgtagggactagatagaacaaaacaacagaggaaaggtgaatttgctgtctcttctggagctgggagcttctccagccctcagacaacagagctccaggttctcaggcctttggactcagactgcattacactacagacttccctggttctcctgcttgcagatggtgtatcatacgatttctcagtctccgtaactgggtgagccaatttccgtagtgtatctcctcatgtatctctatctctttccattctttacacctatttatctaatccatctgtatcacattagttctgtttctctggagaagcctgattaatatgccatcctattcaattaaagtagtagggctcaaatttggttgctcattggaattacctcaggagttctggaaaccaagttgcctgcttttagtgctgtctgggggtaacatacataaaagggtttcaattgagccatgtccctgttcctcttaccttgactgccataagcccaactgcaccattcacagcaaaaaataagaatgcttgtccacctctactacgaaaggagctaggatgaaattgggagccagtggtcaatctcatggtaagtacattcaggattttgcacagttctacagcatttgcaaccaccagcattttcacaaataaaccttcattgcgtatctgtccttcctgattcccaactgcacatatgtgcaaaatctttttaaaaagtctaaaataatgcatgtgccgatatcattttgactaaaaaatgacataataaggccatttctgtattgccaatgttttttatttttttctgctccttgttttatttttcttgtaaccagaccaatctcttgcatagtctctgtttcttatgttatttactttttcttctgtaaacttgctctcacatgacttttattcactgcttttcataagattttgtactttgtgacttgcaggatattacttaaataaataaaagcaaaacttataaactcaggaaatcaaagagcttttagtccattccagttttaatttatctttgtaggatctgacatatgaagctttactagcaagggaggtgacttattgtaaaccacatggattttggaaattgaggtttgaatcttggtttagttagtctacaaccttgagaaagttatttatgtatctgcaaaacaaggctaataataccaaactttcaaggtcattgacatacatacatacatacattcatgtctgtgtttatctatctatctatgtcgtatttggaagcaaatggtagctactaatagcttgccaactctgggtgaaagcgagattgatggctggggagatgggctggtgaaaagtaggtcttgtcaattattttttagacatagtttcacgattattctaagtaaagggcaccaaaatctccaaaaggagaattcgaaaggaagcatggcaggcaggatgtggatttgaatataatatacccacatgacttatgactaaaggcaggtgaccttttatagcttttaatattgcagataaaattacgcagcctagtatcttgcaaatttgttagctaaaatcttaatgtgtctgaatgatccattttattttgaagattacatcacttcaactttttgaaaaagtacttattgcaggatacaaaagaagattaagatgtggttcttggccccattgaattgtaattgcaataggaaaacaagctatgtacaggtgaagtagtttagatagtgctacaagatggtatctgatttcaagtttatgattgacagataagtacagataaagtctttggagaaagagatcaatgtgggctggaattgtctgagaaattttgctaaaagtcaggtgacttgagctggctttaacattttgaggttaagggacggagggtattttctgatgtcaaatgatttgaactatggtttcctatcacatagggattcattaaattgtatttcacttgctctcatttttcttagagttgcagggttattcatttttaatgtctaattttcaggctctcacatcaaagggagctatttaaggaatattctgtggctttagtcctgaacaccttgctctatcagaagcgccacatagcctctcatttgtaaaacttgatgcatgtacagggcacttattgcagtgtcaaggtacaaaaattatttcaatttaaactatcttcacactgagaaccaaactttaagatgttttaatgaagaaaaacccatgcgaccgcccatccattcctaggtaccatctgccttcaaatgccctcctcccatttacatatctaattcttcaatggcagtaacagatcactgcacgatttttgctggaggaaagaaatagtaggagcttttcataaagcacatttatgtctctgaaggtttgaagtcaaaaactaatgttatgaagagaactgattttatacttactctgactgaaattaaaatgaatattggttatatctggagggattttgtgaaacaatgccagtggaagaatgagaaactgaatatacacatacacataacacttttatgactgagatggcatgggggccactgaagccgagtaagaagctgccacacccatcatcttgattggctttcgtcttaaatgcacttggtctgacacaatttcgtcagggaaatgcatactctatgtgccagggaaccaaaaattaaatctcctttcttgtagcggaatgctttctcttcaatctagcctgaatctgaatctggcttctagggcaagactgaagatacactggagttaaatattaaatattattttaaaaatttcaatgcagactgaaactacctcacttctgtcctagtcaagagaaacaaaacgaaataaatacacagcagtactgagagtaatatgggcccagggtttacatgagcggctcagagatttctggaggacttctgaaagacaggaagttaatgagattctatttatatgagtttcctagggctgccataacaaattactacacgcttggtgacttaaaacaactgaaatggattctcgtgcagttctggaggctgttatacgaataaaagagaacagagttgctagttgtccaaaatttgcccagaagggagcagaagaagtagggaagatggatactattgtcaagggtagggcctcaggaggttttaagcttcatgtgatcaaatgagtaaagcaaagttgtaatggaacaaaaatcagggaaatcattgaggttttgtggatgaatagttctatgtctttccaacttccctttctcttccctccttttggcccattctgagataaaagcaggcagagttgcctttacgcctgaccttcttgctagctacgaccagcaaataacactctcatgtaataaccattcttcctgagtaggattagtcctttgatttattatgattctctggcattttagggcaatcttagctgctctcctgctcatgtcaaggttgtcttgacatgcctgtctgcacatagagttcagagccagcctgcccactcagaagacagacctgctgatgatgaaatcattcacaactgaaacaaaatcttacagaagctacgtgtgtcagtcatctagttctttcacatgaatataaacagagaatcaaggatcatcagacacatgcagctctcactcaggatttagataaaagtcacttccttgggaaaaaaatgatttctactttatctgtatcgctcttgagttcaatcagtagaacattcatgagaaatccaccccatgatccaatcacctcccaccaggccctacctccaacattggggattattacaattccacatgagatttgggtggagacactgatccaaactgtatcacctgcatacacattaattcttttattactcggagctagagcaccaggaatgagattgctagattgaagggtatatctagttttaattttaataactgttgccaggttgctttccaaaaatgccataacaatttatgtttcagcaacaatgtattagagaatgctttccctgaatctttgcccacaaacatattaacacatttcgtttttaatcagtttgatgggtataaagtgttgtgttgtttaatttgcatttttctaattaccgacaaacttcagcaccattttctgttggtcatttggatttgagcctctgtgatttgctgtgttaattggattaggtttatttgcatatggcagaaaaaccaaaaacaacagaggcttaaattggatagaaatttgtttttgtcccttgtaaaagtattctggaggaagggagtgcgggattggtattgtggctttgcaaactaatcagggacccaggcgtcttctagggctgcattttgctctccttagggaatggctgtggtcctcagccccacgttccaagatggctgctagagtgccaggcatcacaccctcattccaaccagcaggggagaggcaggcacaaaggaggacacactccttccctttaaggagtcttcctggacataacacacaacacttctgcttgcatatattgaatcagaatttagtcacatggctatacctatctgcaagggaggctgggaaacatggtctttcaattagataaatggcaactctgagtaacatcaggattctattactgagaaggatgggggttggggggatggcaattgaagtaagtacctagaaatctctgctaaaactgccttccttttgccagttttttttccatttggctatttgccttttttttttttttttttgtcaatacagatggtccccaatttaccatggttcaatttaaggatgttttgactttacaatggtgtgaaagtgatatgcattcgatagaaactgaacttaaatttggaattttagtgttttcctgtgctagccatgtgtggtacaagaccgtcttgcaatgctggccagctgcagtggctacagctcccagtcggtcactcaagtaggagggtaaagaactgatactgcggccgggcgggatggctcatgcctgtagtcccagcactttgggaggccgaggcgggtggatcacgacgtcaaaagatcaagaccatcctgtccaacatggtgaaaccccatctctactaaagaaatacaaaaattagctgggcatggtggcatgtgcctgtagtcccagctactcgggaggctgaggcaggagaatcatttgaacctgggaggtggaggttgcagtaagccgagattgcgccactgcactccagcctggagacagagcaagactccatctcaaaaaaaaaaaaaaaaaaagaactgatactccacagtggactgccttgccagatgattttgtccagctgtaggctaatgtcagtgttccgagcgcgtttaaggtaggctaggctcagctatgatgtttggtaggttaggtgtattaaattcattttcaacttaacaatcatttcaacttacaatgagtttatgtggatgtaaccctatcttaagttgaagaggctgtgtatatgtatgtatgtgtgtgtttatgtatcatttctttggagctttttggattttggaattgtaaacaagaaattgcgacccatattttcacccctattttacagaggaggaaactgagacacagaaaagtgaagtaacccgcctggggtcacacagtagaggtctaagtcaggattcaaagccagcagtctggcccagagctccaaatctttggccttacaatactttgccaccgcaacagcgtgatcggtgacaggcccgctgtctgtcctgggacgggtcagctgagcccccattctgagagtgagccctctggctgcttgttgcacactgggcttgggttgcagggctgcaggccccctcgctggctggctcctggaagcgctgtgctcccacaaaaagccagccaggcctgagggctcagggctcacaggtccatggaaatcagccccaggtgactccttcccacctctgcccatgaaatgtgcctcccaggctccaggtttcccctggaatacaggcccctggtgttcccagtgctgtacctgcagtgtctgctttgctctgaggccatggcattattgacttaaaataagctgcttgggcttttaaaaaacaaagaatctgcagactctgtagcccttttcctttccacctgtgctggggagcatggcagtggagagggtgggcaggccgcttcctgttgcgtaggtcaggccccccccagcccgccctgctccacgctctggcccctctatcaagagctatttctcattttttccaagcatgaggttcaggtgtctccatcctcccaggcccccggccccctgcccagggatgcttttatgggaccatgtctgccctcaactgggccgccccgagttctctccattttattcccctcatgcctcaagtggtgtttgtttgtttgtttggttgtttctggagatccgaatacacaacacttggggttgaggtttttttttactttgctggctggagtctgcttctctaagggtggaggagggaatgaagaaaagtcctgagcacattgctttagaaacctaatctagtgtggtcaagtggaaactcaagggcagtctgtcttggaggagagcgagagggacaggcagacaggtcgtggggctccctcttctgggcctgccgaatacaacctgctccgcccatgcctcacttggtccttgcaacccaggactcgtgcttttcctccccctagttaatttagtccattattttttcattctccatagaatattggttttgtaacactcaatacagtttaatatataccatttagacaaaagttccaccttacgaaagatcagcaaaaatacatcagcaaagatataactagtgcatttataaaatacatcataacaaggaatccaaacgatcacacacaataatcttcacgtttgacatactggttacagcctaggagagctcgctaaatgccagtgtctttggcaagtgattcacatctgtaagctgtaaacccaaaaatatctgagacaggtctcaatcaatttagaagtttattttgccaagttaaggacatgcttggaaaaaaggcacacaaaaccacaggaacaatctgtgatccgtgactttttccaaagatgattttgagggcttcagtatttaaaggggaaaagcgggctggaggggaacgagggaggggacagttgcattactgaatccacatgttgcaagaaagaaacaggtaggggaatggtcaaaaatgtgttcaatttttctttctttttattttttttgagatggagtctcactctgtcgcccaggctggagtgcactggcgtaatctcggctcactgcaacctccgcttcccaggttcaagcgattctcctgtctctgcctcctgagtagctgggattccaagcgaatgccaccatgccctgccaattttttgtattttagtagagacagggtttcactgtgttgcccaggctggtctcgaactcctgagctcaggcagtccacccgccttggcctcccaaagtgctgggactacagttgtgagccaccacacccggcaacatgtattcattttgtggtcagtaaattagcactttacccaagataaagtgaacatagagtagctacctgtggagatatctggcctttcatctgtagcaatctgcttacgaacagaaggaaaggcagtttcttgcacggcccagccttcagcttattttttttcctttcggcttagtgaaatggaatcctgagatgttattttcctttcacaaagcagtaacactgatcaatcctaacacctctgaaatgttagttcttgatcagataaacccaaaataaatcaacaagagtactgaaatatgacgaggatgaaatccaaagtttttgaaaggggcaatgtttaataataagaagaatgttgaattgggagctagtatatttgggttcttgtctttttcctgatcttgggcaagtaatctaggatttactaatcctttacttttatttatttttatttttattttttattttttgaggcggagtctcgctctgtcacccaggctggagtgcagtggtgcgatctcagttcactgtaatctccgcctcccaggctcaagcaattctcctgcctcagcctcccaagtagctgggattacaggtgtgtgccaccgtgcccagctaagttttgtattttagtagagatggggtttcaccatgttggccaggctggtctcgaactcctgacctcaagtgatctacccgtctcagcttccctgggattacaggcatgagccaccatgcccagcctaaatccttcacttttaaaatgggagagttggctggatgtttccctatggtctttctaggtttaattttccatgcttctaaaatcttccacgctggttcattttggtgttgcaaaatgcaatctctaacaattctaacttggtagttggagtgaatccagctctgcccacacaaatctgctcaaatagtcgtctgtcttctgagccgcgagagagctcagtcctcaaattaacgaactgtgatgacaggcttcatgaggctcacagctggttctccactagacacaaactcaagataagtagttttaaaggtctcaaagtcatggtttgaacttcctcacagctggggcaaaaagggacacaccctaagtttctcaattctcactatgtaccacctcacaaattccatccccagcctctttccttacccctcactaaggttctcaaggcttcaataagcacctactgtatgccaggctcagggcaaggaagagatagccctgtcctcagagggctctcagtggaggggacagttttctaaacccttgtggatattccaattcctggggcatgaattagttgagggagctgccccagcatcctacaaaatggaataggatggggtagaaaacagcaaaggtcaacatcatatgtggcgagggcgggcctttctgcctttcttcctttcttccttcttccttccttccttccttccttccttccttccttccttccttccttccttccttcttctttcttttctttcttttcttcagatggagtttcgctgttactgcccaggctagagtgcaatggcgcgatctccgctcactgcaacctctgcctcccaggttcaagcaattctcttgcctcagcttcctgagtagctgggattacaggtgccagccaccatgtctggctacttttttgcatttttagtagagatggggttttgccatgttggccaggctggtctcaaactcctgatctcaagagatccaccctccttagtctcccaaagtgctgggattacaggtgggagccactgcacccagccggcgtggtttctttaaagatgattctactcgttggtgtggacatgagtcctgggacatgagttcagagcaaaattgaaagcttaacccagagagttaaagagttaaagcttaaccagagagttaagtttaactctcatagtttaaaaacaattttattaacatattatatgtcaattttgtgagacctcatgtcctttttgaaaaaaaaaataaaaaataaagaaaagaaatgcatgtggctgctgttgctgggggaggttgtggctctgtgtcctccagggaaggggacccagcacagagcactgaggtgcaggctggacaggccaggactgcacggcacgcagcctgctatgtcagctggccccagatgagccccatgcattacagacacttaggaagcaaagccttccaccaggacgctggacaactcaagacacacagactatgcctaaggccgacagctgtgggaggaggcctggcctggaagagtaggctgttacttgtccctcctttgtgatgggagctgacactgacagaggaagccatggcaccttttccagctagcaggagggtggccccatttcaggcctgttgttcttttttttgaggtggagtcttgctttgttgcccaggctggagtgcagtggcatgatccttggctcactgcaacctctgcctcctgggttcaagtgattctcctgcctcagccttccgagtagctgggattacaggcacccgccaccaggcccagctaatttttgtatttttagtaggacaggatttcgccatgttggccaggctggtctcgaactcgtgacttcaggtgatccgcctgcctcagcctcccaaagtgctgggatgacaggcataagccgccgcgcctggccctgagctgttgttcttggcattctgaacgctccatttgtcatctgcacaaagcccaagtcaaaaatgtcaggtatcattacggatggcacctagactaggcagatactcccttttagtgtcccttccagaggcctgtgctgtccatccgtcatggcctcagccactacaccgtctacagtcacttccagtacaaccctctgctttccactctacatctccagggctcagcctggtgcctcaaacataaacacatggaaagtttgttgacccacaaccgactgactgtccaagtgactgaaaacagagtttcagagcttcctgttgcttcaagaaattcctaccaggaaaagcaggctttaacacagaatcctcccctgtatgcagttgccttttcaatttttttttttttttttttgagatggagtctcgctctctcacccaggctggagtgcagtggcatgatctcgtttcactgcaacctccacctcccgagttcgagaaattctcctgcctcagcctcccaagtagctgggattacaggtgctcccagctaatttttgtatttttagtaaagacggggtttcaccatgttggccaggctggtcttgaactcctgaccttgtgatccacccgcctcgacctcccaaagtgctgggattacaggtgtgtgccaccgtgcctagctgccttctctattcagtcgtctcaattgcagggcccttccctgctccccaggtgggctgggttaagaagccaggacagagtcttcagtgagccctgaagtgggttctttgctcccaggtctgggttcttctatagtgaattctcctggctgtcagctccaccttcctccctgagaggtactcggacaaccttcttttcctcttgccctgggagaatatttgcttcatttttttcccccctggagacctgaatttattctttaatggaaatttaagcactttgaatttcatctggcttctgctttattatcttagggttaaatgctaatttctgtttttaagaaaagcctttcggtttttttaaagtcttgaatccagtcccagtgcaatccaaaaagatgggtttattacatcaggatcacagacagacgagacttttgccttagaaggaagctaaatagcatctggttcaccctctgcattttgttaattttaaaaaatctcagttcctcttatttcccatgcccagcattcagaactggatccaagttttggggacatgaagcttattatacaattttggggataggtgttgtcctcttgatgagaaagagacaaagttacagacagaattcaatgcagggccttggacagggcggctcaggtgagggactgcaagcttaggctttgttgccttcacagtaaacccgcctctgcaacaagcatgttctgtggatgccttgggtgcttcctgtacattcctgtgtcattttaccttcaacacccgaacaagaaatatttcctgcgtaggtactttacacatattaccttgttatctccaggtagtgctgcgtccattttatcatgtctgtacataaggtaggtacttcattccccaacaggggaaaaaaagagcttactgttcccagtaattccaggaaaaggcatgggaagggcttccattgtctgccttgggtgatgtcgagctgccttaagctgacggcttgacagtgggggtgaagggcggtgactcccccagggaatagcaggacattggaatcaaagtgggtggctgctggctgcagaaacagaggcctgtggtccccagggttccaggccagtatgcactccatgtgccctgagggttggatcattaaagttggtgaaaggcatttggctaggccaggggcggtggttcacgcctgtaatcccagcactttgggaggcccaggcgggtggatcacctgaggtcaggagttcaagaccagcctggccaacctggtgaaaccctgtctctactaaaaatacaaaaattagctgggtgtagtggtgcacgcttgtagtcccagctacttgggaggctggggtgggagaatcacttgaacctgggaggcagaggtcgcagtgagccaagatcgtgtcattgcactcctgtctgggcgacaagagggaagctccctctcaaaagaaaaaaaaaaaggaaggcatttggctgagtctttgctagaatgtgggagggcagggcaggggcagggctaagacaataatttcaagataacttcacttgaggtggggtggaaagtgcactgaattcatccaacagccttagttgtactttcaaggtcggcatcatcctccccggcaggcaggtgaagagaggctccgtggcttgtcctggcccagcccttccgtgacagtgcctttggcctcatggactgaggtttcaggaagtttgcgacagtgtctgcgggtctggacactcatgtgacatgtggaggacgtcctgcaacatgctgtggaaacaccctcatttgtctccagcgctggggattgcccagggaagagccgcctgttgtccattccccaggccttgtaatactttctctaactgtgcttgggggtcctggaatttgtgtgagaaaatccatgggtccacatctgggctgtccgggtagaggggccatccgtacccctccctcactgtgatgggtggcactgcatcctctgaggactcgtatgttgaagccccgtcccctgtaccgcagaactggtcccatttaggttgttgcagatgtaacgagttaagacgaggccatactggagtagggtgggtccctaatgcggtgcaactggtgtccttataaaaaggggaaattcggacccagagacaggctcgcacgtagggagaacaccaagtgaagatgagggcagggatggggcgagacctacaggccaaggaacacagaagattgtgacaaccaccagaagttagacaagaggcctggagcagtccccagtcagggcccccaggaggaaccaaccctgcctcaccttgatctcagacttctcgactccagagctgtgacaagataaatgtctgctgttgaagccgcacagtttgtggtacttcatggcaatcccaggagattaatatatgcacatcacgcagcccaggaccccagcaggcctgcaggctctggcagcggctgttggaagtggcccgtggtctgcccgggggagacactgacaaggcctcccaggctgccgttagcctcctccggtctgccctggctgacttttccccctttctcttttcccaaaacaaaccccagccctcttgggactcattcatttctgtttaccagaaacttagcatgtaactgtctcagagctgttaaaagtgccgcctcttcactgcagggtccttgcctcaagttaattagcctgaggaaatttccagacgctccctttccaaaaggctgtttggaaaaagccctccctgggtgacctctggcagtgtgaggggctgagggctaccctcctccctgggagcagacagctctgccacttccccatgtgcatcctccagtcagtgactggacatctccaggcctcagtttccccgcctgtgcagcggagggctgttaggaggattaactagaacactgcggtgcttggtgtgtagagagtcctctccatgtgttggttactagaccctttgttcatgttgtttccatagagaataaaacaaaacaggaacacttgcttgggggagggagggtgcaggaaaggttgtccagttgcaagcgtgagagagatttatgtgtgtcattttgagcctctgaaatggcagatccctcccgggagggacagtccctgagccagcatccccagcacccccaaggagttagaaaggccaaacctggagtgccgcccaggaacactgcaacagaaaatgcattttaacacccagagattgggggtgccccattacagaggcactgctttactgctggggccaccacccatgcaaaccctttgcctcggaaagaccagcccagatgcctccctccaacagagccagcgtccctggctgccctctggttctttcccaggggcactccttgcattgctgtgacactgccgtcacttgcacccccattcattgctctttgcagacacttccctcccccagcaatgtgactgaggaaagaaggagggttccatggtgaatatgagggatgtgggcatggcatatctgggaaggaaagggggacccccgacaccccgtcccagttctccaaagccctcggagcctgcagaagagctctgcacgaaggaataggattggcagagggacagagcctctctgtcaggcagaagtcaagttgagtgatgggcacccacctggacagctgagacagggtctcaatgtctgaccaggctgaaggggaacttgggagggctggttcttagcaatggaaaggttggcgtgacactgaactctgcctctcgaaagcccgaccccacctatgggagacggcagcggtagaggtcaccagcattgcttagaagcagccccctgcagacgtctcccctacccccaccctgggcaccagaaggggaagcccgcaagaaagggcaaggccagcgcaggatcaaagctcagcctcctctccagctccaagactgtggctctggctggcatgggaaggggagatgagtttcaaatggagcttgagagtgaagatttaaccagtgaacgggatggaatcctaactcctacaagcagtaaccaaaagaagtcgaaagcttatggctccctaataaggacttagggagctgctgcccagtgggaaaggggggttctgcagttaagaggtagatgctggaggaaaccaaaccatattgtgtataaaccgcaggggagagactcctcaaccatatggctctgctgacccgtggtgaggatggaatggatgaggatgcaggccctgtaactggatcagtaaaaggccccaccacttggagcaatgaaccttctgttgagctccttcaccccctgttcttcctgctcaatcaattcgtaggcctccatatagtcctttctttcagcctgaagaaaggtgtccattaccacccccagtgccccttgcattagtcaggtctttcagtgaaacagaaccaataggagattcatataataaataattggctcctgtgactgtggaggctgacaagtcccaagatctgcagttggccagctggagacccaggagagccggtgacgcggttccagtctgaagccagcagacccaagacccaggaacagctaatgcttaagtttgagtccaaaggttggggggcttggagagggtgacaaatgtcccagcttgaaggcagtcaggcaggaggcgttccctcttactcatgggagatcagcctttatgttctattcagaccttcagctgattggccactttcgccctctccttgtggtcctgtcaaactcctgggaaggtggggaacacttgccctcctacttccttgcctgcctcagctcctcggcccactccacttgagcttctgcctcctgcactgtcattgggtgagtggctgatggctcactgactgccaagtccagtggacatgggcagccacaccttacttgacctctttgggactctcagccctgctggccttgtcccatcttcggtccctcccaagggcttctgaggtgccaccgtgcactgctggtgttttcacagcactgactgccactttctggctggccccttcatcttgtttgctgactcctggtcttgtgtttcagcctctaaccctggtgttaccagagatgttgtaggttctctttcatccttgaccttttccgtggggtgggtcacatcctttctgcccactcaccaatggccctcaaacctgccccacatccttgacttctgcctgtgttcccaacctgtctctcccactgtttctggacatttctgtccacatgcctcaagacacattgacacacaaccttccccaaacagaaccctttatcttcccactcacactcccttgatatagcctatggccccaacaccagccccacaccgtcctatactcctccctctcctcatggtcaatggcccacagacgcttccaagtggacctcttaatccccatcacatccattccttcttcctcatccttaacaacacatcaagctgtccagcaccacttcttgtttcctttctagcctccctttctcccattttctcacattgctggaatgatcttgctaaaatacagtttagttgtatctgcccccacccccagctctgggggctattacacagagctgcttatcatttgctgtaattgtcatgccctttcacatatctatggcttagctcatatcattcccctagcccagaattattctttaccctttctgccttatcacaaactgcctggaaataataaagcttagagcagggtgaaaaatatagagaacagaagaatgatagagaaaattaatgaaaccaaagttggttctttgaaatgataaaaaaaatttgacaaacctttaactagactgccaaaggaaaagaaagattcaaattactaaaatcaagaacgaaagagacaattccatctgcatatttttcaaatatagacaagttgatcttataattcatatgggattaaaggagcccagaatagcccaaacaatcctggaaacaaggttggaggatgcacagttctctaattcaaaacttactacaaagcaacagtaatcaaaattggcacgagaataaccatatatatcagtggactagaactgacagtcaaaaaaagtcctcacattgaaggtgtcaatggattttttacaagaattctaagaccattaaacagatgaaagaatagtcttttttttacaaattataaatgttcatctctaacacataccacatactaaaaattaactcaaagatctcaatataaaagttaaaattataaaaatcagaagaaaacataggtttgaaaatttgtaatcttggattaggcaacagctttgtggatatgacaccaaaagcacaagcaatcaaagaaaaaacagataagctgaacttcatcaaaattaaaaaaattgtgcatcaaataacactatcaaagtcaaaagacagaccacatactggaagaaaatattgcaagtcatatatctgataagtgtctagtttctagaacatataaagaattcaaagaattcatacaacttaataataaaaagacaactccaattaaaaatggagaaagaaatggaataggcatttctacaaagaagacatagaaattaccaataagcacatgaaaatatattcagtatcactagtcattagggaactgcaaatcaaaactacagtgaggtaccacttcacactcactagtatggctataataaaaaataataacaagtatcaacaaggatgtgaagaaattggaacccttatacatttgtgggtgggaatggaaaattgtgcagcagctgtggaaaacagcctggcagttcctcaaaaagttagatgtccggttaccgtatgatccagcaattccactactaggcatacatccaagagaactgaaaacatatgttcacacaaaaatgtgtacgtgaatcttcatggtggcattcttcgcaatagccaaaacagaaacaacccaaatgtcctttgactgatgaatatattaacaaaatgtgataaatccatacaatggaatattatttagccttaaaaagatgtgaagtattgatacatgctaaaacatggatgaaccgtgaaagtgttaaagaaatgtcagtgaaggaagaagccagatgtaaaagaccacatatcgtatggtttcatttatttggaatatccagaataggcaaacctatagaggcagcaagtagattagcggttggcaggagctgggaggagtgcagaaatggaagtgacacctaatgggtagaagggattttgggaggcgatgaaaatgtcctggaattagatcatggtgatgattgcacaacttggtgaatatgttaaaaatcacagaaatgcgtccgttaagatggtgcattttatgctacatagattgtatctcaagaaaacctggaatctaatctgggatcacacattgcactcattcttcatgtctctttaatctcatttagaacaccgcacctcctttcctgctccctcttttcatgatattggcatgtttgaaaagtctaggccggtcattttgtagaatgtcctgcagtctagatttggcttgtttccttatgactagattcaggctaaacaactttttggggagaaattaattttcttaatgtttgttgttggtgtgaagaaacgcaaatgatttttcatagtaacctttagccagtaaccttgataaattatttcatgagctttgatgttttacctgttttcttttaattttttatgcatgcaatcatgttatctgtaaataatgacagtttactttttcctttctaatcttcaccctttagttgcctttccttgcctcactgcactgaacagacggttatctcccaaacctcctaacgttcatctcgggcaaccattagtctattttccagctctgtaacttcattattccaagaataatggaatcatatagtgtgtaaccttttgagattggctttaaaaaaaaaatacttcccttgaagtctattcaagttgtgtgtcaatgtcgacatgatttttagaaccagactgcacagatctattagagaactgatatttttaaatattgaatattccagtctattgcatagtacattgcttactttatttatatctttaaattttttctctaaatgttcatctttttattcttttttaaaaaaggtggtacataattttaattgtattccccttttcctatgctttggaagattttgtgtagaagcagtgttctttctttcttaaatgtttgtaagcattcacttgcaaaattgtctgcacctggttttctttgtgagcagatttttaattacaatatcttttttaattttttttgatggtaatgtgtttctcaatgctgtttgtctttcagcctctatttctccttcactttttgaaggatattttcactgggtatagacttccagtctggcaagatggcatcaagatgctgttcctttgtttcctggagtccattgtttctattttaaaatcagtcatcagtcttagtgttgctcctttgaagataattttctttttttttttccaaatgctttcagatttttctctgtttttgcttttcatcagtttgctataatgtccctagatatggtgttgcttctctccttcttgggaattatagtgttgcttgtatctgtggtatcccatcttttattcatttttgaaaattctcttcttttcaaatagtacttctccactctgtcttctcctttcctctgtgactcctcataacaaatatgctagatatttttaccatactctagacgcctcttatattccttctgtattttccaacattttgtctttctgtgcctcagcatgtattttttttctgattccatctcccaattcactttttcttcagttgaattcaaactcctgttaaaccaatctattgatttcctaatttcagtttgttctaaagttttaagatttaggatttctattttgaatgctttctcattctctgacaaaatacttctgtatttcttaaaccaattaattatagctgtatgaggtttgtttctgataatttcaaatcctggatgctccaaggatatgtccctactgttcattgattatcttgagttttgttaatatcttaacctctactattcctggctttttaaaaattaaatgccgggcattatatgtaaacatttaagaggtaatttgaggttctggataattgtatctacattttaagaggattactttttctctaggcaatgagactagaagccccagttaccccaggtcatcttaatatcatcagggactgacataattttgcggttggtcttcagttcctttgagggctgatccctttttagtatccccaggtcaaaatgatttcaaattctgagctaacttttctggaattccgtctcttttccataatttctcactcacttgtttgcttgccaatgatgtcaagattttctgttgttcttgagggagagctgttctgattcactcagtctaccattaccaagcatggaacctatttcatgacagtttgtttcttcatgtgttttgtgacttttgattataaaatcatgttcctagtcactatctttgagaaatcgttaaggcctcagcttaaaccttttggagagaacttatatttgcttatgctagatgccaggaagcacagtcaacttcagatcactttaaactaaaatttctggctgagagcagtggctcatgcctgtaatctcagcacttcgggaggctgaggcaggtggatcacctgaagtcaggagtttgagattagcctggctaacatggtgaaaccccatctctactaaaaatacaaaacttagccgggcatgttggtgggtggcagtaattccagctacttgggagactgaggcaggagaattgcttgaacctgggaggtggaggttgcagtgagccaatgcgctctagcctgggtgacagagcgagactccgtctcagaaaacaaacaaacccaggccgggcacggtggcttacacctataatcccagcactttgggaggctgaggcggggagatcacgaggtcaggagactgagaccatcctggctaacatggtgaaaccccgtctctactaaaaatacaaaaaaattagccgggcatggtggcgggcgtctgtagtcccagctactcgggaggctgaggcaggagaatggtgtgaacccgggaggcagagcttgcagtgagccgagatcacgccactgcactccagcctgggtgacacagtgagactccatctcaaaaaacaaacaaaaaacaccaaacccaaaactttctatttgcgagggggcttcaattttcacaaaaagtgtagattcttgccctcttcctagtcaaatagggacagatggttaggaatgtgttaggggaatgttttatttctttgcttctgtgctcacccactgaaggtattgagttctgggatttctgactttatgcaggggtctctggtcagaactcttcctccagcccagctcccctcttactttggtcatttgtacccagcatagttcagtgtaactgtggttctaggcgactggaaaccagcagaagccttcaggacaaaattcagctcactcatacaggattttgattccaatggaatttctgccctctcattgttttccttattttattgctatctcagtagaactttaaataaataaataaagctaaaattattttatttgccatttttatatgtaatgatctcggagggattcttgaacagatgtggtctacagtctacagctaacatgtagctgcctgctttcactgtgttcactcttcagattaataaaatgaaaagcaatgctgataatagtggtttcttttctttctgctttctccagtaattagcttatgggggacactcagaggacaggatttaggatcagcagacctgggtctgcctcccatctccactgctaagagttgaatcagtccatgcaggccactccccatcctcagccttttcttctgtcaaatgaacaatataatcccctagttttagggaattttgaggaatacatcagattaccaaatcgtgagttccttgagctgataaagagtgagcacttactgtgtgtaaggcaactttcctaagtgctagggatacaaaagtgaacaaaacacacaaaaaatgtgtctgtgtgtgtgtgggggttggtgtggatgtccacaggcatacatgtgtggtagcagacaataatataagaaaaataaagtaaaatatatagtgttttaggtggtagtaattcctatgtcaaacaacagcgccgacgaagtagaggggataggaatgcgtgtgtatgcctgtgtgggcacgttcgctacctctgcatcccaggcacctagacacgatctggctcagaggggaagctcaaagaatgtttgatggatgaattaacactcataggacacttactaccatgcctggcgaataacagtagcttttggttttagaatggatgcagttgctattgggctcccctctttatgtccagttgatgcaagtaggttagggggtctctagaggctcacaaagctgtgcttggctcagaagttatccagataaaaactagtataggaatccaactcccctcctccctccatctttcacccctgcaaatctggtgagctccatgaagctttcctccccaggtgacgttgttgctgctgtacttaagggacagcacaggccacctgggtgtgggacagagctgacaccttcctgtctgggctcttccagccttcactctagaacgaagcgggaagcctcaggtccaaggggagagccgccgcaaaggccgcgttgaacgccgaggtgcacgcgcaggtactggctaagtgcgcgccagggtgctcgggagggggcgggtgcgggccgcactgccgggcggggtgcgcgagtgaggagggcggggtgcgcgagagaggagggcggggtgcgcgagtgaggagggcggggagtgcgcgagtgaggagggcgggggagtgcgcgagtgaggagggcgggggagtgcgcgagtgaggagggcggggtgcgcgagtgaggagggcggggtgcgcgagtgaggagggcggggtgcgcgagtgagaaggacgagggagtgcgcgagtaagaaggacgggggagtgctcgagtaaggaggacgggcgcgagtgaggagggcgggggagtgcgcgagtgaggagggcgggggagtgcgcgagtgaggagggcggagggcggggtgcgcgagtgaggagggcggggtgcgcgagtgaggagggcggggtgcgcgagtgaggagggcggggtgcgcgagcgagggcgtccggccggcaggtggcactgtggcgtcgccgtgggccgagcctggcgaagcgctgctcgcccgagatcgcgcagcttggtgagtggcagcgcctggctttatactcgcgtctcggacaccgatggtcatcttcccacgtccgtgactcagtggccttccaatgcaggctgcggcctctcagcccagaaggccctgggttctggtacaggccttccttgtggcagacggaaggaaggctgacaaagggagttcaccgggtttgcctgacttgccacgctcttctctctccgtgccaactttaacctgggaagccacacatacctctagggcctctgatatcttcagtgtccccaaggcccatgctgctcagagcctcacgtggccgcaaacccaggtgccagtacttgagagttgcaccttgagcgggaactgcagagggttttaatggcaccagctccaaacatttcgcccacagcgtctgcagtcctccactgcggaaggcagaataaacgccccaagggtgtccacatcctactccccagagcctgtgaatttgtccccttacatggcaaaagggaattacagttgcggatggaattaaggtagattaattgcacacacagacagaaacacgcatttttgtgtgttttgttcactgtcgtatccctagcacttaggaaagttgccttacacacagtaagtgctcagttaatctttattgactcaaggaactcacagtttagtaatccgatttattcctcaaaattccctaaaactaggggattatattctccatctgacagaagaaaaggctgaggatggggagcttaatgggtaaggagattagcctgggtcacccaggtgggcccaatgcaatcacctgtccttataaggaagagaggcgagagaaagaaagagagagaacagagaacagagaaggccgacagcaccaggaggtctcagcccggtttttctggctttggggatggaggacgggccacggaacagggcggcctctgcctagcagctggaaaaggtaagggactaggttctcccaacgaacctccggaaagaaacgcagccctgccagcagcttcatttcagctcagtgagacctctttttactctttcgacctccaggactgtaagatcataaacgtgtgttgttggaagccagcaagtttgtggtaatttgtcacagcagtcgtgggcccactaagacacctgtcgtgggcctcgtgtccagaggcctcagctgaaatgcactgggggcctggtggtgtgtgttaggtccacttggcttgctgtgttgttcaagtcctctcatttcctttcttatcttctgtctggttgttctttccattattgaaagtgggggactgaggtctccgacgattattgtagaactacttttccctccaattcgctccctttctgctttgcatattctgttaagtgctaaatgtttataactacttattcttgctgtattgaatctcttctcaatatataatgttctttgtctcttgtaaccttggacaagatacagactacttagactattgaaaatcctgacagtgtatttgaaacatgcacgtggacatggttttatttttctcagttactgctttcaactgtgtgctgattgaaactcctttcccctggatagaagacctattaaaataacccaactttattcactaacttgtcaactacttttggtcagtcagaattttgtctttggccagagttaatcagctaacccgttgtccccagatcatcagtgcagcttcacctgggtacttcttataaatgcaaattctcaggccctgccccagaaactctggaggtggccctgcagtctgtgtttaagaagccctccaggggatcctcaggtgtgataaactttgagaatcagcggtaacccatctgcagaggtatttctattatttcagtaattatatttttaaaattttactttctggaaatactttttaaaatttacctattttttcatgtatcttgattctttttttctgtttttatttctcattttaggtctttagtaattttaagccaatttatcttgtaggctctgttttgatcattctactggctttccatccctgaagtttattgacttggagttgccagtgttttgtaatttgggattgtgagctggtcttaatggggacttcatctattggaatcttctgtaccttacatgagagtgggtgcctccagagtgcttttgggtttgcttcagccaggtgcttggcgttatcaccagcccaggactgctttgcataccaatgttttgacctggggattttctggcccatgcatgtcatatacagcctaatcccatcacatgagtatgggcctgtgatgacaaattgataggagaatcattttccctactcagagcccaggccaggtctaatatccctgacataactgccagtgggggaactttctctagatgatgattactgagagtgcatcctgcccttgaaggacccctcatttatgagtgttgtggggcaggtccaaggcttcctctccaattcctcacagcattaaaacccaagtccctaggccagggatggtggcacacgcctgtaatcctggcactttgggaggccaagttgggtggatcacatgaggccaggagttcaagaccagcctggtcaacatggcaaaaccccatttctactaaaaataaatataaaaactagccaggcatagtgatgcacatctgtaatcccagctactcgggaggctgaagcatgagaatcacttgaacccgggaggtggaggttgcagtgagctgagattgtgccactgcactccaacctgggtggcagagtgagactctgtctcgaaaagcaaaacaaaacaatccaagcccctgagttagtgagaggatgccagccctggtgggtggggagatcatgaagttgtatacctaattgttggttcccagttcatcttttggcctttactttctgttgaactctgcatttagagtctgttctattgcaccaagcaattctgagcatattgcggtgggtgttgcctttcaggttacctagtttctcatattgctgtaaatagaagtcccctgatagctcattttgaaacgtcaatctctcttcccttctccacctagtgcaggctaaacctagtgtttccatagatggagagtggggtaggggcagttgcacatgactctcctgcttcttggcacttgctgttctaatgttggggtcaggaagaggggctggcaaggcatgactgtggtgagctctcctcttgcttttcgggtggtaactgctggtccagcttattgtccacagctctgcataggtaggaggtgaccagaaaccctaggcatgatgaggttcagctgcccctgtggacccccagatggtggcctcatggtgcgttctggtgcacaggccttctgctccatgacgtgaccccgtagccccggtctcctctgccgttcagggccttcagcctgggccctagacacgcatgccacatccatcttctcccctcttggaacccgaggactcaaagctctactggcatcccctctcctctgtcctcatttcctgtttccctggctacaggaacacctgacgatgcccatttgcagcaaaccaaccatggctcagaattcctccaagctcagtcatgctctgagggcatgtgaaaagaatgccctgcagaggaggagagatttgtttgtggccttgatgtcatttgagattctgagtgtccaactggggaaatcaacgtttccaggtggaaacaaagggggctgcagaaagctgcccacccaagccaagggtccctgttttgctgagtctagcgagggacttcctgtccccactgctccactccctcctccagcccaactctccctgaggcagatggcagcagagagaggagcaggggtttccaggtcaggcgagagtcctcagtgggagcctgctgggaggtggttttctgcctgaaagcagaagtggtggtgtgacagtccgtggacaccagagtagggacagaaaaattgtctcagaccccatctacaataaaaatgtatacaaaggcctcccatcctaggggcaggtatgtgcctagaaagtaccccttctggctctgccaacagctgtaccagcttcatttgctggaggtgaagaggcggccacatgaccctggactggccggcgtggtggggtcggcacgcaggtcttgactgcagcaagttctatgtgtttgtgcacaattagccagatagcctctcctctggggaaccagttcattccaagccaagagtagatgagtgggccctgtgccagggagacaaatgactggtgacaccgtggtgtttcactgaagctctgctgggggacccatcacagcctctgcctgagctgctggctttcaagtgccctggggctgagccctgggaatatccttgtttatctgcagttgctggcctggctcctcttcccctttctctattcctccctctcttctctggggagcaagcggcccacccccacccctgtaccactgggtcctgaatgtccaaaaagccaaggaggttctggcctcaactcagcctctccttgaggcaaatcacctcacttgggagtgggggttcttcaactttacacatcccggttacccagggggcgtggtgagcatcggatgaaaaactgggagggggaacttgaatgctgcttctgaacgcgtatccggggtgagagctcatctccctcctggatcctgtcttcctgcaccaaattgccaaggccaatgctctgccccttgggtaggccagtccaccccccttcctgtccacccaccccagatgccaagtctgtggtggggtggcccatgctggggcatgagaagtttgggggatgaggaggagaaccatatccaccagggaggacccggggtgaggaaaagatgagacaggatgacactcaggagaggccgcctttcaggagatggacctcagaacgatggcttttccttgataactctagaccttgagctacactggcctctctctgagcctgcgccagccacagggatgtgaaggttgagatattccatacgtggttggctgacaggtagctgagtacagccattgtagagggggatctcgctctgcttagtgacattgatacctgtatcattcaagtgctagacattttgttcctgggcatatgtcccaaagacttgcacacaaagcgaccgagaagtgatttaccacagtattgtttggggacagtggagttagaggctggcatccatcactggggaatgggtgagtaaaatgagattgtcacatggatgacccacagccacaaacagggtggacacccatcactgtggctacagccttaaaaatagcgtgagtgagaaaagtaagaagcaggacaaaatctctaacactgcatcatttgtaggaacctgaaaatacatacctatcaatcaacttgtcaggtttctcaagtgtgcggagaaaaagaaagataaacattaaatgcaacagtagggatgaatgtgcaaaggtgggagtggagaattgggataaagaggaataaagtaaagcacagtaggagcaggacctcacatggagaaattgtgctagcacaccatgaactgagcaactggttgactctgcccctgaaggaaaaggagcagttaaagccctaaagaagtgaatgtcagctgcagagaagggatacgcactattcatcactaaagcatgggcaaaactgtgatcacagggccagcccctccctctgctcccatccacaccaacagcaccaactgttggctaggtctagagcagaactcttcccctttgccttctaagaacagactctgagacgtggtgactgctccagggcaacctccctcttcccaaatgacaccagaggatctctttgagtggtgaaggctcagcatcttcattagctctccgatttagagatggccaagctaaaatctacagcacctagctcagtgcctggcagaaagttgatcctcaaatgatggatggatgaatgaccatacctgcttggcagctgcttagctttggttgggccagagaagaatcagtcaaatgatccctatggtgtgctgaacactgcaaagttgccagaataagaccctgtgcttgctcttgaggtgtttgcctagtgtttctcaactaggttacatatgtcgtggtcccaaaacttgtcttggccatctagtatgtgctgggcttttgctaccagttggggtaaagaaatgagtacaatgggtcctagatacagacataaaacagataacctgcaatatgaggagtgactgagatacgccaagagtgtggggagtgcagggaatgtaactggcaggcagtggacctaatgagtgagtcctgaaggtgtcaatagcccaaaaaacaaaattatgagttaggaagatttgttcttttcaactgcatatgaaaatatttgccaaagaggatctctacaagtttgagcagtagctggtttcttttttctttttctttctctctcccctcgaccttccttcatgggtgatttgggacagagacaatgccatgggctcaccaaatcatatttcactttcctctccctgggcacattggaagacttttccagcatgacttgtaattaaattggagctatatgaccatagtttggccattgtggtgcaggaggaagtaaggtgtacaactttcaagccagctataacctcccttgaaccatcatccattctctcttgcctttccacagtgacctcagtgggtatatatttacatggcaatgtcacaagatgaagcttggatcccaaagtcaccactcagagaaattgcccaggagagctagtcagccagcactgggtgtgatatgagtcactgagatgtgggtttatttgttcctgcagcaaagcctgttatatccttactaatatgctaggtacactgctttccaaagtagctattttgaggaaccacagctcttcttaaaaaattatgccaattttatttatttatttatttgagacagggtcttgctatgttcccaaggctgggttgcagtagctattcatggatgtgatcatggatcactgcagcctggaattcctgggctcaagcaatccttttgcctcagcctcttaagtagctaggactgtaggcatgtgccactaaatttattttatttcttaacagctttattgaaatataatttacataccatactattgacccattcagagtgtacaattcagtggtttttggcatattcaaatttataccaccattaccagtcaattttataacattttagtcacccctaaaaggaaactccatccttattagcacccaattctataccctactactaggcaacaactaatcttctttctgtctctatagatttgcctgttctgtatatttcatataaatggaagcataaaacatatggtctttgtgactggtttctttcactcttatcatgtgaatgaaccttaaaatgtttttctttctttctctcattattattttgagacaaggtctcagtctgtcacacaggctggagtgcaatggcgcaatctcggctcactacaacctctgcctcctgggttcaagcaattgcctcattctcccgagtagctgggattacaggtgcacaccaccccacctggctaattttttgttttgttttgttttgttttttgtagagatggagtttcaccatgttggtcaggctggtcttgaactcctgatctcatgtgatccaccggcctcggcctcccaaagtgctaggattacaggcacgagccaccatgcccggccttgttctgtcattattataagcatcctagtgtgtgtgaagtggtatgttattgtagttttgatttgtttttccctggtgactaatgattagcatttcctctacttgtcattttaaaatcttcattgaagaaattctatttaaatcctttacccattttttaaatgtggttgtctttttattgttgtgagcgttctttagatgtttttgatgttagaaccttatcagaaatatgtcttgcaaatactatcaagaaagttaaaatgggagaaaagtatcttttgaagtgaaaagttttcaagttttatgaagtccaatagattaattttttctttggttgcttgtgcttctggtataatagccaataaaccattatttaatccaaggtcatgaaaaggtacctgtattttcaaggagttttattactttggttcttacatttaagtcttttttccattttgagttaattttttgtatacggtataaggtaaggctctaattcattcttttgcgtgtggatgtccagctgttccagcacaacatgttgaaaacagtattctttctcctacttaatgatcttgccactcttgtcaaaaattaattgaccatagatgtgcaggtttatttctggactcttaattttatgccattcatctatatatgtatccttatgcctgaaccacactgtgttgattactgtaacataaccccactgacactgggaagtacaagtcctcccaccttgtttctctttttcaagattgttttggctattttgggccacttacatatccatatgaattttaggatttttctttccgttgttgcccaggctggagtgtagtggtgcaatcattgcttactgtagagtcaatctcctgggctcccaccccagcctcctgaggagctgtgattacaggtgcatgccactgcactggctaattttattatctctatttttatatacatgggttgaggggggggatctctctttgttgcccaggctggtcttgaactgacttcaagtgatcttcccacctcagcctcccaaactgctgggattacaggcatgagccaccatgcctagcctgaattttagaattagcttttatatttctgcgcaaaaaaaaaaggcggttggaattttgttaggaattagattgaatctgcaaatcaattagggatactcagtgtcctttgacctacatcttcccattcccctgccccataactctggtcttggtaaccactgttttattctctatatatttgaccttttaaaaaagattccacatgtaagtgagactatgcaatatgttttgtgtctgacttaattcacttagtgtaatgtcctccaggtccatccatgcagggacaaatggcaggagttcctcttttttaaggctgaataaaatattccattgtatatataccacagcttccttattcatttgtccattgatggacacctagattgtttccatatcttggttattgtgactaattctgcattaaacatgggagtgcagtatttttatgaggtggtcatttcatttctgttgggtatgtacccagaagagggattgctgggccatatggtaggtctattttttaattttctgaaacttccatacggtttttcataatggctataccaatctacattcccaccaacagagttgatacaaggggtacaaagggttctcttttctccacactctcactagcacccgttatctcttgtattttttaataatagccatcctaacaggtgcgagatggcatctcatagtggtttcatttacacttctctgattggtgttgttgaactccttttcatgtactgttggccatttgtatgtctctttggagaaatgtctgttcaagtcctttgcccatttttaaattgggttatatgttttcttgctattgagttgcatgagttctttatacatcttggatattaaccccttatctgatacatggatttttctaatctgtaggttgccttttcattttgttgattattttctttgctgggcagaagctttttagtttgatgtagtcccatttatttatttttgtttttgtagcctgagcttttgatgtgatatctaagaaatcattgccgaggccaatgtcaaagagctttacccttctaggagttttagagttccaggtcttaggtttaggtcttttcttttatcctacacaaaaatcaactcaaaatggataagaatccagtgtagggtaacagtccagttttattcttctgcatgtggaaatcagttttcccaggaccatttattgaagagaccatcctttcctcattgtctttcttggtgcccttgttgaaaattagttcactaattatgactggatttattcctgtactctattccaccggtcagtatgtctggttttatgccagtaccatagtgtttgattactatagctttgtaatacaattttgaattgggaagtgtgatgcctccaccttttttttcctcaaaattaatttggctgtttggagtcttttgtggttccatgtgagttttgggattctttttgctatttctatgaagaatatcattggggttttggtatggattgcattgaatctatatattgctctaggcagtacggacgttttaaaaacatcaattcttccaattcataagcatggaatatattcacttatttgtgtcctcttcaatatctttcatcagtgttttatagtttcagtatacaggtctttcacttccttggttaaatttattcctaagtattttttttatgcttctgtaattaggattgttttcttgatttctttttcagtttgaccattatttgcatatagaaatgctacagatttttgtatattgattttgtattttgtaactttacataattcatttattagatctaacaggttttttttttttggtggactctttggcattttctacatataggattatgccatcttcaaatagagataagtttacttcttcctttttgatttgggtatctttttattatttttttcttgtctaattgctcttgatagaacttccagtactatgctgaaaagaagtggtgagagtgggcttccttgccctgtaccagatttgagaggaaaaagctttgtttctccccattgtttatgatgttagctgtgtctttttgatgactagcttttattatcttgaagaactttccttctatacttaaactgttaagagttttttttattatgaaataacgttgaactttgttgagtgatttttgtgcatcagttgatatgatcatgtggtttttgtctttcagtctgttaatgtgatgtataacactgattggtttgcataagttaaaacagccttgcatgacacttgatcatgatgtgcaatatttttgatgtgttattgaactcaatttgctcctcaaattttattgtggattttcacatcaatgtttatcagagatattggcttgtagttttcttttcttgtggtgtcttagtctggcttaggtatcaaggtgatgttggtcttatacaatgtgttagggagtatttctcccagttctattttttggaagtgttaaggaagcgttgatattaattctttgaaagtttggtagaattcatctgtaaagccatttggtcctgggcttttctttgttgggagattttaaattaccacttcaatctctgctgtaatagctccaatttcatttcttattttatgtatttgagtctattcacctttttacttagtctagctaagggctttttttttttttttcaaaaaaccaactcctattattattattattattattattattattattattattattattttgagggggagtctcactctgttgcccaggctggagtgcagtggtgcgatctttttttactgcaacctccaccttctgggttcaagcaatcctgctgactcaggctcccaagtaactgggactacaggcatatgccactacacccagctaatttttgtacttgtagtagagacggggtttcaccacgttggccagactgatctcgaactcctgacctcaagtgatccaccctcctaggtctcccagagtgctgggattatgggcatgagccactgtgcccagcctactcttattattgaatttttccctatggtttttctgttctctatttggcttatttctgctcagattattatttcctgccttctgctaactttgggtttaatctgttctttctctagttccttggggcataatattaggctaaatgtttagtgtttagttggaatctttcttctctctcttttttttttttaatgaattctctcactctgtcacccaggctggagtgtagtggcgtgatcttggctcactgcaacctctgcctcctgggttcaagtgattctcctgcctcagccttctgagtagctgggattgcagatgtgcagcaccacaccctgctaatttttgcatttttagtaggtgcatttttcttgtggcagttcttgacttgaagtctattttatctgctgtgattatagctgcactgctttcttttggttatcatttgcatgaaatatcttttaacccttcattttcagtcagtttgtccctaaggctagtgtgggtctcttgtaggcagcatatccttaaccttattattaaaaaaaaatccatttagccactctgtcttttgattaaagaatttaatccacttactacattcaaagtaattattgatgggtaaggacttactactgccacttttttgttttctggttgttttgtagatcctttgttcctttctctcttgttcatctttgatttgatgagtttctgtagcactattattatttctttctctttactttgtgtatctgctatactttttttttctttgtggttaccataaggcttacgtaaaactatagactatttcatactgaaaacaccttaatttcagtcacatacaaaaacattagacttttaccctccctcatttatatttttgatgttgcagtttacatcattttatattatgtatctcttaatatagcttttttttctttgactattttggtctttaacctttatactatctgtatctatatatactttatagaactatatataacaatattagaatattctagagttgactatatatttacctttaccagtgaattttatactttcatatgtttccatgttagttattagtgtccttttatttccacttaaagaactcccttagacatctcttgtaaggaaggtctagtggtaataaattccttcaacttttgtttgtctgggaaagattatttctcatttatttctgaaggacagctttgctgagtatagcagtatagttagcagtttcttttcagcacttcgaatatgtcattccattctctcctgccctacaaggtgtgtgctgagaaatgcactgatggtctaattggcattcccttatgtgacttgacatttttctgctactgcttttaaaatgttgtcattgacttttgatagtttaattataatgtgtcttagagtggacttctttgggttgaatctatttgggaaaagttgagctttgtgtatctgaatatccatgtatcttccaaggcttatgaagttttcagcaatttattatataagctttctttctctatctttgtctcttctccttctggaactttcataatgcaaatatttgttcttttaatggcatcccacaggtcctataagctgtcttcactctttttcattctttgttttccctcctctgactaattttaaaagactcatcttcaagttcaaagattcgttcttctccttgatctagtttgctgtttaagctttctattgtatgttttattttgttaactaaattttttagctccaaggtttgattaaatttttatgatatctcttttgttgaatttctcattcagataatgaactgttttcctaatttcattgaattgtctatctgtattctcttatatctgagttttcttaaggtcactattttgaattcctttttaggcaatttgtaaacttccctttctggggaggggggaaggtcagttgcctgagaattattatgttcctttggtggtatcatgtttcctggctttttcttcttcctttttttgggggaggaggggagtggggcantgtcccattgtcacccaggctagagtgcagtgcatgatcatggctcactgcagccttaacctctcaggctcaagcaatcctcccacctcagctttctgagtggctgtgatctcaggcatgtgccaccatgcctgagtaatttttttattttacnnnnnnnnnnnnnnnnnnnnnnnnnnnnnnnnnnnnnnnnnnnnnnnnnnnnnnnnnnnnnnnnnnnnnnnnnnnnnnnnnnnnnnnnnnnnnnnnnnnnccagcgctggccaaggccaagccttcccctcaggtgtcctcctgggcccccgggccctggcctccttccccttggctgccccatcttggatattgcctctgatgagtcacgggctctactgtttggcccacgatgactcttccatgaggcaccacctgtgggcagggtcccattcccatgtgtctgcagcagcctgttctcagtggctgcttctacctcttggtcaccctgggtgcttcccctggccacagaaatccccttgtcctctcctcttcctcacacagtacactaggccagaggctcacaggcccccacacaccccctccgactcccaggcacctctgggcaggcctggtttccaaagttcagtgcccctctaagagggagggtctgcagagcccactcagcaagcatcagaccacgtttcttaagaggcattgggaccaccctctccttcacccatccatccctgcttccccctgaggcctcttctgggccagcagcctttccctgctgccaaatccaaagatgcctttcaggccccagcactacaggtgcagtcccttcccggcatccctgacctggcggtcaccccctctgcatctcttctggaggctgtcattccccccaggtgcttgcactccccaagcccctgccctccaagctgtcttctctgtgtctgcgctgtctggatgatcccttcttacctttggtttcccccttgacctcctttgctcatgactttccagccctatgtctccaacctgaccgcaccccaagctgcagactgcacctgccgacctgcctgacactgcacccggtagcccctcaacccggcctctaaagcagcgccacccttccaccgcaggccagctcctccccgggtgctccttctcagtggaggtaccaccaacattcttgggctcagagtcctgagcctgacatttcttgccttctttctctctttgaccccacataccaaagacgctgtcatctccaccctttaagagtcttccaaccagggaggctgaggcaggagaatcggttgaacccaggaggcaaaggttgcagtgagtcgagatcgtgccattgcactccagcctgggtgacaacagcgaaactccatctccgtctcaaaaaaaaaaaaaagtcttctaccaaggcatgttgtccccttgccaccactgccttggggaaagccatcatcttgccctctggcacatgattcctgagtgtaccaaaggccacctctctcccaccccagccttaaggtgtggaccagacatcccagacttgtcagttgcaccacagtccctccacctcctggacattgtgagggcaggctccctccgtctgaatgctgagccccgcttatttggttgaccagctccactttgaccttcaggacccaacccaagctccagttccttcacagcacttgtcagatgttaaagaaattgtctgtttttatgtttctcccacccctgaggaccacacacttgcctgaggtttgtgaaggtggggaaactgagtcaggtgtcccagcccttggttcaggactcaacgtgaggttgacactcacgtatctgggaacaaagaggctgagactgagcgggttgaccgtgccagtggctgcttcctttggcctggcctgcattttctggagcttgggcggtgtttgccaccctttttatgctgccatgttgtatgattgacttcttgatgccctgcctggaattggcctgtctctaacagatgctcagagaatcacatacaggcacctgtttccttactttgattaactgagtgaatgtggggaacattcctagcacagagattggcacagattagacactcagtcgataccagcgccttcttttgcgcccattctgaggaggcacaaagttaacactggacccctggacaaaccacttgttagcccagattgtgctggaatacaacatctcatgctgttttttgataatttaaagttgttgaaaataacgacctaccagggctctctctttggctacctgcgtttgagattccctctatattcaacataaaataactgtgtcagaaaagtgtgaccctgatgatggcattgtttctttgcaacaactgtcacatcagcagacctcacaaggcctttacctagtttaaatctcagccaaatcaagatgtaaatagaaattgaattttaaataggagctgagttttttcagaattgggaatgcagtgagtgtgtggttggcagaataacggccccacaggtgtccacattctaatccgtagaacctgagaatatgtggcctcctgtgtggccaagaggagttaaggttgcagatggtgttaaggttgtggtatggattgaattgtgtcctcttcaaaattcttttattgaagtcctaacccccagtatctcagaatgtgaccttatttggaaacagggtcgtggcagatgtaattaggtaaaatgatatcatactgaagtagggttgggccctgatctgatatgacaggtatccttataagaagagggtcatgtaaggacacagacacacagaggacactgtgggaagatgcaggctggggctggggctggggctggggctggagtgatgcttctgcatgccagggaacaccaaggcttcccagccgccaccagaacctaggagagagacacagaacacgttctccttcagggcccttgggaggaccagccacactgacaccatggttttggacttctggcctccaaaactgtgagggaatagattcctgttgttttaagccacccaattcgtgatacttttatcgacaatcctagcaaactaatacaggttggtagtcagttgtgatgcttttattagcagtccttttatcggcaaattttaaggccaactgattatcgggttggtaatcagctggccttaaagtagattattctggattatctgggtgagtctggggtcatcacaagggtccttccaggtaggagatgaggcagaagagaaggtcggagtgacacagtgtgagaaacactcccccaccactgctggtcttgaggatggaggaagacgccccaagccaaggagtggggcagcgtggagctggaaaagaaggaatggggcagcatggagctggaaaaggcaggagacagattcttccctggagtctccaggaggaaccagccctctcagcaccctggttttagatttgagagactcatgccagacttctgacctccagaactgtaagataataaatctgtgttattttgagccattaagttgggggtaatttgttacagtagcactaagaatacagggtctcatatggtcactgagctgcctgaggcatctcattaggatgatttaacttgaagcatatgcagaggaactgagtcagtgctaggcaggaaaggaagcagagtcgcaggaggatcaggagaaggggtgccctgaattagagaagcgttaactgtgacttcctaaagaattacagtttcagccaggcgtagtggctcatgcctgtaatcccagcactttgggaggccgaggcaggcagatcacttgatgccaggagttcaagaccagcctggcatacatgccaaaactccatctctactaaaacttcaaaaatgagcggggtgtggttgctcatgtctataatcccggcactttgggaggccaaggcgggcggatcactggaggtcagcagttcaagaccagcctggccaacatgggaaaaccccatctctactaaaaatacaaaaattagccaggtatggtggagcacacctgtaatgccagctactcaggaggctgaggcaccagaatcccttgaactcgggaggtggaggctgcagtgcgccgagattgcgccattgcactccagcctgggcaacagagtgagactccactcaaaaaaaaaaaaaaaaaaaaaagaattacagtatcatgcttttaagaagagcagctacctcaaacttggctaataaatattgctgttaaagttttttggggcttactagtggaaaaaaatagggcttacaatgtaattggaatataaattgttttacggaactacagttcctttcccaaattactggatttaaagtcaacgtgatttgactgtggtggtgagttgcacagtgtcgttcaagtgtcgtaggtgggctcctggagccagggggggttgggtgaaatgatttctttatgccaccaaaaaaagaagttttaaggaagtcattttctgcccatacctcattgagatttgtcaagatcagaagcaaaaagtctagctgaaaaacagctaaaatacgctgcggagtgcttgtacacaaagtccacacagcaacccccgtagacggctcctcctgcactgcaggtgtgaacgtgtgcaccccgggcacagcgctctgctctccccttcggctgcctgcggcttaagaaacacttcgcttctgcgacttttcttcactgatttacaacttgcttctaaccacccactgacatcattcttttaattgtggtaaaatacacataaaatttaccatcttaccatttgtaaatgtacagttcagtggcagtaagtacattcaccttgtgcagccatcaccaccatccaaacacagaacttttctatcttcttcagctgaaggtctgcccccattaaacactcactccctattccccttcccctcagctcctggcaaccatcattctactttgtctctataaatctgactgctccagggatctcacataagtggaattgcacaggatttctcctttggttattggcttctttctgttggcatgaagctcatccatgttgtagcatgcatcaaaatctcctttttgacaactaaataatattcccttgtatgcatatactacactttattcatcctttgatggacacttgcatcgtttccaccttttggctattgtgaataatgctgctgtgaacacaggtgtgcaaacatcttaccataccgttttttaatctatccacatagccattcagtggctatgcatcattctaacactggatgatagagtttaaaactgagtaaaacaggatacagtggcctcgcttactcgcggccaaccctgctgactgagactcagctcagacatcacttccccaaccctgaggcagagcaagtcgcctccctgggcccccacagccccgtgttcacctcctctgcagcagtgagcctcgtatactgctgatccggctggttatgtggctcctgtgggctgagccgtatttctgactatacatctagaaccccaggtggagctgggaagtagaaggaagggcgtggagcaagggctgtgccctgagctgcctggtgtgggacccatggtcgtgagtgcatttgtgctcctctcttatggggagactcgaggtcccccatggtggggttgggaggctgtgctctcggcaggtggagcttgtttttgaattccaggggccccaggacatgagagtttatcagtccatctggcgatgcccattgcaccataggagggaggcaggggcagccccagaggaggggtgaatggcagagcatccctggctgaggagcagggcggcacccgtgggctgcacctacacctcatgtgctgggggctgtgtaaccctccccctgtgaggctctgggctgtgacaaggagggagattgtaagaactccgcgggaaagggctggacagcaggaaggagggatgcatgaggtatgttccattctggcacaagaagcaaaggagagaagaggcaggacagccagccgcccctcactgctctgcaggaatctcccatgtgaaaacagtgcccctcccagggccatttctccaaattgctcaaatcaagaaatcacttttgtgggaagcctcttaaatctacaaaactttttgaatgacatttttgctttttccacgttcctcttgactctgtttccccgcagatctggctttttaagtcagcgaggtgacggcggatgtagagacatcagggcaggactgctgagcctcgcccagctcttccctcgtccccccagtgtgtcctggatgtggcctctgtgtcaaccagagtcgctgctcacgtccactagagcacctgccgtggtcacgtgctgggaatggccatgcaccctgtggcctacggcatgccaagtggcatccccatgagcaagacagaggggccccacttctcaggcttggccctggaagcacagcacaagcaaaggcgggagcagactcaaagccgttttcacagctggggtcagcacaatagcgccaaacaggtctcaccctaaagcctgacgtctttattcacaaagtcaactgcaaaagggcaggacaaaggagatcttgtgggagtcagttcatgagagacaaaaagcagcccaggatggggaagttaatatgtttaatctggctgcttaaaaatatagaaatagtatcaagttggacaacattgatgaagtcagagtctctattttagaaaagaaaatcatcacattcaaatttctttttcttttttttttttttttttttttgggtttggccttttttttgagactgagtctcgctctgtccccaaggctggcaggctggagtgcagtggtgcaatctcggctcactacaacctctgcctccccggtccagacagttctctcacctcagcctcccaagtagctgggaccacagatgcacaccaccacggggggctatttttgtattttagtagagatggggtttcaccataccggccaggctgatctcgaactcctaacctcaggagatccacccaccttggcctcccaaaatgctgggattataggtgtgagccactgtgcccggcctagacttgattctgtggagtacttgtaggttcacatcaaaattgagaggaaggtacagagagatttctcacacactgcctgctgcaggcacgcatggtctccccgccagagtgctacattcgttaccgctgagggacctaccctgacacatcacgacatcatcgtcacccacatctatggttcatcttaggcttcattctcagtgttgcacattttgtgggtttggacagatttatgacatgtttccaccgttatagcatcatacaaagcagtttcactgccctaaaaattctctgtgctccaaccactttccttctttaaaaaaaaaaaaaaaaggaaaagagaccagtttattttgtgattgtgagcaaagaaagaaatgacacagctaccaatctcctattctgtgcctcttcttcccaagtacagacattgttttccttcaggagagatgtggctgattctagattcaggggtaatgggcatgcctggatcatggccttcatcattctcaccctggggagagctttgggtcctctgaaggcccagaagtctagtgaacctggctgatgctcagtaaatgtctgccccgctgaatattttccatatctccatccaagagcaccttctggtgttcttccctctattttcttgaccatagcccccagcaggcataaggtctatgtcctggagccaatacttctacagtgatgattctagaaaccagtctgttctgaaagctttcaccatttctcaggagcaatgagagaaataagcatacgtttttattcattttaaagatgtctcctttatttgagactatgtctcttctgtatttttagtgttaaggtgtattctggggagcagtatggttggggccgggcacagtggctcacacctgtaatcccagcactttgggaggctgaggcaggtggatcacttaaggtcaggagttcgagaccagcctgaccaacatggtgaaacccgtctctactaaaaatacaaaaattagtcaggcgtggtggcgcatggctgtaaacccgactactcaggaggctgaggcaggaaaatcgcttgaacctgggaggtggaggttgcaatgagccgagatcgtgccattgcgctccagcctgggtgacaagagcgaaactccatctcaaaaaataaagaagatagtggctgttttttagtatgtgtgtgcttattgtccctatccatcacattcattcttgctgcttccaggccacatctgggccatgttgtcctctggaagaaaagtcgtgactgagtagaaaatgaatgggagggattgaacatctgccacacaaactcttggccaaaagaagagaaaacttaaaggggaacaaaagaactgtcttcacatatttaagaaggcctctgggttactccaaagaccagaactaggagaaatgaactaggagaaatgtgtagaatttagctcaattctcttcgtgctgagtgtggccaggtgctgagatgggaggctcatggccaccctgcaggagttctccatctcctaccaaggagacaatgacagcaatgatagctaagagttacatttacacgggcttcaggtgtgccagacactgttgtaagcagtttatggacaatgtgccacttgtcctcacaactgcaccccaagggagtcactgtggctcccatccctgccatgcgagccatggatccaagaagggcttcactggagttaggccccagaagcctgaggatagagtgatgattctgccaagaggattggaacttagctccagaggaggtgctctgggacaaggagggacaacctggggtggagggaggagcccaggtggctctgtcttctcagcgccagagatgccggcgccaccccagttggttcagaccagtgccgtcgtcactgggactgccgtaggagcctcctctctggtctccctgccgctgcttctgcccactataaactggtatccacaccgagccagtggtcctctcagagccgaaaggaacatgtcactcctctctcaaaaccctccagtattccatcttatttgaacaagagccaccagggccagccaggccctaggtatctcacccttctgccccccaaatcccatcctttcccctcgctctccccttcctcactccgcctccaccccgccagcgtgcccctccaccagggcctttgcacccctgtgacctctgccttggaagccttttcccacgtagtcacggggctcacttcctcccaggctctcctgagatgtccacttcccagcgaggccttccctgcatcctgctgtaagataacacccccacccactccctgttctgctcacgctgcttgacttgtctctagagcacttgtgactgtgtgttacggtctctaatctcatttagtatatttgttatagatgctatggtgatatatatggttcagtggctatatatggtctgcccccctcagaatgtaagcttcagagggcagggactttgcttcactcactgcttcctcatcagaacctagaaggtgcctggcacgtgggaggccctcgataaatctgcagtgcctggatgggcagatgagccactcagctgggaccggaaagcgagagacagctggcaccgtccagtacccgttcaaaggatcctgccagtgggcaaaagcggtagacattgctcaacagtgggatggcccggcatggcatgatcagacttggtttggggcgggattcaggactgtttttgactaatgaggaggaactgagtggctgtcagacctggcagtgcacaggtcaagctgctttgtcaggtggcgaactcttggaagcgaggagtttatgaggcaggacaagaaagggcaaagccagttggctcatccagaaagcaagcaggggagatcccttagtgttcgcaaaagggcactggaagccctttgtgtgtcatgaggaagcatgattcccaagctgctcagctgctttccagcgccctgaggccaacagagatgcctaatgcatcggatcatcaggctatcaggcagggacctgaagttttattttttgtttttattttttgggggatacagtctcactctgtcacccaggctggagtgcagtggcgcgatcttggctcactgcaacctccaccccctgggttcaagcgattctcctgcctcagcctcctgagtagctgggactacaggcgtgcaccaccacgcctggataattttgtgtatttttagtagagacggggtttcaccatgttggccaggctggtctcgatctcctgacctcaagtgatccacctgcctcagcctcccaaagtgctgggattacaggcgtcagccaccgcccagcctgagccgaagttttagaagaacactttcagacgccaacctcaacagcctctgtcttcccatggcccacaacgtgccactctcaggcaccacagccatctccggagggcccaggctctggaaagcagggagggcctagttctggttaatcaagctgggaccggtgtgggctggggggttctttgtcagtggctgtatcaatcccctattgccgcagcaacaaacaactgcaacatctccatcactgacagtagcgcaggcggtagtggtgcgggctgtctgtagggacattccctgtactgggactgttctcccagcagagggtaagaagtaaagagaatcagagccaaaccacataaccacattcagagcttctgccgggacgccgccagcatcctcttcactcacaccctgtcgaaagaagcaggtcctatgacgacaagcagatacgtaattccctacagggaggccgtgaccagataattctgtctgccgtaggggtgttggttgcagaaagatgtctgtgctgaggagaccatccaaccagaggaccactcaagtcactccctctgtgccgatactctgagttatgtccagggttggctgaaaagcttcctgagtctgcctccctctctcccaccacagggcagcaattccaggatccggccggaaggccctccggagaggctggcctctcacccagtcgttctctctctctttcctcccgtctggcaggtgggtggcaggcccgtggagcccctgctcggcgacctgtgagaaaggcttccagcaccgggaggtgacctgcgtgtaccagctgcagaacggcacacacgtcgctacgcggcccctctactgcccgggcccccggccggcggcagtgcagagctgtgaaggccaggactgcctgtccatctgggaggcgtctgagtggtcacaggtgggtgcctgggcttgccaccaggactcagccacagggactccaacacggtgccatggtattggtgacattctggtgcctcccagccctcgctcgcccccaggtcagcttgaagttgtgttatagctcatgtgttcttaatttccatctcagataacagcctggctgcggaaacatagataccatgtctctgatgatgtacatgtcaacaccacagtgaaggactgtttgatcccatttcctatgaaaattctcacatcaagataggatagacagatactgaccgactttttaattctcctttgggtgtatttaactgtggtgtgctcaggctgggaaggtggtttcaaaggtttgcctttaatcccccagcagtctttgtagattacgagagtcagatgccaggagggacagcttttagtgtgcaagttggagttacaaatctcatgccataaaatgttttggaaagaagtggattaagccttaagtcttaactttgaaggttggtcctgggagtacaattttatctctggtgatgtcatccttcagggctttgcattgactttgtgttaatgattttgactgtttggctataaaactacaaaaaaaaaaatagctgaataaagggcaggcttccctcaggtcttccaccagcgtagtctagaaaactcagagacgctcatccaagacactcttcagtgtggaaaattttttaaagttccctctattgccaaacagttggaattattttgaataaaaaagtattccgcccatttttaatgaaggaaaagtctgccattggctgctctaaaacaaaggttaattttcaaacagatcttggcatgtatttgtttatagatcaggatttttagtcctacattttatgatattttaggaaaagagagtttgagattttgttgtttgatttttttgtctttgtctatgcttacgtttgtcagtttaacattagagggattttttttggccccttgctggaagggttgaggcaggtgttcagtcccctcccctttccagtactctaggtgagcctttgggttttaattgcctggctcttgatcgaagtaagacttgtgctttgatcagatcaaaaccataaattttccactcagtggtaaaatcctgtctctactaaatacaaaaaattagccgggcatggtggcgcatgcctgtaatcccagctacttgggcggttgaggcaggagaattgcttgaacctgggaggtagaggttgcagtgagccgagattgcgccattgcacttcagcctgggcaacaagagcgaaactctgtctcaaaaaaaaaaaaaaaaatccactcagactctttttatgggggaaaacaatgcttccccaccaagtctgacatcatcaattatcattacagccctgaagatctctacgtttggaaaatgtgagacaatgggagcaagatttaaagaaatttctctgtgtctgtatctatgtgcatacctaatcctaatcccgaacgagcaccacaccagtcagcctaactctggcttagcccaggcttgagcaaaatgcttccttctgaacatttaacctggaatcaaatcattccccatgggaagctcgcgaagctggtacttctgccgcttcccacgtgctgaagtcccaaagtgagactgtcttccgctggaagcagatgggtttcagtttcttaagggagagtttttattgacgtggtcgcttttatccaaccagctgtgttgattgctctcactacctactccccagcttcttcccgactttattagaagaaggatcaaatatccagaaggaaggaaaaggtagtgcgtttctcctgtcctcagcttgcaggccccgcccctgatgggaagcaaagagagagaccgaagggcaccctcctaggcccctttggagctggagccgtcctcagcagcctgcagcactgctcagacaaaggcttcaggagaatgggttgctggtcagagtttggttaagaaataggctggacattcagagcttgaaattcaaggggaggaggtgagcaatgcaaaatagaggccaggcaagagtgaacttaggcagaaatggtgcatgggttcctggttgcagaggagcaagttgtgtggatgctggtgccaggggtagcccacaagtcagacagtgaggacagagttgctgaaatggtcaggaaaccttgccacacagagaagcaaggggtagccctgcagtgcagtgccccgggcctcctgcccaagctcctgcatgtaaagtccactgcaatcagcctcctacccctgctcctgcatgcaaagcccaccatggacggacccctggcatccggggaccctttaaaccagctctacactccacacacagctactctccccactccctgcaggggacattgcagccagttctgaagcatgtgcatttccaaccagccttaattagccttgaaagaaaaccccatgggatctttagacaaagagctgaattgaattcgtaagaaagagctgcgaggcgcaatggctcgcacctgtaatcccagcactttgggaggccaagtcgggtggatcacgagtcaggagattgagaccatcctggctaacatggtgaaaccctgtctctactaaaaatacaaaaattagccaggcatggtgatgggcgcctgtaatcccagctactcaggaggctgaggcaggagaatcgcttgaacccgggaggcggaggttgcagtgagccgatattgcaccactgcactccagcctgggtgacagagcgagactccgtctcaaaataaaaaataaaaaaagagaaagctagatcatatcttgggataaatgttaataacaaatatcaggaataacatttgtcctttatgtaccttttttccagtggacacagtgggattttttttttttttttaagagattggggtctgtatgtttcccaggctggtcttgaactcctggcctcaagtgatcctcccacctcagcctcccaaagtgctgggattatgggtgtgaactactgcatttggcctagaactttttaaagttgagtttgttataactcaagaaagtcagtgctgtcgcctgccatatttgtggtaaactgagcaagtatgaaaccgccttagcagactgcagcctcctgcacaccatctttccaagttatatgtttacgcctgtgtcagggacagggctcccagggccaacttgtttgtgagttttgtcttcccgaggctgtgggtcagctcggcctgggcttccttctgctttgcttttggagatggtaagttctcctgccagcccgggcaccgtccctccccaagttctgtggtgggcgtgtcaggagcaggctccagacgcactccagagtgcctgtctgctgtgttgacaccctgtcatgccccctgcctcttcgctccttcttgctgctgggaatcctgaactcttgagggcaggcacatcattcatcacccccaggccctgcccaggtcccatccccactgccccttgccaggtctcctgcaagtaagtaaactaccacaggggccatgcgtctgtcaccattcttggtgtctgcattcagacattcactggagctctctgcaaaggctttccacctgcctcacgagaaagtcatctgtggcttttccttccttctgccgcctcctcctccttctcccggctggatcgaggagtttgtcccaggctggtccaagcacagcatgtgcacctggaggccagctggaaagatctggggcctgggactcagctttagggcctcaccttgctccggctggcccctgttccctgccccactcatggctccatcacacacctgcccttcgagctcacgtattgccttgagcttttggacccgacaagtggccactgaattccactcccctcatgtgaccttatgagtaccccaggttcttcccactcctgattcctaggtcccttccacaacactggccactcggctggggccccagctgggaccacgtgcgtaagaccctgcagaccaggagctttttgaggacagaagtgtgggttttcatctttgtatcatccccacaccgcacctggcacattggagggagttaatagctgttgatggacttgaatcgaattggaactcggttaaatatttgaatggtgtcttgcagtgctctgccagctgtggtaaaggggtgtggaaacggaccgtggcgtgcaccaactcacaagggaaatgcgacgcatccacgaggccgagagccgaggaggcctgcgaggactactcaggctgctacgagtggaaaactggggactggtctacggtgagagcagcctgctggcatttctctccgtgccgcagtgcagggggctcgagggtcgggaactcagctcttgtgacgggtcccaattctacgcggcagtcccagcgtaactaggcaaattcattttccttccacccgctgcaactacccaagaccccgtgtgcttcctcccctgcttctcccacaggctgcaccagcactgccccttggggctcactgggagaaccccactgcttcacgtgcatgcagaaggaacccgaaacgcagcccaaggcaggacgcgggtgccctggatgccaggcttgccatgctgtgcggtgtgctggcaggccccagcctcctgccatggggacacttggggcaaacatcacttccattcactcccgggacccctgggcaagggcctggagatgcagggacagacagggcagggggccatggggtggtagcagggaggagtatcacagaaccgccgggtcagcactcccgagagcaagggtgaataaagggccactgaatgtttctccaggtaagaaaatgctttgttgtttaactcctcttttattcattcatctgatatatttgaatgattcctgttttctggggaccaaggtgagccccactgccacctgtaagaaccttctagtgggttttctagactcttctcacaaaatctgtaccactcctcctgtaagcatagaccgtgtttgtccttctgtatggtcttagcaactgaaaaactcctgcttgcttctcctgatagctcttccctcaaagattgccaactgctgacctagagccattggtttttgctcagcctgcagaatatcttaaacatgttggaattagtggctagcattttttttttaagttctgaggtacatgtgcagaaagtgcaggtttgttacacaggtatacatgtgtcatggtggtttgctgcgcccatcaacccatcatctaggttttaagccccagatgcattaggtatttgtcctaatgtactgcttcccctagccccccaccctacgacagtccctggtgtgtgatgttcccctccctgtgtccatatgttctcattgctcacctcccacttatgagtaagaacatgcagtgtttgattttctgttcctgtgttagtttgctgagaatgatggtttccagcttcatccatgtccctgcaaaggacatgaactcatccttttttgtggctgcatagtattccgtggtatatatgtgccacattttctttatccagtctatcattgatggatatttgggttggttccaagtctttgctattgtcaacagtgccgcagtaaacgtatgtgtgcatgtgtctttatagtggaatggtttataatcctttgggtatatattcagtaaagggattgctgggtcaaatggtatttctggttctagatccttgaggaatcgccacactgtctttcacaatggttgaactaatttacattccccatgaacagtgtaaaagcattcctatttttccacatcctctccagcatctgttgtttcctgactttttaatgatcaccattctaactggcgtgagatggtatctcattgtggttttgatttgcatttctctaatgaccagtgatgatgagctttttttcatatgtttattggctgcataaatgtcttcttttgagaagtgtctgttcatatccttcacccactttttgatggggttgtttggttttttcttgtaaatttgtttaagttctttgtagattctggatattagcctttggtcagatggatagattgcaaaattttttcccattctgtaggttgcctgttcactctgatgctagtttcttttgctgtgcagaagctctttagtttaattagatcccatttgtcagttctggcttttgctgccattgcttttggtgttttagtcacaaagtctttgaccatgcctatgtcctgagtggtattgcctaggttttcttctagggttttcatggttttaggtcttaggtttaagtctttaatccatcttgagttaatttttgtacaaggtgtaaggaaagggtccagtttcagttttctacacatggctagccagttttcccaacaccgggtattaaatagggaatcctttccccattgcttgtttttgtcagggttgtcaaagatcagatggttgtagatgtgtggcattatttctgaaatttcatttgaaaatttaggttttggcttcgctatgaaaatgtggcaacatggctcaggcaggtaattttgcttctgcctgtgctttacggaaggaaaaatgggttttccattggaaggcaaaatttatcagaatctgatccctgcagaaatgctaccaccttcccatcagcccaagtcagaacacaaagttccccaaaccctttgagtaaaaaaaaaaaaaaagccaaatttcccaattcccagtttgcctggtagtgctaaggtaccctattattctggattaacagtgaatttgagaaggacctaaaacacctccttcctatttactccctggtcaaaacatctgaccaaggcaatagaactgaggctgtcagtccagtttccccaaaaccaaacagggacgtcacacagttacttggatgttaataaagcttagtatggagctgccaggatgtatctttcactggcagagaaacttaacttcagagctcccacaaaagatatgtgtgctttggctgggcgtggtggctcacacctgtagtcccagcactttgggaggccaaggcaggattgcttgagcccagaagttccagaccagcctgggaaacatagggataccctgtctctacaaaaaaaaatcaaaaaaatagctgggcgtggtggcacatgcccatagtcttagctccttaggaggctgaggcgggaggatcacttgagccagggaagtcgaagctacagtgagccattattgcaccactgcactccagctcagtcaagagagcgaaaagaaagatgcacttcgaaccatgagaacttgaactcacacaatagagacattaaggggctgatttacagctctgactctctacttgtgtgccttaacctctctttatctctgaaatgggaatcataaacactgaccctgcctgtttctcagagatgcttagaggtttcaagatgctaatatatatgtctaagtacttggacaactaaacccatttcatttcattgcccaaaatccaccacccaatgttcacacggttctggggcacagtccccagggttataacccattctgatctgacctcaccttgtcttatcagtagggcttctggccttttatagacaacactgagaaattctctgtccaagcacatccagacctagcttgaaaacggtcactgatcctagcccaaagactgtaggtgagctaccaacagaccaggttctgatccataagtaacacactggcagatgttcgggatcatctgaagaactgatgattacctcatgcctgcatggttacggagagtccagaaggtgtagaaggggaagctgcccagcacagtaacaggcagggtagcattgtttggacactgagtgttcagatgtgaactggaataaagctgtcattgtcatcagggaattggaagggtcctagcggtcacgccctaaatgcagcctgtactattgttggcgcctgtgcccacaggggtccggggcaggagtggaggcaagaagtggtcagttctaggcttgggccacatctgcccatctggggtcggggcacctagcactgctttcctttttgtggggtacccctgtgcgtcatgtcactggtcccctccagccaaggttgtcacccctgctgcacagaagagggaacagaggctcagagcagttccgtgactcgcccacaccccccggcagagtccaagctcctggacccagttcagtgctcaggctacttggtggaaaccaagcaagaagggattgggtaggagagctaaggggcgtcctgtagatggtctttgggctccaaggcctggctgtcctcagcatcaccattcctgttctgaggactcgctggacacttttgcttttgtacataccttgaccttcctggtacaaggagctgcaaaacaaccaaaacatgaatgggaataacatgtgggacactcagcagccctgcccaagacctggtgctcatgcatcacgtggctcactcagcccatgagccttccctcctctgctgtttggggtccctccctggccaaggacactgtgcaggtttccccagacaggaccttcagccttccgggaatgcctgtcaggtaagatggagccttttgcctggccgtcctctcttcaccagccatgctgtgaagaacacttccaggctttcagaagagtgaggtattggagtcactgtgcccacttttgccacagcccgtttgacaagctgtccctgcagtaagaacaaaagggatttgtgggatgtgagggcctctgtgacatcttggttgctatattaatctactttgcattgctgtgaaggaatgcctgagactggatcattgataaagaggtttatttggctcatggttctgcagactgtataggaagcaccatgctggcatctgcttctggggaggcctcaggaggcttttacttgcagtagaaggtggagctggcatgtcatatggtgaaagagggagagagagggcagaggccccagattttttaagcattatnccaccccaaaggannnnnnnnnnnnnnnnnnnnnnnnnnnnnnnnnnnnnnnnnnnnnnnnnnnnnnnnnnnnnnnnnnnnnnnnnnnnnnnnnnnnnnnnnnnnnnnnnnnnaggccccccccaaaacgtgagggttggataaaaaaaaaggaggaaaagaaggaaaggagggatgggagggagggagggaaggaaaggaggagggacgggagggagagaaggaaaggcagtaaggacagaagggagggaaggaaggaggaaaggaaagaagaaagggaggaatgaggaaaggaaaagaaggaaggaaggaaaggagagaacaaaggcaggcaggaagattttcaacactttgctattataaaatatggtttaagggaaagtatttctaaaatagattctctagttattataccagctaagcctttttcagagcttcctatgtgccaggcaatgttctaagcactttatatgattcaacttatttgatccttgcattgatcctataaagatccattctataggtgaggaaactgaggcacagtctccaatctcactcaggttgctgcaaatgccattaattcgttcttgtttatggccaagtagtattccatcatataaatataccacagtctctttatccacttgttgactgatgggcatttgggtaggttccaagattttgcaattgtgaattgtgctgctacaaacatgcaagtatctttcttgtataatgacttcttttcctgtgggtacatacccagtggtgggattgctgggccaaatggtagttctactttcagttctttaaggaacctatacactgttttccatagtggctgtactagtttacagtcccatcagcagtgtagaagtgttccctgatcacggcatccatgtcaacatctactgttttttgattttttggttatggtcattcttgcagtagtaatggggtatcgcattgtggttttgatttgcatttccctgatcattagtgatgctgagcattgttttcatatgtttgttggccttttgtatatcttcttttgagaactgtctattcatgtcctttgaccactgtttgatgcaattgtttttattcttattgttttgagttcattgtagattttggatattagtcctttgtcaaatgtatacatcgtgaagattttctcccactctgtgggttgtctgtttactctgctgttcctttcaccatgcagaagctctttagtttaattaagtcccaactatttatctttgtttttattatggttgctttttagttcttggttatgaaatccttgcctaagccaatttctagaagggtttttccaacgttatcttctagaatttttatagtttcaggtcttagatttaagtccttaatccgtcttgagttgatttctgttattaggtgagagatgaagatccagtttcattctcctacatgtgtctagccaattatcccagcaccatttgctgaaaagggtgtcctttccccactttatgtttttgtttgctttgtcgaagatcagttggctgtaagtatttgggtttattctgggttctctattctgttccattgatctatgtgcctatttttataccagtaccatgctgttttggtgactacggccttatagtatagtttgaaatcaggtagtgtgatgcctccagatttgttctttttgcttagtcttgctttggctatgcaggctcttttttggttccatatgaattttagaattgtttttttctaactctgtgaagaatgatagcagtattttgatgggaattgcattgaatttgtagattgcttttggcagtatggtcattttcacaatattgattctacccatatgtgagcatgggatgtgtttccatttgtttgtgtcatctatgatttctttcagcggtgttttatagttttccttgtaaaggtcttttgccttcttggttaggtatattcctaagcattttatttttttgcagctattgtaaaaggggatgagttcttgatttgattctctgcttggtcgcttttggtatatggtagagctaccaatttgtgtacattaatcttgtttctggaaactttgctgaattctttgatcagttctaggagctttctggaggagtctttagggttttctaggtaaacgaccatactgtcagccaacagtcacagtttgacttcctctttaccaatttggatgccctttatttctttctcttgtctgattgctctggataggacttccagtactatgttgaagaggagtagtgagagtgggcatccttgtcttgttccagttctcagacagaaagctttcaacttttccccatcagtactgtgttggctgtgggtttgtcatagatggcttttactacattgaggtatgtccctcgcatgccggttttgctgaaagttttaatcataaagcgatgcgggattttgtcaaatgctttctctgcatctattgagatgatcatgtgatttttgttttaaattctatttatgtggtgtatcacatttattgacttgtgtatattaaatcatccctgcatccctggtatgaaatccacttgatcatggtagattatctttttgatatgttgctggattcagttaacttgtattttgttaaggattttagaatctatgttcatgaaggatatcggtctgtagttttcttttttggttatgtcctttcctggttttggcattagggtgatgctggcttcatagaatgaatgagggagggttctttctttctctattttgtggaatagtgtcacaaggaatggcaccaattcttctttgaatgtctggtaaaattctgctgtgaatctgtctggtcctggatttttttttgttggtaacttttaaattaccatttcaatctcgctgcttgttattggtctgttcagggtatgcaattcttcctgatttaagctagaagggttgtatttttccaagaatttatctatctcttctaggttttctagtttatgtacataaagatgttcacagtagccttgaataatctttcacatttcactggtatcagttgtaatatctcctattttatttcttaatgaggttatttggattttctctcttcttttcttggttactcttgctaaaggtctaccaattttatttatcttttcaaagaaccagctttttgtttatctttttttaaattcaatttcatttagttctgctctgatcttggttatttcctttcttttgctgggcttgttcttgtttctctagttccttgaggtgtgaccttagaatatcagtctgtgctctttcagtctttctgatgtagatgtttagggctgagaactttcctcttatcactgcctttgctgtattccagagattttgacaggttgtgtcattactgtcgttcagttctaagaatttttaaatttccatcttcatttcctttttgacccgatgctcattcgggagcaggttatttaatttccacgtatttgcatgattttgaaggttccttttggagttgatttccagttttattctactgtggtctgagagagtgcctgatataatttcaattttcttaaatttattgaggctcattttatggcctaccatacggtctatcttggagaaagttccacaagctgttgaatagaatgtgtattctgcagttgttggatgaaatcttctgtatatatcttttaagtccatttgttccaaggtatagcttaaatctattatttctttgttgactttctgttttgatgaactgtctagtgctatcagtggagtactgaagtcccccactattattgtgttgctctctatctcatttcttaggtctattagtaattgttttatatatttggaagctccagtgttaggtgcatatatgtttaggattgtgatattttcctgttggacaagaccttttaccattatatgatgtctcactttgtctcttttaactgcggctgctttaaagtttttttcgtctgatacgagaatagctacccctgctcacttttgctgtctatttgcatgaattgcctttttccacccctttactttagtttatgtgagtctcctgaaggtagcagatggttggttggtgagttcttacccattctgtggttctgtatcttttcagtggagcatttaggccatttacattcaatgttcctattgggatgtgaggtaccgttgcatttgtcatgctatttgttgcctgtgtaccttgcttttttttgtttttctttttgttttttaacttgtatttttgttttaaaggtcctgtgtgatttatgctttaaagaggttctgttttgatgtgtttccggaatttgtttcaagatttagagctcctttgagcagtccttgtagtggtggcttggtagtggcgaattctctcagcatttgtttgtctgaaaaagactgtatctttccttcatatatgatgcttacttttgctggaaacaaaatacttggctgataattgttttgtttgaggaggctgaagatagggccccaatctcttctagcttgtaggttttctgctgagaaatctgctgttaatatgataggttttcttttatgggttacctggtgcttctgtctcacagctcttaagattctttccttcatcttaactttagattacctgatgacaatgtgcctaagtgatgatctttttgcgatgcatttcccacgtgttccttgtgcttcttgtatttggatgtctaggtctctagcaaggctggcgaagtattcctccattattccctcaaatatattttccaaacttttagatttctcttcttcctcaggaacactgattattcttaggtttggttgtttaacataatcccagacttcttggaggctttgttcatactttctcattcttgtctttgttggattgggttaattcaaagacctgtcttcgagctctgagaattactttcttctactagttcaatcctattgctgagactttccagaggattttgcatttctgtaagtgtgtccaatgtttcctgaagttttgattgttttttctttatgctatctatttccttgaatatttctcccttcacttcttgtatcgttttttggatttccttgcagtgggctttgcctttccctggtgcctcctttattagcttaataattaacctcctgaatattttttcaggtaaatcagagatttcatcttggtttggatccattgctggtgaacaagtgtgagttttttgggggtactaaagagacttgttttgtcatattaccagagttggttttctagttccttctcatttgggcagactctgtcaaaggaaaggtctagggctgaaggctgttgttcagattcttttgtcccatggggtgttcccttgatggagtactctgccccttttcctatggatatggcttcctgtgagccgaactgaagtgattgctgtctctcttctgggtctagccacccagcaagtctacccggctccaggatggtattgaggcttgtctgcacagagtcctgtgatgtgaaccatctctgggtctctcagctgtagataccagcacctgttccagtgtaggtggcaggggagtgaaatggactctgtgagggttcttagctttggtggtttagtattctatttttgtgctggttggcctcctgccaggaggtgatgctttccagagagcaccagctatggtagtatggagagggatcagtggcaggtggggccctagaaccctcaagattatatgccatttgtcttcagttaccagggtggatagggaaggcccattcaagtgtgggcaggggtggacgcgtctgagctcagactctccttgggctggtcttgctgtggctgctatgggggatggggttgaggttcccaggtcaatggagttgtgtacctaggagggttatggctgcctctgctgagtcatgcaggttgtcagggaagtgggggaaagccggcagtcacaggcctcacccagctcccacgcaatccaaagggctggtctcactcgcaacgtgccccctcaacagccccgagtctgtttccaggcagtgggcaagctaggcttgagaacttgccccaggctatctgcctcccagctgtgaaagaaaagggcttgtttctgcccccacctgtggaatctgcacactggatttgtgccctccccccaagttctggccaggaggcttcttgcccggttcaaattattacatagttcagctggagacttccttctccctgtggtgttcagcctctcctctggcctccctcccgatggatccctgtggtgccaggcaggaatggcctgcttggggacccagggagctcccagggcctttcccgctgcttcctctacttctgtatttcactcgactctgtaaactaactcagctccaggtaaggatggaaacttcccccgaaaacagaccttcattttctccagtgggggtgtatgtttgggagaggatgctctccctttcccacttccacagtttgggcactcacagtatttggagtgtctcctgggtcctgcaggagcagtctgcttccttcagtgggtctgtgagtcctcttggggttgctggcttgttcttgcaggttctagattatcaccatcatcacacagacttcctattatgtcttttttgattatagtcatgctagtaggtgtgaagtggtatttcattatgtgtgtttttttgtcgtggtaaaatatacataatgaaatttaccatcaaatccatttgtaagctgtacagttcagtgacattaagtatatttaaattattgtatagacaccaaccccatccatctctaaagcttttcatcttcctacactgaaactcggtgcccactaaacaataactccctatttcctgctctccctagctcctggcaaccaccatgctactttctgtttctgtgaattcactactctagatgccttatataagcggaatcatacagtattgtccttctgtgacgggttttcacttagcgtaatgtcctcaatgtgcatctgtgtcgtagcctgtgtcagcattcttttcttttgtaaagctgaacatacaaatcaactaagagaagacaaattgcctaatcagataatgggcaaacaataaaagaaaaaaatcacttaagaagaaatataaatatctcccgatatgggttggctctgggccctcacccaaacctcatgctaaattgtaattcctcgtgttggaggaggggcctggtgggaggtgattggatcatagggaggatttcccctttgctgttctcatgatactgagtaagttctcaggagatctggttgcttagaagtgtgaaccacctcccacttctctctcttcctcctgctccagccaggtaggaagtgcctacttctcttttgccttctgccatgagtgtaagtttcctgaggcctctccagctgtgcttcctgtacagcctgcagaattgtgtgccaatgaagcctcttctcttttacattatccagtctcaggtagttctttgcaatgtgacaacagactaatacatcccccaaacatctgaaaatattcaacctcaccacagagcaggggaatttaaaaaccaaatgaggacgtgccctttcacatctatcagactgacaacactaaaaatatgtgactaagccacatttggccatgatgggagaaatgttctcacacggtactggtgagatgctatctacaggtaacccctttggagtaaagctcaagttatgtataacctatgccttattccacttctagggatacagtttcttacacatgtgcccaagaaaaccagaaaacgacattcactccataattgtataaacctcaaatggcaatccacctacgtgtccatcgatggcagaatgaataaatgtgtaagacgaaatcatatagaaaacgaatgccaaagagctacagcagcaacacggcgagttcccaggggcaagacagatgtacataccctaagagactatttaagacacaacaaacaatactctcttctgtttgtggatatatacatatatagtgcaagtttgaaaatttgggtgggatgagatgcatacataccaacaggggaaaggaggagaacgggactagggagggtcaaaaaggacttccaacgtatctgtaacatattatgacttaacggatgtgaaatgaatacagcgattgtaaagatttgttaaaactgggaagtggagacgtgtttattagttaatctcggtacttttctgtaccatgaaaatttttataagaaaaatacttacagaagctatagtcaggctggtatgtactaactgaccttggctgcagtgagtggttgagaccacgggcaactgaacatgtgctacccggtgtatgaccacacctgcgctccagcccactgaggccaaatgttgccacgccgttcatttttaaaagtaaggctgaaaatccagagtcttactgcaatctcctgatttaaaaatgttggaaatgaatcctaaaaccttaagacgcctgtgtgggccaagctacgtctgctgtggaatttggccctgtggcctctagtctaggactttacactttcctatcctgaagcagcagctgccgtggttctgagcctaagctccaacagccagatgcccatctccctccagctcacacttggagatgattctgcaccactggcctgcacacgggtccttgtcattgctttctttgttttgatcaccaaattcctactactcacacatgctaacttaacaggttagccccaagcctcttgtcctaagatttggaaaaaaaagactcccaaagcataatgacgtggcatagttttcccaggacagcagccggaatcgtacccatcagaaataaacaccaaagtcctgaaccaagtaggctgcagaaaacacccaggggacggattaacaccagtgggaggccctgccctgctggcccagctgcccggccccacaaaattattcaatgtgaaaacacacaagcagacctccccagcattccacccccgctgctgctccactttggacatgaaaatattcagaatttgacaaggatctcagaaaatgtcctggggcaaggtagggaggtgctcagcagtctgagtgaggcagctcgcttgtcctgtaagggcgacacaggggaagcgctccctcagcaactgtgttcgaaggggcagaggcagggctccaacaggactgagctggctgcctggggctctggcatgcagctttacgagcaagggaattcacagctctgcctgaatccccacccacaactacctttaactgcaagctgcaggttcactccctgactcccccagagccatcaggagccagccaggcccctgacaacaagctgcaaggtgaccctccgtgggtctattttgagttcctggtgcctctcaacatgctgctgctaagttagaagcagtgaccctggtagttatggcttataaagtccatgttcatggtgaacttgaaaagaggtttcccaggggcaacagacatccaggctagagccatgtggagacggctgaggcccagggcgcccatcctgacccagtggctggcgttcggctgtgtctatctccatgcactgactcaagtgactaagggtgtttggagaccatgacgtgtcataatcatctttagtacagatgacagctttgtcactggcagcctctcctcctcattttctcctgcttcctcctgggcttctccagtgctgggagcttcgctgttctcccctccacttctctatctccttcctcccccattttctaagctagcttggctctttccttggttcagtctgtggcttcttccctctcatggctcacttacaaataactgtttgaggaccttatctatgccatgttccttcagatactagggaacagggcataggggacccctgactctccacctgggaggcttcaggccgatgtgttcaccagcctagaggatagcagggagtcccaccaggcctgtggttctgggtgggtgtgcgtgtcacagaccactctgctagtccccatcactgaagcctagtggccacttcctttccaaagaccagacatgcagggttaggatctgggcgtcatcttggactgctctctgtgccacgttcaagcaaccactaagtcccaccaagccaaccaccacgaaggatctcaaatctgccttcccctccccatatccatggccacccttcgctagggtgccataacagtctcctaactgcactgcctccccaaaaacaaacatgtaatctcttttcccttccaagtaacctatgcttctctgccacagctccagtctgaaactttcgacggctccctagtacctaatgccttccatatcctgagcccagcattccggtcccagccagtctgatgatttactcattcgttcagtccacgctccttcatagtgccacccaaggactgcagctgttttcaggaatatatgcagagaaacaaaaataagactctggactaagaaaaagaagtaccagggtagatgaaggtaaggggaacaagccttgtcgccctggccctggccagccacatgtgctcctccctcccaggctgttggctgttccttcactcagacatgctggcaccggtccctctgcctgcacgccctcctcatttctcggttggccaatgtcaagcgcctgctcctccacaggtcctagatgttctctcttccactgctggctcatctgaggctctccaaatggcctaaatgataccgttcctgccaagactatcctgaccttgctatggcttgggtgctcctaggagtcaagaggctcagatctagttcgggctcccaggctaagtctttgttgaccttggctactaaacttccccgggctcagtttttccatctgtgaaatgggttgaaactcatttgtttctcacgtggatgtgccaacgattgatcctatatggtcaatctgttatcacccagtgtccccttctggatggatgcaggcccccagcaggcatatcacagagcagtccaggagctgcgtgcaccacaaccccatgtgctgacttagccacagcccccacctcctcctcggcggtggaccccactaaggcagcgtgtgctgagtccaccctaaacctcggctctggcacactggagagaaagttcgtattaatgttgctggccaataaaacaaccagcagtttcctataaaaagtgacagtgggataagtctacattaaaatattcatgccctttatttcacatcacaaaaagattcaaacaccccaaccaaacgcagttacagcagctgccgggcagatgttcttcaggcaggcaaatgagacacagtaattagtctcaattaagttaccagtaaattatgtaacggagacctttagccacccagccctgacaggtttgctgagccaaaggcagtgaacccggtccaaaactatttagaaactctggattgctttggataattcatgttctgagtaaattacagagagtcttggcatgggaggaataatgaataccgtaaccactttcaactgaaaataataatttgttaataattttaatagctaatgagctacagaaaccacgtccgtaagccttccaagcagaaaggaaggagattcattttatttctggctgtatgaagctgatggcattcactcatccatatgcttttgagacttttgctcagcaagtatcttgtcacatgatctgttttcaccggagcactgcttcttcttgaattttcaaaaacagtttcctaaaggtctgctctgcaaagatgtttctgtctaatcgggctttaaggatttctcagcaagaggcacacaggagactggctggctgccattctgccttcaagaccctgagaaaagagactcttccatcaagtcttgttgaaccaagttgtgtgatgttttcccttgtcaacttttgtttttaggtgaacaaaataaaaaaattttttttttttttgagacggagtttcacttttgttgcccaggataaagtgcagtggtgtgatcttggctcactgcaacctctgtctcctgggttcaagtgattctcttgcttcagcctcctgagtcgttgggattacaggtgcctgccaccacgcagggctaatttttttttttgtatttttagtagagacggcgtttcacgttggtcaggctggtctcgaacctcctgaccttaggtgatctgcctgcctcggcctcccaaagtggtgggattacaggggtgagccactttgcctggccaagaaaattttattcacagaattgtagagaatatcccactccctggtgaaataactgtatttggggccactcagagtccagatttcctctcttcatccacaaaagcctggtcacatcttgctgtggatggtccttgtccaagtccttgccttctccctatctcttctgaaagtcagactctagcacagagcctcgtgcttcttaaggacctcatgaatgtcttctaaatttaattaaattccatggttctctatgaagaaaactgacaagtgacctggagcttacaaaaatgatctttgcgctgatctccagggcatcttgggctattctcactcactttagtttatctcttctattgccgtattttctgcttagtagaacttataaatttaattcatgcacattgtagaaaatctggaaagtacaaaaaatagcgagagaaccaaaggacacacatgatcctagtctttcttcctaaacatcttcctttgatgttgatgtcataccacaaatctttgtatactgtgcatcgctattgatagcgaagcaattcctatgcaatcaaaaatcttttctaaaggttgatttttttttgttgttgttgttgagatggggtcttgctctgtcacccaggctggagggcagtggtacaattcagctcagtacagcctcgaactcctgggctcaagcaattctcctgcgtcggcctcccgaatagctgggactacaagcacatgtcactgtaactggctaatttaaaaaattttttttgtagagatgttgtctcattttgttgccctggctggtctcaaactcctggcttcaagcagtcctcccaccttggcctcccaaagtgctaaagattaactttttaatgcttgcatattactctgtcatatagatagagccatacattactgaaccagtgcatacctggtcatttgggtaggtgcccattttgtccatattttggatgatttccacagggtacaaatggaagtcctggatccaaagtgttgagcaacatcattcagagggccagggaggagtgcttggatctctccgtgatggggatctcattacactatgacccggccatgcctgacccactagcctgttgggtatgcttgttctctagtgacgatgctttacatttgtgaaggctttacattgtgaaggggcaaggtttccaaaagtcctcctatgtatcccttgtgtcttctttctgcctatgcatgtagcccttcagctgttccttaagaggcagcagtgtccaggctacagtccctccaccccactcccctgctttggatgttccctgccggtcaatgtttccttagcacgtgaccttgacaaatacatgtctagttgcaatgtgacctgcttcaagtaaataaacaataagaaccacactaactggacccttctatatgccagatgttgtgtgctttagtcttcacttgattcccaattagataagcggggagctcctgtgaagtaacctgctcaggatcacacagtcagggagatcggtcttgggttgagagtggtacgctaatgttgtctcctatagccaatacatttctctctgtatctcctgtagtttatactttatataaatggctgctgtgttatttgaagcataaatattcataactgttatattttcattataaattaagacttttaatgtaagtttccttgccacatttaatgctttttggcttgaagtctattttgtctaaagttaggattgctacctctgctctcttactgtttttgcttccctggaatacctttatttttagcctttttgaatcggtttcttttaggtgtgtttttttgcatacagcatatagttgggtctttgtgagccaatttgacaatctttttctcttcttttcttttctttttttttttttttgagacagactttcactcttttgcccaggctggagtgaagtggcgtgatctcggctcactgcaacctccacccccagggttcaagcaattctcctgcctcagcctccccagtagctgggattataggcactcgccaccacgcccagctaatttttttgtatttttagtagagacagggtttcaccacattggccaggctggtctcgaactcctgacctcaggtgatctgccagcctcggcctcccaaagtgctgggattacaggcgtgagccaccacgccttttctttcagaaaaagaaaatttttttcttttaaccagtaagctaggccaattccaatacacttgatctcaactttgtagtagtatttaattataattactgtgtatattttattgtgttttctgtgttttttagatgttatttctttactgtttatttattttttggtatctataggtttttgtttttgttttactccaaccatttttgatagttttattcaagtatcacataaatacataaaagtatataaattataagtatacagcttgatgaaattttcacaaagcaaggcttgtaactacaactcagatcaagaaaaggaacattaccagaacctcagaaggcctcctcatactcagttatgagcctcccccaacaattctgactcctaccatcacaggtttgtttggcgtgtccttcaactttatataaatgaactcacagagcaggcactcttgtcttttgtgtctagcttctttatttgtgagactgatccaagttttgtagaacaatagtttattttcatcattgtgtcgtatttcattgtatgactagaccacaatccatccattgtactgtggatgtgcatttgggttgtttcaggttttggcctcttatgactagcactgtgctgaacattcttgtacatgtcttgtacaacttgctggcatacacctatgtggaagctaaagcaactgcatcttaaatgggaggctaaagcaactccatcttgaatgcttatccgccatgttggcttaactgactaactgtagttccaggaaggcctccgagatttccaatttatctactgttgcttgtgtaaaagcaggcacataccataaattgtgctcttaggtcaaacaaccttatgctatcacacttcagttgtcctacaaattgcatctgaaccattccttgacctgggtctgggggacaatggcatggggatccaccatcttgtcttgctgctgcccgaggcacaggcatggcttctgtttttaagtccctattaaatgtttctttctaagaaattggatttgtcagcctctttggcctctcagcttcctcagactttggggaatgtctgcatagctctgcccaccttgaaacaatctaggagtagaatttctgggtcatgagaatttgtatgtttagacaaatagatttccaaagtggttatgccaatttacactcacaccagcaatgacagagattgccaatggctccacgtccttgccaaaacatactatcatctgtcttttctatttcaatcagtctagtgggtgtgtcagtggtatcacattgtgttttaatgtgtacaagtggagaatacaggtgaaggcattatgggcagggagaacagggtgaacaacagtcgggaggtgcagaagtactcatacctttgtaaaacgcactttgtctctctttcctaatcttttactacctggtttatcagtttttaatgatatctcttgacttccacccactctctaaacaacgacaaatgttattatttgattttcctgctttctgttttttctttctttttattcttttattctactcttttttctattgcttttagttgcattcttttcattttgtcagagcatataacatttacatattatttttcattcctgtatctaactttgtgttagtcttagctccacaattaaacatcctaagatgctcaccatcagcccttttaccgctgaccctagtcatctcttggttagatgaagggcatcctatgatagtagtgggattgacaaactatggcctgagggccaaatcctccctgatacttgtcttggtgaatacagttttattagaatacagccctgtctatttgtctatacattgtttgtagctgcttttgtgctacaatagaattgagtagttaagacagagactatacagcttgtaaagcctaaaatatttaatatctgtctttcactggaaaagtttgctgattcctgctccggtaaattcctcaagaagggctcatggatacagcgtcctcagctcttgtctacttaaaattgtttttctaaagctttgatactcgaaggatagtttagctagttataaaatcttggtctgatctgtgaggacatcatgcagaccctgagaactgggagtctgagtctcatgagtcagaaggagtgggctggggagtagaatgagtgccccgttctgagacgagtcctaccacttgatagccacacatttctgtggagtctcctgaccccatggcagtccccactggggagccctacccagagaagtcacatgacaggaggctgctgacaagctgtacaggcagagccacagacagaccctctaggaactgtagtgcctgggtgatgagccatcagctgccatctgtgtccctgcttcatccataataatatcatgggaagcttactaagtgctctgctgacctgacccaccaccccaataacactgtcagacaggcgcagaatgttctcattaaaccctcgcacatttggggcactcatgcagccttcttttcaaaaatgcatgcaaaccatctgcctaaatcatccctcatcctctagttgtgccaggggttgacagcactctgaaacggcattcttcggacccggccatttatctgtttgggaaattgnnnnnnnnnnnnnnnnnnnnnnnnnnnnnnnnnnnnnnnnnnnnnnnnnnnnnnnnnnnnnnnnnnnnnnnnnnnnnnnnnnnnnnnnnnnnnnnnnnnnagacatgaaccaagagaccccgaccccaactgtggacctcaccacccaccctcctgctgccatcacccaggagagttgggggctgggcacctccccaccaccaccacctgcccctcactaccctctccccagatagagaaacttgcccgttttccctctctgccttctctggagaagtgggaagaatacatttccctagggtggtggtggggaccccatgtccttactccctggagaccagacctctctaattagattccatgggatgaggcttcccgagcgtttttgtctgattcggactgtttacgtttgccgtatggtttatgtgtcatctttgctgtccagcttgcagatggtgccatggttgcacccatgggttccactgcctttttaaaccagtcacccagggcttccttcctgtaaccagccaccaaacctcatcatgtgctggcatttgaaggcagcagacaaagtgcccaaaaggaaagcagagagaaggctgaacactatccgtgtatcactgtagttgtggaaggttgttaatgtaaccagttgtccagtttcgaggtcttgggaggcaaacaccgcagcagcagcagcagcagcagcatgctaagcaggtgttccgctcactgtgttgcagtagagggagcttaaaggggcaatcttccagcagatggaagcttcgatatccccatccaagcagtctcctctcacttcaccccaaggtgctgttgagaaagatgagactgtttccaaggaggtgaggaatgggccagtccaagagcatgctgcaggtgctagctgggggaggacgcccaggcatggctgagcactcctgccactcagagccttggggaggtgggcaggcccctagggaagatggagcccctctctccctgcccctagccctcatcctgaccttggccagcagccaaaccctaaccagggtcgtgtatgagggacacacatcacgttcccatctctgcctagggcactcctatcactctggtatgtttgaaaaatgacctgcagctgccttcccacccgggatagtagctctttccagaaaacaatgctgatcgttgttttcacccactgaatgccgggtctatgtattccactctgggggtggcgggcccttaaaattggggaggaggaaatctcctttctttctagatagcatgatttctgagcattaatcaccactgaaatgatgggatgtttccaatgaaaaacacattctggagggattataatggatgatgtttttaaagaaaaccatgacttaacagaccaagggaagagaacagtgttcccttatactgaaaagaagaaagtgatcgttgaccccctggtgccagtggaaggggctgatctgacttgcaaggcctctgagcaccctgacagcccaagccagccttctttctgtgtgtgatgtggagatagcagtgcctcagaggcctttcgaatcaaatgatgcaatacatgttcaaggatctgtgtgctctgagccctaggaggaagtcagggagaatcagtctgaggtcaagttcatgtgtattttgctatgtctgtgtgctccccagaaacccagctgttagatgcctttctgtgttctaggcaaggagatacaggcttgagttccatgaccttaacaatgaacgaaccttgtatcacgcgagagggtagttacagacagttttcaatgtggacacaccatctctgaggcctgcacttgctttggtggggcctgaacccccctgccccaccctgcaaggcctgcctgcctggctgtggcccccacttgctgtgggcatgtggccaagccacttcagttcagccggcatttctggagttactgttctatgccagaccctgtgctggtggtacaagagtggacagtgacttggcctaaagggagacagacaaggagctggctatagtggcccatgctgagtcccactgggcaggtatgaagtcagcactgtgggatccagacagcccctgcctggggagccacagctgggggtgggtgcaggtagagggtaagactacttttattgggatcagtgatattggcccgtgacatttgccgttgctttagaatttacaaagcacgttccctcagggtatctcattggaccctcacccatctgtccccattttacagatgagcaagctgaggttcagagtggtgatatggctttcttcacagtcatacaactagaaaatggcagagctggtaatccaccttggcttcaagtgcaagatcatgtcagaggcttagattccgaatttgaaacaagaaggagctgagctctaagatgctcatgtggtcgttattaagtcaagtatctgtctgctctctccccagcccatgacgtccatcacaatctgctcccccaaaggctttgagtcagtcgtttacactttagtgtaaatctcttatctctctaggagatcctgcatgtttagcctccccttaattgtgaaagtaaaagttgagtccttattgaagaatatttgaccatcaaaaatcaagtgcacaaggcactggggaccctggggcccttttctgggacacatgaaactgtgccatggcagcagccagcactctgcatccagatcaagagaggcagatcctccattcaccatcactcccaggaatgtgagcagcccgtgaaaggcagtgaccaaaattcagtgcttttctgggcaggggcaaaaaggagcggggacagacacttctttggtgtggaacactgtgtgtgagtccacagagcccgccgctgggccatccgtgctttacagagagaagtccgagacctgggccatgctcacatgagagcagtgagcttgctgaagagcagcgaggtcccaggaaattgccaggaggggtggccgcggggaagtgaggcgggccgcagggccatgccgaatggtccaaaggccagtgcctccatctcctgggtcccctgccgtccctccatttgctcagtgtcccttgtcaaaccagccgcctttgcagggagtgagagatcagagagcggggaagcctggtcatcccatgccccgtctccaccacagtctaggttctaatcactgcctgcatgtggctggtaagtcagaagacatcatccctaaggagtgcttttttgtcattgacctcagagcagggcaggtggttaagacaacacaggttcacaacccagccctactgctgtccccatctcaccttgtgtgggcatcatccgccatcagatgagtttaggggtagccctcatagggctgattgaggagtgaatggcatccaagcatagcattcaccccagtgctggcacaggggaaatgcccagtaggggcttttgatcatcgttattttcacaatcaccatctggggcagtcatcagcctcttctctcatcagaatctcatttcttatatgggcctgtaaagtgttcacgtgttcgaagaacagtccctcgagtgtgcttcagtccccataaatggtgcgttccgtggttgggtacccacacgtgatggcggcatggcgtggggcagctgtctcactgcagcttttgcagtggatggtgggaagcaaagttacccacagggaacagctccagccccaggaaagaggatgagagctgcccgcagtctcctctgcgcttcagtccccaagagctctggaggcgacccggcccctgcaggccatcgggggtcacctcagcctcctggttccctggctagaaggtcccagccacaatatgcaggtcagcaggccgcgaattcagaggaaggagggacccctgaagctgagactgccgggaagaaagcaggcgtcgcagggggcgtgggagggggtgtctgggaagcatttcctgtttcccagcgacggcacagggagtgggtgttttcactgttgtctaacactctgctgtttcaggtttcaaccgcttccgaggttttcctcgctcatgccaagtctcggggagaaacctgctcaaaatgcttttgaagagctttgacatttcaccagccaagcaccttttcagtagaaactgcagttactgtcaggattccgtcagtctctttctttgctatccaaaaccagcctgaggcaggctggcccctcagagactcactcagtggggacgggggtggattcattgtgctttgagagttcagccttgcatgatttcaccccatcttgggcttgtgctcaccccagacccagtgcggggagacagtggggggcagccctgcctgggccactctgcaggaagcagagcccaggcgtgtatagttgacattcctggagtgttttcctcttcctgagagctttacagcctcctctcgctaattctcaaaacatcctgttgggatctggtgttatttacagttgtgattttacagctgggagaagctaggggaagggaatcccgctgtggggaaggatgtcatcagggtaggggtgatggagacctggttcctcccctgttgggggtggtacgggcaggtggggggcaggggcaggctagctgtgtggcttgggaagacttacatggacgctctgaaacctcacattctgcctctctgaaaggtggcgccgcatccccagcagacaccacttattgagcacctactgtgttctgagctctggccacggcagctgtcagtgtgaggattaacaagctcgtacgtaagcccggtcccccgtacacagcagacaggcaggtggtgggccctgctgcgacggtgactgccgttactgttattattaaagaagctagtaacgcttgcacaatgtctcagtatcacgctggtctggggaacctaacaccttttctctttttgccggaaactctacctaaaggaaaatctcttttacacagtaacttcatgaaataatttgcacacaaaaaaagcacatgagtaaatccaaattgaacctctttttgccctttgtgcatcaacaattttgttcctgttttttccagtgacaccccctccctgcctgggaagggtggtggacagatgcagaggatgcctctccaccgggcagccagctccgacgcacagctgtgggcacctgctggggagggggctccactcacttcaggtttcccggcaaggagcttttcagctaaatttattgctgcccccattttttttcagttacctgcatcttgggaagccacatgaaattggatgtgatgagccccttgacaaaaggaccaaacaagaccagatatgttttttatagatctgtttgcttggatgattaaagcctgaaaaatggcttcacagcaatgcttggggcaaattcgatgctatcaggagacactacagtctcctcactgttcaattaacgttgaagccttaggggaggccgacagagaaggaattcaccccgtgcgcccaccatggcccagctcaggttacgagggtgtcgttcaacagcagccccttcagacctgtctggaatcatgtttgtttttcagggccaaaacagcctctaattgtgctccctgaggtgtggctgcctgatcaactcagggagccaggcagacagggctgtgtgcacctgcctgtggagggcctggtgaccgaagggcagcccaaggagtgctaagggagtgggccaggtgacgcagtgtgccttgctgggctgcaggagctccctgcccagctcgctgtggcgcttggccgtgcattcactgttgagaataataacagcaggatttgtggagctccactctatctgagacccccggctaggctcctattccacactgcctctactgcaggaaacaattctacaaacaagagtttgttatcctcatgctgcaaataaactgaggctcagagaggttaagtcatttgcctgaggtcacacagctagtaagtggggacgtagcatgccaacaggcaccccttccccctgccgcctgacaccccgcactgcatggcctctccatcaaaactctgctttaggagagtatattacctgtggattttaggccagggcaggcctggcagcacctcagctcaaatgaaaatgcagctggttaggatggtgggccaccagcaggttacaccagactcattggcagaattctccagttttatttttaattatataagtagctcttactatagaacacactaaaaggaaaattagtcccagaaaccatatgatgacatggtaaatttttataacggtttgtcttccaaactgttacataggtatacacacatctatattaaacaaaaacggggtggtttctgtacatgccactttgtaacttgtcttctcacctaacacatggaagcatcctctagggggctggcccagacacagctccaggcagttaagcaaacaccccaaaattctcaaaaattctcccaggtgagtcagagccactcatagcccacagctgtgtgaacagtgcccactaggactccagctagaattaagcaaaccctaattctgatgagagtaaaatgcctacaaggggcagagcccttgggaccacctgccctcagaactgcctcacacctggccctgcctcatgggggcactagtgaacagtgagaacagacacctgtccctgttgaaggactttggagacacccttccatgatctcatggagcagttctatttatagactggaaaattaaaagccagtgacccatgctaggaaagataatgagtaaatggtggagatgggcagtgacctggttctttgattcccgcttccgattaaagctccattcagtacaacctcttattcacataggagggtggaattcattccatgagatggggtccctggaccactcgccactcctacctctgcaactttgagcaagacgtggacccgtgccaacctcagtggccggcatcagccctgaggattgttgtggaacgttccgtgctgccgtggaggcctacgaggggtccactgggaagagcaggcataccatctgcatatgctggagacgtgccacatgtcagccttttcccctcggccccagagcaggctgcacaagactaagacctttcagaggggacacgtctgcaaggtcacctcaaatgcctgagttttacgatggtcattgatcatttccaggcagaaaccttgccaatgctgcacttggttttaatagacgcacagggtgaagcccttgcccttgtgtgattttcacatacatatcagcaacactcgcagaagaaacggaagcccttcctggcactcctgcagggctgagccccttaacagcagtgattcagtgggactgactccccagctggcagggcacggacacctcttcaggagatgcaggggagtgaggcgggttcctccatccatctgtgcagtttcctccccagaaatccaacagccccctgccccatgctcctctctccagaaaggaataggaggctgcctgcctttccctcctgggtacatgttttgcagtagaggcggcactgtggccaatggcccgagaaaagatctgaagagaaaagggatgttggtgttgcctgcaggtcggcaggcagcaggtgtatctctctgtttttagtttttacttttttgaaacagagtcttgctctatcacccaagctggagtgcagtggtgcaatctcagctaactgcaacctctgcctcctgggttgaagtgattctcctgtctcagcctcccaagtagctgggattacaggtgctcaccaccatgcccagctaatttttatatttttagtagagacagcgttttgccatgtgggccaggctggtctcgaacttctggcctcaggtgacctgcccactgcagcctcccaaaatgctggggttacaggtgtgagccaccgcacccagccctctgttcttaagtgggcctcatacgtgccaaatagtcacagaaattaaccctgattatatggtaatcccgttttcccaggaagcagggtttcttttgaattacataacacatttagatataaaagtctctagtgatgtaagtggactcatcaaatgcctgccattaagtaacttattgatgtagttatacattcatatttaaagttatgcattataaacattcaaatttagaaatgttgctattttccttggtatgttataaaatggagccttatgaaatggatgctttgaggtcaaaacagttgaatagaagcagttttgtgtggtgcaacctggtgattgtagtgttggtctcatcgtcaccagctccactttgagtcgcctgtcggtttgccagagggcacgtggttgtatctgacttcactcaaatgctgcccttttttcagtctgtcccgctcccagtggaccactcgcgtggttttgcaggggattggcgtgacttcgctctgcgtttagcgttcggctccgtggctttgttccgcattgggaacgttggcttttcccttcatctaccacatttgtgtggactctcagtttctgggtacaactacttaccagattgcttttgtaagtgattttttttttttttgagatggagtcttgctctgttgcccaggctggagtgcagtggcacgatcgcagctcaccacaacctccacctcctgggttcaagccattttcctgcctcagcctcccgagtagctaggattacaggtgcacgccaccacgcctggctaatttttgtatttttagtagagacaaggtttcactatgttggccaggctggtctcaaactcctcacctcgtgatccgcctgcctcagcctcccaatgtgctgggattacaggcgtgagccaccgcacctggcctctaaaaagaattttgactgaaagcctttgctcccttacctttaggcacacctgtcatctggctatagactgcagtcagggctgcgcctggatgttgttcttgcttaattatacatatttgtgtgtgcagagacacaactactccttaacaggaagaaaagagagctctttgcattctccacagggacctgagaggaggttcaggttaagtcggaggccctcggttctgaatgcccactgcaagcacttggagagctttataaacactgagctctgggtcttgggaccccctccaccatcggattgtattggtgtgggatttttcaaagctcaccaggtagctgcatgcagtagatcccagtgtgcagccagcttcctccaaggtgcccccaacaccagcagggcgggagtcgcgttgctgtaccacctgtcttgtgttcaaggcgggaacttccttgtgtgacttcatccctcaacctcagcactcctcaaacttccatgcgcctgatgccgactcctgaggtctgggatggagccctgaaatctgcatgtgtaatgcatgaatttgaaaggccatgagctgcctccgaagggtttatctaaaaaaaggaacaaggcatgaagtggggaggccctagggttggcctggcctctcgggtcagagcccgggttccagtttgaacgtgccgggggcccactagggagctgcttatagttttcacaccttctttgtgagctgaaaaaagcagtgcccctttagagcaacattccctctgaatgtttatcactctaaagtgaaaaaagacacacaaaacctgaacctgcttgtcaggcaaggaagctgaggaatccacctggcttgcaaaaccccccctgggagcagacagccctcccaggcacagatgggacaccaccgcctcccacgcagcctgtgtctggagactccgcatgacccccaagaaggtcctttctccagcaaggccagggtcaggaccaagagtgaggacacgggaagcacaggatctgcggggcacctgcctccctcaccacgtgtggcattcagagaacaaggctgcgcccaaaccctccacgccctgctcccctctctccaccccaggtgccattcctagctccagctcggctgctgcaccggttttgctgactgctctcaaaaccctgtaaatcaggggttgtgtgggctctggtggacaccaaagtatactcatggacctggctgtcttcctgggaagaggccaatgtaagggagaagacaccattccaagggctcctgggagaaagcaggggccgaaaagctcaagagcagaatctgagtagaggactcagatacctggccagttcctacctgggaaatgctttaaggagtgtgaagagacaccaggcacggtggctcactcctgtaatcccagcactttgggaggccaaggcgggcagattgcctgaggtcaggagttcaagaccagtctggccaatatgatgaagccctgtctctactaaaaatacaaaaaaattagccagatgtggtggcaggtgcctataatcccagctactcagaaggctgaggcaggggaatcacttcaaccagggaggtggaggttgcacagtgagccgagattgcgccactgcactccagcctgggtgataaagcgagactccatctcaaaaaaaaaaaaaaaaaaaaaaaaaaaattatatatatatatatatatatatatatatatatatatatatatatatatatgaagaggagggacggagaacagaaccacgaagtcttaaccgggtccactccttgggaatttgggggcctctgctcaactatgttgaccaggttttagcaaacacggcacctcctcatgctggggctggagatgccagcagccagggatgtctaaatcaacaccgtcagccacatgttagtgcgtgactctggtatgcaagaaaggttgtactttgttttcttttacttaattctaagccccaatcctccaggcttgtgggaaattcaaccccagtcattactgggctcttctccatgcccaagactgggcaaaggccccggagcctcaggcagcagacagtgcttgggagacctctgtggtcatcaggcccggtccttcctgggggccaccaagccatgctgctcaccatctcaaaaacgtcagagcctggagcagaggcgagcggtggaatgcagctagcatgagttaatatttcagctgttgtcttaacatcttagtctcccctggctgctgtcaccaagtaccgaagcctggtggcttaaacatttattccttacagttctggaggtggaggatcagaatcaaggtgctaacaaatccagtgcctggtgaagaccctccccgatttacagaccacggtatcctctcacggtggagagccagcaagctcgggtctctttcccttctcacactattcccagcatggaggctccaccctcatgacatctaaccctactcacctcccaaagccacccacctccacggctccaacatctgcattttgcagagacacaaacatgtattccataacatcttgaaacagtcttctatcaggcagctgctgtttttgccctgaatgattgcaagtgcctgggcatgacacacagtgcccagcccaggggcagccacattgtgaggccatcgtcccagccccctgacctcgtgtaggccccactcaggctgtcctgtctccgcagtgccacattgtgaggccatcatcccagccccctgacctcgtgtaggcccccactcaggctgtcctgtctccgcagtgccacattgtgaggccatcatcccagtcccttgacctcatgtcagccccactcaggctgtcctgtctctgcagtgctcgtcgacctgcgggaagggcctgcagtcccgggtggtgcagtgcatgcacaaggtcacagggcgccacggcagcgagtgccccgccctctcgaagcctgccccctacagacagtgctaccaggaggtctgcaacgacaggatcaacgccaacaccatcacctccccccgccttggtgagtgtcttcactggccccggttcccagggggctgctgtgtctcctgcccagtaagtcctccctgacggtgaggttctttcagccagaaagccccttcttgggcctcacttgtcacataaggctgacatttgtcagttctgtagaagaggtttcagagatggattccattccttgttatggaagtggtgtttgcttactgctgtctccaacacaggcacctgagcgtctccctcacccctttgcccaacacaggagaatgttccacagacactgtaggtttcctgtgcatgaggaatgtgaagggaagtgcttctttctagaaatgaaagctccaggggcatccttcatgatgccatgaggatgcacacatggggcacaccccaggctgatgcttgagcagcagacaggcgtggttggaggggctgcagactgtgtgagtggtttggccctgggtgctcggaacctggcctcttaccagttcatgccccaggtcagtggtgatacaaggagaagaagagcacttaaagatctggctggttgtggtggctcatgcctgtaaatcccagcactttgggaggccgagatgggtggatcacctgaggtcaggagttcgagaccagcctgaccaacatggtgaaaccccttctctactaaaaatacaaaaatcagccgggcgtggtggcgtgtgcctgtagtccccacgcctcaggtgactgaggcaggagaatcgcttgaacccaggaggcagaggttgtagtgagccgagatcgtgccactgcactccagcctgggcaacagagtaagactccatctcaacaaaaaacaatgatatgatgattccttttaacagagtttctgctttgctaaatacaagtccctgagaaatattttcctacctgaggctggaaactcaccaaaatgaaggggatttctagtatctttgttccgggggaggcctttgagctggcagaagtatagttgtgtcttttcaagcaccggcctgcttgggaacttcaggacctcccttgagcagggccttctctctgtacaatcaagaccctgaaggatatttgggccacttgtatgtacttggacctcatgctttttggggtcctttgatgtccactgttccatgttgtcctgttttataaatgcctacagtaatggtacccttggccacaaaatagtaagtgccacttagctcggaagcaaggtggcctgtgccctcttccctgaagaggcagccagaccaccacactctgtcatgtggttgggtttggatgcaaaggtgcatccctgtgacagaaagtggcacccccagtgccctggcaggaggcatggcctaatcagtgcaaagggttgacgtgtgcacgagggtgagggagcccagacggtcagaccacaagccctccctgtgcctgcatcaggacatgcctaggccatccctgaccctgggtattctctctcctatccccttagctgctctgacctacaaatgcacacgagaccagtggacggtatattgccgggtcatccgagaaaagaacctctgccaggacatgcggtggtaccagcgctgctgccagacctgcagggacttctatgcaaacaagatgcgccagccaccgccgaactcgtgacacgcagtcccaagggtcgctcaaagctcagactcaggtctgaaacccacccacccgcaagcctaccagccttgtggccacgcccccacccggctgccacaagaatccaactacatagaacatgagcgtggacttggcgtttgccattagtgcttccgtacttaatatattgttaacagccactggctggctttctacagtgaggagaaagtaggcatgagtcacaaagtaacttcaatttctaggatttcaggtacctcgaagggaagcacctctggcagacaaccgtcaagagagagacatcatttagtgttcttgtcttgactcgcttttgacatttgaatttccagtgcttggtatatcatggaggaaacatccccaaaacgagacatgctagaaaaggctttattctgaaagccggcgacaccatggagggaggggcaggtgttggtgagcctctgcccgtggcttctctggggagggccgggctgcttagcacacgtttctctccatctaccttcttgaccacatgagaaccaggacgttgcctccatgcccgtctctgagaacatagtctctaaatcctaggtgttgccttggaagtctcgtgcgtggagtgtaaatctatatatgccagcgaggacagcagtgccacgcagttcataccacccgcatgggaagaatgttccaagagagtctgggtttggggaagcatctaattttcagagctctgctgtccaccgtgtagggaaacagaagggcctctcttcaaggtgctgtgacataagaaacggtaattgcggtgatggggttgcttcctaaggcaaaggtaagcttgggccatcttcatggggcggatgggcacctgccccgccttccgggaacatccactctggcctgcacttcctaaagctttgtaccttaaagatgctgtaccacatcccagtggctttctaccgaccgtggccatttatctgaaggtaagacgacatttgggacctctgaggacacaagcccaggcctaggatctgtagagcaaggcctgactgctctatcctggcacggagcagcctgatgtgccaggaccaggggaggaacgccatctggctggcactgctgcacacccgccgagccttcctgtagccccagactttgtggtacccattatcatcacgcctgtcatcattgacccatcttcttggtggggcaaggatgatgcatgatgaaggaaggtccttcccccctgcagcccccttacgcctggcagcagacaagcagagtggcctctttgagagcacagaggatggtagcaccctacctgcaaggaggccgggcagggaccctagatgccaggaggcctgttttgctcaccaacttggtgggcatttcatgggtgcttatgttctaggactttaccgtaaataacacctcctccctgatttcagacggaaggtctcacttggacttccatgggatcatctccctgtgcttcttgatttattggtgctgtgtttctgtgttttgttttgttacatgtcacaaccgtagagttagcttaaatcagaaagaagcctctctgccttctccaccctgtcttacgagctgtgtttttgtttttactaccctagaggcagagaagcggtagggatgtcagggaatttactcacttccacttgaatcaacgagaagtgttgagaaacttccgtgggtgctctgtggaaagaaccgagggtgtcaggatggagcggcccaccctcgccccgcggcctgcgcagactgctgtcctccccttcaggcctggccaccagcagactcccatgaattcccattttcacaaagccctcaaaattttgggggcgctgaggttcaattttcttcatccccaaatgaactgttaattcactgaaagacatttagacttttgcagccaaggagcagagccgggcaagctcactaaggaagccttagcttggtctcctgcatgggccccggggcctccagatatgcccactgtcaccctggcaagggccccacaccctcagaatgaaaaggattgattgggttattgtcagatacccccattagttcccctaaagtctgcatctgcagagctcttttagctcatctttttgttgtcggtgttgttttttgagacagagtctccctctgttgcccaggctggagtgcagtggcgcgatctcagctcattgaaagctccgcctcccgggttcaggccattcttctgcctcaccctccccagtagctgggactacaggcgcccaccaccacgcccacctacttttttgtatttttactagagacggggtttcaccatgttagccaggatggtctcgatctcctgacctcatgatccacccgcctcagccttccaaagtgctgggattacaggagtgagccaccgcgcccggccttttagcttatcttgaaatccaccagcctaccttctgttcatggcacgagcagtgatttcagtgaaaccatcataaacattcttgttccactagatgctgatcacagcagtgatgtttctgtgttaataccctgactgtcnnnnnnnnnnnnnnnnnnnnnnnnnnnnnnnnnnnnnnnnnnnnnnnnnnnnnnnnnnnnnnnnnnnnnnnnnnnnnnnnnnnnnnnnnnnnnnnnnnnngcacccagaaatctcactaaaaaaataatttgacagacaacacactgcccacagccccctggacactggaaaacctgtggtttgtgtaaattctcaagaaccgtcgcccacctgcctccaggaggtgttagaaccctcttgtccttcctccgttctaccctttctggcgggttggcttttaacagccctgttcatgtggaatttcttcatgagctgctgtgattcctggatggccccagtgattccggtttgttagatgaaattgacaagctgtccatcagcaagtgtcaagtaggcatctgttggggaccaagcacttcctagaaccaaagagaatgcaaaggaacagaagtcttattcaggagcccacagccccacggggcagagaaacctggagacgcgcacagctgggaatgagcccgaggaacagagctcggaagagggaaaggtcaggatgtcctctgtgggtttgttgactgaccttctggacacagattagaagggctggggttggaagcttttactgcagcaccctctctctgtaaaaggtctcagcaaaagcctttgcatttctgctcccaggtacaaacttgcctgcatgtgtgtccaccttctctgcctgacaaggaagcagtgcccagccttcctggaaagccagccctcccaccatcactgacctccccccttccccagcagcgctccacacaccacctcacctctggtcatgaactcccctggcttttgccctctgctctgcagtaacactcttcttgacaggtcaccaatgacttcatggcatcaggttgcgtggacatcctagtgtcctgttccccagctcccagcagccctcccctttgacacagcccctctgcagcaccacacactgctgcctttcctcgcctctccccaccatccagctagtgatggagtgccccaagctcagtcctccacccttttctatgtactttctccctaggtcatattacctggactcaagagtttttacaccatgtacattctgttatcttccaagtgaacattttgggccctgacagccatcccggcccacctctgtactcacgcatgactctccacgtgcatatactcaatcccccgggaagtttgggactaagatggcgcttcatagttgtcctaaatctgcaatttcagcagagggtttggtgagggcagctcacctctgctggggtggctcaaaggtcaagtagagactggaagggtcagaagggctatagtcttgcacctgtggccggtgatgacagctgtcagtcagaacttccgctaggaccatcagccgggacacctgcaaggggcctctccaagggatggtgggattttggtggcaaacatcccaagagtgagctgcacaacctcttgtgacaactcagaagttccacagcatcactcccaccataccctaagagcaaggcaggcacaaaggctcacctgagtttaaggggaggggacaaagagtccacctcttgctgggggtggtgtcagggttctggaagaacaactggactgggaaatactgttagggccatttttaggagattcacacacatcccctgtattagtcagggttctccagggaaatggaaccaagagaatagatgagatttattaagggaattggctcacatgatgattggaggccaagaagtcctgccacctgctctctgccagcgggagactcaggaaagctgccactgcaattcagtctcagtccaaagccggagaacctggagttctggggccggagaagatggatggtccagctccagcagagtgcagatttacccttcgtcagccttcctgttctattcgggccctcagcagattggactttgcccacccaccttggtggaggtggatcttctttactcagtctatggattcagacactcatgtcttccagaaatagcctcacagacacttccagaaatcatgttttaccagccaactgggcatccctttacccaggcaagttgacatataaaattaaccttcatattcacacatgcaaaatacactcacccctcccccaccccagccctaaagtctcatctcctttcagcatcaggctcgggactgcatcccctgaatcaggtgccgatgtggctcctccagcatggttccccaggcacgggcccttgagcactggttctaaaattccgtgaactaaagagacacatcctctcccctccacccagaggctcaagagaagatggtggcaacggcataagacaaccactgcagacactccctattttaaaaggagggacagagaaggcacgtgacaggcaccatccagcagctgacgtccagtctggcacatggtgccaattccattaggctcagtcctactgccagggaacgattctccttggactgcctccagaagccaaagaggctttgggcatattgtgattcattcttaatgatgggggaggcatgattcaataaagtgtccttccttttggagagcatgttctgacacgcccccagctacttggactcctatgaacttcactgataaaatgagcccttgggctgggcacggtggctcatgcctgtaatcccagcacattgggaggccaaggcgggcggataatgaggtcaggagatcaagagatcaagaccatcctggccaacatggtgaaaccccatctctactaaaaatacaaaaattagctgggtgtagtggcatgcgcctgtagtcccagctacttgggaggctgaggcagaagaactgcttgaatccgggatgcggaggttgcagtgagccgagatggtgccactgcactccagcctgggggagagaacgcgactccgtctcaaaaaaaaaaaaagaggggggtgccctcaaattttcatagggcttttctcccccagcctagagtccatgtgtcctcccacagcctctagtctacttaccactcctgtgcatctggtctgattaacatgatgtcacagatacagtggatcagtccaagttcttgggagagtctttacaatccaggccctctcaggcagtatcataacagagaattaacatcagcctcggggaggacaagtggaaacttgtgtctgtcacacttctttggccccactcctcctttctgatatggatggaaatgaatgccttccccagccactggccatcatccttgcatctgaatcacgttaatttgctctagcaaagacatcacacctggcacagcagtttgtgtggggctcattcttggatacaattgcagtagtccactgtggtcagagaggatccactgtgaatttcgtagatgccagactgaggaattgcatgggaatatgatggggacaaccacagcagcatcctttaggtctttaagaatgacattcataatgctattctcactgggttgcaacattgctattgatttactgtcttgcctggtgtcatgagtggtgcaagattagagataaccaggtccacaaacatttgtatctttctacaatgtcagacttttattgatgccatttcaatcacagaagcccaaagttcgatggggttcccaagtatgcagttctccttagtactacccattcacttggtagtcagagccatgggcaccaggctcaagcccctccacgggtcagtcaatattgcaaaccacgcataatagtatacatagtcactcacgcctataatcccagcactttgggaggccaaggcaggtggatcacctgaggttaggaattcaagaccagcctggccaacatggtgaaaccctgtctctgctaaaaatacaaaacttagccaggcatggtggcaggtgcctgtagtcccagctactcaggaggtcgaggcaggagaatcgcttgaacctgggaggtgaaggttgcagtgagccgagatcacgccactgcactccagcctgggtgccaaagctagactcagtctcaataataatatacatagtcactatataaatgttacagattaaacattccacagtaaacaaagtaacatttaacatcaagagaaaaagattgaaagaattaatcaaccaggccaggggaagtaagacaaaatgagtcctggactgggttggccagtccatcggtcttgcaaggaagagcctttgatatagcagagcctttggaggcagatgtgaagttcttatcataagtgactgcaagaccatgtcaattaagatggccagttgaagctgctgaagggctggctgttcttttatggtcacagagtcctctggtgagaactgatagtactaaatagaagagtatgcttatttgtgaccttatctggttggatgctgtcttaatttttttatttgtttcctaagcaaaacatctcatccttgttggcaaagtgccctatgaaatatacaattgagggaggccgaggcgggtggatcacgaggtcaggagttcgagaccaacctggtcaacatagtgaaaccccatctctactaaagatacaaaaaaattacccgggcatggcggcacgtgcctgtaatcccagctacttaggaagctgaggcaggagaatagcttgaacctgggaggtggaggttgcagtgagccgagatcacgccactgcactccagcctgggacagagtgagactccatctcaagaaaagaaaaaagaaatatataatgcagtccttttctaagatggagttagttatgtcaagggtgctatatacacccggggagagggaggtagtttcacagacttccacttggccctccccattacagtagttttttaccctacaggccaaggaccaagtccagccattaccagtacacatttagggagggggaaaccatcactgcgaggcttcacggacccaccagacccactgtgaaccaaacctggaccaggccccatttattatgtgaactccattcctcgtcactctgaaacggggaccacaatgacactcagtagccggggtaccagtgtcaacttggatcctgtgtgcaagtcctctaaatgcctgcgtatctttctctccaacaagtcaatggctgtaggttcctttggggaaagattgggggcaattaattgatacccttctccctgggacccaacctctccttcagtcaatggattctgggcatgaaaaccggctcagactggaaactgagcaagacgccatgtttgacaggatggttgctcttgtgatcgcccttttttagtcaatgtgtaaactgagtaatactataaatgtacaatgaattgagttataggtgggaagttggctgctcctctgtctggccctagtagggctctattaactatttccaacccctgtctgtaggtcaggccccctgctgcttctctgaccttgctgcccctcatgatcttacgcccaccctttttctgactgtgaagggcttaccatgtggctttattttgtgatcctattagcctcatggctatcagggagcccagttctgcacagcatcccctgctgtcagccatgacctacagggaaccgttctgctggaacttctccacaatgctgctgccctttcagcaggacctcctcactgctttgggaaatggaggagtttccctcagaccctcctatggaacatcggatgggggctgggaaggtgttccagccttagaaagaatatcctctctagcaggcccagcctctgactcttctgaaccctctatctctacctaccaaaacacttttttttttttttgagactgagtctcactctgtcacccaggctggagtgcagtggtgcaatctcagctcactgtaacctctatttcctgggttcaagcgattctcctgcctcagcctcctgagaacctgggattacaggcgcccaccaccacgcctagttaatttttgtatttttagtagagatggggtttcgccatgttggccaggctggtcttgacctcctgacctcaggtgatccacctacctcagcctcccaaagtgctgggattacaggtgtgagccaccatgcccggcccctaccataacacttctactgcactttgcgagaccatcactgtccccaaggttctgtgagccatctgtctcccagggtccttgggagggagttaaatccatgcagagaactcccgctgcaagaggtagaattcccccttctaccttcatgtccactgttccttatccagcacttcagatccggtctggtacactctcctggcatctgcatgtccgttcttgctagggcctgcagctccttcgggatctagttcctttccccctccacctgagttacattgtgacttaggaatctgtctggtggccaggaggggaggtgggggagatcctgattctaacacagcatttgtattatcttacaaggcacaggactcggtatcatctttaagcaagggagcagtgatagatagctttaatagggaagagagggccacttccgcaggctggaaagcgtctagagaatgtggggtttcacagtttttaggacatttactgagttatccccccttccaatcccagaatcccactccttcgtaatcaggattctgacctgcatgtagccaacttcctggggttgaggattcagccttctctgaagcttctgtagtcattaccattgaagcctggcctgatcctcaacgctttctgccctcttaagacataagggcctcgtttcacacttccccttaaattagtgattaatcatctgtagcatttttattgtctttctccaatgcatcactaacactggcaacagccacttcatttctttgccttggaatttctgtttccctgtatctttcaaatgactgagctattgcgccatcagtgaaggcttaatcattgcccatacagatgccagaggcttccctcctgggaggttggtgagggggggggggggtgcgggggagcccttgtatccagctggcaggtgatggcagctccaaaatcctattttagggtctgcttcctataggaccactcctggcaccagctgccttagtttgggttctcaagagccagtctgagatggaggcttgtggggaggttgattgggaggtaccctcgggaatcctgtgatgaggaagaaaggatttggcacaggcaggtaccatggggagctgtagagtggaacggttgtctcaaacagaggcaaggtggcaggccttcgtgtatcacaggacgaatgccatcttgagggttcactgtcttctgctgagagggtactggggacagactcagttgtgagcagccaccactcctggcagctggggacagccctcagtcctgaagggggatctgtgtggcataccacaccatacaccacatgccttaaacttagattgttacaaattaaatgcccaattaactgcggcttccccaaatcagtaaatggcaccactaaccaactaatgtctgatatcaaaacatcaaagtcacctttctttcctcagtttcccttcctgtcctcaacccaattcagccacagataccattggttctacctccaaaggatatctctaatctgcccacttctccctatcttcactgccacgcggtggctgtgcgccaagtcgcagacatttcaccaggaccccacagtagcttcctgtcatagtccattagggctgctataacaaacaccttagcctgggtaatttataaatagagacatactgctcccagttccagagactggaaggtcaaggtaccagaagaatcagtgtctggtgagggctcccccctacttgagagattctgccttctcactgagtccccacatggtggtagaaggggcgaacatgctctctgggttctcttagtaacgactctagtcccattcatgagagctccaccctcgtggcctgatcacctcccagaggccctacctcccaacaccactgcactgagaattaagttcgacatctgaattttgggaagacacaaacattcagactatcacacttcctgaccgtctccctccgacacactctccacaccctagccagggtaatatcggaaaaacgtaaatcataataaaaacttaagtggcattccctgcttaacatcctctgatagcttctcacccctgtggtcctctcagacccccgttccctcctctcctaccctgtccttcccgcacaggacgcccagccagtctcccttctgtctgcgagccttctgccctcttccccaccgggcctcagcaggtgctgctccccacgtaggtaacgctgccatctcacatcccgcgggtctttcccctgctgaaatctctgcatccgccatgtttcagctcccacatgacccctcacacagctgttccaagcatccagctaacatggcctcccagtcacggttgctgtcctgaagcaccgctcggtccttgtcacaacccagaattattaacgtttttgcttgtgtagtgtcactttcccatctagaaagcaagctccccacacacagaactcatgtggcacttttgtatagctggagccctggtgcccagcatgtgcaccccctaagtgaatacacttaacctttgttagttcccattctattgcttacattatgttcagataagctaaagactgtaccaggacatgtttatactgggtaataaaaacatactctaacttttttttttttttttttttgaaacggagtcttgctctgtcacccaggctggagggcagtggcaccatattgactcactgcaacctccacctcccaggttcaagcgattctcctgcctcagcctcccaagttgctgggactatgggtgcctgccaccctccctggctaatttttgttttttnagtagagacagggtttcaccttgttggcccggctggtctcgaaactcctggcctgtttttatccagctggctgagctccccaatttgttgggtttgggggtgtgnnnnnnnnnnnnnnnnnnnnnnnnnnnnnnnnnnnnnnnnnnnnnnnnnnnnnnnnnnnnnnnnnnnnnnnnnnnnnnnnnnnnnnnnnnnnnnnnnnnnatgtacatcaataagggaaaagatgcttaccattttccaaatgctcccccttgccaacagagataggtgtgtccaggtggctgtcatggtgatagaagctgttttctcgtcttttcatttgatctgtggaataggaaagtgatgactcagaaggcagagaacattcatggtctggagaggatctttgaaaagcctgatgtggcgccaccatctggtgtctctagaataaaagttctaaccgcgcggttcatggtatcttcgggacaagcccacgcgccggctgggacccagcatgacatgggggctcgcccactctgggatttccttaaccagggaccactgtcatgcctcgtgcactgtgaacttgtcatccccgtggcttggaagccctcctcagaaagacatcccctttcagagcctgagcagccacagcatttcaggggaccacataaaaaatgaccaagaaggccagacacggtggctcacacctgtaatcctagcacttcaggagaaggatggaggaagaaggatcgcttgaagccaggagttcaagaccagcctgggcaacataacaagacctcgcctctacaaaaaaataaacaattagccaggtgtagtggtatactcctgtagtcccagcttcttgggaggctgaggtgggaggatcaattgcttgagcccaggaggttgaggctgcagtaagccatgatcacgccactgccctgcagcttggatgatagagaccctgtctagaaaataaaaagagaccaagaaataggaatattttcctcctagaattgctcaggagaacactgggatttcctctggaaaagactagacacttatgtctgggggaatccatcccattgtggcaaaaagaaggtaaaggacccagtgaatcagagtttgttggaagcctggtgtggtggctcacacctgtaatcccagcactttgggaggctgaggcgggcagatcacttgaggccaacacggcaaaaccctgtctcttctaaaaatacaaaaattagccaggcgtggtggtatgtgcctgtaatcccagctactcaggagaatcgctttaatctgggaggtggagtttgcagtgagcagagatggtgccactgcactccagcttgggtgacagaacaagactctgtctcaaaaacacaaaaacaaaaaaaacagagttcgttgttaaatagagcccagtagagccaaaacaaaactccttcctggcagagccatcaggataaatgtcagcccttaacaggggctgccacagaccccaccgttatccatatttacctacagcccagcactgctgtgatgaggctcagggaaaataacagggtccctgaagtctccaacaagctctttcctacccaccctgtctctgtctccaaagttttctctttccacgcacctgatcctaccctctcacttttctgcctctttctcgtgtatttgttctctcctccctccctacatccatctctccttcgctcttccctccctttccatttcctgcattatttcccaccttctccaatttaagagggttatccacttctgacttggccccatcatagatgcagaagcttccacagagggtcagctcgtagatccctggggactcgggggctgccctaagggctgtgtttctactgagcctttagaataccaagtaccctttaaaaattcacttgcaaactacccacccagtatcgttgcagactgttctttagaagttttagaggtctctgcgtgctcacttccaacttatttctgtatgtgccagtcacacgttcaacaattctttggctcacaatgtatccccagcaattggctttctcgccactgaggttagttttaacatgccagctgatagttataaaacagcaattctggaaatcccatccaaggattgctctgtattaacacatcatcaaaatagtatattgcaaagtcaacatacgattgtaactgttgacctatcaaatactgaaatattttgaaacctcagtgggagccaaatgccattttattaaattgggatacaggaaaggaagagtgttgcaaatgtcgcagtggtgttagtttgagatgttagtgggttttgccaatattttctctaacaaaataataatgtaatatatctatgtcacattagaatattgtatgtttattctatagatacctacactcacatatatacatacacacagtgcatacatgtgaagtgtggccacagagttgacgtgggacaatctactgtggttcatatctaatggccatagagcaatttcaatgaggttcctgcaacctctggagcaatggccccattactcaattaagacagaggctcccaaagcggctgcaacacccatctgaaaatgttaagttatggtatataaaaatttatatcatgactcatatattcaacaaccgttttacaatgtaagtcaataaacttctattgagcagtgtggcagatacagggtaggggtgaaggatgaatgcacacagtcccctgtcctcagagagtcataacaatatgttactgtgcccttctcttggaaatgagtgactctgcccaaatgtggaaaatatttaagtgagttcaaaactaacacggctgttggctctgaatacagaataaacaaacctctgcccaaagagaaatcagatccgctgtctttctgatctaactcagcaaagccaagttctcagagtttgaattcctcccgcataagcaccctcaaatgcacttcttgcctctgacattgcactcatcccaaatatcacttcctgatggcatgacctgtgctttctgagtgtgttgatgggtcagaccactgaggagtcctgcgtggctctctctgtccagaccaagctggctggtcaggatgaacggccatgtctatctatacaaggctggtggcttatgtgagctagacttacacagctgttttaggatgttcaaaaagatcaaagagcaggaaatcatgaaacaaaatcaagtagatagagaaaagaaccaacaagaaaaaaaaattctaattgacaagcaaagtggttacagtgaaaacctcgaagccctgggtaaatgcgagagacaaaggaatccaacacagggctcgtgaatgggaaagttacttggaagagggaagagttgtacccagaaggcagtgtagagaggcaaaggaacttttttaaaaattaaagtgtaggcagggcgcgttggctcaagcctgtaatcccagcactttgggaggatgagatgggtggatcacctgaggtcaggagttcaagaccagcctggccaatatggtgaaaccccatctctactaaaaataccaaaattagccaggcgtggtggcatgtgcctgtaatctccgctactcgggaggctgaggcaggagaatcgcttgaacccaggaggcagaggttacagtgagccaagatcacaccattgcactccagcctgggtgacagagcaagactccatctcacacacacacaaaaaaaagtagttaggcaaagagtttgagaggtgttgacttctgtctaaacgccactccagagatgagaatcaaagaaatggaagaggaaatgtattgagatcatggctggggatgtgcaagaattgaagacaagagtgacaatgcacagaagtgaatccacacctcatacatcatattgaaactacagagatcaaggaggaagaagaaatcttaaaagcaaccagagaaaagacaggcaccctggaaggaataacagtctgacagcaggtgccagagggaatggaatagtatcttaaagtgctgagagcggtcgtagccgtggctgtttagttcagctattagcattccatggaacagactgtggggagcgccacttcctccttctccagagtctcccacaattgacagcggacatttctcagaatcccggctcccgcccggggactgtgtgtctcaatgagtggctccaccttgctccgtttttacaaaagtgagaaacctgagagccagcccatagacagaacctccccaagtcctgtcactttggttttttttccttttttgtagagatgggatctcactatgctggtctcgaacttctggcctcaagggatcctcctgccttggcctccctaagtgatgggattacaggcgtgagccaccgtacccagcccatgtcctttgtcttaaattcccacatgtccatccctgtgggcactgctccggctcaggcctgttgcaggagccgcctggctcgccttgctccctaccacctcaccaataccaaagtcactcttttcagaccgctaacaggggctccctttactgcttcctactcaaagctctcccagctcacccttcaggcaatgtgctccccctgttgccccctgcccatgcctgggatccccattgttccaagccaggggtctacaaaccagggctcaccggccacactgtttggataccccctctgcccagtccctggctgtggggtcattcccagctgtgccacatgatcgctttcagcaaaagcctgcaggtaactctgggtgccacacttctgactactctgagaatcgcatccagtctgctctacccctctgtataagttgatcctttagaaaggcataggaattccaggcaaggacaaagcctctttcctgtggccttgcgtgttgttccagtccttcccggagcccttgttcttccgtgcatcccccataccacagcccacaccacccctccccacatgccttcctggtgggcaccagagcttccccttccattctccacagtctctttcatgccacaccctggtgggtgctaggcaggacataggctgggtccaggttccccctctcaagtggcatgaggcccgtgcccatccacaaaggacccccagccccaccagggatgagaatccagggctgaggtgcagagccacgtggaggccagagagctgtgctcctgggtgtgaggagatataaccatgtcttttattttctgtttcctgatgctttgacatctggggccttgccaaccctgaagggatggcccctcccaggactatttcctagagagaataaagaactcacccccacagcgtgctcctcaaatgtgagccaaccaatccagaggccacacccctggccacacccccatccttccagccacccccacctccccgcgttgccccagggcgagtaccaggcaactagagacaggcccaacaccccaaagcctgcagaaattaatcaaacaggccaatccctggcctgtctaccctgccttgcccagtccttcccatggaaccacagtagaggctcttgtccatgttttattcctgctgcctctgcctcccgcccagtcctgtgcttcctggcacgaccccccatggcacactcccttgtcttgggaactgtgagtaacaaaccatcttttcaagggcagctgcctcctgatctgttggtcctgctgttcctcacattctctcttaatgtatattttaaaacagagggtaaagaagaaagtggtcaggactcttgggaggattagagacaggaacatggggcctatttgccaggacgggtgggttctaagggaggggaacagatgggtcatgcgttacgtcaaggcaggtggtcagcagctacctcctgccctgccacgccccacctacccaccctcggcctgcccgtggactgcacttcctcctcaggttggaaaataaggcagactcttccaggctctcttctaaaggagagcacaccaataaatcaaacaccaaagtatgccttcttctcattttattctaatgcaagcatcctggagtcttctgtaccttctatccatgcaccctgccctccagccctctctctgtaaggctatgtaacacatggccttgtctgaaccaaaactgcctcccagaggctggatggaatgctggctgcagggtctgggtcctgaggcagattgatgggtgaacccatctcaaaatgagatcctgcttggctttgagtcatgaagccccctgaaagtaatccaggactgtcggccactctacagagtgggtgcagccacattccacaccaggaagaccaaagccagagaggctgtcacatctctcagagccacatagcaaagagtgattcactctgcttcatgcagtccatggagactcacagaggagaggacacctgaaggagaagtgaggatctggcaggcagaggagaggaagggctttctggacagaagggacaggctgtgcaaggggacagaggagagtgggaaatcggtggcacatgaggtgcagcattgtggggttgatagcaattgaaaccggaggtccaaagaccagcatgtttccagttttgccccccgcctccagggcccaccacagggcctcgtgcagatgaaggattcaataaagatttcctgatgaatgaatgagtttaagacacagccatggacagagacgtgggaccttgaatgccagaccaacagcattttgccttctgctcagagtgggccaactgggctccaggcagaaaaggacacctaattagaccttcttgcttctacagagatcatgccaggatagccaggggtgtttctgggctaagctggatgagctggttaagccatgctcttgaaataaatagcttgtactgtttgtcccccaaggacagaacatgcttcgtggagcctgtctcattattccttgcaacatacatatgcaaagcattagcgggcagatttcccagctctggcttgtttagagagtgaagatttttgtcaaggtcacacagcacatgaggggtgaaactgaaagcagcaatgaccctcagccccttgtcctaaccatgttcttctctgatgcttttcccccttgcttcagccaggggccaaggctgacctaccaaatcatgactcagctcctatctgcgggttaggcccaggacagggtctcctcctccaggctgggatgccggctccccacagcggagtgtaacttgcttactacggtgtggctctgtcctgcagtgattgtcacctctgggggccaggcaagattcaagcccctgaggggagaaggagatgactcatgtatgcctgaaagaaagcaggaaggaggtagaaactggacccaaatggaagagcctggcctagccccttgggaagtaaccagaaagcttcctcacccagcagacctccttgacctccagaaggctccagcatgcttatatgattcccaattctcattccggcaccagaaagctggcctctccgctccattccacagttttaacaaatattgagtgagttctcatacgtgccaggcactgcactggccaccatgcacgtggcaacttccacatccataatagcatgggctctgtgttaaacacgttagaagtcaagagatacagtggtagacatgacagacacagccctgccctcgtgagtttacagtctgaaatcgttgtatttcagagagtcagggcaatatagttttggaaagactacaaatcctagtcagagagacctggattcaagacacgggcctagcttctcaccaactggttactaaacaatgtgaaaatggaagtttggactgacatcaatatgcagagataccatgtgcccaagacaatacctgaccccaaaccatcaaaccaaaaccccttacccatgggtatggatgtaaaaaagctgggctttggtgattaaaatatttctttggagatagccactggtgtgcctcgttccagccctgccaatgaggagatggtacctcccacccatcttgggcctagaaaagaagaggggctacatggagacctcaaaagggacttcataccatacacgtacccagatgtttaggcagcatagtggatgggtacctggctcacagctgagaaatccagatggaaagagattggccctttgttggctggggctgccaggacagaaagccacagaagtggcttaaacaaaagaactctatttctcatagtactggaggctggaagtcccagatcaagatccagcagggcttggtttctggcgagggtgctcttcctggctctcagacagctgctgtgtcctcccatggcctttcctctgagcactcttggagaaagagtgaaggagagttctcggtgtcccttctcataaggatactaatcctacggatgagggccccacccttatggcctcatttaaccctaattaccttgttataggccctgtttccaaattcagtcacactgggggttaaggttcaacatatgaatggggggcagggggacaattcagtctatagcaggcaacctagctactttgatggcagaggaagggaggtagctgcaccagaatcagcctgcactttcagagtgtgtcagagtagagacagtggggggccatgtacgagagacagctgatgtgcggtggcttaggtcctgtccaaggggactgtgtggtgaggagacaataggagaataccagctgtgatccaccagcgtccctggagctgaagaaggagtactaaccgcaagtagagaaaagcccatcttctacatcagcctgcaggagagagatgtcagcagataacagggtgatggatgtgtatctccaggccacctatgaacgtgctctaggaggcaaagttagctctgagcacttgcaaggcccagagaacaatcatatttgatagtcacatcagtatctgccaagaaggaaccttcctggtcccctttcccctccacctgcccccagcccatggaagacaaagaattcccaggtggggaaagctctaacaggcttactgtggactcttcccccaggcaatcttcctcctgaagccagaagagaaagaatagattcaactttaaacgaaattcagagttgtattatgccacgaaactggatagttttattactgaatcgagaccatattttgcaacttaagttgacttgagaaagttgactgggaaactatttttattaccttggagagaccaaaaaaattcatggaccaaaactttcatccagggtcaggggaagaaccagccccaagaatagatttatagagacagtgaagaggtggcaagaacatgcttcatggggactcccccgacctggaatttgtgtgtgttcaatgccacaggtacacatgctacatggtttgccatcttaaaatagggataatataacttgccatggaatattgctctgaacgttaaactacatatgttaatgtctgcaagacacctaggacagcacctggcactcagtaggtccaaagacatggtagccagtgtgattgttgttggtgatagtgtagcaagagcattaagaagtacctagaggttagaagtctctgcaactccgagcttgctttgtgtcttctccctccaaagttgactctcatgttaaggtcagtttctagtactatggaattccaaggaagttccaaactgcaaggaaatctgacctctctctctcccccaagcccaatacaacatttgaattttatgtggaaatcttaaacctctccttctcatttggtctcacttggagctttgaaaatataagatatgccatatatggtttctccccagactcatgccgaacactagtcactgttttccagaaacctcagcatctgctcagctatctagcccctgggatcactgcgaaattggactaataccaaggaccggttaccacagtacgtcatctactcatgaatactgttaagtgagcttggtttcaagaaaccttaaaccttcaatgcataactcaattcagtcttttcttggcattccagaacatgattaatggtgacgccatgccacaaataagttatacatggctcagaactctaattcacaattgattagtccatgaacaatagccctgagtaacgtagtgttaatggccagccccggtggtctgttcctaccagaaacccattactaagtccaccctgtgttttacagcatccctactggagcccaatatctgcttatgggggcaactgctttgtttaatggttgctagccacgtgcaattagctagagtagaacagacactttagaggttactgcttcagcctcctagtgagaggatgggaaatatgattttttaaaaagtcagtttgccttcaagtggatcatattcccacagactgggaaatagatgccttcacattgtgctttggatgagggcagggagaaaaggcaacnnnnnnnnnnnnnnnnnnnnnnnnnnnnnnnnnnnnnnnnnnnnnnnnnnnnnnnnnnnnnnnnnnnnnnnnnnnnnnnnnnnnnnnnnnnnnnnnnnnnagggaacaaagctatatagtaacaaagtttttgtatactattaaaattaagttgatattattacatactggattactataaatcaagacgttaatggtaaactcccagggcaaccactaagaaaataactcaaaaatatattgttaaagaaaaaacaagggaattgagattgtacatagaaaatatctttttaacagaaaaggcagtaatgatggaattgaagaagaaaaagatataagacttaatagaaaaccaaacagcagaatggcatacataaattctaccctatcagtaattaaattaaatataaatgtattaaactctctaattaaaaggcatagattgtcagaatggatttaaaataaaaacatgatccgactgttatctatgagagactcactttagattcaaagacgcatataggttgaaagaattaataaaaggatagcaaaagatgtgccacacaaacagtaaccaaaggagagttggagtggctataattatttcagacaaaattgactttcagtcaaaaattgttactagagacaaggaaataattttataatgataaaagggtcaatccatcaagacaatctaacaattacaaacttataaaatacaacagttgaacaatgtcatcaatctactatatttaacagatatttatagaactccacccaacaatatcagaatacacattcttctcaagtgcatagggaacattatccatatgctaggccataaaacaagtctcagtaaattaaaaggattcaaatcatacaaagcatgttctccaactataatggaattagaaatctataatagagagaaatttgggaaatgcacaaatatgtgaaattaaacaacatactcctaaataaccaatgaatcaaaggagaaagtgttaggaaaattagaacatactttgagataaatgaaaatgaagacacattccaaaacttattgaatgcacttagaacggtgctcaaagagatatttttagctacacaagctttcacttcaaaaaaagtaaataacctacccttcaacattaagaaactggacatgaagtacagactaaactgaaagcaagcataagaaattgaataataaaaataagcgtggaaatagaaaaatgagagaaaaaaatcaatgaccataaaaattattttaaaaaaatcaacacaaatgacaaactattagctatgttgcccaaaaaagaaaagaagactcaaagtattaaaaccagaaatgaagatgatattactaccaaacttacagaaataaaaaggatataagggaatattatgaactgaatgccaaaaaattagataatctagatgaagttgacaaatttttagaaaggtaaaaattgccaaaactacttcaagaaaaaatagaaaatatgaatcgattatgacaagtaaagagattgagtcagtaatcaaaacactttcaacacacacagaaaaaggctaggaccaaacggcttcactagtgagttctaccaaactatttatgagctaactaatctttgaccaagttacccaaaaatagaaaataagggaacatttttcaactcattatatgaggccgatattaccttgacgccaaaatcagacaaagtcattaaaagaaaactatgggtcaatattcctcatgaggctgggcacagtgactcatgcctgtaatcccagcactttgggaggccaaggcaggaagattgcttgaggtcaagagtttgagacaagcctgggcaacatagcaagacaccatcgctacaaaaaaatttttttaattagccaggtgtagtggtacatgtctgtagtcctagctattctagaggctgaggtgggaggatcccttgagcccaggagttcaaggctgcagtgagctatgattatgccactgcactccagcctgcattacagaatgagaccctgtctcaaaaaaaaaaaagaaaaaaagaaaaatgtccctatgagtatagattcaaaagtcctcaacaaaatagtagcaaacagaatatagcagtatattacaagaattaaacactatgaccaagtgggatttatcctgggaatgcaaccttggttcaacatatgaaaaatcaaccaatgtaattgctttagtttcctatggctgctgtaacaagttaccataaatctggtgacacaaactagatagcatctttaaaactctgtttctatcattacatcatcttctctgattctgattttcctatatcttttctataagtactcttgtgattgcattagttccacccagataatccaagaaaatctccccacctcaagaaccttaacctaacatctacaggttacttttaccacataagataatatatttataggttctgaagattaggacttgggcctctttgagttgtcattattctgcataccacatattaatcagataatgttaatttaataatataagataccaatagaagtgagagaaactaaatattaaccaaaaaaaggagggggaaaagcataatcatcaacagattcagaaaaagtacttgacaaaacaccacactctttcatgataaaaacacaacacactaggaacagaagcgaagttttagagtaacatcagcaagatgactgactgaagaccctcgcactcatccacccacaaagacagccaaaacaacaaacaaaccaccactttttgatgaaaataactaaaggagggcaccaaagtacatcaaaggagtagcagaaaccctgtagagcaaagaaacccactattgccccacggagaaaggaaggaacacagctcacctctgccaccccatttcccagttgggatcaactaaaaactaggagggactatttcctacagagaaaaggtaagaacttcatcagcctccattatcaccttggacacctgtagttctcacaggcactaaggccagcctagggagttgcctggagttcacacagctgtgctcccccaagagaaggagtcaacattgtgtcccactccagtggcctggctactgtgctatgacatcttggaaccagaatcactgctggagtgtgtcctgctccaggagtgagtgatcacagcaccctcagcacctttccatccctgaggccttgacaccactgggccatccctgcctggtggtctgccatccctgagaagagctgctgctacaccctaccccatgcggccatgctactgtagaactacttcatctaccactcccagttgctactgtgccctgcccctccaggcctgagctgaagtggcacactgcatcctggggaaatgctacattggctgtctagagcatccatactctccaggccagaactgaagtggcaccctgcattccagcaaatggtgccctgactgcccagagcagccacactccccaggcctcagctgaaatggtgcatcacctccggtgtaattaatgccttggccaagctaagcagtggcacatcccagggatgaactgacatggtcccctgtgtcccagggaaatagggcagtggctaagctgcgacaccccatcctactgggcaaataactgtagtaccttgcttctctggaactggactcacccctagagtctgagctgctgagacatttcactcacaaggaatagtgccattgtcgtacttctccctgcctccccctccccaactggcgctgtggacccaagtgaaagctgaactctgctaatctgagatccttgttgcagcctcaccttgccttaccgagcctcccatttcccaccatcccagggtccagagtcatgactacatggtgtttcatcccccctacgcctgagttgccattgtaccctattggctctggttcctgaattgcagctgtacccctgatgcccaggctcacacctccagagctccccttcttctatgaagctaggccagtgctattccctaacccctagagtcggagtcacagctacaacccggccgcctgggttcaagctgctgggagttgcctcagattatagactctggctctgtgggcagtctgcatgcaacccttccttcagagattgaacctgtaccccaagacccaggtgccacagttcgttctcaagaccctgagtccagggcccaagctccacatttgctcttgtcacctgtgacctggaaccccacgctgctgcagctgctcgtgggctgtgtcagaacatcaaaaggggtcctctcagctagtcttctcattgtggggaaaagaaaaacaggaggaccccaaaagctgttgccacctgggatcctaacaacctacactgccactgctgctgccacatattgctatagcctaggctactgaggcacccagtcattgctgatgttgatcgtagctgaagcagctgcatggaggttatactactgtgtctactcagatgcagagtagaaccaccatattcttcccaactggtatactaagactttccctgcaaaaaccactctgtaaagtttggaaaaggtaatcattccatcagatgtgcagacatcaatgcaggaacacaagaaacatgaaaaagccagaaaaggccagacatggtggctcatgcctgtaatcccaacaaacacattgagaggctgaggcaggaggattacttgagcccaggagtttgaatatgttccccataacttcctatgttacccatctgggtaacataggaagaccnnnnnnnnnnnnnnnnnnnnnnnnnnnnnnnnnnnnnnnnnnnnnnnnnnnnnnnnnnnnnnnnnnnnnnnnnnnnnnnnnnnnnnnnnnnnnnnnnnnncctccctcctcctttacttccctcccttcttccttccttcctttctgtctctttccccagcaaatgagaactaaccatcatggcccaagaattttttcaggaaaacatggaaagaccctggctgatcacccatctcgattcttggggttgaactaattaactgaagcctcaaaatcagtgttttttatacaggatttaaggctgaaagtggtttctcagtagtcctcactgttagcaaaagacaacgttgtctgcgtcgcggggcctctctgcacgtagaaccgccggcttccggagacgcgcacattcacagatggtgccgtgctcctcacagtgtgctgtagattttcatttcctctttcaaaaagcaaatatgggaataatattacttttcagggaaatgtatatgagaactcataattctcgagttttaaatggagaaaggctgcatggaagcctcacgtgtgcctgtaaagcgtccctctgggtcccctgggagaacattgcagcccagctagtaaagtcccagttgtacctcctcacctcactcctttgcagacatctgttcaataaaagcagccacaggtcttcaggactatgcatggcacatgttaaagctgtgttttggttgttctcgtaacagagttgctggctgtcatctgccaggagctgtgagagggacccagtctcaggcagacaggaacctctgacgctggtcttttttgggaagggcctgggagcatggcctcttggctggccagctcctgccacagcctctcacccataggctcgcagcacacgtggagaacagtgttgcaggtgcactgggaagggccttgcctcccacagcaaagcagaacagagtgcttgctttctccctggtcctgcaccacggagagaaggaagggatgtgcatgcctggagcatcccctgtgcaggcacctcctgatttccccatgcccaatatatttacttatcattcagtcctcacacacacgcccactgctcttgcccctgatttatgggtgaggaaccctgtattagtctgttctcatgctgctaataaagacatacccgagagtgggcaatttataaaggaaagaggtttaatggactcgcagttgcacgtggcaggggaggcctcacagttatggcagaagccaaaagagaacaaaggcacatcttacatggtggcagacaagaaggcatgtgccggggaactgccctttataaaaccatcagatctcaagacttattcgctatcttgagaacagcacgggaaaaaaaccaccctcatgattcagttacctcccaccaggtccctcccacgacacatgggaattataggagctacaattcaagatgagattcaggtgaggacacagccaaaccatatcaaactcaaagctcagagcaggtaaatccaaaataggattcagtactcagaggccttcagctgtgagtgttctgtccctcatgtctaaatcatgtaaatctgttgaaagttagaaaaaaaaattaagatgaatgtgaccatctctgttttggttcggaccgtccacatagactgtccattccagagggctttgggggaacagcaactcctcttaacaagaccgatgtctggatggagagtaacgggcacaacagttgtaataagctggggttgatcgggcctgtggagtgtcaggcctgggctgagtgctcggtagaggtcacctgagtcacgcctccaacaagcctgtgacatgagagcaacatctcacaaagaaggaaactgaggcttgagcacagactcccccaaggtggcacagctggggagtcagtggggtgaggacttgagtctgggtctgtccaggtccttctgagaatttgagaaggtctgacttcagtatgtgggcacctggaactttcagggtcatgatgaggctagtcaggtgcacccgtgctggaagtaggattatatgaataaaaaaagaaagcccctgaactgaggcacagaggacccacctacataggaataggggagcccgaggccagtcttgctgcctctccaagttgttttctccctctgtaaagggaaaccagcaggtctcatgcctcttcctctgggagttacagtgggcatgagaatgagacagcgggtagaaaaggacagggtatgccaggcgcagtggctcacatctctaatcctagcactttgggaggctgagaagggaggatcgcttgatcccaggagttcaagaccaggctaggcaatatagtgagaccttgtctctacagaaaatcaaaaaattagccgggcatggtgacacacgcctgtcgtcccagctatgcagtaggctgaggtagaaggatcacttgagccccaagaggtcgaggctgcagtgagccaagattgcaccactgcactctacactgagtgacagagtgagatccagtctcagaaacaaacgaacaaacaaaaacggcacaaactggaggggtgaccacatgtgtgttagagtcacagggctgacccaccaggggtaggtgtgggcctgttttttcaggctggctcagggcagacaataaatgagaagtgagaactctgatccatctcgctttccagatcagatgcccaagtctccctgggacaggaagggacgagatcactcttcaggctgggctccttgtcaggatgccataatccaccagcccaggctcgtcaccnnnnnnnnnnnnnnnnnnnnnnnnnnnnnnnnnnnnnnnnnnnnnnnnnnnnnnnnnnnnnnnnnnnnnnnnnnnnnnnnnnnnnnnnnnnnnnnnnnnnctcacctccctatagccgggagtacaggtgcttaccaccacacctggctaatttttgtatttttagtagagacagggtttcaccatgttggccaggctggtctcgaactcctgatttcaagtgatctgccctccttggcctcccaaagtgctgggattacaggcgtgagccacagcacctggcctagatttcatgtgtgagatcatgtggtatttgtctttctgtgtttggcttatttcacttaacatatcttccaggatcatccatgtttttgcaaatgacagaatttccttctttttaaggttaaatagtattccattttgtatacacagccacatttactttattcatctgttgatggacacttgggttgtttctctatcatggtctttgtgaataatgctgctgtgcacatggaagtgcagatatctctttgacatatcgatttcctttgtatatatatccagtggtaggattgttgggtcatatggtagttctatttttaagaagccttcatactgttttctgtaatggttgtactgatttacattcccaccaactatgtacaagggtttcattttctccacattaccaacacttgttatttttcatctttttgataatagctattctaacaagtgtgagatctcactgtggttttaatttgcatttctctaacgtttagtgatgttgcaaattttttcatatatctgttggccatttgtatgtctccttttgagaaatgtgtattcaggtcctttgctcactaaaaacaaataaggttatttgttttcttgctattgagttgcttgagttcttcagatatttttgatttaaaccattatcagatgtatggtttgcaaatattttctcctgtaaattgtctctttatgcggttggttgttttctttactgtgtagaaactttttagtttatataatcccatatgtgtatttttgctttttttgcctgtgctttttgggtcatatccaaaaaataattgcccagaccaatgtcatcaaacttccccctatgttctcctctaatagtttaacattttcaggtcttacatttaagtttttaatgcattttatttttgtatatggtgtgagataaggatctaatttcaatcttccatatgtggctatccagtcttcccagcaccatttaatttacactgtccttcccctcatcatgtatttttgccatcattgtggaaaaaatcaattgcaaatgtgtagatttattttggggctctctagtctgcttccttgatttatatgtctgttttggggccagtgccatgctcttttgattactatacctttgtagtgtattttgaagtcaggtagtgtgatgcctctggctttgttctttttgctcaagactgcttgggctatttgggtcttttatggttccatatgagttttagaattgtttcctatttctgtgaaaaatgtcgttggaattttgatgggagttgcattgaatccataggtcactttgggtagtatgaacattttaacaatattatttattccaatccaggaacacaggatatcttttcacttattgaagtcttcctcaatttctttcatcaatgttttatagttttcagtgtatag

SEQ ID NO: 1096 - protein, 1031 aa, Homo sapiens
  MOD_RES (43)..(56): Variable amino acid
MNLRVYAAAGRADRQWSLCVHVCTRVCAGGPRSGVGLPRRSQXXXXXXXXXXXXXXGLFPVHGRGSEGKPCGELKKEKGIHRLEAMLFALDRINNDPDLLPNITLGARILDTCSRDTHALEQSLTFVQALIEKDGTEVRCGSGGPPIITKPERVVGVIGASGSSVSIMVANILRLFKVSALVGPLRCSSPNGLCPPHFRVPGLADQPLFPPFFLTLRDSFFLRAVSENLGQLFLVSVCCLVVSAQAQQMKGIGTQPCGADRGAETAPAAGGSGQSRWGADAEEEEAGLQTIGQSQVVLPSRGDGVWSSGSLRHLEFVGAQYWGGGSWTEIPPSLWLGTGLYMHPVTVRHKHDHARCDSRFKPVVFKFVFKEKLTMKTASLTEEKLECSLWCCLSDPSPRGLAARCCVLEGLIVQSRRQGTQGSAPTVQSNAPQLVPGGCGGPPHPTHAGIFQGTQGSAPTVQSNAQPPPVSLFSGHPVFEPTGPGPPLAFGNPKQQPPGLIQKEHCLNQDDEAKRDGWLEWHCGVAVGRAWRSAARPRSRSLCSASCGKGVWKRTVACTNSQGKCDASTRPRAEEACEDYSGCYEWKTGDWSTAAPALPLGAHWENPTASRACRRNPKRSPRQDAGALDARLAMLCGVLAGPSLLPWGHLGQTSLPFTPGTPGQGPGDAGTDRAGGHGVTFIFSSGGVCLGEDALPFPLPQFGHSQYLECLLGPAGAVCFLQWVCESSWGCWLVLAGSRLSPSSHRLPIMSFLIIVMLVGVKWYFIIPTQAVLSLQCSSTCGKGLQSRVVQCMHKVTGRHGSECPALSKPAPYRQCYQEVCNDRINANTITSPRLGECLHWPRFPGGCCVSCPPLCSTTHCCLSSPLPTIQLVMECPKLSPPPFSMYFLPRSYYLDSRVFTPCTFCYLPRRPASLPSVCEPSALFPTGPQQVLLPTHPHLPALPQGEYQATRDRPNTPKPAEINQTGQSLACLPCLAQSFPWNHSRGSCPCFIPAASASRPVLCFLARPPMAHSLVLGTTAWAIWVFYGSI

SEQ ID NO: 1097 - DNA, 931 bp, Homo sapiens
  source
  (1)..(931)
  CDS (201)..(731)
agagatatggtatgtctcttctacagttcccaagatgttggtcaacttcctttcagagaaaaaaaccatctcctttgctggatgttttctccaattttatttcttcttctctttggtacatctgaatgcttgattttgactgtgatggcctttgatcagtaccttgttatctgccatcccttgcactatcctaataaatcatgactgggcatctctgtgccaaactggtcatactgtgctgggtttgtggatttctgtgtttcctgatccccactgttctcatctctcagatgcccttctgtggtccaaacattaatgaccatgttgtgtgtgacccagggccactatttgcattggcttgtgtctctgccccaagaatccaactgttttgctacactctaagctcattagttatttttggtaacttcctctttattattggatcctatactcttgtcctgaaagctgtgttgggtatgccttcgagcactgggaaacataaagccttctctacctgtgggtctcatttggctgtggtatcactgttctatggctctcttatggtcatgtgtgtgagtccaggacttggacactctatggggatgcagaaaatcaaaactttgttctatgctatggtgaccccactcttcaatccccttatctatagcctccagaataaggagataaaggcagccctgaggaaagttctggggagttccaacataatctaagccatattagattattcctccatgatcagatcagtacagtctaacaaagagaaatcagaattatatagttatttaaatctaaaaaatatggatctagtgatattgactatatcagcctatgaaattaaacacctgttgggccccttacaaattaaagttgccaaattatatagataaatggaagcgtgtggcttcccttt

SEQ ID NO: 1098 - protein, 176 aa, Homo sapiens [sequence omitted]

SEQ ID NO: 1099 - DNA, 991 bp, Homo sapiens
  source
  (1)..(991)
  CDS (201)..(791)
tgtcaacctaaatgacagagaggaaaatgcttcaaaagaaaatgacgtttattagggaataggcattgcaatgggaatacaggtgccatagtgaactatgcgcatatttaggcagggaggtaaaggaagacaaaggtttttaaaggaaaaatcagggggattgtgtaattgttttgagatagttatccttggctacaaggatgaataacaagggtggtgccagttcgaggttggacaggcagttgctgggaagatgtcctcgtaaaagtattttttgtgtgtgtaaggttgcaatggtctttgtgcaaagttatggtttttgcaagagaagaggtcttgctttgtctcccaggctggagtgcagtggtgtgatcatggcttactgcagacttgacctcctggcctcaatcaacaacagggacaataggcatgtgccatgcctggcttttatttatttatttatttatttaatttatttatttattttcatagagatagagtcttgctgtgttgcccaggctggtcttgtactcttggcctcaagcaatccttctgcctcagcctcccagaattctgggattacaggcatgaaccaccatgcccagacttgtcagggttatttttgtttgtttgttttgtttttaaagagagtctcactctgttgcccaggctggagtgcagtggcacaatctctgctcactacaacctccgcctcatgggttcaagcgattctcctgcctcagcctcccaaggagctgggactacaggtgcacaccaccatgccccgctaatttttgcatttttagtagagatggggtttcaccatgttggccaggctggtctcgaactcctaaccaagtgatctgcctgccttgacctcccaaagtgctgggattgttagggtttttaacacaagtgactccatttttattctgacaactttcacaagagaaatgtaacataaatgttaaagcatgtgacataaatatat

SEQ ID NO: 1100 - protein, 196 aa, Homo sapiens [sequence omitted]

SEQ ID NO: 1101 - DNA, 961 bp, Homo sapiens
  source
  (1)..(961)
  CDS (201)..(761)
gaaataggagaaatctactcttctgttcttctttgcaacactgcaaaacagcagaggtgagtggcaatgtagctccatcacccccaaaaaccaggactaaagagataatgaaatattttagtattgaatttaaaatgtcatcattcagaaatactattttttttcagatgggccatacacacacaacctgagctaaatctatgaaaaagatgaacaatgtaatagaattcatactgctgggcctcactcacaatccagaactgcagaaattcttgtttgttatgtttttaatcacctacttgatcacattggcaggtaacctgttcatctcagtcatcatcttcatcagcccagccctgggttcccccatgtactcttttccgtcctatttgttcattatagacattttctgctcttcttccatagcccctaaaatgaactttgacttgatctctgaaaagaacaccatatccttcaatggctgcatgactcagctcttcacagaacatttcttttattattattattattatactttaagttttagggtacatgtgcacaacgtgcaggtttgttacatacttatacatgtgccatgttggtgtgctgcacccattaactcatcatttaacattaggtatatctccaaatgctatccctcctccctccccccaccccccaccccacaacaggtcccagtgtgtgatgttccccttcctgtgtccatgtgttctcattgttcaatttccacctatgagtgagaacatgcagtgtttggttttttgtccttgtgatagtttgctgagaatgatggtttcccgtttcatccatgtccctacaaaggacatgaactcatcattttttattgctgcatagtatttcacggtctatatgtgccacattttcttaattcagtctatcgttgttggacatttgggttggttccaagtctttgctattg

SEQ ID NO: 1102 - protein, 186 aa, Homo sapiens
MKKMNNVIEFILLGLTHNPELQKFLFVMFLITYLITLAGNLFISVIIFISPALGSPMYSFPSYLFIIDIFCSSSIAPKMNFDLISEKNTISFNGCMTQLFTEHFFYYYYYYTLSFRVHVHNVQVCYILIHVPCWCAAPINSSFNIRYISKCYPSSLPPPPTPQQVPVCDVPLPVSMCSHCSISTYE

SEQ ID NO: 1103 - DNA, 883 bp, Homo sapiens
  source
  (1)..(883)
  CDS (201)..(683)
ctgcatgggaaagtgctataggacacacatggccgaagtggggatagaattcagtgccctcacaggcagcttctctggcttttttaaaaccatgagcttaggctttgtcaatagagtacactggctttcataagcttaggattcaccttccaggaaagaaaacaaacaacataggcagccgtgatcaagtccagcctcccatgtttgaagggagctcaaaaactctgcaaagggaggcagccggaggttcggcgccattatggttggtgagcacagcccaaaccaaagtcaaatgcagcaggctcctgaatatcaaacgtgttagtcactcagggttagtgaatgggaagctgtcaacttcacacaacatgctggaaagtcctttacctgaactaccaggtgctttttgttttatttcagagctcagaatttgggccctgaaggaagtgaacttacagggcactggacttctgtacctgaaaaggcaaatgattgttcaaaaagaacttaaaaggcatccttcaagcctactatctctagttcttttttctttttttttttttttttttgagacaagagtctcgctctgtcccccaggctggagtgccgtggtgcaatctcggctcaccgcaacctccgcctcccaggttcaagtgattctcctgcctcagcctccagagtagctgggattacaggcgcactccaccacgcccagctaatttttgtatttttagtagagatggggtttcgccatgttgcccaggctggtctcgaactcctgacctcaggtgattcacccgcctcagcctcccaaagtgctgggattacaggcatgagccaccgcgcctggctctctaagtttaagtattaaagagtgaaagct

SEQ ID NO: 1104 - protein, 160 aa, Homo sapiens
MFEGSSKTLQREAAGGSAPLWLVSTAQTKVKCSRLLNIKRVSHSGLVNGKLSTSHNMLESPLPELPGAFCFISELRIWALKEVNLQGTGLLYLKRQMIVQKELKRHPSSLLSLVLFSFFFFFFETRVSLCPPGWSAVVQSRLTATSASQVQVILLPQPPE

SEQ ID NO: 1105 - DNA, 1360 bp, Homo sapiens
  source
  (1)..(1360)
  CDS (201)..(1160)
cccagctccctctttatccctaggaccctgaggctcagaggggcagcttcaggggaggacaccccactggccaggacgccccaggctctgctgctctgccactcagctgccctcggaggagcgtacacacccaccaggactgcattgccccagctgtgcagcccctgccagatgtgggaggcagctagctgcccagaggcatgcccccctgccagccacagcgacccctgctgctgttgctgctgctgctggcctgccaggtgaggactcacagcaccctcagcacccaggggccctcctgtgaggactgcacactgatggctctctgtctgcctgcctgcctgcctgcctgcctgcctgtctgtctgtctgcccgtctgcctgcccatctgcctgtctgtctgcctgtccgtctgtctgtccatctgtccatctgcctatccatctgcctgcctgtctgcctgtccgtctgcctgtctgtctgcctgtccatctgtccatctgcctatccatctgcctgcctgtctgtcggcctgcctgcctgcctgtctgtctgctgcctgtctgtccgtctgcctgtctgcctgtccgtctgcctgcctgtccgtctgcctgtccgtctgcctgcctgcctgtctgtctgcctgcctgtctgcctgcctgtccgtctgcctgtccgtctgcctgcctgtctgcctgcctgtctgcctgtctgcccgtctgcctgtctgtctgcctgtccgtctgcctgtctgtccgtctgtccatctgcctatccatctgcctgcctatctgtctgtccgtctgcctgcctgtctgtctgcctgtctgcctgtctgtctgcctgtctgtccatctgcctatccatctacctgcctgcctgtctgcctgtctgtctgcctgtctgtctgcctgcctgtctgtctgtctgtctggttgcttgtgcatgtgtcccccagccacaggtcccctccgctcaggtgatggacttcctgtttgagaagtggaagctctacggtgaccagtgtcaccacaacctgagcctgctgccccctcccacgggtgagccccccacccagagcctttcagcctgtgcctggcctcagcacttcctgagttctcttcatgggaaggttcctgggtgcttatgcagcctttgaggaccccgccaaggggccctgtcattcctcaggcccccaccaccgtgggcaggtgaggtaacgaggtaactgagccacagagctggggacttgcctcaggccgcagagccaggaaataacagaacggtggcattgccccagaaccggctgctgctgctgcccccaggcccagatgggtaataccacctacagccccgtgg

SEQ ID NO: 1106 - protein, 319 aa, Homo sapiens
MPPCQPQRPLLLLLLLLACQVRTHSTLSTQGPSCEDCTLMALCLPACLPACLPVCLSARLPAHLPVCLPVRLSVHLSICLSICLPVCLSVCLSVCLSICPSAYPSACLSVGLPACLSVCCLSVRLPVCLSVCLPVRLPVRLPACLSVCLPVCLPVRLPVRLPACLPACLPVCPSACLSACPSACLSVCPSAYPSACLSVCPSACLSVCLSACLSACLSICLSIYLPACLPVCLPVCLPACLSVCLVACACVPQPQVPSAQVMDFLFEKWKLYGDQCHHNLSLLPPPTGEPPTQSLSACAWPQHFLSSLHGKVPGCLCSL

SEQ ID NO: 1107 - DNA, 1087 bp, Homo sapiens
  source
  (1)..(1087)
  CDS (201)..(887)
ctgatatgtgttcctgggtttccaatttcttccttcttgtgtgtgacctgagccctttttactcacacagtcatggaagtaggcagatgagagcacttaggaacgaactcccttaacacagacacaggtgtcctgcgtactcacgtggtcagggatgagacagatgagaacactccgaatgcactcccccgatatgcagcatggaccttcagtcactctgcacaccgccagctcccccgacacgcaacatggaccttcagtcactctgcacaccgccagctcccccgacatgcagcctgcaccttcagtcactgtgcacaccgccagctcccccgacatgcagcctgcaccttcagtcactctccacaccgccagctcccccgacatgcagcctgcaccttcagtcactctccacaccgccagctcccccgacatgcagcctgcaccttcagtcactctccacaccgccggctcccccgacatgcagcgtgcaccttcagtcactctgcacaccgccggctcccccgacatgcagcttgcaccttcagtcactgtgcacaccgccagctcccccgacatgcagcccgcaccttcagtcactctgcacaccgccagctcccccgacatgcagcccgcaccttcagtcactctgcacaccgccagctcccccgacatgcagcccgcaccttcagtcactctgcacaccgccagctcccccgacatgcagcccgcaccttcagtcactctgcacaccgccagctcccccgacatgcagcccgcaccttcagtcactctccacaccgccagctcccccgacatgcagcttgcaccttcagtcactctccacaccgccagcagccctgacaatctccacgttggacctttgatgtttttcttatagcttcttcgtacactgatctaaacttcttcttttgtaatgcttttacttctattcacttttccctcttaaattttttaactgtatgaattatatccaataattatgtgtaatataactacagctggccctctgtatccacgggttccatagatggggattcaaccaagcattgagagaaaatattca

SEQ ID NO: 1108 - protein, 228 aa, Homo sapiens
MDLQSLCTPPAPPTRNMDLQSLCTPPAPPTCSLHLQSLCTPPAPPTCSLHLQSLSTPPAPPTCSLHLQSLSTPPAPPTCSLHLQSLSTPPAPPTCSVHLQSLCTPPAPPTCSLHLQSLCTPPAPPTCSPHLQSLCTPPAPPTCSPHLQSLCTPPAPPTCSPHLQSLCTPPAPPTCSPHLQSLCTPPAPPTCSPHLQSLSTPPAPPTCSLHLQSLSTPPAALTISTLDL

SEQ ID NO: 1109 - DNA, 2614 bp, Homo sapiens
  source
  (1)..(2614)
  CDS (201)..(2414)
  modified_base (205)..(304): a, t, c, g, unknown or other
  modified_base (2494)..(2593): a, t, c, g, unknown or other
cacaggctttatctggctttatccccacaccgtctgactccacttcatcgtactcaggacggtgaggtgactgcaaggaaggagaatgcttgttaatatcagccaaagaacaagagtcccctgaacctgacagtggcaggaaagtcatcaggacaggtcaggctcagcaaggaccttaagaacaattccctctgtaatttatggnnnnnnnnnnnnnnnnnnnnnnnnnnnnnnnnnnnnnnnnnnnnnnnnnnnnnnnnnnnnnnnnnnnnnnnnnnnnnnnnnnnnnnnnnnnnnnnnnnnnttggtcccgggaaccccctcattcccgggaaacccctcagtcaggaaacccctcagtcccgggaacccctcagtcccgagaaccccctcagtcaggaaacccctcagtcccgggaatccctcagtcccaagagacccctcagtcccggaaacccctcagtcccgggaaccctctcagtcccgggaaccccctcggtcccgggaaccccctcagtcaggaaacccctcagtccagggaacaccctcagtcaggaaacccctcagtcccaagagacccctcagtcccggaaacccctcagccccgggaaccccccagtccctggagcccctcagtcccgggaaacccctcagtcccgggaaccccttcgatcccgggaacccctcagtcaggaaacccctcagtcccgggaacccctcagtcctggaaacccctcagtcccgggaacccctcagtcaggaaacccctcagtcccgggaaacccctcagtcccaggaaacccctcagtcccgggaacccctcagtcccgggaacccctcagtcaggaaacccctcagtcccgggaaacccctcagtcccaggaaacccctcagtcccgggaacccctcagtcccgggaaccccctcagtcaggaaacccctcagtcccgggaacccctgagtcccaagagacccctcagtcccggaaacccctcagtcccaggaaccccttcagtcccaggaaccccctcggtcccgggaaccccctcagtcaggaaacccctcagtccagggaaccccctcagtcaggaaacccctcagtcccaagagaccccctcagtcccggaaacccctcagccccgggaaccccccagtccctggagcccctcagtcccgggaaacccctcagtcccgggaaccccttcgatcccgggaacccctcagtcaggaaacctctcagccccgggaaccccctcagtcccgggaaacccctcagtcccaggaacccctcagtcccaggaaacccctcagtcccgggaacccctcagtcccgggaacccttcagtcccaggaacccctcggtctcaggaaccccctcggtcccgggaacccctcagtcccggaaacccctcagtcccgggaaccccttcggtcccgggaatcccctcgttcccgggaacccctcagtcaggaaacccctcagccccgggaaccccctcagtcccgggaaacccctcagtcccgggaacccctcagtcaggaaacccctcagtcccgggaaacccctcagtcccaggaaacccctcagtcccgggaaccctcagtcccgggaacccctcagtcccgggaaacccctcagtcccgggaaacccctcagccccgggaaccccctcagtcccgggaaacccctctgtcctgggaacccctcagtcaggaaacccctcagtcccggggaaacccctcagtcccgggaacccctcagtcccgggaaacccctcagtcccgggaaccctcagtcccgggaacccctcagtcccgggaaacccctcagtcccgggaaacccctcagccccgggaaccccctcagtcccgggaaacccctctgtcctgggaacccctcagtcaggaaacccctcagtcccgggaaacccctcagtcccgggaacccctcagtcccgggaaacccctcagtcccgggaaccccctcagtcccgggaaacccctcagtcccgggaacccctcagtcacgaaacccctcagtcccgggaaacccctcagtcccaggaaacccctcagtcccgggaacccctcagtcccaggaaccccctcagtcccgggaaccccctcagtcccgggaaacccctgcagtcccggggaacccctcagtcaggaaacccctcagtcccgggaaacccctcagtcccaggaaacccctcagtcccggaaccccctcagtcccggtaacccctcagtcccgggaaacccctcagtcccgggaaccccctcagtcccgggaaacccctcagtcccggaaacccctcagtcaggaaacccctcaatcccgggaaacccctcagtctcaggaaacccctcagtcccatgaaccccctcagtcccgggtacccctcatttaagatacccctcattcctgggatacccctccatcccatgatacccctctgctcccgcaacccttcagtccctggaacccttnnnnnnnnnnnnnnnnnnnnnnnnnnnnnnnnnnnnnnnnnnnnnnnnnnnnnnnnnnnnnnnnnnnnnnnnnnnnnnnnnnnnnnnnnnnnnnnnnnnnatgtgtgaggccctgccacag

SEQ ID NO: 1110 - protein, 737 aa, Homo sapiens
  MOD_RES (2)..(35): Variable amino acid
MXXXXXXXXXXXXXXXXXXXXXXXXXXXXXXXXXXWSREPPHSRETPQSGNPSVPGTPQSREPPQSGNPSVPGIPQSQETPQSRKPLSPGNPLSPGNPLGPGNPLSQETPQSREHPQSGNPSVPRDPSVPETPQPREPPSPWSPSVPGNPSVPGTPSIPGTPQSGNPSVPGTPQSWKPLSPGNPSVRKPLSPGKPLSPRKPLSPGNPSVPGTPQSGNPSVPGNPSVPGNPSVPGTPQSREPPQSGNPSVPGTPESQETPQSRKPLSPRNPFSPRNPLGPGNPLSQETPQSREPPQSGNPSVPRDPLSPGNPSAPGTPQSLEPLSPGKPLSPGNPFDPGNPSVRKPLSPGNPLSPGKPLSPRNPSVPGNPSVPGTPQSREPFSPRNPSVSGTPSVPGTPQSRKPLSPGNPFGPGNPLVPGNPSVRKPLSPGNPLSPGKPLSPGNPSVRKPLSPGKPLSPRKPLSPGNPQSREPLSPGKPLSPGKPLSPGNPLSPGKPLCPGNPSVRKPLSPGETPQSREPLSPGKPLSPGNPQSREPLSPGKPLSPGKPLSPGNPLSPGKPLCPGNPSVRKPLSPGKPLSPGNPSVPGNPSVPGTPSVPGNPSVPGTPQSRNPSVPGNPSVPGNPSVPGTPQSQEPPQSREPPQSRETPAVPGNPSVRKPLSPGKPLSPRKPLSPGTPSVPVTPQSRETPQSREPPQSRETPQSRKPLSQETPQSRETPQSQETPQSHEPPQSRVPLI

SEQ ID NO: 1111 - DNA, 997 bp, Homo sapiens
  source
  (1)..(997)
  CDS (201)..(797)
cactacacctggcctattttttaaaaatttttgagacatatatttctattgtcatttctttctcttttttttttcatgaagaagttttactctgtcacccaggctcaattgcagtggcattatcatggctcactgcaaccctgacctcctaggcccaagcgatcctcctgtctcatcctcctgagtagctgggactatacatgccacaatggccagttaatttttttctttttttttttttttttgcagagatgaggtctcagtttgttgcccaggctggtttcaaactcctgagctcaagtgatcctcccaccttgacctttcaaagtcctagcattataggcgtgagccaccgtgtccacccaatttttttaaaaattttaattttaggctgcaggttgcacgtgctggtttgttgcattggtatattgtatgatgctgaggtttgggcttgtaatcatcccattgtccaggtagtgaacagaatagaatatccaataggttattttcagctgccccttatggagttcccagtgtctgttgttcccatctttgcgtccgtgcgtattcaatgtttagctcccacttataacgaaaacgtggtatttggatttcttttttttttttttgagatggagttttgctcttgttgcccagcctggagtgcaatgacgcgatctcggctcaccgcaacctctgcctcccgggttcaagcaattctcctgcttcagcctcccaagtggttgggattacaggcatgcgccaccacgcccggccaattttgtaattttagttgagacagggtttctccatgttggccaggctggtctcgaactcccaacctcaggtgatccatccacctcagcctcccaaagtactgggattacaggcgtgagccactgggcccggcggtgtttggatttctgtttttgccttaatttgctcagggtcatggcctccagctgcatccacgttgctccaaagcacatggtttagt

SEQ ID NO: 1112 - protein, 198 aa, Homo sapiens [sequence omitted]

SEQ ID NO: 1113 - DNA, 952 bp, Homo sapiens
  source
  (1)..(952)
  CDS (201)..(752)
agactgaacaatagggcaaagcgagttgatttggagacagaggccaggctctcgagcagacgtgtggcctgatggcagtagagagagacctgggatgcagaggccaagtgatgggaaacagaaaggctgagtcatgaaagatggagaagcagaatgaggagggatggagatgtcagtaatcgggtaaggggagcagagttatggaggaaaggggagaaggaggccttctcatggggactacagagacagaaccagccaggcagcttagtagggattggtggaggatgcagagtcagatgatggtgacaaggaggaatagagatggggtcacggggacagaatgttggagggtggaaagccaaagtgacagaggtcagggaggcagaggggaacaagtgaccccgggccccctgccctgtgcagatgtggatgaatgcacccagagcccaggcctgtgtggccgaggggcctgcaagaacctgcctggctctttccgctgtgtttgcccggctggcttccggggctcggcgtgtgaagaggatgtggatgagtgtgcccaggagccgccgccctgtgggcccggccgctgtgacaacacggcaggctcctttcactgtgcctgccctgctggcttccgctcccgagggcccggggccccctgccaaggtgagggtgctgagcccagccctactccatcactgtttgctgtggagactggagagagattattgaggggcagagaggcagagtgatggggctcagggatggagaacaggggctgagggatggggacctcactccagagtcttctctcctttcaacaaaataaggcagtcctccccacccctcctccctttttgaaagatactcttgtgcttatgggaaccctgaggagggggtcacctgaggcagggcaggcaacatggagttggtgccttagcccccaccttag

SEQ ID NO: 1114 - protein, 183 aa, Homo sapiens [sequence omitted]

SEQ ID NO: 1115 - DNA, 1099 bp, Homo sapiens
  source
  (1)..(1099)
  CDS (201)..(899)
ctggagtctctgagctcagcgtctgctccatattctagcacagtggagaagcccaggctcttccagaacccacagttctcacattccttacttgtcccactagcataaaacgtttgggacagtggcaaggaggtgtggtcccctttgaagggcgccacctctgacttcatcctgctgatctttgcctcccctgtcccctcatgctcaccaccaccaagaagttccccaagagccacttacatttctcacaaatatctggcaggccttcctggccaccccaggagcatggcctccagctccaccaaaggaacctgcgaagcttcctccgaagttgccacgctccatctcgatggcacggtcaaagctggcaccgccaccgccacccatggccaggcccatgcgctcaatgccagcgcccagggccgggcccatggcggggcccatgcgctcgaggctgttggcacccatgcgctccaggcccatgcgctcgaggctgttggcgcccatgcgctccaggcccatccgctccagattgttggcgcccatgcgctccaggccggtggccatgcgatccatcacggggcccatgcgctccaggccagctcccatacctgcgggcaccatgcgctccatgctcaggcccatgcgctcgatggcagggcccatgcgctccacgccagagcccatgcgctcaatggtctggcccacacggtcgatgggagcggccatgcgctcaaggccgaagcccatgccggcacccatgcgctccacgccagagccaatgcgctccatggtctggcccatgcgctcaatgctggaggccatgtggtcgaggcccagcgggcccatgcgctcaatgccggagcccatgcgctccacggagcccatgcggtccatgaccaggcccatgcgctcgatctcggagcccacgcgatccatgccgtggcccaggcccgcgcccatgcgctccatgccggcacccccgaggcggtcaatgccaggacccatcctctcgatcccagggacgcttcctccacctccacctgaaacagggacacaaaacacaggtgggtgtcaagaacttgagtgtgcgtgtgca

SEQ ID NO: 1116 - protein, 232 aa, Homo sapiens
MLTTTKKFPKSHLHFSQISGRPSWPPQEHGLQLHQRNLRSFLRSCHAPSRWHGQSWHRHRHPWPGPCAQCQRPGPGPWRGPCARGCWHPCAPGPCARGCWRPCAPGPSAPDCWRPCAPGRWPCDPSRGPCAPGQLPYLRAPCAPCSGPCARWQGPCAPRQSPCAQWSGPHGRWERPCAQGRSPCRHPCAPRQSQCAPWSGPCAQCWRPCGRGPAGPCAQCRSPCAPRSPCGP

SEQ ID NO: 1117 - DNA, 922 bp, Homo sapiens
  source
  (1)..(922)
  CDS (201)..(722)
gtcttatatgtaaatgaggcggggtgtgggcccgggcagacagtaagggctcaataacagaaggtcccatctgggctgtgaccaagtggaggtgtttgtgagcccatccaggcccctttcctctctgccctctgccaggtgctgtttccctccaagcccagtttcacccaaggtcaaggtggggcctgaggaagggagaaatggaggtggattgtaataagagtcatggctgctgtgggcatgggcctgccttgcccactgttccaacctgtggcctgtgcctggtccaagccctaccatccctggctggatgctggcctggcttcctgctccaacaggccacagggtcttctgaaaattccaaatcagaccacagtcctccccctcctcacacaccttccatggctccctattgctctacagtccaccctctctctgtcccccaatgcctctctgaccttctctgtctctggccactcctggctcactccaccccagatgtgtggggtttgcctgctcctggaagccacctgtttagcacagtcccacctcagggcctttgcacctgccattgtgtccacctggctcccacctccctgagacacctcagagacagggtcttgctctgtcacccaggctggagtgcagtggtgcgatctcggctcactgcaatctccgcctcccgggttcaagcaattctcatacctcagcctcctgagtagccgggattacaggtgtggtaccctcctggatcctctgtccaaagcagctctctccctgccaccctccactgcctccccctgttgaatttcttccttgaaggccgtcttcccagatacggttatgtggctgctgttgcctcccccatcagactgggtgatggggggaggccttgctctgcccaccccctgctcctgcatcc

SEQ ID NO: 1118 - protein, 173 aa, Homo sapiens [sequence omitted]

SEQ ID NO: 1119 - DNA, 1102 bp, Homo sapiens
  source
  (1)..(1102)
  CDS (201)..(902)
tgcacaggtccagtacacacaccatgcccgggtctttcttcaccacctccgccccctcctgcatgggtccttatttcctggatttcacatcttcctctttcttggtccccccttgcttgtgttgagcctatcctccaggagttcttgagaaagactgcccggaaggtaacattgctgaattcttgcatcctaccccatagatggctgatgcttggctgagctgcagatcgttgtccttcagaatcatgaagagatgctgttggccagctgccacactgcggttgagcaggctaaagccattctgtttcggaagtctttggttgttttttgttttgtttttatttttttgtagacacagggtcgcgctatgttgctcagacaagtttccaactcctgggctcaagcaatcctgctccggccacgctgtggatcctttatatgtaaccgattttgttcttcctggaaagtttttaagattttgggccccagagttctgcagtttcacactgatattcccctatgtgggactaatttttttttttttttttttttttgagaccatctcactctgtaatccaggctggagtgcagtggtacgatctcggctcactgcaacctctgcctcccgggctcaagcaattctccctcagcctcccgagtacctgggactacaggcgagctccaacacacccagcttcatttcctccactgtgcctgcactcaacaggcactttcccgctggaagctcattctttacttttcagaagttggattatttctttgatttccttccctctattttctcacttctctttcttttcaaatttatgttgtgcagcaatcacttcctttctggaactcctattactcagaatgtagggcctctagggctgtttttctaacttcctttttctctctctctttttttttttttttttttttttttgagacagagtctcactctattgcccaggctggagtgcagtggcataatcttggcttactgcaacctctgcctcccgagttcaagggattctcctgcctctgcctcccgagtagctgggattacaggcatgtgccatgacgcctggctaatttttgt

SEQ ID NO: 1120 - protein, 233 aa, Homo sapiens [sequence omitted]

SEQ ID NO: 1121 - DNA, 1078 bp, Homo sapiens
  source
  (1)..(1078)
  CDS (201)..(878)
ctgtgtcacttcatcaacaagaaaaataaagtcatcattttcattatcaacctctctgtggctgaccttgcacacatgttgtccttacccctctggatttactattacatcagccaccactggcctttccaggggccccttgacctagtgtgcttctacctgaagtatctcaacatatataccagcatttgcttcctgacatgcatcagccttcagaggtgcttctttctcctcaagtgtcatatactggaagcataggtatgacgggggtcatcatggagactgcttgtttaccatttcccattctgagaagcactggcttagccaacaacaccaaatactgctttgctgccttagggcttcagcacattagcatggcttcctcccttggcatggtaactgtagctgaacttggagggtttgtattacccattataattattacttatttcacatggaaaacaagaaaatctttatgggaattccaagttccccctaggaataccaaagagaggaaaaaggctttgaggatggtcctgatgtgtgaagtggtgttcattgtgtgtttcactccttaccacctcaacttcccattctttatgatggtgaaggaacatgtctttttgaactgctcttttataaagatcattctctgtttccacattatttccctgtgtcttgcaaatctgaattgttgtcttgatccagttgtatattattttatgacctcaaaatttcatgatcaattttcagatcatggcagcttggttcttcagtcatgtatgagatgtaataacagtaccttagaaattcatcagaggaaggaggatcttcaaactatctctcttgaatgtttgaaagattccaagacaatataatcaaataattaactagaaaaatcgatatgctctattagtgtatctatgtcactttgaagatttttcttttttttttttctttttttttattatactttaagttttagggtacatgtgcacattgtgcaggttagttacatatgtatacatgtgccatgctggtgcgctgcacccactaactcgtcatctagcattaggta

SEQ ID NO: 1122 - protein, 225 aa, Homo sapiens [sequence omitted]

SEQ ID NO: 1123 - DNA, 1492 bp, Homo sapiens
  source
  (1)..(1492)
  CDS (201)..(647)
  CDS (796)..(1078)
  CDS (1186)..(1292)
agcaaattaatcttatgctgtatatgaatgttttatctcccaaattaaaacataaagatccaaatgacattacttgttttgtagacatctcttcctaatagcacccaatatagagattgaggatatagcaaatactcaataattgcctctcaaattaaaatgaattgaattccttcttctttctcggcagatagaacaaaatggatattctggttattgataatggcagtgaagtgacagagttcatcctggtgggtttgtacaaccatccaaaatttcagattgccttttatcgcaccatggtagtggtctacctgatcacatttgttggtagcagtctcattattgttgtggttaaagttgatgggtggcttcacactcctatgtgttttttcctaagcaacctgtccttccttgatatctgctactccagcaattcagtaccttttttgttgttcaatggcttaagagactaccccaccatttcctataacagctgttatgcccagatgaccagtgctttttttctggggatgacagggtgtcttctccttgctgtcatggcttatgagagatttgttgtgatctccaatcccctgcgctacatcatcattatgaacaataaggtctgcatacagttggccatggtgacctgggccagtgccttccttatgtcattaatacaataattgcaataatacattgcaataatacattaattgcaatgattgcattgcaattcctgcccatttttgtggacacaatgtcatcaaccattttacctgtgaggtgcaggaattgttgaagcttgtctgctcagacatcccaggcagcctcatcctcggtctagtcatcggcatattcaccttgtccctgcccttcaccttgcccctgcccttcaccttcatcctcttcgcctatgctcacattgtggttgctgtgctgaggatcaactctgcagaggccagactcaaagctttctccacctgtggatcccatctgactgtgatcatcatattttatgggacagccacctacatgtacttgaaacctcagtcaagggaatcccaagatgagggtaaagtcatctctgtattttttttgaaagtattttttattatactttaagttctggggtacatgtgcagaacgtgtagttttgttacataggtatacacatgccagagaagcaacatcaaaatgatagcatctctgtattttatggtgttgtgacccctatgttgaaccccctcatttacaccttgagagacaaggatgcgaaaatgctctaagaaaaataattaggaagaaagagtcctaaaagaatgtgaatatcgcatggaggctcatctaaccaacagtttgatattgacttgtaaaaataacaaggtagaaatactaaacaacattttataagataattaaagtgttttctctatttccaacaggcatgtaaaatctttccactgagaaaaaaaatgttaaactttta

SEQ ID NO: 1124 - protein, 278 aa, Homo sapiens
MDILVIDNGSEVTEFILVGLYNHPKFQIAFYRTMVVVYLITFVGSSLIIVVVKVDGWLHTPMCFFLSNLSFLDICYSSNSVPFLLFNGLRDYPTISYNSCYAQMTSAFFLGMTGCLLLAVMAYERFVVISNPLRYIIIMNNKVCIQLAMELLKLVCSDIPGSLILGLVIGIFTLSLPFTLPLPFTFILFAYAHIVVAVLRINSAEARLKAFSTCGSHLTVIIIFYGTATYMYLKPQSRESQDEEKQHQNDSISVFYGVVTPMLNPLIYTLRDKDAKML

SEQ ID NO: 1125 - DNA, 1375 bp, Homo sapiens
  source
  (1)..(1375)
  CDS (201)..(650)
  CDS (723)..(1175)
  modified_base (1309)..(1309): a, t, c, g, unknown or other
  modified_base (1326)..(1375): a, t, c, g, unknown or other
ctcccctttaacccaatcttccacacttagctgtataacttgtaataactcatgaaaacccagacacatacataggaataggaattggaattctgaaaagtttaagtgtaactggaaaaccaaacccatgctcacttcattaactgatctctgtttctctcctattcatgtagctgaaattaagtcccttccaaaattcaatgaatgagacaaatcattcttgggtgacagaatttgtgttgctgggactgtctagttcaagggagctccaacctttcttgtttcttatattttcactactttatctagcaattctgttgggcaactttctcatcatcctcactgtgacctcagattcccgccttcacacccccatgtactttctgcttgcaaacctgtcatttatagacgtatgtgttgcctcttctgctacccctaaaatgattgcagactttctggttgagcacaagactatttcttttgatgcccacctggcccagattttctttgttcatctcttcactggcagtgaaatggtgctcctagtttccatggcctatgaccgttatgttgctatatgcaaacctccccactacatgacaatcatgagctgctgtgtatgtgttgtgctcgtcctcatttcctggtttgtgggcttcatccataccaccagccagttggcattcacgttaatctgccattttgtggtcctaataaggtagatagtttttttctgtgaccttcctctagcgacgaagttagcctgcatagacacttatgttgtcagcctactaatagttgcagatagtggctttctttctctgagttcctttctcctcttggttgtctcctacactgtaatacttgttacagttaggaatcgctcctctgtaagcatggtgaaggcccactccacattgactgctcacatcactgtggtcactttattctttggatcgtgtattttcatctatgtgtggcccttcagcagttactcagttgacaaagtccttgctgtattctacaccatcttcacgtctattttaaaccctgtaatctacatgctaagaaacaaagaagtgaaggcagctatgtcaaaactgaagagtcggtatcagaagcttggtcaggtttctgtagtcataagaaacgttcttttcctagaaacaaagtaaactcatgagactgttaccactttagccctgtctccatacacttacaagtggattcactgtgatcttaaagcaatcaacttggcctgtgggaaaagtcagttgattgattcgaagcaaactgtgatgataataanaactcatgaaataaacnnnnnnnnnnnnnnnnnnnnnnnnnnnnnnnnnnnnnnnnnnnnnnnnnn

SEQ ID NO: 1126 - protein, 300 aa, Homo sapiens
MNETNHSWVTEFVLLGLSSSRELQPFLFLIFSLLYLAILLGNFLIILTVTSDSRLHTPMYFLLANLSFIDVCVASSATPKMIADFLVEHKTISFDAHLAQIFFVHLFTGSEMVLLVSMAYDRYVAICKPPHYMTIMSCCVCVVLVLISWFIVFFCDLPLATKLACIDTYVVSLLIVADSGFLSLSSFLLLVVSYTVILVTVRNRSSVSMVKAHSTLTAHITVVTLFFGSCIFIYVWPFSSYSVDKVLAVFYTIFTSILNPVIYMLRNKEVKAAMSKLKSRYQKLGQVSVVIRNVLFLETK

SEQ ID NO: 1127 - DNA, 946 bp, Homo sapiens
  source
  (1)..(946)
  CDS (201)..(746)
agcatgtcttgcaaatgaaaaacaaatcaagagcccacacgccccaaccacctcttttattgggctctccctctccagggccaggtaccagacaactaggaacagcccctatgtcccagagcctgctgaagtgactcacactcacaaccctgagcctggtgactgcctatccattcattcctcaataaagtctcttgctcatgtctcacttcctccctcttcctcttgaaaggaagcgttccccatgtggccctgcagagcacggttcccgggttcccagggttccccatgtggccctgcagagcacggttcccgggttcccgggttccccatgtggtcctgcaaagcacggttcccgggttcccagggttccccatgtggccctgcagagcacggttcccgggttcccaggttccccgtgtggccctgcagagcacggttccccgggttccccgtgtggccctgcagagcacggttccccgggttccccgtgtggccctgcagagcacggttccccaggttccccatgtggccctgcagagcacggttcccgtgttcccgggttcctaggttccccgtgtggccccgcagagcacagttcccgggttcccagtgttccccatgtggccctgcagagcacggttcccgggttccccgtgcggaccgcagagcacggttcccgggttcccagggttccccgtgcggccccgcagagcatgccatgtctcccgtttctcgggacctagaatgtaatgaatgtcttcccggatgacagtactttctgtgtctgggggtcttaccatacctgattaaaacaaatccctgatgaatagagtgagtctctgtatcccattctgcgggcatgcacacaacaaatacacacatattcacagagtcccttatgtgtgctcagacatgtgaactttgcatcacaaaaccactgagt

SEQ ID NO: 1128 - protein, 181 aa, Homo sapiens
MSHFLPLPLERKRSPCGPAEHGSRVPRVPHVALQSTVPGFPGSPCGPAKHGSRVPRVPHVALQSTVPGFPGSPCGPAEHGSPGSPCGPAEHGSPGSPCGPAEHGSPGSPCGPAEHGSRVPGFLGSPCGPAEHSSRVPSVPHVALQSTVPGFPVRTAEHGSRVPRVPRAAPQSMPCLPFLGT

SEQ ID NO: 1129 - DNA, 871 bp, Homo sapiens
  source
  (1)..(871)
  CDS (201)..(671)
  modified_base (278)..(377): a, t, c, g, unknown or other
gtgggccatattacagcatggacattctctcatgtggaaattaatgtttcagtagtaacacaggtaaatagcaccctctgatgggaactattgacttagataagattggactactaaaagaaaagatgtcctaaggatattcaaagaagactctagtaggataagcttggattctgctcaaactcataagatctggaattatgctattttacaccgggaatttccaaaggatcggggaaaaagtgaaaggtttgactcccttactcacctcaacaagnnnnnnnnnnnnnnnnnnnnnnnnnnnnnnnnnnnnnnnnnnnnnnnnnnnnnnnnnnnnnnnnnnnnnnnnnnnnnnnnnnnnnnnnnnnnnnnnnnnngctagagatgcatgcctgcggttcggctctagaggatcccccatgtcctcagccgagggttggttcaaagccatcggtacctgtggctcccacataataactgttggcctattctatgaatttgggctgatcactcatgttaagttatcatctgattggtatatgggtcaggggaagtttctctcagtgttttacacgaatgtggtacccatgctgaaccccctcatttatagcctcaggaacaaggatgtcaaacttgctctaaaggaaaccctaaataaaattacaaactgagtagagccaatggtgctgccttagcccctctccaattgctgagtcttcctctcctcttcctgctcctcctcatccgcttcctcctaatcttttctgccttctctccatctttctttctaaagtcgtgttggcaaggtttctgcctttcttctctcactatgcaatgtaactgtgtgggtctatccttggacagaagagtt

SEQ ID NO: 1130 - protein, 156 aa, Homo sapiens
  MOD_RES (26)..(59): Variable amino acid
MLFYTGNFQRIGEKVKGLTPLLTSTXXXXXXXXXXXXXXXXXXXXXXXXXXXXXXXXXXARDACLRFGSRGSPMSSAEGWFKAIGTCGSHIITVGLFYEFGLITHVKLSSDWYMGQGKFLSVFYTNVVPMLNPLIYSLRNKDVKLALKETLNKITN

SEQ ID NO: 1131 - DNA, 13654 bp, Homo sapiens
  source
  (1)..(13654)
  CDS (201)..(704)
  CDS (3070)..(3286)
  CDS (3593)..(3728)
  CDS (4400)..(4554)
  CDS (5738)..(5878)
  CDS (5999)..(6199)
  CDS (8151)..(8296)
  CDS (8380)..(9003)
  CDS (11900)..(12211)
  CDS (13257)..(13454)
tcggcgcttgtaagagcgagacggaggcccgggcaggccggctgagctaactccccagagccaaagtggaaggcgcgccccgagcgccttctccccaggaccccggtgtccctccccgcgccccgagcccgcgctctccttcccccgccctcagagcgctccccgcccctctgtctccccgcagcccgctagacgagccgatggcgcggccccggagagcccgggagccgctgctcgtggcgctgctgccgctggcgtggctggcgcaggcgggcctggcgcgcgcggcgggctctgtgcgcctggcgggcggcctgacgctgggcggcctgttcccggtgcacgcgcggggcgcggcgggccgggcgtgcgggccgctgaagaaggagcagggcgtgcaccggctggaggccatgctgtacgcgctggaccgcgtcaacgccgaccccgagctgctgcccggcgtgcgcctgggcgcgcggctgctggacacctgctcgcgggacacctacgcgctggagcaggcgctgagcttcgtgcaggcgctgatccgcggccgcggcgacggcgacgaggtgggcgtgcgctgcccgggaggcgtccctccgctgcgccccgcgccccccgagcgcgtcgtggccgtcgtgggcgcctcggccagctccgtctccatcatggtcgccaacgtgctgcgcctgtttgcggtgagggccgcggggccgggctcggtgtccagcgtccctctcccgtcctcgccctggggtggcccaagtctccttcctttacttcttctggaagagtctccgttttaatcactcgaattcacacagcgtcaaagaagccctgtcagttgagcccgacgcaggcctgaatcggatccacccaaacactccagccgcccatgtctaccccgccccgcgaggcgccccttcccgggcgggtgccacctacgcctctggccggttggctggggagggcggcctgactacagcccccatttgccagcctgctcgggtgcccttgttctgggcacacccctgcaaccatacaaggtgctcctgccccctgggcctgcggagcgctcgagtgatattgcaactttgagttttgtttggaacccgggcccttcttccagagcagcaactggggcgtgtccctgggctgctatgggggatggataggcctgaaaggtctggtctttctcttttttgatcatttaaatttattttcaaaatgccttgaactctccctcaaggggcatctgagagcagggcggggcgttcccttctgagctctggtctcctgcaccctgccctgcgcaggtgcccgggctggccctgctctgtcctcaaatgtagggaactgtcccgtgaggggcagcgtgttccttgcagtcctaggggccagcagaatcgggattaggagggctttggcatacaagtttgggggttttcgatttggtcattcactgggggttgtgggacagtttttctggggttctgtggcgggaggggcctgtgtgcatccggctctctgtgaaggaggaaggcctggcttccatctacctaggagaggaacttctgtttcctgagagcttctccgactcccgggcgcagcgtctgtgtttgttccaggcgtgcggggccgctccctatcgtctgcgcacatgaaagcccccatccctgtttcctcggattggcagtgttgatgtgacatctccacgctggcaccagacaggctgtgcggccgcccaggggtttttcacccacctgtatgtgtccccggccctgcctagagctctagtttctgtctctgtcctctaggtcgaatgcagagattccagaccccaaggcttcaagggcccagttggggactcaggtgggcaggactctgtgagcccagggcccactgctgccagctcagcccagattgaggttgtgctgcccagctagaaatgcaaacattaataaaaactgtgcaaaacacagccacaggcaagatgctgcaattcctggtctaaaagaactacattcatttcccagccacatgaccgtgctggcaggcattttaaattaacttccctcaggaggtccagggggcatgggagggttgttcccaaactcaagtgtccaggagagctgggaggaccacagcattattcactgagctgtggccactgggctttctcgtctctcggtctcctcagttgtttctctctctctctctccctctctccttcttgtttctctccagcctcaccttccctctttctttctctctccctgccactcctggcttccttttcatgctgtctctatactttctatcctgcttcaaacaaccctggaccagcccccctccctccttccagaaactccccctctctggccttcacaccagctcctgctatagcccctcttgcgctggagccccatagccccctcttggcggccttctcagccccgtgtctctgcctccacactccccggtcagttcagcctctggtctctgctgttaatcactctaatgcatgcagagaaacccagtttccaacaatccccatcctaggccagacacagctttaaatggaacatcccctgctgctcccctgtctgccctaatccctcctagggctgcctgtccctgcggaccaccccttggtgtgaatcaagaaaacgtgctttgccctgggcctgactaggacaggcagatgcagctggatgggctgcaggccctctgctggggggtccttgttcaggacacagcttgtaccagtatatgtggcggtcctgccctctccccagccctgcatacctcccacctgcacagcattcacggaattctcaggcccactcacaaaacacagaccttgcccacagcttccagcctttccaggtggctgctccagctggccccaggtccccaccccaacccttccatctcccatctgtgtcccaggtccatgccacacaccttctgtgccccgtccgtgtcctgggccccccttaccctccctctcttgagttactgacctccatccacagcccagctgtccttcctgccccacagataccccagatcagctatgcctccacagccccggagctcagcgactccacacgctatgacttcttctcccgggtggtgccacccgactcctaccaggcgcaggccatggtggacatcgtgagggcactgggatggaactatgtgtccacgctggcctccgagggcaactatggcgaaagtggggttgaggccttcgttcagatctcccgagaggctggtgagctgggggctccgaggcaccaaggagtctacatagtgtgggcccggggccctcagttggggcagaagcagaaagatggggggcccaggtccatgctgggcgaggttgcctggctggtgctccatgtgggcgggacctctttgttttggacgactcagccctgcctcaggcttggcggagggtgcaggccagacttcacccctgcagacccttcagccagcctacacagtcctctgcagcggtggccaggtgggtgtgtgggtgggtgccacggaagctgactctggcacccccaacgcccagggggggtctgtattgcccagtctatcaagattcccagggaaccaaagccaggagagttcagcaaggtgatcaggagactcatggagacgcccaacgcccggggcatcatcatctttgccaatgaggatgacatcaggtgggacagtggcacaatcaccgggcccctgggtctccctgagggtcccacccctcctcttgcacatcgccaccttacacactctccctgcctccctttcccctgctccccgcaccccccaccttccctgctgctgcctctgagtctggtgcccaggctcagaagcagcctggtctggggagatgccacaagcccagactgaatagcgcacagaacatgtgtctgtgtttacagctcctgggggtgcggggagggacctgtgggcagaacctagtgagaaaatgagctgtgagggaaggagcccagggtccatacagaggctgcggacccagccgagacccaccggcccgagttcatctccagcctaggaggctggtgtgacgctggtggaggcatgtggggaggggctggcttcgaactggattttcccccaaggagtccctctgaaccccctgaacagtgggttacagtgggcagagcaagtgggcaggcctagggtcagaggaaagcccagggaaggtgccctaaatgcccccggccccgtttttcctgagaaacaaggatctggtgagtgattatagagcaggggagatggatagagtgggaagggatgggggccgagctggaggaggctcccaggccctccctcaccccagccctgctcctaccaggcgggtcctggaggcagctcgccaggccaacctgaccggccacttcctgtgggtcggctcagacagctggggagccaagacctcacccatcttgagcctggaggacgtggccgttggggccatcaccatcctgcccaaaagggcctccatcgacggtgagtccaggggcactccatcccccaccccacacgtctccccagcaccccctcttggggatgctcattttctgcatctgtgtaattggtgccataatccagatcccttctcagatccccagatcctatgagtccgatcatctgtggacgcgtccctccaagcagcgcttgactgggatggcgtgcgaggaaagcacgctccactcactggacggggaggaattgttgggtttttggttttgtttcttaatttagtgcctgtatttctagtgctgccaaagacattctaatctgagggtgagggcgggagggagagaaaccaaggatacggaatataccatcctggtgatcagagtgatgaggcccctgcacccccagtcctacctgtggatctggatgaatccagcaggaacagatggctcactttacaataggattgctcattttcccaaggctggaccgaggacaccttgatgacatccttcagggctattttatgaaacacagaccctggaaaggctgagccctggctgctagggcctcttagccttagggggatatataccatcacgccttttatttcagctacgttgcatctgggtgcaggtggcagcctggactgagagtagttttagcgataaaggcatctcatcacaagacaggaggtctgagagttggtgactttaggcatggggcagtgagtgaatgcactctcaaagccctgggctctgtccattcctttgttccaccattccctgtggttgtcttgggtcttcctgcttatggtctcatagtcacaagatggctgctgaggctccacccattacatcttcacagcagcatcctaacaggaaagaaggagcagggataaaagtctttcaaatggtgaggctctgagtttgcatcagcatgtaagtgctaccctggaacctccagttggctctgagtccaccaatcagaacttggtcacctggccacgcctagctcacctggccactcctagctcacctgccacgcctaactcacctggccactcctagctcacctgccatgcctagttcacctggccactcctagctcacctggccactcctagctgaaagtgagcaagtggcagagagacacaggagaaacacagctggctcaggtcagcgccaccctcccccttcttccctgtctgtaggatttgaccagtacttcatgactcgatccctggagaacaaccgcaggaacatctggttcgccgagttctgggaagagaattttaactgcaaactgaccagctcaggtacccagtcagatgattccacccgcaaatgcacaggtgagagctgcccagggtggtgagggtggggagggtggggagggtggtgagggggaaggcgggaggccgggttcggtgcatgggggccgggcacactttctctgggcatccctaggacaggcgaggaacgcatcggccgggactccacctacgagcaggagggcaaggtgcagtttgtgattgatgcggtgtatgccattgcccacgccctccacagcatgcaccaggcgctctgccctgggcacacaggcctgtgcccggcgatggaacccaccgatgggcggatgcttctgcagtacattcgagctgtccgcttcaacggtgagtgggtgcctgcccccctgcagcagtgaaggacagctggggggctggattttgctgtgaggcctgggacaacctcagggtggaagggctgggtgaggctgagtggtctaatgggggtgcctggggctgagtgccaaagacatgagacaagttccggtccccaatttttaacactgctccctccccaggcttcagtgttccctgcgctggtttgcacagttcagatgctggggagcttctctgatcccttctgccaggaacccccagtgggtcacaccacactcccctccactgcgcagagcttgagggcatctggaccctgggggtgcacgtggggcacagttaagactgcgtggggcgcctacccagggacatgccgcccactctgagtcatgcgccaggcacaggcgtgggtctgacctgtcccttggcaccaggcttggtgtgtggtcagggctcaaaactgtgtcttctgaggagaccccagtggactcaagctctgtccacggtttgtggagagatgactttctgttcaatcactatcctttacacaattcaaaactccgctcttccactgaacactcactcaccaccttctctccgccatgctctctgctaatcaattccatttaatatgactccagagcatctctgcaagctggtggaacaagcttgtaagaaaaatagagctcattgttcaagtcattccaatttcatactgtcactcagacctctctccgtgtctgaactcatcctctcgcctggacagtgaaacttttttcatttttaattgtgataaaatacatataatataaaatgtatcaccttaaccaattttttaagtgtagagttcagtgatattaaatacattcagtctgggcgcaatggctcactcctgtaatctgagcactttgggaggccgagacaggtggatcacttgaggtcaggagttcgagaccagcctggccaacatggtgaaaccccatctctactaaaaatataaaaattagccaggtgtggtggcaggcgcctgtaatcccagctactcgggagtctgagacaggagaattgcttgaacccgggaggcagaggttgcagtgagctgggattgtgccactgcactccagcctgggcgacagagtgagactctgtctctaaataaataaataaataataaattcacaatgttatgcaaccatcaccaccatctatccccagaactcttcatctatgaaaccataactctgtatgcattaaacacttccccatcccctcctcccgccagcacctgcaaccgccattccacggcccctctctatgaattgtctaccctcggtacctcctgtggtggcatcagacggtatttgcacatgtgtgactggcttgtttcaccgagcatcatgtcctccaggtccatccattttatagcatgggtcagaactgccttccttttgaaggctgaatcgcatcccattgtgtgaatggccccgtcgtgttcgtccattcttctgtcagtggacgctcgggttgctttcatcttgtggctatgtgaataacgctgctgtgaacgtggctgtacaagcatttcttgccaccctgctttctagtctctcgagtatctacccgggagtggaactgctgggtcatgtgtttaatcttttgaggaggctccacactgttttctgcagcggctgcagccttttcccacccaccgtgcacaagggttccgacttctccacacgctcacaacactcgttattttctggttcttggctagaagccatcccaatgggtgaagggggatctccctgcggcttggatttgcacgtcccttatgagcagtgatgcttgttaagctcctcctttctcctgctggtccctggggcctccccaggaggcagctctgctgggctggaggaccaccgaggatgacggactctctctccaggcagcgcaggaacccctgtgatgttcaacgagaacggggatgcgcccgggcggtacgacatcttccagtaccaggcgaccaatggcagtgccagcagtggcgggtaccaggcagtgggccagtgggcagagaccctcagactggatgtgagtgtgcagaccgagccccgggtgggcatgggcccaggatcccggagcagacgccccagcctgtgttttgtgcgtcccaggtggaggccctgcagtggtctggcgacccccacgaggtgccctcgtctctgtgcagcctgccctgcgggccgggggagcggaagaagatggtgaagggcgtcccctgctgttggcactgcgaggcctgtgacgggtaccgcttccaggtggacgagttcacatgcgaggcctgtcctggggacatgaggcccacgcccaaccacacgggctgccgccccacacctgtggtgcgcctgagctggtcctccccctgggcagccccgccgctcctcctggccgtgctgggcatcgtggccactaccacggtggtggccaccttcgtgcggtacaacaacacgcccatcgtccgggcctcgggccgagagctcagctacgtcctcctcaccggcatcttcctcatctacgccatcaccttcctcatggtggctgagcctggggccgcggtctgtgccgcccgcaggctcttcctgggcctgggcacgaccctcagctactctgccctgctcaccaagaccaaccgtatctaccgcatctttgagcagggcaagcgctcggtcacaccccctcccttcatcagccccacctcacagctggtcatcaccttcagcctcacctccctgcaggtgggtccgtaggctcccaagggccagggcagggagggggactgtccgcaacgttacaaagccaaaagggccaggcacagtggcacacgcctgtagtcccagcacctttggaggctgaggtgggtggatcacctgagtccaggagttcgagaccagcctgggcaacatggcatgaccctgtctctgcaaaaaatatgaaaattagccaggcatggtggtgcgtgcctgtagtcctagctacttgggaggctgaaataggaggatcgcttgagcccaagagttgaaggttgctgtgagccaagatcgcaccactacaatccagcttgggtgtcagagtaagaccctgtctcaaaacaaaaagataaatgccgtttttagagtcactcttttctattttggttcctgtgttgttttatttttttttttttagacagagtctcgctgtgtcgcccaggctggagtgcagtggcactatctcagctccctgcaagctctgccttccgggttcacgccattctcctgcctcagcctcccgagtggctgggactacaggcgcccgccaccacgcccggctaattttttgtatttttagtagaaacagggcttcaccgtgttagccaggacggtcttgatctcctgacctcgtgatccgcccacctcggcctcccaaagtgctgggataacaggcgggagccctgcgcccagtgagtttttttttttttttaaggccacaggaaatggagcccctcccctcctgtgacagcagctcagttagggccgccatctcccctgctgggtccttgaaggaaaacggggcagtcaggtggggagtgtgggcctccagagatctttctgtgcaacagtgaagttattttctaaaccaaaatgctcttctacaatttggctcacatatggaaacaggtcaaagagctatctgaccggttttcctgtttccacaagggagtctctgctgccctgctccctggggcagtgtggatgagaggcacagggtccaacattttactgtggaagagcatcgaattccatccagtgccagcgtttcgtgctggccgttaaataatggagctcctttgggggattttcctaagacagtaaagttattacagccttggagacaactcttggagtctggggcgccctggatgttttctgtgtgaagagtacgagagacagatggcttggggagggtgacctggtgtgacactgcagggccagctgggttctcagggccaggtggagggtggcctcagtgcgaacacctgctcacccatttggagcactcccggtgctgtccactcccggcgagccccttctctattcgttccgcacacgccacgtgcctcgggtcatgcagttctccgtgactaggaggtgctcccgtcttcctccacgtaacagggcctgagtgtcccctggtcaggcccagggtctccgtgtgccgcacatcctgagaaggtgccctctacgtcccggcctgaggtgctcctgctcccccaccctcaggtggagatgcttagaccccgttggggacccccagctctcctccccagcctcagccactgcccgccccacactgtaccctcttttccagatacaagggatctttaaaaacacacaagcctgcaactggcctaggtgttttgccatgactaccacgtcatgacgggctgcaaaatggcatctcactgtggcttcaattcgcctgcacttagcaccagtgcgccggccatggggctttcctctcctgggctcagcctgttcctgtcctttgctcatttgctgttattttgcaagagtccgttccgagttcgctcgctccccactccacgggctgcggcatctgtgggccgttttggtggttaccgctgtgcagccctgggcttgcatttttgtttctcatgagcaactttttttttttccacctggagccttgttctagtaggaacttccaaacttattttggaagttggtctcgatctcctgacctcgtgatccacttatttggaaggtcctttgttcaggggtctgctgcctttgggagaagcacaaaaagctgctgcttctgggtgggcagatgactgcaaagcatcccttccagcaggatcacatggccctgctccaggtgctcggcatggcactggcatgcaggctggattccagctccacccctgcccccaatcaggcgctctcgtacagtgaacaaccagcacgaacgtgtggggcagccttccagggtcccgcctttatgcaggtggctttgttcctgttccccagctttccttggcttgaggttgtgcttcctgtcatgtgagggagtggtaactccatctcctccctgtgagggcctgcacagactccaatactcctcggcatcagctcccattcctgctcctccccactgagtgctcctttgtttctcttgcctgtggcgtgccctgattttgaagctcagtacacgtgaggaggctagagaggcgatgcgagtagggcctcagttccagagcttccggccacatccatctaccttgaaggggcgcagtaaatggcattggtaatggctagaatgcaggaagaggacaccaagctgccccttatgcacactgcactgatgttgccaacatatacgggcggcacagcccttctccgcagctgccaggtcacgggcctttggacggacccctcttgggctgcccctgcctgggctgccatcccctcttctccactgagtgctcctgagagccaccacgaagaggtggagcatcccctccataggccagagcctcaaggggatcctgacccgcaggggcctctgtcagggctggaatggatttgtccctggaaagtgctgtgtctgatgcagtgttggctcctgcaggtggtggggatgatagcatggctgggggcccggcccccacacagcgtgattgactatgaggaacagcggacagtggaccccgagcaggccagaggggtgctcaagtgcgacatgtcggatctgtctctcatcggctgcctgggctacagcctcctgctcatggtcacgtgcacagtgtacgccatcaaggcccgtggcgtgcccgagaccttcaacgaggccaagcccatcggcttcaccatgtacaccacctgcatcatctggctggcattcgtgcccatcttctttggcactgcccagtcagctgaaaaggtaatgaggtccccaggaggtctcgctgcctgtttcctgcctgtcaggctggtcgattcattcatgagattaaatgcttgttcgtgcttttgtttatcccgtatctggctgcttgttcattcactcattcccttcttactttgttcattcattcacttttccaagcttctaacccctcttcttaacttccactcttctttttttctttttatcattttcatttctttgagagatattgcctcactctgtcacccagttacagttagcttgttttttttaattcaagttcttcatatgcttttttttttttttttttttttttgagacagagtctcactctgttgcccaggctggagtgcagtggcgtgatcttggctcactgcaagctccgcctcctgggtcaagtgattctccagcctcagcctcccccgtagctgggactacaggtgcctgccaccacgcctgggcaatttttgtaattttagtagagatggggtttcaccatattagtcagactggtctcaaattcttgacctcaagtgacccatctgcctcggcctcccaaagtgctgggatgacaggcgtgagccactgcgcccaggcttcatgtgcttcataactgccaacccattaatgcgtcagcccattgctgcagcatttattcacgtatgcggcagaatattttatgcacctgtcatccatttatttgcccatctgctcctgaagtttgtctctgcccatttattcatttgtatgtatttgaaacgtgctcattcactgacatgcacccggctcccgcttccccaggtgtctctctgttaataacccctcctcacccctccctcctgcccacaccagagctgcatggaggctgccagcccctcaggcgcggggcccctgctcatactgttgtcctggtctaagtgctcattcccagttccccaactgaaacagactcagctccagagtatgtggtgaggactgtgtggagcggggcagggagagcagggctgagtcccatctggtcccctcttccatggcctagatctacatccagacaaccacgctaaccgtgtccttgagcctgagtgcctcggtgtccctcggcatgctctacgtacccaaaacctacgtcatcctcttccatccagagcagaatgtgcagaagcgaaagcggagcctcaaggccacctccacggtggcagccccacccaagggcgaggatgcagaggcccacaagtagcagggcaggtgggaacgggactgcttgctgcctctcctttcttcctcttgcctcgaggtggaagctgtatagagcccgggtccacggtgaacagtcagtggcagggagtttgccaagaccatgctccgcgtcggtggggctggccttgagaaggaactggacccagctctaccccgattccagcatgtgagcttcatgct

SEQ ID NO: 1132 - protein, 877 aa, Homo sapiens
MARPRRAREPLLVALLPLAWLAQAGLARAAGSVRLAGGLTLGGLFPVHARGAAGRACGPLKKEQGVHRLEAMLYALDRVNADPELLPGVRLGARLLDTCSRDTYALEQALSFVQALIRGRGDGDEVGVRCPGGVPPLRPAPPERVVAVVGASASSVSIMVANVLRLFAIPQISYASTAPELSDSTRYDFFSRVVPPDSYQAQAMVDIVRALGWNYVSTLASEGNYGESGVEAFVQISREAGGVCIAQSIKIPREPKPGEFSKVIRRLMETPNARGIIIFANEDDIRRVLEAARQANLTGHFLWVGSDSWGAKTSPILSLEDVAVGAITILPKRASIDGFDQYFMTRSLENNRRNIWFAEFWEENFNCKLTSSGTQSDDSTRKCTGEERIGRDSTYEQEGKVQFVIDAVYAIAHALHSMHQALCPGHTGLCPAMEPTDGRMLLQYIRAVRFNGSAGTPVMFNENGDAPGRYDIFQYQATNGSASSGGYQAVGQWAETLRLDVEALQWSGDPHEVPSSLCSLPCGPGERKKMVKGVPCCWHCEACDGYRFQVDEFTCEACPGDMRPTPNHTGCRPTPVVRLSWSSPWAAPPLLLAVLGIVATTTVVATFVRYNNTPIVRASGRELSYVLLTGIFLIYAITFLMVAEPGAAVCAARRLFLGLGTTLSYSALLTKTNRIYRIFEQGKRSVTPPPFISPTSQLVITFSLTSLQVVGMIAWLGARPPHSVIDYEEQRTVDPEQARGVLKCDMSDLSLIGCLGYSLLLMVTCTVYAIKARGVPETFNEAKPIGFTMYTTCIIWLAFVPIFFGTAQSAEKIYIQTTTLTVSLSLSASVSLGMLYVPKTYVILFHPEQNVQKRKRSLKATSTVAAPPKGEDAEAHK

SEQ ID NO: 1133 - DNA, 904 bp, Homo sapiens
  source
  (1)..(904)
  CDS (201)..(704)
  modified_base (47)..(146): a, t, c, g, unknown or other
  modified_base (187)..(187): a, t, c, g, unknown or other
  modified_base (190)..(190): a, t, c, g, unknown or other
  modified_base (799)..(799): a, t, c, g, unknown or other
  modified_base (809)..(809): a, t, c, g, unknown or other
  modified_base (867)..(904): a, t, c, g, unknown or other
aaaggccatcgcagcaagagtaaaaatttccacatggacacgagcannnnnnnnnnnnnnnnnnnnnnnnnnnnnnnnnnnnnnnnnnnnnnnnnnnnnnnnnnnnnnnnnnnnnnnnnnnnnnnnnnnnnnnnnnnnnnnnnnnnggactagtgtggtgacaaaacactgctgcgttcgggctgtnagnagaaacccccatgttggcagtcatggcatatgaccgctatatggccatctgtaatccattgctctacagtagcaaaatgtcccaaggtgtttgtgtccacctggtcattgtcccttatgtctatggctttcttctcagtgtgatggaaaccttaaggacctacaacctctccttctgtggaacaaatgaaatcaaccatttctactgtgctgatcctcctcttatcaaactggcatgctctgacacgtacagcaaggagctgtccatgtacatagtagccggctacagcaacgtccagtctcttctgatcattctcacatcctacatgttcatccttgtcgctatcctcagaagccattctgcagagggaaggaaaaaagctttttccacatgtggttcccacctgacagttgtcacaatcttctatggaaccctcttctgcatgcatttgagacgtcccacagacgaatccgtggagcaggggaaaatggtggctgtgtttacaccacagtgatactcatgctgaactccatgatctatggcctcaggaacaaggatgtgaaagaagcgttgaaaaaaagcataggaaaacaaacattgggaaaatanaaatgctatnctatcattaacaatttgtgaagtaatgagatataatatcattcggttcagatgtcaannnnnnnnnnnnnnnnnnnnnnnnnnnnnnnnnnnnnn

SEQ ID NO: 1134 - protein, 167 aa, Homo sapiens
MLAVMAYDRYMAICNPLLYSSKMSQGVCVHLVIVPYVYGFLLSVMETLRTYNLSFCGTNEINHFYCADPPLIKLACSDTYSKELSMYIVAGYSNVQSLLIILTSYMFILVAILRSHSAEGRKKAFSTCGSHLTVVTIFYGTLFCMHLRRPTDESVEQGKMVAVFTPQ

SEQ ID NO: 1135 - DNA, 868 bp, Homo sapiens
  source
  (1)..(868)
  CDS (201)..(668)
  modified_base (292)..(292): a, t, c, g, unknown or other
  modified_base (314)..(314): a, t, c, g, unknown or other
  modified_base (356)..(455): a, t, c, g, unknown or other
tcaccctgttagccaggatggtttcgatctcctgacctaatgatccacccgccttggcctcccaaagggctgggactacaggggtgagccaccgcgcccggccagaaatcacatttaatcaagtctttattttaccatctggttaatttttcttttaaaaacctttgacacataaacatttgtgatgggggtaaaaggggatgctggtgtctgttttttttaaaacacctgggggcaagagttcctccctattttgtgaggggacactagcggagggtggaccaaaggaggncccttcgccccctttgggaggngggtgttgcgcagagcaatgggacaaccaaaagcacaaaccnnnnnnnnnnnnnnnnnnnnnnnnnnnnnnnnnnnnnnnnnnnnnnnnnnnnnnnnnnnnnnnnnnnnnnnnnnnnnnnnnnnnnnnnnnnnnnnnnnnngcaacttgttgcaaagccgcatacttggctctaaagaaaccctcttatttttttttttttcctgagacggagtttcgctcttgttgcccaggttggaatgcagtggcacaatctcggctcactgcaacctccacctcccaggttcaagcgattctcttgcctcagcctcccaagtatctgggattacaggcatgcaccaccatgcccagctaattttgtatttttagtaaagatggggtttctctgggttggtcaggctggttttgaactcctgacctcacacgatccacctgcctcggcctcccaaagtaaaagttttattttttatatctttatgtatgggataacccaacacattttgttaaaaaggacattttgaaaatcatttctgaagctgataaaagacatttggg

SEQ ID NO: 1136 - protein, 155 aa, Homo sapiens
  MOD_RES (31)..(31): Variable amino acid
  MOD_RES (53)..(85): Variable amino acid
MLVSVFFKTPGGKSSSLFCEGTLAEGGPKEXPSPPLGGGCCAEQWDNQKHKPXXXXXXXXXXXXXXXXXXXXXXXXXXXXXXXXXATCCKAAYLALKKPSYFFFFPETEFRSCCPGWNAVAQSRLTATSTSQVQAILLPQPPKYLGLQACTTMPS

SEQ ID NO: 1137 - DNA, 1024 bp, Homo sapiens
  source
  (1)..(1024)
  CDS (201)..(824)
  modified_base (336)..(336): a, t, c, g, unknown or other
  modified_base (361)..(361): a, t, c, g, unknown or other
  modified_base (371)..(470): a, t, c, g, unknown or other
  modified_base (481)..(482): a, t, c, g, unknown or other
  modified_base (495)..(495): a, t, c, g, unknown or other
  modified_base (498)..(498): a, t, c, g, unknown or other
  modified_base (512)..(512): a, t, c, g, unknown or other
ttttatagcatagttatgtcagaattcttaggcatcattttcttgtaactgatcataataatttttttctaaattgttttcatcaaggttgctgtatatttttgacatttatatttggcatttatgtttttggcatattgcctctatcaaaataaggagattctactttttaaaaaaatatgtagagatgagatttcactatgttgcccggtctggagtgcagtggctattcacagatgcaatcagagtgcactacagctttgaactcctggcctcaagtgtcttcctgcctcagcctcccaaggagctgggattacaggctgcgaggggatcctntagagaaagagcggaggtttcagcnaaaatttgcnnnnnnnnnnnnnnnnnnnnnnnnnnnnnnnnnnnnnnnnnnnnnnnnnnnnnnnnnnnnnnnnnnnnnnnnnnnnnnnnnnnnnnnnnnnnnnnnnnnntggctctctcnntggtgccgctctnccntcatcctcatctcntatggcgtgattgcagccgcggtgctgaggatgaagtcagcagcagggcgaaagaaagccttccacacctgctcttctcacctcacagtggtctctctcttctacggaaccatcatctacgtgtacctgaagccggccaacagctactcccaagatcaggggaagttcctgactctcttctacaccatcgtcattcccagcatcaacccccctcatctacactttgaggaacaaggatgtgaaggggaccatgaagaaacttctggggtgggagaaaggggctggggagcctcaacgaggggaacactctagtaatgtagacagtttgctggagttactctcttagatgtgtctgtggccatgtggagaactaatattcaaggagtagagtgaacgcgggtgggaaaatgctttcgagtttgaccccgtcctctgccctctggatgtgaagtggtttccttctgtttgaagttgcctgcttcaggatatctctgctgtatcttgcactttcc

SEQ ID NO: 1138 - protein, 207 aa, Homo sapiens
  MOD_RES (46)..(46): Variable amino acid
  MOD_RES (54)..(54): Variable amino acid
  MOD_RES (58)..(90): Variable amino acid
  MOD_RES (94)..(94): Variable amino acid
  MOD_RES (99)..(100): Variable amino acid
MLPGLECSGYSQMQSECTTALNSWPQVSSCLSLPRSWDYRLRGDPXEKERRFQXKFAXXXXXXXXXXXXXXXXXXXXXXXXXXXXXXXXXWLSXWCRSXXILISYGVIAAAVLRMKSAAGRKKAFHTCSSHLTVVSLFYGTIIYVYLKPANSYSQDQGKFLTLFYTIVIPSINPPHLHFEEQGCEGDHEETSGVGERGWGASTRGTL

SEQ ID NO: 1139 - DNA, 898 bp, Homo sapiens
  source
  (1)..(898)
  CDS (201)..(698)
  modified_base (717)..(816): a, t, c, g, unknown or other
  modified_base (844)..(844): a, t, c, g, unknown or other
ctaaagatccccgactgcaccgtcctcctttgctgccctgtccctgtcctgtatggggtcacggtgcaaaagaacctgctcagcatcctggctgtccgctctgactcccccctccacacccccatgtacttcttcctctccaacctgtgctgggctgacatcggtttcacctcggccacggttcccaagatgattgtggaatgcaggcgcatagcagagtcatctctcatgcgggctgcctgacgcagatgtctttcttggtcctttttgcatgtatagaagacatgttcctgactgtgatggcctatgactgctttatagccatctgtcatcctctgcactacccagtcatcgtgaatcctcacctctgtgtcttcttcattttggtgtcctttttccttagcctgttggattcccagctgcatagctggattgtgttacaattcaccatcatcaagaatgtggaagtctctaattttgtctgtgacccctctcaacttctcaaacttgcctgttctgacagcgtcatcaatagcatattcatatatttcgataatactatgtttggttttcttcccatttcagggatcctttggtcttactataaaatcgtcccctacattctcaggatttcatcgtcagatgggaagtataaagccttcgccacctgtggctctcacctggcagttgcttgctgattttatggaacaggcattnnnnnnnnnnnnnnnnnnnnnnnnnnnnnnnnnnnnnnnnnnnnnnnnnnnnnnnnnnnnnnnnnnnnnnnnnnnnnnnnnnnnnnnnnnnnnnnnnnnnggtttagacttgcagaccctgcagttgncgactctaaagaatccccgacctgctttctttctgatcccgggctgcgttcccc

SEQ ID NO: 1140 - protein, 165 aa, Homo sapiens
MQAHSRVISHAGCLTQMSFLVLFACIEDMFLTVMAYDCFIAICHPLHYPVIVNPHLCVFFILVSFFLSLLDSQLHSWIVLQFTIIKNVEVSNFVCDPSQLLKLACSDSVINSIFIYFDNTMFGFLPISGILWSYYKIVPYILRISSSDGKYKAFATCGSHLAVAC

SEQ ID NO: 1141 - DNA, 1117 bp, Homo sapiens
  source
  (1)..(1117)
  CDS (201)..(917)
  modified_base (170)..(170): a, t, c, g, unknown or other
  modified_base (173)..(173): a, t, c, g, unknown or other
  modified_base (207)..(306): a, t, c, g, unknown or other
  modified_base (343)..(344): a, t, c, g, unknown or other
  modified_base (351)..(356): a, t, c, g, unknown or other
  modified_base (360)..(361): a, t, c, g, unknown or other
  modified_base (378)..(378): a, t, c, g, unknown or other
  modified_base (380)..(383): a, t, c, g, unknown or other
  modified_base (398)..(399): a, t, c, g, unknown or other
  modified_base (401)..(402): a, t, c, g, unknown or other
  modified_base (405)..(405): a, t, c, g, unknown or other
  modified_base (431)..(432): a, t, c, g, unknown or other
  modified_base (434)..(434): a, t, c, g, unknown or other
  modified_base (437)..(438): a, t, c, g, unknown or other
  modified_base (440)..(444): a, t, c, g, unknown or other
  modified_base (464)..(465): a, t, c, g, unknown or other
  modified_base (468)..(468): a, t, c, g, unknown or other
  modified_base (484)..(484): a, t, c, g, unknown or other
  modified_base (487)..(497): a, t, c, g, unknown or other
  modified_base (509)..(510): a, t, c, g, unknown or other
  modified_base (525)..(527): a, t, c, g, unknown or other
  modified_base (532)..(533): a, t, c, g, unknown or other
  modified_base (539)..(542): a, t, c, g, unknown or other
  modified_base (548)..(548): a, t, c, g, unknown or other
  modified_base (552)..(552): a, t, c, g, unknown or other
  modified_base (557)..(561): a, t, c, g, unknown or other
  modified_base (565)..(565): a, t, c, g, unknown or other
  modified_base (573)..(573): a, t, c, g, unknown or other
  modified_base (577)..(577): a, t, c, g, unknown or other
  modified_base (588)..(588): a, t, c, g, unknown or other
  modified_base (605)..(610): a, t, c, g, unknown or other
  modified_base (615)..(615): a, t, c, g, unknown or other
  modified_base (617)..(617): a, t, c, g, unknown or other
  modified_base (619)..(622): a, t, c, g, unknown or other
  modified_base (629)..(629): a, t, c, g, unknown or other
  modified_base (646)..(646): a, t, c, g, unknown or other
  modified_base (648)..(648): a, t, c, g, unknown or other
  modified_base (650)..(650): a, t, c, g, unknown or other
  modified_base (652)..(653): a, t, c, g, unknown or other
  modified_base (669)..(669): a, t, c, g, unknown or other
  modified_base (673)..(675): a, t, c, g, unknown or other
  modified_base (688)..(689): a, t, c, g, unknown or other
  modified_base (694)..(696): a, t, c, g, unknown or other
  modified_base (698)..(698): a, t, c, g, unknown or other
  modified_base (712)..(712): a, t, c, g, unknown or other
  modified_base (715)..(715): a, t, c, g, unknown or other
  modified_base (717)..(717): a, t, c, g, unknown or other
  modified_base (719)..(719): a, t, c, g, unknown or other
  modified_base (722)..(722): a, t, c, g, unknown or other
  modified_base (725)..(725): a, t, c, g, unknown or other
  modified_base (735)..(735): a, t, c, g, unknown or other
  modified_base (739)..(739): a, t, c, g, unknown or other
  modified_base (744)..(744): a, t, c, g, unknown or other
  modified_base (750)..(756): a, t, c, g, unknown or other
  modified_base (774)..(776): a, t, c, g, unknown or other
  modified_base (779)..(781): a, t, c, g, unknown or other
  modified_base (784)..(785): a, t, c, g, unknown or other
  modified_base (797)..(799): a, t, c, g, unknown or other
  modified_base (806)..(812): a, t, c, g, unknown or other
  modified_base (814)..(817): a, t, c, g, unknown or other
  modified_base (820)..(822): a, t, c, g, unknown or other
  modified_base (825)..(833): a, t, c, g, unknown or other
  modified_base (835)..(835): a, t, c, g, unknown or other
  modified_base (837)..(838): a, t, c, g, unknown or other
  modified_base (840)..(840): a, t, c, g, unknown or other
  modified_base (843)..(843): a, t, c, g, unknown or other
  modified_base (845)..(845): a, t, c, g, unknown or other
  modified_base (849)..(849): a, t, c, g, unknown or other
  modified_base (851)..(857): a, t, c, g, unknown or other
  modified_base (1034)..(1034): a, t, c, g, unknown or other
  modified_base (1037)..(1037): a, t, c, g, unknown or other
  modified_base (1052)..(1052): a, t, c, g, unknown or other
  modified_base (1061)..(1061): a, t, c, g, unknown or other
  modified_base (1075)..(1117): a, t, c, g, unknown or other
tgatgattttattcaattcaatccaacaaacattgattgagaccttactctgggcaaagaataatgataattaagtcacacatggcattagggaaactgctgatatttgtgttgatgattgatactaaagaattaacaaaattagaagagaaaacctaaaggaggggatnctntacgaaagaagcggcgggtcagcacaaatgtgcnnnnnnnnnnnnnnnnnnnnnnnnnnnnnnnnnnnnnnnnnnnnnnnnnnnnnnnnnnnnnnnnnnnnnnnnnnnnnnnnnnnnnnnnnnnnnnnnnnnntgggggggggggggggggggggggggggggggggggnnggggggnnnnnngggnnggggggggggggggggngnnnnggggggggggggggnngnnggngggggggggggggggggggggggggnngnggnngnnnnngggggggggggggggggggnnggngggggggggggggggnggnnnnnnnnnnngggggggggggnnggggggggggggggnnnggggnngggggnnnngggggngggnggggnnnnngggngggggggngggnggggggggggnggggggggggggggggnnnnnnggggngngnnnnggggggnggggggggggggggggngngngnngggggggggggggggngggnnnggggggggggggnnggggnnngngggggggggggggnggngngnggnggngggggggggngggnggggngggggnnnnnnngggggggaggggggcggnnnggnnnggnngggggggggggnnngggaggnnnnnnntnnnngcnnnggnnnnnnnnngngnnanggngngtgngnnnnnnngtacacacacacacacacacacataactttttatccaataattcattgatgaacacttaggttgatttcatgactttgctaatgtgaatagtgctgcaataaacatatgagtgcagatgtctttgttacataatttttttcctttcagtaggtaccaagtagtgggatgtggggatnctnctagccgacgagcgncgattcatngcacgaagttggcnnnnnnnnnnnnnnnnnnnnnnnnnnnnnnnnnnnnnnnnnnn

SEQ ID NO: 1142 - protein, 238 aa, Homo sapiens
  MOD_RES (3)..(36): Variable amino acid
  MOD_RES (48)..(48): Variable amino acid
  MOD_RES (51)..(52): Variable amino acid
  MOD_RES (54)..(54): Variable amino acid
  MOD_RES (60)..(61): Variable amino acid
  MOD_RES (67)..(69): Variable amino acid
  MOD_RES (78)..(78): Variable amino acid
  MOD_RES (80)..(82): Variable amino acid
  MOD_RES (89)..(90): Variable amino acid
  MOD_RES (95)..(99): Variable amino acid
  MOD_RES (104)..(104): Variable amino acid
  MOD_RES (109)..(109): Variable amino acid
  MOD_RES (111)..(111): Variable amino acid
  MOD_RES (114)..(114): Variable amino acid
  MOD_RES (118)..(118): Variable amino acid
  MOD_RES (120)..(122): Variable amino acid
  MOD_RES (125)..(126): Variable amino acid
  MOD_RES (130)..(130): Variable amino acid
  MOD_RES (136)..(137): Variable amino acid
  MOD_RES (139)..(141): Variable amino acid
  MOD_RES (149)..(151): Variable amino acid
  MOD_RES (157)..(159): Variable amino acid
  MOD_RES (163)..(163): Variable amino acid
  MOD_RES (165)..(166): Variable amino acid
  MOD_RES (171)..(173): Variable amino acid
  MOD_RES (179)..(180): Variable amino acid
  MOD_RES (182)..(182): Variable amino acid
  MOD_RES (184)..(186): Variable amino acid
  MOD_RES (192)..(192): Variable amino acid
  MOD_RES (194)..(195): Variable amino acid
  MOD_RES (200)..(200): Variable amino acid
  MOD_RES (203)..(215): Variable amino acid
  MOD_RES (217)..(219): Variable amino acid
MCXXXXXXXXXXXXXXXXXXXXXXXXXXXXXXXXXXGGGGGGGGGGGXGGXXGXGGGGGXXGGGGGXXXGGGGGGGGXGXXXGGGGGGXXGGGGXXXXXGGGGXGGGGXGXGGXGGGXGXXXGGXXGGGXGGGGGXXGXXXGGGGGGGXXXGGGGGXXXGGGXGXXGGGGXXXGGGGGXXGXGXXXGGGGRXGXXGGGGXGGXXXXXXXXXXXXXVXXXVHTHTHTHNFLSNNSLMNT

SEQ ID NO: 1143 - DNA, 1267 bp, Homo sapiens
  source
  (1)..(1267)
  CDS (201)..(1067)
  modified_base (39)..(40): a, t, c, g, unknown or other
  modified_base (56)..(56): a, t, c, g, unknown or other
  modified_base (92)..(191): a, t, c, g, unknown or other
  modified_base (947)..(1046): a, t, c, g, unknown or other
  modified_base (1112)..(1112): a, t, c, g, unknown or other
  modified_base (1212)..(1212): a, t, c, g, unknown or other
aagtagattaggggtttgaatgggttgggaaaaggaggnngggggattcttctagnagccgcacagggcagggcatttcaagaataggttcnnnnnnnnnnnnnnnnnnnnnnnnnnnnnnnnnnnnnnnnnnnnnnnnnnnnnnnnnnnnnnnnnnnnnnnnnnnnnnnnnnnnnnnnnnnnnnnnnnnntactgtaatatgattccccctgcgcatgagcgcagtaataacaacagtaatatgattctcccgccgcatgagagcagtaatcacagtaatattatcctcccgccgcatgagagcagtaataacaacagtaatatgattctcccgccgcatgggagcagtaataacaacagtaatatgattctcccgccgcatgagagcagtaataacaacagtaacatgatcccgcggccgcatgagagcagtaataacaacaacagtaatatggtactaccgctgcatgagagcagtaataacaacagtaatatgatactaccgctgcatgagagcagtaataacaacagtaatatgatactaccgccgcatgagagcagtaataacaacagtaatatgatactaccgccgcatgagagcagtaataacaacagtaatatgatactaccactacatgagagcagtaataacagtaatatgatactaccaccgcatgagagcagtaataacaacagtaatatgatactaccgccgcatgggagcagtaataacaacagtaatatgatactaccgctgcatgagagcagtaataacaacagtaatatgatactaccgctgcatgagagcagtaataacaacagtaatatgatactaccgccgcatgacagcagtaataacaacagtaatatgatactaccgccgcatgagagcaggaataacaggggttctttagagtcgccagcagggcttgtcaagactaagtgnnnnnnnnnnnnnnnnnnnnnnnnnnnnnnnnnnnnnnnnnnnnnnnnnnnnnnnnnnnnnnnnnnnnnnnnnnnnnnnnnnnnnnnnnnnnnnnnnnnntcggctgcatgggagcagtaatcacatcagtaatatgatactgcggctgcatgagagcagcaatcncagcagtaatatgctaccgccgcatgagagcaataatagcagtaatatgatactaccgccgcatgagagcagtaataacaagagtaatatgataccaccnccgcatgagagcagtaataacaacagtaatatgataccaccgccacatgagagca

SEQ ID NO: 1144 - protein, 288 aa, Homo sapiens
  MOD_RES (249)..(282): Variable amino acid
MIPPAHERSNNNSNMILPPHESSNHSNIILPPHESSNNNSNMILPPHGSSNNNSNMILPPHESSNNNSNMIPRPHESSNNNNSNMVLPLHESSNNNSNMILPLHESSNNNSNMILPPHESSNNNSNMILPPHESSNNNSNMILPLHESSNNSNMILPPHESSNNNSNMILPPHGSSNNNSNMILPLHESSNNNSNMILPLHESSNNNSNMILPPHDSSNNNSNMILPPHESRNNRGSLESPAGLVKTKXXXXXXXXXXXXXXXXXXXXXXXXXXXXXXXXXXSAAWEQ

SEQ ID NO: 1145 - DNA, 946 bp, Homo sapiens
  source
  (1)..(946)
  CDS (201)..(746)
  modified_base (123)..(123): a, t, c, g, unknown or other
  modified_base (338)..(338): a, t, c, g, unknown or other
  modified_base (346)..(346): a, t, c, g, unknown or other
  modified_base (453)..(453): a, t, c, g, unknown or other
  modified_base (456)..(555): a, t, c, g, unknown or other
  modified_base (584)..(584): a, t, c, g, unknown or other
  modified_base (591)..(591): a, t, c, g, unknown or other
ggcgggaacagcctaagaacagaaacttggaggtggtcagtgcagacccttctggccccaatgccctcttcacccaggggtggcctggcctggcctgactgccccgactgcccccaaccccangcagcggtggaggagagggatgtcacacagcacaaacgccggcggaggggccacaggagtggggagagcaaccagggatgaagcagagtggggtgcgcaggcctcgcgtctcctcccccagggcaggtggccaagctcagagatttcctgggtataggggggaaggggcggcgaaaacgccccttgctgccacctgctccttgttgccagagcangaacccangttggggcttggggagcaaatgaggctgggacagagcacggggcagtcagatggggtgaggcgaacaaaggcctctctctgcgagagaaatcccgactggctgcggngcnnnnnnnnnnnnnnnnnnnnnnnnnnnnnnnnnnnnnnnnnnnnnnnnnnnnnnnnnnnnnnnnnnnnnnnnnnnnnnnnnnnnnnnnnnnnnnnnnnnngtccttttacttgcagacccgcagttcgnactctanagaaccccttttctcttaagaattttcttttttttttttttttgagacaagtctcactctgtcgcccaggctggagtgcaatggcgcgatctcggctcactgcaacctctgcctcctgggttcaagcaattatcttgcctcagcctcctgagtagctgggattacaggcacccgccaccacgccaggctcattttttgtatttttagtagagacagggtttcaccatgttggccagactggtcttgaactcctgacctcaagtgatctgtctgcctcagcctctcaaagtactaggattgtaggtgtaagtcactgcagctggtcttaggacattttctttttttctttttttat

SEQ ID NO: 1146 - protein, 181 aa, Homo sapiens
  MOD_RES (46)..(46): Variable amino acid
  MOD_RES (49)..(49): Variable amino acid
  MOD_RES (85)..(119): Variable amino acid
  MOD_RES (131)..(131): Variable amino acid
MKQSGVRRPRVSSPRAGGQAQRFPGYRGEGAAKTPLAATCSLLPEXEPXLGLGEQMRLGQSTGQSDGVRRTKASLCERNPDWLRXXXXXXXXXXXXXXXXXXXXXXXXXXXXXXXXXXXPFTCRPAVRTLXNPFSLKNFLFFFFLRQVSLCRPGWSAMARSRLTATSASWVQAIILPQPPE

SEQ ID NO: 1147 - DNA, 925 bp, Homo sapiens
  source
  (1)..(925)
  CDS (201)..(725)
  modified_base (232)..(332): a, t, c, g, unknown or other
  modified_base (340)..(340): a, t, c, g, unknown or other
  modified_base (343)..(343): a, t, c, g, unknown or other
tgtgttatcacaacctgttttttaacttgcggcgccggctatgtggctgattttctacattgaagccaccgccgcagtgaccacagtcaggtgtggaatagtaccgcacctccttggtagtttttgtatgataccatgtgtcgttgtgtttcccgtgcaaaaattattagtgggacatggggcatgtctttatactctaaatgctcgcaaaacaattcgaggaaatgaacannnnnnnnnnnnnnnnnnnnnnnnnnnnnnnnnnnnnnnnnnnnnnnnnnnnnnnnnnnnnnnnnnnnnnnnnnnnnnnnnnnnnnnnnnnnnnnnnnnnnataactgnggnttgcaaagcctcgccttggagctctaaaagataccccccgtgtttctgtggctttctagttttgttgtctttttttttttctctcagtcttttagacgtccagctgcgcaacttgattgccttacaaatgacctgcttcaaggatgtggaaattcctaatttcttctgtgacccttctcaactcccccatcttgcatgttgtgacaccttcaccaataacataatcctgtatttccctgctgccatatttggttttcttcccatcttggggacccttttctcttactataaaatcgttttctccattctgagggtttcatcatctggtgggaagtataaggccttctccacctgtgtgtctcacctgtcagtggtttgctgattttatggaacaggcgttggagggtacctcagttcagatgtgtcatcttccccgagaaaggctgcagtggcctcagtgatgtacacggtggtcacccccatgctgaaccccttcatctacagcctgagaaacagggatattaaaagtgtcctgcggcggccgcacagcagcacggtctaatcttgatatcttcttatctg

SEQ ID NO: 1148 - protein, 174 aa, Homo sapiens
  MOD_RES (11)..(44): Variable amino acid
  MOD_RES (47)..(48): Variable amino acid
MLAKQFEEMNXXXXXXXXXXXXXXXXXXXXXXXXXXXXXXXXXXITXXCKASPWSSKRYPPCFCGFLVLLSFFFSLSLLDVQLRNLIALQMTCFKDVEIPNFFCDPSQLPHLACCDTFTNNIILYFPAAIFGFLPILGTLFSYYKIVFSILRVSSSGGKYKAFSTCVSHLSVVC

SEQ ID NO: 1149 - DNA, 862 bp, Homo sapiens
  source
  (1)..(862)
  CDS (201)..(662)
  modified_base (497)..(597): a, t, c, g, unknown or other
  modified_base (640)..(640): a, t, c, g, unknown or other
tattttgtgtgtgtattcacaaaatatacacacagcattaagggctggtttttatcttttatttttcaaatcctcttttcttccctaggtgtccaagtcacacagagccatggaatctcacaggtgtctgagaattcctcctcctgggactctcagaggatccagaactgcagcccgtcctcgctgggttgtcccggtccatgtatctggtcatggtgctgaggaacctgctcatcatcctggctgtcagctctgactcccacctccacacccccatgtacttcttcctctccaacctgtgctgggctgacatcggtttcacctcggccatggttcccaagatgattgtggacatgcagtctcatagcagagtcatcttttatgcgggctgcctgacaccgatgtctttcttggtcctttttgcatgtataagagacatgctcctgactgcgatggcctatgactgctttgtagccctctgtcgccctttgacttannnnnnnnnnnnnnnnnnnnnnnnnnnnnnnnnnnnnnnnnnnnnnnnnnnnnnnnnnnnnnnnnnnnnnnnnnnnnnnnnnnnnnnnnnnnnnnnnnnnntcgggagggcctcacgtaactgctctcatcccccactgggggngacaattcacagtgggcattgatggttggctcaccacttcctccacctgctggactcaagtgattctcctacctcagccccttgagtagctaggattacacgcacccaccaccacacccggctaatttttgtattttaatagagacagggtttcaccatgttggccaggctagtatcaaactcctgaccttgtgatccaaatgcctcggccccccaaagtgc

SEQ ID NO: 1150 - protein, 153 aa, Homo sapiens
  MOD_RES (99)..(133): Variable amino acid
  MOD_RES (147)..(147): Variable amino acid
MYLVMVLRNLLIILAVSSDSHLHTPMYFFLSNLCWADIGFTSAMVPKMIVDMQSHSRVIFYAGCLTPMSFLVLFACIRDMLLTAMAYDCFVALCRPLTXXXXXXXXXXXXXXXXXXXXXXXXXXXXXXXXXXXGRASRNCSHPPLGXTIHSGH

SEQ ID NO: 1151 - DNA, 1069 bp, Homo sapiens
  source
  (1)..(1069)
  CDS (201)..(869)
  modified_base (321)..(321): a, t, c, g, unknown or other
  modified_base (420)..(420): a, t, c, g, unknown or other
  modified_base (542)..(542): a, t, c, g, unknown or other
  modified_base (644)..(644): a, t, c, g, unknown or other
  modified_base (753)..(852): a, t, c, g, unknown or other
  modified_base (885)..(886): a, t, c, g, unknown or other
agactcccatctccaaagcccaatgtatttcttcctcaatgtcctctcgtttcttgatatttgttactcttctgtggtcacacctaagctcttggtcaacttcctggtctctgacaagtccatctcttttgagggctgtgtggtccagctcgccttctttgtagtgcatgtgacagctgagaagcttcctgctggcctccatggcctatgaccgcttcctagccatctgtcaacccctccattatggttctatcatgaccagggggacctgtctccagctggtagctgtgtcctatgcctttggtggagccaactccgctntccagactggaaatgtctttgccctgcctttctgtgggcccaaccagctaacacactactactgtgacataccaccccttctccacctggcttgtgccngcgcagccacagcaagagtggtcctctatgtcttttctgctctggtcacccttctgcctgctgcagtcattctcacctcctactgcttggtcttggtggccattgggaggatgcgctcagtngccggagggagaaggacctcttcccttgtgcctcccactttctggccattgccttttctttggccccggggtgtttcctttgttccgcccctggttctcttnccgtcccctgggccaggagggggtgtttgttccccttgtgtttccctggctgatcccttctttcttgccccgcggccggggggggaagaagcactcaaaaacaaaaaannnnnnnnnnnnnnnnnnnnnnnnnnnnnnnnnnnnnnnnnnnnnnnnnnnnnnnnnnnnnnnnnnnnnnnnnnnnnnnnnnnnnnnnnnnnnnnnnnnnaagcgtgcaggtattagaaatgacctcgctggnntgcgactctagaagaatccccataaggtctttaaagaggtaatcaagttaaaattaggtcattatggtgggcactaatccaatattactagtgtccttataaaaaggggaagtttgaacacaaagacagacataaacatgcatacagggacaagatcatgttaagatgaaggcagagatccag

SEQ ID NO: 1152 - protein, 222 aa, Homo sapiens
  MOD_RES (41)..(41): Variable amino acid
  MOD_RES (74)..(74): Variable amino acid
  MOD_RES (148)..(148): Variable amino acid
  MOD_RES (185)..(218): Variable amino acid
MAYDRFLAICQPLHYGSIMTRGTCLQLVAVSYAFGGANSAXQTGNVFALPFCGPNQLTHYYCDIPPLLHLACAXAATARVVLYVFSALVTLLPAAVILTSYCLVLVAIGRMRSVAGGRRTSSLVPPTFWPLPFLWPRGVSFVPPLVLXPSPGPGGGVCSPCVSLADPFFLAPRPGGEEALKNKKXXXXXXXXXXXXXXXXXXXXXXXXXXXXXXXXXXACRY

SEQ ID NO: 1153 - DNA, 880 bp, Homo sapiens
  source
  (1)..(880)
  CDS (201)..(680)
  modified_base (177)..(177): a, t, c, g, unknown or other
  modified_base (369)..(468): a, t, c, g, unknown or other
  modified_base (503)..(503): a, t, c, g, unknown or other
gggcaggtcactgggattgtgtaaattctcagaaaggaaatggaccagagaagtcatccaacccaacctcttcatttgactaatgaggaaacccaggtctacaaataaaaaatttgcccaagttcacagaataactgacccggatcccagagccggaagagagtgtaggagtcattntgtccaacttcctccttttacccatgaaaacactaatgtccaaatcatctggaatgagaatgcaggctttccagctctctgggtatggttctttctgctatgtcattttagtcacttcctttctttcattgagaaacacatttaaaatcctatgggccaggttgcaaggtagggaatattttcacatgacannnnnnnnnnnnnnnnnnnnnnnnnnnnnnnnnnnnnnnnnnnnnnnnnnnnnnnnnnnnnnnnnnnnnnnnnnnnnnnnnnnnnnnnnnnnnnnnnnnncaactggagcttgcaagcctgcggttcggctctanaggacccctgtttgtttgtttgtttttagagacagggtctcactctgtcgcccaggctggagtgcagtggcacaatttctgctcactgcaagctccgcctcccgggttcatgccattctcctgcctcaggctcccgagaagctgggactacaggtgtccaccaccatgcccggctaattttctgtatttttagtagagatggggtttcaccgtgttagccaggatggtctcgatctcctgacctcatgatccgctcaccttggcctcgcaaagtgctatgatgacaggagtgagccaccgcgcccggcctacaaacagggatttttacatcatcactcctttcccacatctcccccatcactttggtcctcccctcc

SEQ ID NO: 1154 - protein, 159 aa, Homo sapiens
  MOD_RES (57)..(90): Variable amino acid
  MOD_RES (101)..(101): Variable amino acid
MKTLMSKSSGMRMQAFQLSGYGSFCYVILVTSFLSLRNTFKILWARLQGREYFHMTXXXXXXXXXXXXXXXXXXXXXXXXXXXXXXXXXXTGACKPAVRLXRTPVCLFVFRDRVSLCRPGWSAVAQFLLTASSASRVHAILLPQAPEKLGLQVSTTMPG

SEQ ID NO: 1155 - DNA, 946 bp, Homo sapiens
  source
  (1)..(946)
  CDS (201)..(746)
  modified_base (1)..(73): a, t, c, g, unknown or other
  modified_base (251)..(251): a, t, c, g, unknown or other
  modified_base (253)..(253): a, t, c, g, unknown or other
  modified_base (779)..(780): a, t, c, g, unknown or other
  modified_base (802)..(802): a, t, c, g, unknown or other
  modified_base (815)..(815): a, t, c, g, unknown or other
  modified_base (825)..(924): a, t, c, g, unknown or other
nnnnnnnnnnnnnnnnnnnnnnnnnnnnnnnnnnnnnnnnnnnnnnnnnnnnnnnnnnnnnnnnnnnnnnnnngttctcaaggtgtccaagacacacagagccacggaatctcacaggtgtctgagaattcctcttcctgggactctcagaggatccagaactgcagccggtcctcgctttgctgtccctgtccctgtccatgtatctggtcacggtgctgaggaacctgctgagcatcccggctgtcagntntgactccccgctccacacccccacgtacttcttcctctccatcctgtgctgggctgacatcggtttcacctcggccacggtttccaagacgattgtggacatgcagtcacatagcagagtcatctctcatgcgggctgcctgacacagatgtctttcttggtcctttttgcatgtatagaaggcatgctcctgactgtgatggcctatgactgctttgtaggcatctgtcgccctctgcactacccagtcatcgtgaatcctcatctctgtgtcttctttgttttggtgtcctttttccttagcctgttggattcccagctgcacagttggattgtgttacaattcaccatcatcaagaatgtggaaatctctaattttgtctgtgacccctctcaacttctcaaacttgcctgttctgacagcgtcatcaatagcatcttcataattttggtagtactatgtttggttttcttcccattcagggatccctaatgtcttactataaaatcggccccggcttttccnnccccacaatcgaggtttcgtanccaagttagcctntttaaaaacnnnnnnnnnnnnnnnnnnnnnnnnnnnnnnnnnnnnnnnnnnnnnnnnnnnnnnnnnnnnnnnnnnnnnnnnnnnnnnnnnnnnnnnnnnnnnnnnnnnnttttcgatggctttatcgggat

SEQ ID NO: 1156 - protein, 181 aa, Homo sapiens
  MOD_RES (17)..(18): Variable amino acid
MYLVTVLRNLLSIPAVXXDSPLHTPTYFFLSILCWADIGFTSATVSKTIVDMQSHSRVISHAGCLTQMSFLVLFACIEGMLLTVMAYDCFVGICRPLHYPVIVNPHLCVFFVLVSFFLSLLDSQLHSWIVLQFTIIKNVEISNFVCDPSQLLKLACSDSVINSIFIILVVLCLVFFPFRDP

SEQ ID NO: 1157 - DNA, 1506 bp, Homo sapiens
  source
  (1)..(1506)
  CDS (201)..(637)
  CDS (764)..(1009)
  CDS (1069)..(1306)
ttatatatgatgatctggttcttggaacgttcttgaagctagtgtctctaaggcaggtgtttatagcaagacatgaataacacagcaatcgatgttgaaagcattataaggcaattgagtttgtcagaactacaaaatattgctgagtgtggattgctctgaaatctgaaaacattacttgtgaattgcttctgtccaaaatgcagacacaatgctgggtattggtttacttgtttccgacttttcaaccctcttttccaggcaaaagagggttgtatccaaacgctacagacccacagagtccaacagttgtctctatattcctcctcctcgaactctcagaggatccagaactacagccggtcgtcgctgggctgttcctgtccatgtgcctggtcagggtgctggggaacctgctcatcatcctggccgtcagccctgactcccacctccacacccccatgtacttcttcctctccaacctgtccttgcctgacatcggtttcacctccaccaccgtccccaagatgatagtggagatccagtctcacagcagagtcatctcctatgcaggctgcctgactcagatgtctctctttgccatttttggaggcatggaagagagacatgctcctgagtgtgatggcctatgaccagtttgtagccatctgccaccctccatatcgtgcagccatcttgaacccgtgtttctgtggcttcctagatttgttgtccttgtttttttttttttttttcccctcaggcttttagactcccagctgcacaacttgattgccttacaaatgacctgcttcaaggatgtggaaattcctaatttcttctgggaaccttttcaactcccccatcttgcatgttgtgacaccttcaccaggaacatcaacctgtatttccctgctgccgtatttggttttcttcccatctcggggagccttttctcttactgtaaaattatttcctccattctgagggtttcctcatcaggtgggaagtagaaaccttcgccacctgtgggtctcacctgtcagttgtttgctgattttatggaagaggcgttggagggtacctcggttcagatgtgtcatcgtccccaagaaagggtgcagtggcctcagtgatgtacacagtggtcacacccatgctgaaccccttcatctacagcctgagaaacagggatatgaaaagtgtcctgcggcggccgcacggcagcacagtctcatctcaatatcttcttatctgttccattccttttgtaggatgggttaaaaaaggcagcaaggtcaaataagaatgatatcacagggtgaacacccactctgacattacgagtaatacctccctaggatgtaaaaaatactgtcacagagtacacacacacggggtacacccacggtgatattagaagcactatctcccttaaatattatgacaaatatcacagggtgtgcacactgtgtgatatgaggagtgatatttaccctggatatc

SEQ ID NO: 1158 - protein, 306 aa, Homo sapiens
MQTQCWVLVYLFPTFQPSFPGKRGLYPNATDPQSPTVVSIFLLLELSEDPELQPVVAGLFLSMCLVRVLGNLLIILAVSPDSHLHTPMYFFLSNLSLPDIGFTSTTVPKMIVEIQSHSRVISYAGCLTQMSLFAIFGGMEERHAPELLDSQLHNLIALQMTCFKDVEIPNFFWEPFQLPHLACCDTFTRNINLYFPAAVFGFLPISGSLFSYCKIISSILRVSSSGGKGVGGYLGSDVSSSPRKGAVASVMYTVVTPMLNPFIYSLRNRDMKSVLRRPHGSTVSSQYLLICSIPFVGWVKKGSKVK

SEQ ID NO: 1159 - DNA, 856 bp, Homo sapiens
  source
  (1)..(856)
  CDS (201)..(656)
  modified_base (662)..(761): a, t, c, g, unknown or other
aaggaaggaggagagggaaggaggaactaagggagggagggagggaggatacagcaggccctgctaaagcatctcccccgccttggtccccggggagcggcgctcatgagccctcccggcagccgcctctttacctgcgcccctgacccgtacacccttccctccttcccttgcagagcccgggcgaggacccctccaggatgcaggtcccgaacagcaccggcccggacaacgcgacgctgcagatgctgcggaacccggcgatcgcggtggccctgcccgtggtgtactcgctggtggcggcggtcatcatcccgggcaacctcttctctctgtgggtgctgtgccggcgcatggggcccatatccccgtcggtcatcttcatgatcaacctgagcgtcacggacctgatgctggccagcgtgttgcctttccaaatctactaccattgcaaccgccaccactgggtattcggggtgctgctttgcaacgtggtgaccgtggccttttacgcaaacatgtattccatcatcctcaccatgacctgtatcatcgtggagcgcttcctggggtcctgtacccgctcatctccaatcgctggcgccgccgtctttacccggtggccgcgtgtgcatggacctggctgctgctcctgaccgccnnnnnnnnnnnnnnnnnnnnnnnnnnnnnnnnnnnnnnnnnnnnnnnnnnnnnnnnnnnnnnnnnnnnnnnnnnnnnnnnnnnnnnnnnnnnnnnnnnnnatctctgggtatgatactcctcctctggggtggaaaaacccacccattcattccctccacagtctttgggaatgtcctgtatcacacacacacac

SEQ ID NO: 1160 - protein, 151 aa, Homo sapiens
MQVPNSTGPDNATLQMLRNPAIAVALPVVYSLVAAVIIPGNLFSLWVLCRRMGPISPSVIFMINLSVTDLMLASVLPFQIYYHCNRHHWVFGVLLCNVVTVAFYANMYSIILTMTCIIVERFLGSCTRSSPIAGAAVFTRWPRVHGPGCCS

SEQ ID NO: 1161 - DNA, 922 bp, Homo sapiens
  source
  (1)..(922)
  CDS (201)..(722)
  modified_base (1)..(26): a, t, c, g, unknown or other
  modified_base (62)..(62): a, t, c, g, unknown or other
  modified_base (124)..(125): a, t, c, g, unknown or other
  modified_base (127)..(128): a, t, c, g, unknown or other
  modified_base (131)..(131): a, t, c, g, unknown or other
  modified_base (133)..(134): a, t, c, g, unknown or other
  modified_base (138)..(138): a, t, c, g, unknown or other
  modified_base (142)..(145): a, t, c, g, unknown or other
  modified_base (147)..(147): a, t, c, g, unknown or other
  modified_base (151)..(151): a, t, c, g, unknown or other
  modified_base (311)..(311): a, t, c, g, unknown or other
  modified_base (322)..(322): a, t, c, g, unknown or other
  modified_base (326)..(326): a, t, c, g, unknown or other
  modified_base (345)..(349): a, t, c, g, unknown or other
  modified_base (351)..(361): a, t, c, g, unknown or other
  modified_base (364)..(364): a, t, c, g, unknown or other
  modified_base (366)..(368): a, t, c, g, unknown or other
  modified_base (370)..(380): a, t, c, g, unknown or other
  modified_base (384)..(384): a, t, c, g, unknown or other
  modified_base (386)..(388): a, t, c, g, unknown or other
  modified_base (392)..(392): a, t, c, g, unknown or other
  modified_base (394)..(396): a, t, c, g, unknown or other
  modified_base (403)..(403): a, t, c, g, unknown or other
  modified_base (413)..(413): a, t, c, g, unknown or other
  modified_base (415)..(417): a, t, c, g, unknown or other
  modified_base (422)..(422): a, t, c, g, unknown or other
  modified_base (438)..(439): a, t, c, g, unknown or other
  modified_base (441)..(441): a, t, c, g, unknown or other
  modified_base (443)..(443): a, t, c, g, unknown or other
  modified_base (445)..(445): a, t, c, g, unknown or other
  modified_base (465)..(465): a, t, c, g, unknown or other
  modified_base (469)..(471): a, t, c, g, unknown or other
  modified_base (487)..(488): a, t, c, g, unknown or other
  modified_base (490)..(491): a, t, c, g, unknown or other
  modified_base (495)..(495): a, t, c, g, unknown or other
  modified_base (497)..(498): a, t, c, g, unknown or other
  modified_base (501)..(505): a, t, c, g, unknown or other
  modified_base (519)..(519): a, t, c, g, unknown or other
  modified_base (529)..(530): a, t, c, g, unknown or other
  modified_base (540)..(540): a, t, c, g, unknown or other
  modified_base (548)..(549): a, t, c, g, unknown or other
  modified_base (564)..(568): a, t, c, g, unknown or other
  modified_base (571)..(571): a, t, c, g, unknown or other
  modified_base (573)..(573): a, t, c, g, unknown or other
  modified_base (584)..(586): a, t, c, g, unknown or other
  modified_base (592)..(594): a, t, c, g, unknown or other
  modified_base (610)..(611): a, t, c, g, unknown or other
  modified_base (614)..(619): a, t, c, g, unknown or other
  modified_base (634)..(635): a, t, c, g, unknown or other
  modified_base (646)..(646): a, t, c, g, unknown or other
  modified_base (652)..(654): a, t, c, g, unknown or other
  modified_base (667)..(667): a, t, c, g, unknown or other
  modified_base (678)..(678): a, t, c, g, unknown or other
  modified_base (700)..(704): a, t, c, g, unknown or other
  modified_base (709)..(711): a, t, c, g, unknown or other
  modified_base (729)..(829): a, t, c, g, unknown or other
  modified_base (851)..(851): a, t, c, g, unknown or other
  modified_base (853)..(853): a, t, c, g, unknown or other
  modified_base (875)..(875): a, t, c, g, unknown or other
  modified_base (911)..(911): a, t, c, g, unknown or other
  modified_base (918)..(919): a, t, c, g, unknown or other
nnnnnnnnnnnnnnnnnnnnnnnnnnggaccttggttataatgtgcgattggtggggtggantaaccctaccacaaggcagatatctaagcttcctcggaaatagctccacatactcactatgnnannatntnnattngggnnnncntttnttaattcgggccacccaaggctgggaaacctcagagttatccagaaccaatgctttacaatgtgaatagaaaacaaaggaggctgagtcagaagcatccacacagccagcaccttctccccatgcaggcagcactcagaaccacacggtggggtaggggngggtggggggngaanggggcacaggagggtgggnnnnntnnnnnnnnnnnggngnnngnnnnnnnnnnngggngnnngggngnnnggggggngggggggggngnnnggggngggggggggggggggnngngngngggggggggggggggggggngggnnngggggggggggggggnngnngggngnnggnnnnngggggggggggggngggggggggnngggggggggntttggggnnggggggggggggggnnnnnggngnggggggggggnnngggggnnngggggggggggggggnnggnnnnnnggggggggggtttgnnggggggggggngttttnnnggggggggggggnggggggggggngggggggggggggggggggggnnnnnttttnnngtggtgtttaggaaaaannnnnnnnnnnnnnnnnnnnnnnnnnnnnnnnnnnnnnnnnnnnnnnnnnnnnnnnnnnnnnnnnnnnnnnnnnnnnnnnnnnnnnnnnnnnnnnnnnnnngttttaaaaaaggactttggtnanatacgctgcgattcagggtggnggaaaaaccatccctttgcttggacaatcaatttanaaactanngtt

SEQ ID NO: 1162 - protein, 173 aa, Homo sapiens
  MOD_RES (41)..(42): Variable amino acid
  MOD_RES (49)..(60): Variable amino acid
  MOD_RES (62)..(63): Variable amino acid
  MOD_RES (65)..(66): Variable amino acid
  MOD_RES (68)..(68): Variable amino acid
  MOD_RES (72)..(73): Variable amino acid
  MOD_RES (80)..(82): Variable amino acid
  MOD_RES (89)..(91): Variable amino acid
  MOD_RES (96)..(97): Variable amino acid
  MOD_RES (99)..(102): Variable amino acid
  MOD_RES (107)..(107): Variable amino acid
  MOD_RES (110)..(110): Variable amino acid
  MOD_RES (114)..(114): Variable amino acid
  MOD_RES (117)..(117): Variable amino acid
  MOD_RES (122)..(125): Variable amino acid
  MOD_RES (129)..(129): Variable amino acid
  MOD_RES (131)..(132): Variable amino acid
  MOD_RES (137)..(137): Variable amino acid
  MOD_RES (139)..(140): Variable amino acid
  MOD_RES (145)..(145): Variable amino acid
  MOD_RES (149)..(149): Variable amino acid
  MOD_RES (151)..(152): Variable amino acid
  MOD_RES (156)..(156): Variable amino acid
  MOD_RES (160)..(160): Variable amino acid
  MOD_RES (167)..(168): Variable amino acid
  MOD_RES (170)..(171): Variable amino acid
MLYNVNRKQRRLSQKHPHSQHLLPMQAALRTTRWGRGGWGXXGAQEGGXXXXXXXXXXXXGXXGXXGXGGGXXGGGGGGXXXGGGGGGXXXGGGGXXGXXXXGGGGXGGXGGGXWGXGGGGXXXXGGGXGXXGGGGXGXXGGGFXGGGXFXXGGGXGGGXGGGGGGXXFXXGV

SEQ ID NO: 1163 - DNA, 961 bp, Homo sapiens
  source
  (1)..(961)
  CDS (201)..(761)
  modified_base (213)..(312): a, t, c, g, unknown or other
  modified_base (320)..(322): a, t, c, g, unknown or other
  modified_base (334)..(334): a, t, c, g, unknown or other
  modified_base (354)..(354): a, t, c, g, unknown or other
  modified_base (357)..(357): a, t, c, g, unknown or other
  modified_base (892)..(892): a, t, c, g, unknown or other
tatgtacttttttctcattcaatcatctcccttagatatgaaaaagcaactcttcaggttagaaactattatccccactgtgtaggggagagacagagaaagccttgccccaaatcacatagccagccacatttaaacctcctctacctgatctaatgtctgttttctaaatgactcctctctagtctccacttacactgatgaatatgactnnnnnnnnnnnnnnnnnnnnnnnnnnnnnnnnnnnnnnnnnnnnnnnnnnnnnnnnnnnnnnnnnnnnnnnnnnnnnnnnnnnnnnnnnnnnnnnnnnnngttttaannnggcactgggtanattaaaagtccgtcgggggnggnaaaaaagccacccactgcagtacctgtccattttcactcatcaatttgtggccaaagctagtgtcttcattgtggtgcagaatgctttgctgctttcacctgttcctattctctctgcccagctccattactgtaggaaaaatgtgattgagaactgcatctgtgccaacctgtctgtgtccaggctctcctgtgataatttcacccttaacagactctaccaatttgtggctggttggaccttcctgggctcggatttcatcctcatcttcctctcctacaccttcattctaagagctgtgcttagattcaaggtggagggggtggcagtgaaggccctgagcacatgtggctcccactttatcctcatcctcttcttcagcacctgctggttgtggtgttgacaaatgtggccagaaagaaggtccccatggacatcctgatcctgtttaatgtccttcatccctttagtcctcctgcattaaaccctatcatatgtggatttcaaactaaagagttaaagaaggaattttanaagttgctgcagaggggcctttgaaaacacggaagggactctccatagaagcacctattactgtttcta

SEQ ID NO: 1164 - protein, 186 aa, Homo sapiens
  MOD_RES (5)..(38): Variable amino acid
  MOD_RES (40)..(41): Variable amino acid
  MOD_RES (45)..(45): Variable amino acid
  MOD_RES (52)..(53): Variable amino acid
MNMTXXXXXXXXXXXXXXXXXXXXXXXXXXXXXXXXXXFXXALGXLKVRRGXXKSHPLQYLSIFTHQFVAKASVFIVVQNALLLSPVPILSAQLHYCRKNVIENCICANLSVSRLSCDNFTLNRLYQFVAGWTFLGSDFILIFLSYTFILRAVLRFKVEGVAVKALSTCGSHFILILFFSTCWLWC

SEQ ID NO: 1165 - DNA, 1177 bp, Homo sapiens
  source
  (1)..(1177)
  CDS (201)..(977)
  modified_base (20)..(119): a, t, c, g, unknown or other
  modified_base (750)..(750): a, t, c, g, unknown or other
  modified_base (809)..(809): a, t, c, g, unknown or other
  modified_base (816)..(816): a, t, c, g, unknown or other
  modified_base (829)..(928): a, t, c, g, unknown or other
agttccttttttatacacannnnnnnnnnnnnnnnnnnnnnnnnnnnnnnnnnnnnnnnnnnnnnnnnnnnnnnnnnnnnnnnnnnnnnnnnnnnnnnnnnnnnnnnnnnnnnnnnnnngtcatccccaaggtcctggccatcttctggtttgacctcagatcaatcagcttccctgcctgcttccttcaggtgttcatcatgaacagttttctgactatggagtcctgcacattcatgatcatggcctatgaccgctatgtggccatctgcaagcccctacagtactcatccatcatcactgatcaatttgtcgctagggctgccatctttgttgtggccaggaatggccttcttactatgcctatccccatactttcttctcgactcagatactgtgcaggacacatcatcaagaactgcatctgtactaacgtgtctgtgtctaaactctcttgtgatgacatcaccttgaatcagagctaccagtttgttataggttggaccctgctgggctctgacctcatccttattgttctctcttacttttttatcttgaaaactgtgctaaggattaagggtgagggagatatggccaaagctctaggtacttgtggttcccacttcatcctcatcctcttcttcaccacagtcctgctggttctggtcatcactaacctggccaggaagagaattcctccggatgtccccatcctgctcaacatcctgcaccaccttattcccccagctntgaaccccattgtttatggtgtgagaacgcaagggggattttttccaccccaggagcgnagattcngtaccgcagttcnnnnnnnnnnnnnnnnnnnnnnnnnnnnnnnnnnnnnnnnnnnnnnnnnnnnnnnnnnnnnnnnnnnnnnnnnnnnnnnnnnnnnnnnnnnnnnnnnnnntgtactgctgctatttcttgctgttttctacaggagctgcagaggctgattttatggaccctgactccactagtcccttccctccacactactcacaagagttagtgccattattaggcacctggatcctggggccctatggtccatgtcccaggagagtatgttgtgaaaggtgttcagcattgggagtagagtgagggtgaaagagttcaaaggcacttgggaagtctaattaacaaaaatggcatt

SEQ ID NO: 1166 - protein, 258 aa, Homo sapiens
  MOD_RES (184)..(184): Variable amino acid
  MOD_RES (206)..(206): Variable amino acid
  MOD_RES (210)..(243): Variable amino acid
MNSFLTMESCTFMIMAYDRYVAICKPLQYSSIITDQFVARAAIFVVARNGLLTMPIPILSSRLRYCAGHIIKNCICTNVSVSKLSCDDITLNQSYQFVIGWTLLGSDLILIVLSYFFILKTVLRIKGEGDMAKALGTCGSHFILILFFTTVLLVLVITNLARKRIPPDVPILLNILHHLIPPAXNPIVYGVRTQGGFFPPQERRFXTAVXXXXXXXXXXXXXXXXXXXXXXXXXXXXXXXXXXVLLLFLAVFYRSCRG

SEQ ID NO: 1167 - DNA, 919 bp, Homo sapiens
  source
  (1)..(919)
  CDS (201)..(719)
  modified_base (1)..(68): a, t, c, g, unknown or other
  modified_base (736)..(736): a, t, c, g, unknown or other
  modified_base (746)..(746): a, t, c, g, unknown or other
  modified_base (779)..(879): a, t, c, g, unknown or other
nnnnnnnnnnnnnnnnnnnnnnnnnnnnnnnnnnnnnnnnnnnnnnnnnnnnnnnnnnnnnnnnnnnncagcccctgtactacctgctcagcctcctctccctgctggacatcgtgctctgcctcaccgtcatccccaaggtcctggccatcttctggtatgatcttaggtcgatcagcttccctgcctgcttcctccagatgttcatcatgaacagtttcctccccatggagtcctgcacgtttatggtcatggcctatgaccgttatgtggccatctgccacccactgcggtacccatccatcatcactaatcaatttgtggccaaagctagtgtcttcattgtggtgcggaatgcgcttcttactgcacccattcctatcctcacttccctgctccattactgtggggaaaatgtcattgagaactgcatctgtgccaacttgtctgtgtccaggctctcctgtgataatttcacccttaacagaatctaccaatttgtggctggttggaccttgctgggctcagatttattcctcatcttcctctcttacaccttcattctaagagctgtgcttagattcaaagcagagggggcggcagtgaaggccctgagcacatgtggctcccacttcatcctcattcttttcttcagcaccatactgctggttgtggtgttgacaaacgtggccagaaagaaggtccccaggacaacctgatcctgctgaacgtcctncgcattattnccaccccagagggcggatacataccgcagtgcnnnnnnnnnnnnnnnnnnnnnnnnnnnnnnnnnnnnnnnnnnnnnnnnnnnnnnnnnnnnnnnnnnnnnnnnnnnnnnnnnnnnnnnnnnnnnnnnnnnnngcctatgcacactgagcagcttctgtggatccaataagtg

SEQ ID NO: 1168 - protein, 172 aa, Homo sapiens
MFIMNSFLPMESCTFMVMAYDRYVAICHPLRYPSIITNQFVAKASVFIVVRNALLTAPIPILTSLLHYCGENVIENCICANLSVSRLSCDNFTLNRIYQFVAGWTLLGSDLFLIFLSYTFILRAVLRFKAEGAAVKALSTCGSHFILILFFSTILLVVVLTNVARKKVPRTT

SEQ ID NO: 1169 - DNA, 28965 bp, Homo sapiens
  source
  (1)..(28965)
  CDS (201)..(301)
  CDS (861)..(932)
  CDS (2444)..(2521)
  CDS (8332)..(8400)
  CDS (8512)..(8586)
  CDS (22615)..(22800)
  CDS (27532)..(28765)
tttaccaataggaaaggggagtctacagacacatccttcccccactactctccctcactcagatcaacagttctgaggaccaattttttaaatatcctaactcaagtccttgggattaggaactaatcaccagtagtggtagtattgcttagcttcacctccttgccagtttcactccctgtcctgaatgctctgaaatcatgctatcagctatattacccacagctaggcttcttctcaggctctgcttcccgggaaagccaggccaatacaaccagaccttgggaaggatcctgggtaggtctgaaattttcagctatagaaatttataaccatctcgtaagggtaatgacagcagaagctctaaccaacctctaaccagttcccaggagagagtctgattggcccagcttaggtcacatacataccctagggtcttagggcatggaatctcatgctctaatcccaagagaatcgcttggagtggagaaaggagttttccaacaagtatgatgaggttggaaataggggaaattttaagaaacttttgttactagttggaagttgctttagggtcacattaacttatcaatcgttttttttttaatgtatactgtggcatcctaatccccttgtgactgaagtgtaagtttcttttctctgaggaatcaacagcttttaagaccgtggaacgaaccttaaaatagaaaacatgagcctaattcacgtatatacgggcttttctcgtagatttttctgatggttcaaaattgatatttttattctggaaagttcatgctctaacaactgtttaaacagccagtttcattttcactcactctcattttgtttctctctaggttaatatccaacacaggtattaagcaccttccagatgttcacaagattcattctctccaaaaagttttactgtaagttttttccttgagtgactaccaactctttactcagtatctgtcttgcccaacggctatctgggcctttaatatgcattgtgtagtctacatcctccaaatgtattgctctgggttagcaaagatagggaggccagaagtgaggtccttgattttacctgcaggccagtcaatattagtttggaggaaactgaaagacccttcaataagagtattgttcacaaaaccagcatgtagcaaaatcaaaaagtggctcattttttcactatttagcgctttaattactgccccccacacacataaacaacaccccctgtattccagcatcctctcctcttctttctagaattgctatgctgccctgggcacaaagaaactatctaacaaacacattcatattaaagagttaatgacaggctgtgtttgccttttcccaaggtatttgtattttgaaaaaggaagagaaaaggtagcatataatggcaactattcccaatagtgaaattgtaagaatatggacagatccaaaaggaggagatggggaaggggtgtaaggagctaagcagagaggaaggagataagcagggagggaggagagaaagaggaaaatatgaaaatctttcagaatttctcaaattgttccaagctgtttactacactacttgtacagctgttacttccacatttacttctccatattagatcagacctaacagggaaggttgacgggggaaatgaggaatacaaacagaaaatgagagtttcctcatcctttcattcaggaaaagaaaaatcaatgataaagccattctgagacccaaggagaacaggcagaaggaaactagctgtaagaaggggattgacatgaggagaaggcccaactaagatgaacagagaagttagacaagaggtgaaaggtcagcttaagtgtttgttacattagggtgaaattatttaagaaaaccttcagaagaaaaaagtaagccatgcacagtggccagtggctctaatccagtactttcggaagccaaggcaggcagatcacttaagcacagggtttgacaccagcctgggcaacatggtgaaaccctgactttacaaaaaatacaaaaattagctgggtatggtggtgcacacctgcagtcccagctattctggaggctgaggtggcaggatcactggagcctgggaggttgaggctacagtgagttgtgatggcaccactgcactccagcctgggtgacagagcaagagaacctgtcttaaaaaaaaaaaaaaaaaaaaaaaaagacactgaatgtctgcaattccatttgtaagaacatactaaagataaattagagacaattttttctccaaactttgagctgatcatcttctaaacaacaactagttatattaatacattacctcagctgaagaccgcatcatgccagttaaactaaattttggaaggttacatgagtagagctgatgtaagtatcttatttgtctgtactttcttctagtgacattcaagataacataaacatccacacaattgaaagaaattctttcgtggggctgagctttgaaagtgtgattctgtaagtaagggggaaaaaatccaacagagtaacatttgatttttcatttagtgatctctttctcataattggatgctccttttttgtttgggtaactttggcatttctccacttaaatcactctccagttctgcgttcctctctcatctttacatttcagaatcacaatgtggagtcatgttaataatttatgattctggggtgtgattcaagtatttaaaattgctgtttgaatgatgatctcctgtgatacaacatctgttccaaaggaaagaataactcatgcatcaataaagctagttattgcctggcaaggcttttgttgcccaaagaaaaagatcaggaaggaggcccaatcaggaagatatggcgattccctcataaccatgccaagcagttcctgttcaggcccatgctgagcataggatgacttctcattttcttgaaacaatcacattttttaatgagcttgagttactctctctgacttttgggaaatctcttaaaagcattctgtgttgttagtgaaagaccttctactcttttatgccagtagcccctgtagcagtttatccactcacaagtatggccaagaaataggacactatgggctatctaagtatgcctgggatccatgaaagttagatgcacagaatgacatttggggacccagcaattgcacttacatctgtaagatatgaaaagcattttatctattttacaaactgttgtgtttttaaaaaaatataccagtatgagtttttaaaatatgcctatatgtacaaaacataagttccagtccataaagaattttagcccccttcagttgtatgattcagagaccaggctgttgaaagaaaaaagaaatagtagacagattataacactttgatgagtaaagctaagcactgtatttgatgtaaattaatcacagataacaatggaaaaagtttgaaaacagattagcatagaaattgaatgtatggagggaacaataaaattaaatcaaaggaatgtattcaaaatacatagatattaggacaaaagctataggtgagtgatactgaatcatttcacataagctcatgatatttgaagtgaaggggtgtgtgtgtgtgtgtgtgtgtgtgtgtgtgtgttgagatgaggtgatggggtgcagaaagggtaagaaagagaaagcaaaaggaataaactaaaacgcgagcagaatgaatgatatacaaagaaaaaaagagcaatcattctaagaggaaagaaggaatgatttaatctcactagtctgtgatgcgagggttaaaggaagagttaaacaagggaaaggaagctaagaaaaagaggttgtttttaaaatgggcttttaaagatgagcagtagttagctagggaattggcaaagggcgtgcagagggaacagaataatcaagaccaggaagagcacctgccttttataaaaataaaaataatcaggtgggcgtggtggctcatgcctgtaatccaagcactttgggagacagaggcaggcagatcacgaggtcaggagattgaggcaatcctgtctaatacagtgaaacccgtctctactaaaaatatataaaaaaaaaaaattagctgggcatggtggcaggcatctgtaatcccctctactcaggagggtgaggcaggggaatcgcttgaacccgggaggcagagtttgcagtgagccaagattgcaccactgcactccagcctgggcaacagagtgagactccatctcaaaaagtaataataataaaataaaataaataaaaataataatacaaagagcttgtggaaaatagtgaatacatgagtcatattggcctgctggattgtgaaacaaacacaacagtaaaaggattcctgggttacttcacagagggagattggtgataaatgtaaacatttatacctagatgtttatgtttatttggatctttcttgaaatatatgttcattttaaatagacttaaatgaatgttataatatggcaaacttattcaatttttttatagaaaatatataattaagtgggagtgtgctcatatcattcttgtagttttgcatagtgtgcttatattgttctcacagtatcattgatctgacttttttgtccagaccgtaagacagaaggcaaagcactttaagtgacctggtctcaactctccccaactagaggcaaagaacctgaggaaataagaacttctgacatagctttgcaaacccaaagctacaagggaaacatatagatcctgtctgctctttcctaactcctgttcatggacactgatctctcagaatttaggaacacacttttcaggaaaggagttttcttttaagagtgaatgtttctcagacatgtctctaaaggataaactcacttttgtggaaacaatttctattgttcttattttggctgtcccttaatccatagacaataaaatcatgtaattcatacttaacacaacttaagtctccaatcgtttctagtttggcagcttcgatgcaggggtgttttcttcccatggggacatttgagcacactcagaaaaaaaaaaaaaaaaaagcatggcaaatggcgctgatgactgttgaagtattctatggatagcaattttcaaaattctgggaatactacacagctataaaaaagaacaagatcatgccctttgcagcaacatggatagagctggaggccaatattctaagcaaactaacacagggacagaaaaccaaataccatatgttcactcttgtaagagctaaacaatgagaacacatggattctaggaaaggaacaacagacaatggggcctacctgagggaggagagagaggatcacaaaaaatatctattgggtactatggttattacccaggtgatggaattatttgtccaccaaaccccatgacgtgcagactacctaatgtaaaaaacgtgtacatgcggccgggcgcggtggctcacgcctgtaatcccagcactttgggaggccgaggcgggtggatcatgaggtcaggaaatcgagaccatcctggctaacaaggtgaaaccccgtctctactaaaaatacaaaaaattagccgggcgcagtggcgggcgcctgtagtcccagctactcgggaggctgaggcaggagaatggcgtgaacccgggaagcggaacttgcagtgagccgagattgcgccactgcagtccgcagtccggcctgggcgacagagcgagactccgtctcaaaaaaaaaaaaaaaaaaaaaaaaaaacctgtacttgctcccctgaaactgaaagttgaaaaaaattctgaggccctgttctaaaagtaaatgtatttttaaagcaaccagcaatgaaagattatcagacactagcctagtgaatcagagaagtgagcaataaaaacccactgtgtagaggcttctgagcccttctgcacccgcactgtgccctggtaagcagagtgcctgaatggggaaagcacctagctatggccagccaggagaataatgtcctaattcagaagaaataaaatgagtgatatgcgttacagtgcccagcacactcgggcctcaggagagacctgcttcgtgcgtgtttcctctgttcctcagtctgcccgtctcccttgcctgcccctcaatgagttttaaagggccaagtccccagcacctccactctttaggatgagagcaaagttcacttctgtagcttcctgagcctctgctgagtgagcacactggcctcatccccaaggacacaaaagggttaaggtaagcctgtgatgcagtaactccttagttgatgttctgcccaggttgttgtagtcatcgtcatcatcgtcatcatcgtcatcatctggttttcaaataggtacttcctctcttaagagaccaggggtgcgtgtaataaatgtgggtttccctttgttactagcttgagattcccacagataacgtaaatccaagggcagcagttctgaacataatttgttttttttgtgtgatgatccactgctgatatcaagaaataccatcctcctccccatataatggtatctgttgattgagataatccataaagacaaagggatatttgaatacaataattatttaaaattagtttatgttttatttgattatagcaacatcgatttacaggacagtaatatgcaagaaatattaattatctagtcaataggcaaataggtggaacctgtatggattaagggtcagccaactacatataacccagaggccaaatccagctcatgagctaagacaggaaacactaacattagatctaagttaagcaaaatgttatcccccactaaaaattctcttctcaatattaggcctatattacaaaaaaaaaaaatacccaattattacactttgaatttggtcaataaaaaattgtggtaattgttttataagtacataaagtacttatataatattttttatttttgccttttggcccataaaacctaaactttactatcaggccctttacagaaaaagtttgctgaatcctgtatttgattcaaatccccagggatccacatgccacagctacctcagcaactcccactatcctgcaacagtcaggagtccagatgtgcctgggagaggctttctcaaatggcattgggggtgcatagccacttctttgccatcagaacccaccaattgattgtgaatgttttaaaagatttgcctcgcccctttctggatttttttaggtaattggttttcaagaggaggaaaaagacatacagttgttctcctgtgattttaagtgttttctggctacccatggcagcccaggaaagagagtcctggatgcacaggagcttctctgggtcagctttctgtacagtgttatttgcaagcccactaagctggacagggaaaagaacctgacagcaaaacaagagcaggtagtcagaggttcttcgggctaagctctcctgaccttggtatctgtttttgttttcagatccactcaggagcagagcaaggcagagctgtagcccaaggtgtccttgggctcccctgtccagggaaccctgctcactgaccttcttagcgcaatcaggatggctgttctacacccatctccacctcccccagaacctcctcccctgctcattcagatcacctcaccctgccacagcccacattctctgtaattgatttctcttcctttctggcttaacccagagccacctccacaaacctccaataaccaggtccctatgggtcacaggagatgttcaggttgtctgacaacttaattagatcacttttgatgacagccaggcctgctgctgtgggtgatcatgggtgaaaggcttaaggccttagagaaaggtgacacaaaatgttctttctctgtcttataaacacttgttcaataattgtacgattcctgtccttcaggatgagaaagatctgtcgctccccgcattgcttctctacacacaaatgatgtgtgtaaagaccttacagttatagaatccaggctgctctgcctaagtatgcctttcaaacttaaatttcatttaatcctttgaataggtaatacatgcaagtaatacaaacttcaaaagttacaaaagattatacagcaataaatcagtcttcctcccacccgtgtccccaagctttaaaagtggcattttctttatgccactaacctgtgctgtctgcccttgctcagtgcttccaattatgaaacccgtgtattgtttgcatctgacattattggttttttaataggccttttatttcagatggctgaataagaatgggattcaagaaatacacaactgtgcattcaatggaacccaactagatgagctgtaagtagccctgactattcttcaaggccatttaaagggaaatggctcttacaacagcaatatttatgtggctttgtgttttccttcttctttcctcaaccccatccccaggaatctaagcgataataataatttagaagaattgcctaatgatgttttccacggagcctctggaccagtcattctgtgagtagctttccccatttctgtgtgtaagagctcagtttgtgtaagttagaagtcaactctctgcagctaggggagaagcttccaacacagggctggccatcaagttcaatttttattcgtgtcatctgcaaaaatttatagagacaatttaaggcttatccacggtctaactctccattaaaaagcaacactaataataacatgtaatgagcacgtacagagtgtcagatggcgttctcagaagttaagatgcattttcttgtttaatccttataatcaccccctgtggtaggagctattattcccgttttacagaaggaaaaactggcttccctggagaggttaattcacccactcaaggttatacaagagttacagcagggatttaaactgatctaactcatggtacagacccacaaccactcgatcatgtgtctcttccctggaaaggaaagcacaattctccatcatcctcaacactcaggaggttccttcaacccaatgagacctatatacacattatttttggatcctctttccaaatcccttgggatgcattccgtgcctcacagccctgcatcagcacccctccctcttgtcatttccttacttccatctttccctccaaaagtgactttcccatcttctcttcttacctacactgccccttccatcaagcatcattccaaagtcctctacctcctcaagtctctctgacaacctcgccatcagtgacttcttcccgtggctctcatggcctttaaggcttctttggtggggggacaatctgcatcacaatcacaaaaaggctttttaaaaatgtgttcctgggctctaagcaagacctactacacttactgactgaaaaaagtacttcaagatgaagaaaggaacccaaaaggagagaatgaggtacaagaaggaatggtgagcagagcaatagataaacatgttaataaatctacagttttactgaatgatccttatgtagcctgccttaagtcaagtcaggcgtttagaagccacctgcctgaacctcttatttggcagttagcataggctaccatgtgtggttatctacccacctaccgaccaaccatctatctgcatcacttttgtctacaccaaatagctaatattctccttcaggctggaacctgtgtacctctagaattagacttggtatggagagtcagaattttaaatatttattattaatgataaagggtgtgttgtgatctatatatgagattctgctgctttgaagaagaaatatacacttcaaggtagatttatcatcctgaccatgttcaaagattattcgagaatgcctggcttgagataggcaacctatacaaatggagtatccgtgtgattaaagcggagatacagagcagactgccttggtttagaccaattcttttacctctctaagccttggtttcctcacctaaaaaaaatggccaaaacaatacctatttcctaatattatttgaagcataaaacacacacacacacataaatattttttcactcatcagataaatttttaagcatcagtcttgtgccatgcaggaaacaaaggaaagttcctcctcatagaaagcttatattctcattgggggtgggaatagagaggagtcaggcaatacattaaatatacaacttaatatatcaagtcatgatctatctatgaagtacaaggaaggacccagggctaacaaatggagagtgttgggcatatagtccatgtactcaagaatacaaagtactcaaaacttgtactgcttagttcatgtaccctgttcttagagtactcgggagacaaatgaattttgacaagtacttttgatgtctttgatccccacaatagcagcatgtcagtttcacttagcaaaaagccctgaaagttttgaatgttcctaagaaggcatctctatctgttcatggcagaatatgtcagtgatgggtgtgtttatatatgtgacctgtaccaggtacaatattgaatctatagcatcttaacctatctgctcccgagaataatgaagttggatgagatcccccaactccttcattatccaactgaagaaatcagaacccagaggagagtgatctgttaaagatcacactgcaactagaaggggcagagtctggaccagaaactaggtcttctgcctcacattccatgtattcccaccataccatgttgccataaatacgtttaattgaacatctaaaagttattcggtgaggccccctgaaactggttgtgagctaaaatagagaggaaaataactattaacaccagcctcccagcctaagaacaccagtcaatgttagataaacgtggcacagaagaacatctcctgaggttgcacaagcagattccaggcgaagatactgcacaatgtatctcataagaatgtttaacagagaacacaaaacttgaatcccccatctagccccactgtgaacgcaggcaggaagagagcctctgtgaaagcatcggaagcaattctacaaggtcctcaagttataggcccattgttttgtccttcttaccacaggaacacatctgtctagaattaagggaatacaatttacagaaaatccatggaattaggaagcactccccatgacttaaaaaggtagagagtgataatacattcccacatatttccatctcagtgcaggatcctggctggaagcccagcctataattgcgaatttcctcttttccccctggggccaaaagaattgttcaccttaacatcaagcccccctttctggggctttcagatcagtccatagatgttcttcaagcctctccccctgctgacctgagatgcaagaagactaatagcttattccacatctcacttctgcatccagatacactaaaccatctaaaccctggcctgagaggtgcttgtgtaggtgtgcagtagaccagcccacctcaggtgatgagttaagaggtaagagtaggagtatgcgtaggctattcagaccacagtaggtgcaaatcatgctgatcttgactgtgccttgggtcagattgcagtccccgctcccacacacacacacacacacacacacaaagactgtgatatatctgcatgcgggaggtttaccggagggtgctctcagaatgtacagggaacccttgatggaagcagaatcagggtaatgcatttgcaacaaaaggctcagctgatcccatggggagatctggagttaagatggtccttcaaagttgtactgaattaaggtaaggggcaagtcctccatatcaagaattattgggtgcaggctgtccctggggaggaaccaaactcctggggaggagaaagtcagctgagggcaattcccagagtagactcggctatgagccacctcagctgtgagtggttctcagttgtcctagagcagcatgttcagagttgagtaggttttgggggggtgtttttgtggttttttttaatcacccatgctggagtgcagtggtgccatcatagctgacagcagcgttaaactcccgagctctagtgatcctcctgcctcagccttctgagtagctgggactacaagcgtgcaccaccacacctggccattttttttgttgcagagacagggtctcactatgttgccaaggctgatctcaaactcctggcctcaagttattctcctgccttggactcccaaagcactggaattacaggcgtgagtcataacacccagctcccacctttagaatttttgattcagtaggtcagggttgaggcctgataacttgtatctctaacatcttcctagtgaaactgatgctgcttgtccagagtgctctctgagaattactgccctaggaccaatattgggaattgggaagccttgctcagtctccaaaatatctcctccacaagccaaatgtggtgaatcttcctccctcactggctcagtcctttttctccagtggatatatgcaaggaattctaagaaaattaaggggcacacactcaaactgatgatagctgctttcctgaaggcaaaatttgtagttgagggaagaatagggagcctctgaacacctgagggtgcaagggtgcactgttccacacaaagaaagatagatgcagagaaagccaggggcatacaaacaagtttcatcgagtttcagaggagcagctcagcatcctcatttcccccttgtgagtcttgaccttgaacatcagcagccatctgagtttttacctgatattctgaactcactcaaggttgtttttttttaagcaatcgaacaattgctgtttctttgggaaacagtttcctgtggggaaaatttaatgcattgcctttgcaggctggagccagtacaatcatattctgatggtttatcaaattgatttggctatagctcagattcatttgatagttcagattcaaacactgagttatttgtataagaatggttctcttccattaccagtgtacccacagtcctatagatagtaaattgcctttttatccagcctgggatcatgaaagagaggtcttctagccatctgtcagtgtagtatacaccagaaatgtgctctcacttatggaaatgattgacctgtaataacatctttgctgggaaaaatagaaattgttcaaatcaaatttgtggcactggctataacacactttattaaatggggcacagagtgctttttaactcctgcctctcctgcctcagcctcttactaccctcctacccatgcagtctctcttgctactctgtatctcaaaatgaagagtactaacaatgtggaaacaattttaaattactaagtctcttctgtgcaagtcataatcccatggggtatccactggtcttttcaagatttaaattctcaaaactactcactatctgaatatagcatgtgttgcaacgttaaaagtgatatttttaaaagaaagaccaaaatcattagaagagaccagcctgaaagataaagtttaaaaacaccagtccacaactacccctccccgcttgtccagcccaccagttccaggcacaagggcaggaataaagtaaacattctcaagcactcattgagggcatcaagtcttacatgacatacatttagtggatgttgattaaacacctactgtgtgtctggcaaggggtaagaaatatatgtgaaaacagaaaacagtacctactgtaatgcatctggccaagggatgaatgttactccccagtacaatgagcactgcagaaattttcacaaatggctatagtaatatacagcagatgcctaataaacccttgtcatcatgtcacacaatgacttttaacacgtgaagtgatagtgtgggaggagacagcctctgtcatcctaggcctgaatttctgcaaaagccacgttgtccccttcctaccctcagtcctttccccttccattagtttaccaactatttattgaacacccaccatatgctggtatcaaggttctcaagactaatcttacaaaaatccagctttgaataaaccattcttctgctcatataaatcctaaactcttctgcatgactatcaaggctcagagatctaatcccgtcccatggttccctttactcctccaagtatgattgcccagaataactattctaaataaccctccctcactgtgccatgatttatgttctgggcctctctctaagcctatctttagcaaatagtcattgtattagtcaaggttattcaaagacagaaacgagagagagagagagagaggagaggggattttattattattattatattttaagttctgggatacatgtgcagaacatgcaggtttgttacataggtgtacacgtgccatggtggtttgctgcacccatcaacccatcatctacattaggtataactgaaggagacagagacacgaaaaacccctcaaaaacgtcagtaaatccaggagctggcttttggaagagaataacaaaataaacagactgctagccagactaatgaagaataaaagagagaagaatcaaataaacacaataaaaaatgataaaggagatatcaccactgatcccacagaaatacaaactaccatcagagaatactataaacacctctatgcaaataaactaaaaaatgtaaaagaaatggataaattcctggacacatacaccattccaagactaatccaggaagaagatgaatccctgaatagaccaataacaagttcagaaattgaggcagtaactaatagcctaccaaccaaaaaaagcccaggaccagacagattcacagccaaattctaccagaggtacaaaaaggagctggtaccattccttctgaaactattccaaacaacagaaaaagagggactcctctctaactcattttgtgaggcagcatcatcctgataccaaaacctggcagagacaagaaaaagaaaaatttcaggccaatatccctgatgaacatcgatgcgaaaatcctcaatgaaatactgacaaactgaatccagcagcacatcaaaaagcttatccaccacgatcaagtcagcttcatccctgggatgcaaggctggttcaaaatacacaaatcaataaacataatccatcacataaacagaaccaatgacaaaaaccatatgattatctcaatagatgcagaaaatgccttcgacaaaattcaacaccacttcatgctaaaaagtctcaataatctaggtattgatggaccgtatctcaaaataataagagctatttatgacaaactcgcagccaatatcatactgaatgggcaaaaactggaagcatttcctttgaaaactggcacaagacaaagatgccctctctcaccactcctattcaacacagtgttggaagttctggccaggacaatcaggcaagagaaagaaataaaaggtattcaaataggaagagaggaagtcagattgtccgtttgcggatgacatgattgtatatttagaaaaccccatcatctctgccccaaatctccttaagctgataagcaacttcagcaaagtctcaggatacaaaatcaatgtgcaaaaatcacaagcattcctatacaccaataatagacaaacagagggccaaatcatgagcaaactcccattcacaattgctacagagagaataaaaatacctaggaatacaacttacaagggatgtgaaggacctcttcaaggagaactgtgaaccactgctcgaggaaataagagaagaggagatttcttagggacattggctcacatggctatggaggctgaggagtccatgataggctatctgcaagctggagaaccagggaagctatagcatggcttggtccaaacttgaaagcttcagaaccggggaggccatctaattctcagtccaagcaagaggcctgacgtgcctgtgtcaacaaggagacagacatgcactggggagtaagtagaatgatacattgggtggactgacttgaacaccatccagtgttcaggtgttggattgggaagaggcctgagaaccagggaaattgatggtataactctgagtctgaagtcaaagtcctgagaatccaagggggtgggggagggaaactggtacaaatccctgagtccaaaagcctgagaacctggagttctgatgtctaaaagtaggagaagaaggggtacccagcttctgggtgagggcatatcttccttactcaatccatggattcacataccaatctcttctggaaataccctcagacacccagaaatagtgctttaccaactatctgaatattctttaatcccctcaagttgacacctaaaattaactatcgtggtcacaataatgtactcccatgaagatgtgaataactgatgtctttttttgttactaccccccacccacgcccatgtatatttgcatcataaaaatggagagtgttttcataaaggaattaaaatcaaacatctgatttttaggccatgcagaagaactgtagccaacaaatagacctgtgtgtgtatgagtgtgtgtgtatgttttaggagaacagagcaaaaaagggaatatactatagttaagtctctagccaagatctgaacaagatctacttatctcatctttgtccctggctaatataaatttctatggaattttcttaatccatggagatactagagatatgttgtattttctgtcagttcaaaatttggaagtcttgacaggttccatgtttgatcacttcagacagtaagctttaagtaaacacctccacaaagacttttatttccctgtcatccaggaaccacttttgcttaaaaatttgctttactgaactttaagtgactttgcctctttcttaccaagagctccctccttcaacatccaccaatgaaagatctcaatcccagggcactgacaagatgccttcgtctcacagcatcaaagccaccatgtgcaaatggcagcagcacatatgtcttgtagccgtgataagaaggaatccaaaataacaagctagctccagaacactgagcaacggaaaggcaatgaagtttaccaaggaggcttcccaatctaacacctaaacactggattgcattcaagtcaatctacccagtgtatcattctgcttactccccaaggcatgtctgtcttcttgttggcattgcacaaggttgctccctttcttggtaacttttatattctcagccacatatacttacctgctgcagaagcaccattttcctgagctcactttaagtctagatttctggatttctcggtctgcctttcattcatctccccttagaattagctcttttgtaaaattttctccagcctctcatttttattacaatgctgagtcatgtctgcttatcagacaactacttactcaatagatttcatgagcccaaatctatgccagaaatgatacagaacacaaaagcctgctctcagggcacttgaaatctggctgaggagacaaacaaacatacatgaaaagacaaccataggaaacaatagaagacataacacaaggtgcaatattctgcaatttctggaagtcggagaacatcacagttggctggggtgatctgtctatttcctttcctaatccttctccaatgtcactccccagtatatcttctaacaaagcaataagtttctgggtactcactacatgaaaggcaccgctgagaatgcgagagccttataccttcaaggagagataaaatacaaatagctagtacataaagcaaaagatagtcagtggtaaaagaggcagaaagtatacagactataatgctatcgcactcttactggttttcaaggaaaaaatacttcttcaactgttaaacattatggagacctcagtggagtttgttttggttctctattgcctcattaaaatttaatggcttaaaacaaccattccattttgctcacaattttgtgtcagacatttggatggctggccctgatccatgcaatgtcagctcaggcggctgactgcggggcggggggtccacttccaagtagtccccatcacttatgtgcctcacacatctgtgtttattgggtgtgtgtgtgcatttgcatgtgcatttgcatgtgcatgtgtgtgtgtgtgtgtggtgtcttctctaactctgtccatacgggttctcattctccaggacctgtctgcatggtttaggcttttaccaatatggcagccttaaggtattcagagatctttcatggcagctgaagactctgttaagaccaatgtagaagatgtcagtgctcttaaaggctagatctataatgaatagcaacatttctatcatattcttttatccgaagacatcacagttctgcccagattcaaggggagaacaaatagacccgcaatgggaaagagtgtaaaagaatttgcagtcatctttaatctaccacagagtatatgagataatgggatgatattccatggagtataaaaatttgtttctctttagaatcttcaattaatccaatttttatactgtaaactcaagggggagacataatcaagaaaaataacctgctttgtattgctcgttttgaaaaatgtgaaaaatgttcatgagaggcaatgatggtcttggtctaaattgttcctaaaggacttctaaaatgttttttttaatctcatttcttggagggagtcctgaattgttatagacaaaacagggagttgggtctcaacctttgttctttccacatttgagaaaaaaagaggaacccaaatgacagataagaactcagtcacagaaaacagggcaagtgtcactaacagaactggctagaagaggcgttgccaaaagagagaaaccagaaagatctcctgtagcaaagaaaaaagttggaaatctctaaaacaatgggaagtataaatggagagaaggcagagacagcagcagagatcaaagattcatcaaagagacaagggttcatggaccagactctgatctccagggaccccaaatctgaagaatcataatagggagggagctagacaagatgccctggaccaccagaacgtttaccttgtggtgatagcaatgagtgttgtgagaagtaattagattccagatgtatgtggtataaaaagtcaagaagtttttctgagagttttgatatagggtatgagagaaagagaggagtccaggtaggcatcaaagtttttgcatgaacaactggaaaggtggaacagattttcagaaaatatcaggaaggccatttttattattcaaagtctgacctgcatattagacaactaagtggagattataaggaggcaattgaatatgactctggggttcaagaaaaagaagcaacccagaaatacaaattttagcgccatcagcatataaattgtgtttatgtcataagactggataagcttatctgcagagtaagtgaagattgagaaaagaagtctaggcactgagttcattggcactcctaaagttggaggtcatggaggaaccagcaaataagaagaaactttcagcgagctaggagacaattattactagagatacagaaagttaccaggaaggcataaaatgtataaatttgtatgagccttaaaaagtcatcaaacatataaaaggcaaaaattgacaaaactagaactatacaaatccaaaatcattgttggagatttcattataattttctcagtagtgatagaacaaagaagcaaaaaaatcagtaagtatataggagatttgatctaattgacagctaacaaagaggggactatgtataaaatacacacacatacaaatgcacacacacctaacaaaggtaattgttctgaaaatgtaaatcttcctgaacatcaaacaggggatcagtagtccagagattggcaatagtaaccactactaaccctaggacttgaggaacaaatgaggaagtcatcttactgatgtccaggaactggggcaactggtagaagctggatcctccaaggatctgttcaacgagagctgaagtcacagagaagactcagttgctgcctgagacagagaagggatgagatttgcacttttacctattctccagtatcccactagtgccatttgctaaacccaattgaaagctgattgataaggtggtacctgggaaatggaactgcagggatcatccttcctgcaacacagagaagagcgtagagaagggcataacatggatgtgggagaaaagaggcaaatgatcaacacactgtatacagtgacttgtccttcatcctaagagcaatggggagtcattaaagggtcttaagcaggaagtcacaatctaataggcattttttatatctgcagtactaagattgcaatagatggtcatgagggcagttataagacctttgcatttgtctaggcagagattgtggtgacttagaccaaagtcacaggagaggagggaagtaggctgatttgaaacacatttaaaagttaggcttgagagaacaagacactgatgtcccatgagggagtcaaggatggcacccaggtttccattatgaaaaacaggggaaactggaagagtcatttgctgagatggaaaaaacaaggaggaacatatttacaagaaagatggtaacttcagttttgatgcaagtcatcaaaatggtggagttcaaagaacaactgattatgtggacctggagctcaggagtaggatctgaatggggacacacattttggaagccatcagcacatgcctggtatctgaaactaagggaatgaatgagatcacctgaaaagattgggtatagtcagaaggggtctaggtataaagatatactaatatttaaagaacagataaaagagaagtaaaacaaaagcatcagaaagaagtcaacggagatgtcagaggaaaatatgtcaaggagaatatgacgccaagaaagagagtatctcaaaaagaaggagcattctacctgtgaaatgtaattacaaaatcaaggagatcagagctaagacatggccttagtgagtactatttcccgagaggctgaagagaaactcaactgaattgtgagatgaggaaataaaagcatgaacaactagtataaatttgcttgggaaatggaagtgacaaataaggcagtagttagggatgggtttcactggacaataggaagccattataaatttttgagcaagataattatacaatgaaagcaagactttgaaaatgtaattttcaccagattgtgagaacatatggggtagcaaatatatattcacacccccaagtttcattactctgagtgcctactgctttgatttacagggaatgccaacattaaaagactcttcttactcaagtatatccaagggtccccaaggatgctaaaatgaactcatcctggtcatcacttgctaccatccccatcagaagtacccactcacggccaagctgttggccccaccaggtccaagctggtgccatttaaatctccttgttctcaccagccggtcttggttttgaaggttgcaactaccagtggtgctgccagaaaagcgcccacatcactggtgctgctgccagaaaggatggaacttgcagcccatcaggggcagggacctggttaaactggtcatttgtgctgaggtctaatggacaggcagagactttcctaccaaacaagaacaactttctctctctcacactcagtgttatgtttactaagaatagttgccagacactaagtgttgtctgttggtcaggaagttctttatgcactttaactcatctaattttaacaacaaccctctgaggtacacataggatttttgtcttcccattttacagctgaggaaactgaaacatggagaagtgacatacttgaccaaggtcataaatctaatagggagaggggcaaggtacatatgcaggcaggtctgctgtagacgccaagttcgtaaccaccactctgtactgccacttggactttgtgctaacactgcccctaccgcctgccagactcttcttcctcttgtagtatatttccttcttgtccctttttctgaaatttggccacagattctactccagctcatcagaaatatttttatagctagttttatggtacagacaaatggtctcaatcccttagtcccatgcaaattagcaggtacaaatagactgtagaagggaaggtggctaattctactcaccagcaacacttaggccccaaattagccaggatgtaagtatatccaggaatcagagtggcctgttatctaactcctcctaccaggaacagaaggaccaggactcctacagaaccaaatgtcctattagccaaatatccatctggccaaggtgtgttggaggaaccggagtctctctcctcatccatgtaagaatatcactagtgtgtctgctattttgcctgctaaccaagagcagaaagttttaggtccatagtaatcctgttatatttaccttttctctttatagagatatttcaagaacaaggatccattccctgcctagctatggcttagaaaatcttaagaagctgagggccaggtcgacttacaacttaaaaaagctgcctactctggaaaagcttgtcgccctcatggaagccagcctcacctatcccagccattgctgtgcctttgcaaactggagacggcaaatgtgagtccatcctttaagccctgctcaggcatttccccaatgtagaactttgtccacaatttctacctatctgtgacatgaagagaatctacttgcagagagttccctgtctcaagccctttggcacattctgggtcaaaaattcagttcatggagagtgaggaatagttgaactctttcatttctttgaaagtgggctcacaggagagggctacccatgtggcagaacatataccaagtactaaatgagaaaacatgaaaaatactaagcatagtgcctcagagttggtgcataatatctgttccctctttcctttgtaccattatagatttaatccttcaagtcccaaactgtgcacctgataaatgccccatccgtgtcatctttggtggggagatgcataaatgccatgccagagactgatgtacatatctgccgcacatcccaatcactctaagcctctctaatccaccttgggatcttcctacctcacagggaggataaagattaagacatctcattactttggctttcaaagaaagccgggttcaaggaagcccagacttaaagagggccatctaaacagagacaagtcttagtagctaactggttaaaaaagtgaggtaatcatagacaggatctggaaagagtaaagagaaagtcgccttggagattgtacacatgttccagacatttaaatgatccattggaggtaagaacttactgagtatcagagttctcaaagctctcacgctcctctgagctcacctacataagccacaccatgtagttgcactcatcaaatgatgtcttttcattactcttatatactagcctagaactaatacagctttcctatgatattatttctctgtttaacacagtctcctccattattcaacctttaacatacattgaccagtccatgtggacatattccttgctccaaagcaaaacaaaaagagcaacaaaacagtacccaccctaaaatgtttttcagagtagctggaagtccctactcagacccttttggaggatttgtagaaaaatagctgtttttcagaatctgcatgcatcattgggatattatccagaatgggcactcttcatagatcagctcaagagccaggaaatttcttcctgacaatcagaattcttaaggtcctgggctgaagcagtggcttgcctcttttatattccagataagaattattctatccagagtgagaaagataccaattttgcaccaagtccatgggactgaataccccaaaggagaaataaagaacattaagattggccaggcaaggtggctgacacccataaccccagcactttgggaggccaaggcggaataactccttgagcccaggagtttgagaccagcctgggtaacatggtgggacctcgtctctacaaaaaaaatgaacaaaattagccatgtgtggtggcgcatgcctgtagtcccacctactcgggaggctaaagtgggaggattacttgagcccaggaggtcgaggctgcagtgagctataattgtgccactgtacttcagcctgggcagcagagtgagaccctgtctttaaaaaaagaagaaaatgttaagatcactgtgagagcagcttgcagtgtgctatttggcccagttccaacacaccccaagaatttgttgtctcatcgtgttactcagactcctctagacatagcctcaaggctctcccaaccagaatctccacatctaccttatattgtcacaggacatgaggtcttctctgatccctccagaccactcggctctcatccctctaggttgctgctctaacttaccatccaggcctgttggggtatagcaagggagaggaacatggttcttacactacatgccaaaatggagtaacaaaaattgtgataggtggttttcattttttatttttagcaatgggtatttgattttcatatttatcaaattcacacacaaacaacacaaaataattgttattcagaagataatttcagatttattccttcaatagtgacatttcattgtatatcatagtagatgtggtttggtagcgggattcaagttttaacttgtatgatgaaattcttcttttgatcctcatttggaaataatgcccagagtgtaaacatgaggcccctgtgactaaaactttggccagtggtcctcctggactcttcctgggctcttcccaaaagttcgtatcaactacagtcttcatttgtcattgaacctgatatttccttgtcataattctgtattcattttgcattactttgctctcattttattcttcaatttttaatgttaaatacaataaaaattgtgtttcttcacaactcaatgttgtgaaggccatttcttcacaattcaatattaaattgacatgctgttgcatatgcttctaagtacccacacagggcctagacctcaagaattccataagtaaccaccatcatttgtcttcatactgctgacatttgccaagtattcactaccaagcactgtaatactctgtatctttatttcatttaattcccacaatggtaatatcattattattcctttctcacagagacagaaactaaggctcagagatactaaataacttgacctacactgaccaaacagatccaaatctggtctgcctgcctccaaagcttaggctctgcgacactgctatgccacccccaagcatctgttcactgactgatcagagtccaagagtgccactttttcaactgaccctaaactgaattcccaactccttatgataattaggattttccaaagtactgcggaggcaagacttgatgtcctttggtttccacttttgtttctgttcttatctcagagacataagttatttacttttctccttacttcatgtcagtgggtcacttcagtttcagaaaaagagaagcacaatatttaaaatatatggacagcagtatcaacaataagaaccttcacagacagcgaccataagccataggaagtgaaggctgtttctagagagttaagtcagagctcagtccaatgaaccaaactgcagtcagcaagtaccaggttacttactttctcttcctggaatcaggctgcaactaattcagtaacagggtttaagagtctagagttagactaaggaccacaggatacccctcttctcccctctatacccattatggagcttgcctcacctttcttggaagaccattgactaaaccagaacattttctgggctccgtttccattcactttcaattctgtgtatgttaatcatttagccttaaaaaaacaaacaaacaaaaagaatcccttaggccaagagaaaatgacttcctggcaattcaattcacttcccaggggtgagagaagagaggagagcactcttcctaacagacccttctcatccaggttgatggggcaaggttcagtccctgtataataggttggaacacctggcaagactcatcctttagcatcaaatggagtctttacctcctccactcccctagccacctttttccttcttaagaaggtttgatacttacttcgccacttatatctgaggttatgtcaaggtttaaaaaaaatacagtcaacttaatattgctgtgaacttgccccttggggaaggagggaaaggtatgcatgtgtatgtacaattttttttttttttttgcatccaaaaaggtcctaacgtaaggcttattcccattccacaagcctttgcttccaaacagaagtattacctttcttgtttctacatccagagtattgatatactactctggggtagaatatttatgggtatactcgtggattgaatatttatcacctggatttcattcaaatccctctgtaagtacctctatcctgttgacaaggccccttgtacatttgggtttaaaggcaaaaccaagacagtaaagtgagcccaaggagagctaggctgcccagaggatgagttccattcttagaataaattaggtccttttgcagcttgcattgttctttggggcactcactaggaaactgttcaatatgagagagccaggcttaccttgcagacaagcacatgctgaggcctattgtggcccccagaaagtgagataataaagaacaggaaagaccctggtaacatttccggcaaattagctggcctcctaatagcctgagtaccaaagagccagggaataggggctggctgggaactaactacagattttgatcccctaatttatgtagataagagaagcaaataagttctcatttgagtcagcgaacagtctggatcttccagtgatttgagtgtagacgaataggaatatgtcctactcaggtgtattaagagatagctggatcaagatgggagaaggaaaagggtcgagttgatgccagctctgtaaattattttcacttaacagcaaggcttagtctcaggtgccttcctccccacattcaggttgtggcaagatggtttccccagtgagccatccaactctagtaatatatatacaagttgttatattcatttacagtaagcagcattaacccttgaggttagcctcaagggcaggtatgatgtgagaagaaaaaaaaaaaatctcaggaagaaactcatcatttctaccctgcacaaagacagtgatgtatttgctatactggatctgagatgttgattctatttctttttgtatttttctagctctgagcttcatccaatttgcaacaaatctattttaaggcaagaagttgattatatgactcaggctaggggtcagagatcctctctggcagaagacaatgagtccagctacagcagaggatttgacatgacgtacactgagtttgactatgacttatgcaatgaagtggttgacgtgacctgctcccctaagccagatgcattcaacccatgtgaagatatcatggggtacaacatcctcagagtcctgatatggtttatcagcatcctggccatcactgggaacatcatagtgctagtgatcctaactaccagccaatataaactcacagtccccaggttccttatgtgcaacctggcctttgctgatctctgcattggaatctacctgctgctcattgcatcagttgatatccataccaagagccaatatcacaactatgccattgactggcaaactggggcaggctgtgatgctgctggctttttcactgtctttgccagtgagctgtcagtctacactctgacagctatcaccttggaaagatggcataccatcacgcatgccatgcagctggactgcaaggtgcagctccgccatgctgccagtgtcatggtgatgggctggatttttgcttttgcagctgccctctttcccatctttggcatcagcagctacatgaaggtgagcatctgcctgcccatggatattgacagccctttgtcacagctgtatgtcatgtccctccttgtgctcaatgtcctggcctttgtggtcatctgtggctgctatatccacatctacctcacagtgcggaaccccaacatcgtgtcctcctctagtgacaccaggatcgccaagcgcatggccatgctcatcttcactgacttcctctgcatggcacccatttctttctttgccatttctgcctccctcaaggtgcccctcatcactgtgtccaaagcaaagattctgctggttctgtttcaccccatcaactcctgtgccaaccccttcctctatgccatctttaccaaaaactttcgcagagatttcttcattctgctgagcaagtgtggctgctatgaaatgcaagcccaaatttataggacagaaacttcatccactgtccacaacacccatccaaggaatggccactgctcttcagctcccagagtcaccagtggttccacttacatacttgtccctctaagtcatttagcccaaaactaaaacacaatgtgaaaatgtatctgagtattgaatgataattcagtcttgcctttgaagggtatgtcacaaagagctgacagtgcttctacacatttcatctaatttaatattcctggcatacctttaaggtaaattggtcaggaactattaattccatgtgatacattaggaagctgaattattagtaacaacaataataa

SEQ ID NO: 1170 - protein, 604 aa, Homo sapiens
MLSAILPTARLLLRLCFPGKPGQYNQTLGRILGRLISNTGIKHLPDVHKIHSLQKVLLDIQDNINIHTIERNSFVGLSFESVILWLNKNGIQEIHNCAFNGTQLDELNLSDNNNLEELPNDVFHGASGPVILDISRTRIHSLPSYGLENLKKLRARSTYNLKKLPTLEKLVALMEASLTYPSHCCAFANWRRQISELHPICNKSILRQEVDYMTQARGQRSSLAEDNESSYSRGFDMTYTEFDYDLCNEVVDVTCSPKPDAFNPCEDIMGYNILRVLIWFISILAITGNIIVLVILTTSQYKLTVPRFLMCNLAFADLCIGIYLLLIASVDIHTKSQYHNYAIDWQTGAGCDAAGFFTVFASELSVYTLTAITLERWHTITHAMQLDCKVQLRHAASVMVMGWIFAFAAALFPIFGISSYMKVSICLPMDIDSPLSQLYVMSLLVLNVLAFVVICGCYIHIYLTVRNPNIVSSSSDTRIAKRMAMLIFTDFLCMAPISFFAISASLKVPLITVSKAKILLVLFHPINSCANPFLYAIFTKNFRRDFFILLSKCGCYEMQAQIYRTETSSTVHNTHPRNGHCSSAPRVTSGSTYILVPLSHLAQN

SEQ ID NO: 1171 - DNA, 772 bp, Homo sapiens
  source
  (1)..(772)
  CDS (201)..(572)
tcctaattcatatatgcttcagtttccttgtacaaaaaataaatggggctactcattttaaaattcattatgttatttaaaaatctaaattaatattttaatgtttcagcacaaagtctgacacatgggtaaatgttacatgtgtaggagatgataatcacttttattattatcatttcagattttctctaacaacaaccatgtcattagctgaaggaaatcagagttctggagccgtatttaccctcttgggcttctcagaatatgcagacctccaggttcctctgttcctggtcttcctgaccatctacacaatcactgtattgggaaacctgggcatgatcatgatcatcaggatcaaccccaaactccacacccgcatgtactttttcctcagccacttgtcctttgttgatttctgttattccaccacagttacacccaaactgctggagaacttggttgtggaagacagaaccatctccttcacaggatgcatcatgcaattcttcctggcgtgtatatgtgcagtggcagaaacattcatgctggcagtgatggcctatgattgatacgtggcggtgtgtaaccctttgctctacacagttgtcaggtcccagaaactctgtgcatcattagtggcagggccctacacatggggtataatctcttctctgacactcacctatttcctcttgtcattatccttctgtgggtctaacatcatcaataattttgtctgtgagcactctgtcatcatctctgtctcctg

SEQ ID NO: 1172 - protein, 123 aa, Homo sapiens [sequence omitted]

SEQ ID NO: 1173 - DNA, 976 bp, Homo sapiens
  source
  (1)..(976)
  CDS (201)..(776)
ttctcaaggtgtccaagacacacagagccacggaatctcacaggtgtctgagaattcctcctcctgggactctcagaggatccagaactgcagccggtcctcgctttgctgtccctgtccctgtccatgtatctggtcacagtgctgaggaacctgctcagcatcctggcttcagctctgactcccccctccacacccccatgtacttcttcgtctccaagctgtgctgggctgacatcggtttcacctcggccacggttcccaagatgattgtggacatgcagtcgcatagcagagtcatctctcatgcgggctgcctgacacagatgtctttcttggtcctttttgcatgtatagaaggcatgctgctgagtgcgatggcctatgactgctttgtagccatctgtcgccctctgcactacccagtcatcgtgaatcttcacctctgtgtcttcttcattttggtgtcctttttccttagcctgttggattcccagctgcacagttggattgtgttacaattcaccatcatcaagaatgtggaaatctctaattttgtctgtgacccctctcaatttctcaaacttgcctgttctgacagcgtcatcaatagcatattcatatatttcgatagtactatgtttggttttcttcccatttcagggatccttttgtcttactataaaatcgtcccctccattctaaggatgtcatcgtcagatgggaagtataaagccttcgccacctgcggctctcacctagcagttgtttgctgatttgatggaacaggcattggcgtgtacctgacttcagctgtggcaccaccccccaggaatggtgtggtggcgtcagcgatgtacgctgtggtcaccccatgctgaaccctttcatctacagcctgagaaacagggacattcaaagcgccctgcggaggctgctcagcagaacagtcgaatctcatgatctgttccatcct

SEQ ID NO: 1174 - protein, 191 aa, Homo sapiens
MYFFVSKLCWADIGFTSATVPKMIVDMQSHSRVISHAGCLTQMSFLVLFACIEGMLLSAMAYDCFVAICRPLHYPVIVNLHLCVFFILVSFFLSLLDSQLHSWIVLQFTIIKNVEISNFVCDPSQFLKLACSDSVINSIFIYFDSTMFGFLPISGILLSYYKIVPSILRMSSSDGKYKAFATCGSHLAVVC

SEQ ID NO: 1175 - DNA, 1440 bp, Homo sapiens
  source
  (1)..(1440)
  CDS (201)..(657)
  CDS (774)..(1240)
ctaagcctaggtgggaaggtgactgcatccacctttaaacacggggcttgcaacttagctcacgcccgaccaataagagagcttactaaaatgctaattaggcaaaaacaggaggtaaagaaatagccaatcatctatggcctgagagcacagtgggagggaaaatgatctggatataaacccaggcattcgagccagcaatggctaccctctatggatcccctccctttgtatgggagctctgtcttcactctattaaatcttgcaacagtaaatatatatatatatatacatgtccgaactatacagacccacagaatctaacagatgcttcaaaattcctcctcctagaactctcagaggatccaaaactgcagctggccctcgctgggctgttcctgttcatgtacctagtcatggtgctggagaatctgctcattatcctggccgtcagctctgacttccacctccacacccccatgtacttcttcctctccaacctgtccttggctgacatcggtttcacctccaacacggtccccaagatgattgtggacatccaatctcacagcagagtcatctcctatgcaggctgcctgactcagatgtctctctttgctgtttttggaggcatggaagaaagacatgctcctgagtgtgagggcctatgaccggtttgtagccatctgtcaccctctatattattcagccatcatgaacccatgtttctgtggcttcctagttttgtgtttttttttttctcagtcttttagactcccagctgcacaatttgattgccttacaaatgacctgcatcaaggatgtggaaattcctaatttcttctgtgacccttctcaactcccacaccttgcgtgttgtgacaccttcaccaataacatagtcatgtatttccttgctgccatatttggttttcttcctatctcacggatcattttctcttactataaaattgtttcctccatgctgagtgtttcatcatcaggtgggaagtataaagccttctccacctgtgggtctcccctgtcagttgtttgcttattttatggaaaagtcgttggggggtacctgagttcagatgtgtcatcttcccccagaaagggtgcagtggcctcaatgatgtacacggtgatcacccccatgctgaaccccttcatctacagactgagaaacagggacatcaaaagggtcctgtggtggttgcatggcagaacagtttaatctcattattttattatctgttccattccttttgtagtgtgggttaaaaaaggcagcaaggtcaaatacgaataatatcacagggtgaagacccactgtgatattaagagtaatagctccctaggatatgaaaaatactatcacagagtgtacacacatggagtacacccactgtgatattagaagccatatttccctaa

SEQ ID NO: 1176 - protein, 307 aa, Homo sapiens
MATLYGSPPFVWELCLHSIKSCNSKYIYIYTCPNYTDPQNLTDASKFLLLELSEDPKLQLALAGLFLFMYLVMVLENLLIILAVSSDFHLHTPMYFFLSNLSLADIGFTSNTVPKMIVDIQSHSRVISYAGCLTQMSLFAVFGGMEERHAPEYSQLHNLIALQMTCIKDVEIPNFFCDPSQLPHLACCDTFTNNIVMYFLAAIFGFLPISRIIFSYYKIVSSMLSVSSSGGKYKAFSTCGSPLSVVCLFYGKVVGGYLSSDVSSSPRKGAVASMMYTVITPMLNPFIYRLRNRDIKRVLWWLHGRTV

SEQ ID NO: 1177 - DNA, 877 bp, Homo sapiens
  source
  (1)..(877)
  CDS (201)..(677)
ctgtattttctagcaattatgaatttgttatatatgatgatctggttcttggaacattcttgaatctattgtctctaaggcaggtgtgtacagcaagaagtgaataacacagaaatcaatgatgaaagcactagaagacaattgagtttatcagaactgcaaaatattgctgagtgtggattgctctgaaatctgaaaacatgacttgtgaattgcttctattcaaaatgcagacacaatcaatgccgggtgttggtttacttgtttcccattttgcaaccctcttttctaggcaaaaggtatccaaactatgcagagccacagaatctaacagatgtctctctattccttctcctagaactctcaggggatccagaactgcagctggtcctcgctgggctgttcctgtccatctgcctggtcatggtgctggggaactgctcatcatcctggccatcagccctgactcccacctccacacccccgtgtacttcttcctctccaacctgtccttgcctgacatcagtttcacctccaccacagtccccaagatgattgtggacatccaatctcacagcagagtcatctcctatgcaggctgcctgactcagatgtctctctttgtcatttttggaggcatggaagagaggcatgctcctgagtgtgatggcctatgactggtttgtagccatctgtcaccctctatatcattcagccatcatgaacccgtgtttctgtggctttcctagttttgttgtcttgttttttctcagtcttttagatgcccagctgcacaacttgattgccttacaagtgacctgcttcaaggatgtggaaattcctaatttcttctgtgacccttctcaactcccccatc

SEQ ID NO: 1178 - protein, 158 aa, Homo sapiens
MTCELLLFKMQTQSMPGVGLLVSHFATLFSRQKVSKLCRATESNRCLSIPSPRTLRGSRTAAGPRWAVPVHLPGHGAGELLIILAISPDSHLHTPVYFFLSNLSLPDISFTSTTVPKMIVDIQSHSRVISYAGCLTQMSLFVIFGGMEERHAPECDGL

SEQ ID NO: 1179 - DNA, 1423 bp, Homo sapiens
  source
  (1)..(1423)
  CDS (201)..(1223)
  modified_base (1039)..(1138): a, t, c, g, unknown or other
gaacctgttggagactaaagggacatgtgtatggagatgtaaccaagaaccggcacacgtagccatccttatgaactgacatgggaagagtggttggaggacagagaatgaacagtgcaaagactctgaggccgtgttcatctgctggaggagatctgtagaacataaaccagggaaacagagaggagttaggtcagcacatgaggtcactccctttatcccacgggttaactgagatggttttaaagacctcggttgtcaggggggttgatttgcatttggatagactttcctttgactataggagattgaacctacaggccacagttctcacttcatcttctcctccctcagcactccatagggttcctccctggtccttaaacacagtacctgcgaatcctgggcccatgccacccttctgggaagcgccaccctgggccaatcagagccgagcacgcgagctggagttcgtgctgctgggttttgcacacgtgccctcactacgcccgatgcttgcagcgctcttcctggcagccttcctgctcacaatgtcagggaactcgctcatcgtcttgctcaccagcctggacttcggcctccgcacgcccatgtacttcttcctgcgccaactggcgctggtagagatctgcttctcactggacgtggcaccccgcctgctggtgaccctgctgcagcctggacgtggggtgtcccccacgagctgtgccctgcagctgctccttgtgctgtcctgtgtcacatctgagtgcttccttctcatggtcatggcctgggatcgctttctggccatctgcaggccactgcgctatggcgccatcatgagcccgcagctgtgctacctgctagctactacctgctggctggcgggaatccctgtggcactcgtcttcaccatctggctctttaacttccccttctgtgggccacgtggcatccgacacttcttttgtgacatagcacctctgctgagcctggtgtgtgcagacaccagagttttcgaggccaatgtgtttgnnnnnnnnnnnnnnnnnnnnnnnnnnnnnnnnnnnnnnnnnnnnnnnnnnnnnnnnnnnnnnnnnnnnnnnnnnnnnnnnnnnnnnnnnnnnnnnnnnnntctttcatcttgcttcgcccatagtcgccatatgttgcaagtgagctgccagcgcaacatcgcaagcgcggcgaccaataggtgatgcttactgcgattaatcagcttcatcatcactgcactcccaaagtggctacgacatcactcgctgtttcgcgggtactgcctttgctggatatagcccggcgagcactgacgcggtgcagattgaagccgtgctgttcgtaaagttcaattacgcgcggtgcggtagaattgctgatcaccacttttgccccccgctgg

SEQ ID NO: 1180 - protein, 340 aa, Homo sapiens
  MOD_RES (280)..(313): Variable amino acid
MRSLPLSHGLTEMVLKTSVVRGVDLHLDRLSFDYRRLNLQATVLTSSSPPSALHRVPPWSLNTVPANPGPMPPFWEAPPWANQSRARELEFVLLGFAHVPSLRPMLAALFLAAFLLTMSGNSLIVLLTSLDFGLRTPMYFFLRQLALVEICFSLDVAPRLLVTLLQPGRGVSPTSCALQLLLVLSCVTSECFLLMVMAWDRFLAICRPLRYGAIMSPQLCYLLATTCWLAGIPVALVFTIWLFNFPFCGPRGIRHFFCDIAPLLSLVCADTRVFEANVFXXXXXXXXXXXXXXXXXXXXXXXXXXXXXXXXXXLSSCFAHSRHMLQVSCQRNIASAATNR

SEQ ID NO: 1181 - DNA, 886 bp, Homo sapiens
  source
  (1)..(886)
  CDS (201)..(686)
aacagaaaaccatctctttcataggttgcctcctgcagatgtacttcttccactcactcggggtcacagaagccctagtcctcacagtgatggccattgacaggtgtgtagccatctgcaacccccttcgctatgcaatcactatgtccccttgactgtgcatccagctctccactggctcttgcatttttggcttcctcatgttactgccagagattgtgtgcatttccactcttccattctgtggcgccaaccaaattcatcaactcttttgtgactttgaacctgtgctgcagttagcctgcacagatacgtacataattctggttgaagatgtgatccgtgctatttccattctgacctctgtctctgtcatcacccttttctatttaagaatcatcacggtgatcctgaggattccctctggtgagagtcgtcagaaggctttcttcacatgtgcagcccacattgctattttcttgctgttttttggcagtgtgtcactcatgtatctgcgcttctctgtcacattcccaccattactggacaaggccattgcactgatgtttgctgtccttgccctacttttcaacccagtaatctatagtctgaggaacaaagatatgaaaaacgccaccaagaaaatcctctgttctcaaaagatgttcaatgcctctgggagctaatggagttcacacacacctcttcaaagaaatctcatcatctccttaagtttaaaatgctaacaaatcagtttttttaaattaccatgcactttttctttttttaacgaaattatttaaagacattttggcatgtattttcaaagtgaagtatctctttaatgatttttaatatgaataacaacagtactaagttttgtgtc

SEQ ID NO: 1182 - protein, 161 aa, Homo sapiens [sequence omitted]

SEQ ID NO: 1183 - DNA, 1363 bp, Homo sapiens
  source
  (1)..(1363)
  CDS (201)..(1163)
gcgttcacatggcaaaagtcaataccatagcccctcatcagtcctctacagttggttgtaaataattctgcttatattacctacagagtaaacattatagcattatcactccagaatcctttgtttctatggtttccagatgtttccaatgtctagatgttccagctgcccatctctgagaaatccagctgtgtctcacaatggatgccacagcctgtaatgaatcagtggatggctcacccgtcttctatctattgggcatcccctctctgccagagaccttcttcctccctgtgttttttattttcctcctcttctaccttctcatcctgatgggtaatgccctgatcctggtggccgtggtggcagagcccagcctccacaagcccatgtacttctttctgatcaatctctccaccttggacatccttttcaccacaaccactgtccccaagatgctgtccttattcttgcttggggaccgcttcctcagcttttcttcctgcttactgcagatgtacctcttccaaagttttacatgttcagaagccttcatcctggtggtcatggcctatgaccgctatgtggctatctgccacccactgcactaccctgtcctcatgaacccacagaccaatgctaccttggcagccagtgcctggctaactgccctcctcctgcccatcccagcagtagtaaggacctcccagatggcatataacagcattgcctacatctaccactgcttctgtgatcatctggctgtggtccaggcctcctgctctgacaccaccccccagaccctcatgggcttctgcatcgccatggtggtgtccttcctcccccttctcctggtgcttctctcctatgtccacatcctggcctcagtgcttcgcatcagttccctagaaggacgggcaaaagccttctccacctgcagctcccaccttctggtcgtgggcacctactactcatctattgccatagcctacgtggcctacagggctgacctgccccttgacttccatatcatgggcaatgtggtatatgccattctcacaccaattctcaaccccctcatttacacgctgagaaacagggatgtaaaggcagccatcaccaaaatcatgtctcaagacccaggctgtgacaggagcatttgacctttaaatgcagctaactctgcttccaggacaccaaataacagtgcttagcacagagaaaggactcaatacatgataatgaaataatgttaatttttattggaatcttaagttgttgtataaaattttactacttagtaattcaagaaacctttactaaaataaaaaaaaaatcttcatggcaaaaaattcttaaaagc

SEQ ID NO: 1184 - protein, 320 aa, Homo sapiens
MDATACNESVDGSPVFYLLGIPSLPETFFLPVFFIFLLFYLLILMGNALILVAVVAEPSLHKPMYFFLINLSTLDILFTTTTVPKMLSLFLLGDRFLSFSSCLLQMYLFQSFTCSEAFILVVMAYDRYVAICHPLHYPVLMNPQTNATLAASAWLTALLLPIPAVVRTSQMAYNSIAYIYHCFCDHLAVVQASCSDTTPQTLMGFCIAMVVSFLPLLLVLLSYVHILASVLRISSLEGRAKAFSTCSSHLLVVGTYYSSIAIAYVAYRADLPLDFHIMGNVVYAILTPILNPLIYTLRNRDVKAAITKIMSQDPGCDRSI

SEQ ID NO: 1185 - DNA, 1009 bp, Homo sapiens
  source
  (1)..(1009)
  CDS (201)..(809)
tagattctaggcttcaaacacccatgtactttttcctaaggcatctggctttcattgatcttggttattcaacagcagtgggacccaaaatgctagtaaactttgttgtagatcaacatataatctcctataattagtgtgctacccaactcactttcttcagtatatttatcagtagtgaaattttcattctgtcagcaatggcctatgaacgctatgtggccatttgtaaccctctgctctatatgatcatcatgtcacaaagggcatgtcaaattctagtggcaataccttatctctacagtgtctttttgactttgctgacagtcacaaaaatgtttacctcatcattttgtggctataacatcatcaagcatttctactgtgatagtctgccattgatatctttgctctgttcagacacagaagacattaaattgataattttaatcttttcagcttttaatttgatttcatctcttctgatagtccttgtgtcttacattctgatccttgtcgccgtcctcaggatgaattctgcagaaggcaggtacaaggccttctccacctgtggaactcacctgacagtgataactgtattttatggcaccttcttctttatgtatgttcaccccaaatccagtcattcacttgatattgacaaaatggcctctttattttatactttgataacacctatgttgaatccaatgatctacagtttgaggaataaagagataaaaaatgctctacgtagaacctggaaaatatgtgcaaatcatctatttaaaattcattgtaggttatgataacaataaattatgcaataacaaatagatactcaaactaatattgctttacatttgtattgttgcctccatgtgatgagcaagaatcagtgtgtgataagcacagaaatagataattttattaattacctttaaataaaaatctatcactaacagatgactaattcctactcatactttaactattaatcaatattcag

SEQ ID NO: 1186 - protein, 202 aa, Homo sapiens [sequence omitted]

SEQ ID NO: 1187 - DNA, 1243 bp, Homo sapiens
  source
  (1)..(1243)
  CDS (201)..(1043)
  modified_base (218)..(317): a, t, c, g, unknown or other
  modified_base (381)..(381): a, t, c, g, unknown or other
  modified_base (618)..(618): a, t, c, g, unknown or other
  modified_base (731)..(731): a, t, c, g, unknown or other
  modified_base (805)..(805): a, t, c, g, unknown or other
  modified_base (831)..(831): a, t, c, g, unknown or other
  modified_base (896)..(897): a, t, c, g, unknown or other
  modified_base (900)..(900): a, t, c, g, unknown or other
aatcagcagggcgtggtggcgtgcacctgtagtcccagctactcaggaggctgaggcaggagaatcgcttgaacctgggaggcggagattgcagtgagccgagatcaggtcactgcactccagcctgggcgacggagcgagactccgtctcaaaacaaacaaacaaaaaacaccaataaagctcgcttttagaatcacaaatggtacctactagtgcnnnnnnnnnnnnnnnnnnnnnnnnnnnnnnnnnnnnnnnnnnnnnnnnnnnnnnnnnnnnnnnnnnnnnnnnnnnnnnnnnnnnnnnnnnnnnnnnnnnnatggtttttttgagtatggagagtaggggaaagaagggggggagagaggggaggggagaggagngagcgggagcaggaacaggcacgacagaggggaagcgaggcacgaaaaaaggagcagggcgacaggagcaagaggagggaagcgagcagacgcacacaagaaggaaggagagagagagaggagaggggagggagagaaaaggggaggaggaggaggagagcggcgggcgagagggaggggaggagcaaagagaagcgagagagaggagagacaggcaacagagcgaggggccggcgngaggagggagcggccaacgcggcaggggccagcggacccagcaaggagaaagaaggggagaaagagggcgggggggccggcgagcggccggggggggggggggggggggaaanaaaaggaaagaaaacggaggaggacagccgggggaggggcagggagggacaacaaaaaccagggcagggggcgntggggccggccgcaaaccacccaagngagggcaggagggtcagggcatgagcgcaccacgaccagagcctgagggaggggcaagaagtctnngangcgcggggggcggggcgggcacggggcgcggagacagagtctcactctgtcacccaggctggagtgcagtggcacgatctcggctcactgcaacttccgcctcctgggttcaagcgattctcctgcctcagcctcctgagtagctgggactacaggcgtgcaccaccacaccaggctaatattttgtattttagtagaggcagggtttcaccgtgttgcccaggcttgtcttgaattcctgagctcaggtaatccgcctgccttggcctcccaaagtgttaggattacaggcgtgagccaccacgctggctaagttgtgccaatatttctaagagaacgggtg

SEQ ID NO: 1188 - protein, 280 aa, Homo sapiens
  MOD_RES (7)..(39): Variable amino acid
  MOD_RES (61)..(61): Variable amino acid
  MOD_RES (140)..(140): Variable amino acid
  MOD_RES (177)..(177): Variable amino acid
  MOD_RES (202)..(202): Variable amino acid
  MOD_RES (211)..(211): Variable amino acid
  MOD_RES (233)..(234): Variable amino acid
MVPTSAXXXXXXXXXXXXXXXXXXXXXXXXXXXXXXXXXMVFLSMESRGKKGGREGRGEEXAGAGTGTTEGKRGTKKGAGRQEQEEGSEQTHTRRKERERGEGRERKGEEEEESGGREGGEEQREARERRDRQQSEGPAXGGSGQRGRGQRTQQGERRGERGRGGRRAAGGGGGGGXKRKENGGGQPGEGQGGTTKTRAGGXGAGRKPPKXGQEGQGMSAPRPEPEGGARSLXXAGGGAGTGRGDRVSLCHPGWSAVARSRLTATSASWVQAILLPQPPE

SEQ ID NO: 1189 - DNA, 5452 bp, Homo sapiens
  source
  (1)..(5452)
  CDS (201)..(5252)
  modified_base (1)..(140): a, t, c, g, unknown or other
  modified_base (145)..(145): a, t, c, g, unknown or other
  modified_base (147)..(148): a, t, c, g, unknown or other
  modified_base (162)..(162): a, t, c, g, unknown or other
  modified_base (165)..(165): a, t, c, g, unknown or other
  modified_base (168)..(168): a, t, c, g, unknown or other
  modified_base (172)..(172): a, t, c, g, unknown or other
  modified_base (189)..(189): a, t, c, g, unknown or other
  modified_base (191)..(193): a, t, c, g, unknown or other
  modified_base (196)..(196): a, t, c, g, unknown or other
  modified_base (199)..(199): a, t, c, g, unknown or other
  modified_base (214)..(214): a, t, c, g, unknown or other
  modified_base (218)..(218): a, t, c, g, unknown or other
  modified_base (221)..(221): a, t, c, g, unknown or other
  modified_base (225)..(226): a, t, c, g, unknown or other
  modified_base (229)..(229): a, t, c, g, unknown or other
  modified_base (232)..(232): a, t, c, g, unknown or other
  modified_base (235)..(236): a, t, c, g, unknown or other
  modified_base (246)..(246): a, t, c, g, unknown or other
  modified_base (248)..(252): a, t, c, g, unknown or other
  modified_base (256)..(257): a, t, c, g, unknown or other
  modified_base (261)..(263): a, t, c, g, unknown or other
  modified_base (265)..(266): a, t, c, g, unknown or other
  modified_base (271)..(273): a, t, c, g, unknown or other
  modified_base (276)..(277): a, t, c, g, unknown or other
  modified_base (283)..(285): a, t, c, g, unknown or other
  modified_base (296)..(296): a, t, c, g, unknown or other
  modified_base (298)..(300): a, t, c, g, unknown or other
  modified_base (302)..(302): a, t, c, g, unknown or other
  modified_base (307)..(307): a, t, c, g, unknown or other
  modified_base (314)..(315): a, t, c, g, unknown or other
  modified_base (334)..(334): a, t, c, g, unknown or other
  modified_base (339)..(339): a, t, c, g, unknown or other
  modified_base (343)..(343): a, t, c, g, unknown or other
  modified_base (345)..(348): a, t, c, g, unknown or other
  modified_base (351)..(352): a, t, c, g, unknown or other
  modified_base (357)..(357): a, t, c, g, unknown or other
  modified_base (359)..(359): a, t, c, g, unknown or other
  modified_base (362)..(362): a, t, c, g, unknown or other
  modified_base (365)..(365): a, t, c, g, unknown or other
  modified_base (367)..(368): a, t, c, g, unknown or other
  modified_base (370)..(373): a, t, c, g, unknown or other
  modified_base (376)..(378): a, t, c, g, unknown or other
  modified_base (380)..(381): a, t, c, g, unknown or other
  modified_base (386)..(390): a, t, c, g, unknown or other
  modified_base (392)..(397): a, t, c, g, unknown or other
  modified_base (401)..(403): a, t, c, g, unknown or other
  modified_base (413)..(415): a, t, c, g, unknown or other
  modified_base (420)..(421): a, t, c, g, unknown or other
  modified_base (424)..(429): a, t, c, g, unknown or other
  modified_base (433)..(433): a, t, c, g, unknown or other
  modified_base (436)..(437): a, t, c, g, unknown or other
  modified_base (449)..(449): a, t, c, g, unknown or other
  modified_base (451)..(452): a, t, c, g, unknown or other
  modified_base (458)..(459): a, t, c, g, unknown or other
  modified_base (461)..(461): a, t, c, g, unknown or other
  modified_base (463)..(465): a, t, c, g, unknown or other
  modified_base (468)..(469): a, t, c, g, unknown or other
  modified_base (471)..(475): a, t, c, g, unknown or other
  modified_base (480)..(484): a, t, c, g, unknown or other
  modified_base (487)..(487): a, t, c, g, unknown or other
  modified_base (493)..(493): a, t, c, g, unknown or other
  modified_base (498)..(501): a, t, c, g, unknown or other
  modified_base (503)..(504): a, t, c, g, unknown or other
  modified_base (512)..(512): a, t, c, g, unknown or other
  modified_base (517)..(517): a, t, c, g, unknown or other
  modified_base (521)..(524): a, t, c, g, unknown or other
  modified_base (528)..(531): a, t, c, g, unknown or other
  modified_base (535)..(538): a, t, c, g, unknown or other
  modified_base (542)..(542): a, t, c, g, unknown or other
  modified_base (545)..(547): a, t, c, g, unknown or other
  modified_base (549)..(551): a, t, c, g, unknown or other
  modified_base (553)..(556): a, t, c, g, unknown or other
  modified_base (559)..(564): a, t, c, g, unknown or other
  modified_base (569)..(569): a, t, c, g, unknown or other
  modified_base (571)..(572): a, t, c, g, unknown or other
  modified_base (580)..(580): a, t, c, g, unknown or other
  modified_base (584)..(584): a, t, c, g, unknown or other
  modified_base (586)..(586): a, t, c, g, unknown or other
  modified_base (590)..(591): a, t, c, g, unknown or other
  modified_base (593)..(594): a, t, c, g, unknown or other
  modified_base (598)..(600): a, t, c, g, unknown or other
  modified_base (603)..(604): a, t, c, g, unknown or other
  modified_base (606)..(610): a, t, c, g, unknown or other
  modified_base (612)..(612): a, t, c, g, unknown or other
  modified_base (616)..(618): a, t, c, g, unknown or other
  modified_base (621)..(622): a, t, c, g, unknown or other
  modified_base (625)..(626): a, t, c, g, unknown or other
  modified_base (639)..(639): a, t, c, g, unknown or other
  modified_base (641)..(641): a, t, c, g, unknown or other
  modified_base (646)..(647): a, t, c, g, unknown or other
  modified_base (649)..(649): a, t, c, g, unknown or other
  modified_base (660)..(664): a, t, c, g, unknown or other
  modified_base (666)..(666): a, t, c, g, unknown or other
  modified_base (698)..(699): a, t, c, g, unknown or other
  modified_base (701)..(701): a, t, c, g, unknown or other
  modified_base (712)..(712): a, t, c, g, unknown or other
  modified_base (718)..(718): a, t, c, g, unknown or other
  modified_base (721)..(721): a, t, c, g, unknown or other
  modified_base (734)..(734): a, t, c, g, unknown or other
  modified_base (749)..(751): a, t, c, g, unknown or other
  modified_base (755)..(756): a, t, c, g, unknown or other
  modified_base (758)..(758): a, t, c, g, unknown or other
  modified_base (760)..(763): a, t, c, g, unknown or other
  modified_base (766)..(766): a, t, c, g, unknown or other
  modified_base (774)..(775): a, t, c, g, unknown or other
  modified_base (787)..(787): a, t, c, g, unknown or other
  modified_base (792)..(793): a, t, c, g, unknown or other
  modified_base (795)..(795): a, t, c, g, unknown or other
  modified_base (799)..(802): a, t, c, g, unknown or other
  modified_base (808)..(810): a, t, c, g, unknown or other
  modified_base (817)..(817): a, t, c, g, unknown or other
  modified_base (825)..(826): a, t, c, g, unknown or other
  modified_base (832)..(832): a, t, c, g, unknown or other
  modified_base (846)..(846): a, t, c, g, unknown or other
  modified_base (860)..(861): a, t, c, g, unknown or other
  modified_base (865)..(865): a, t, c, g, unknown or other
  modified_base (878)..(883): a, t, c, g, unknown or other
  modified_base (905)..(906): a, t, c, g, unknown or other
  modified_base (916)..(917): a, t, c, g, unknown or other
  modified_base (944)..(946): a, t, c, g, unknown or other
  modified_base (967)..(967): a, t, c, g, unknown or other
  modified_base (982)..(984): a, t, c, g, unknown or other
  modified_base (1006)..(1007): a, t, c, g, unknown or other
  modified_base (1011)..(1017): a, t, c, g, unknown or other
  modified_base (1033)..(1033): a, t, c, g, unknown or other
  modified_base (1085)..(1085): a, t, c, g, unknown or other
  modified_base (1119)..(1122): a, t, c, g, unknown or other
  modified_base (1166)..(1166): a, t, c, g, unknown or other
  modified_base (1183)..(1184): a, t, c, g, unknown or other
  modified_base (1200)..(1201): a, t, c, g, unknown or other
  modified_base (1203)..(1204): a, t, c, g, unknown or other
  modified_base (1216)..(1218): a, t, c, g, unknown or other
  modified_base (1226)..(1226): a, t, c, g, unknown or other
  modified_base (1228)..(1228): a, t, c, g, unknown or other
  modified_base (1234)..(1333): a, t, c, g, unknown or other
  modified_base (1336)..(1336): a, t, c, g, unknown or other
  modified_base (1339)..(1339): a, t, c, g, unknown or other
  modified_base (1351)..(1353): a, t, c, g, unknown or other
  modified_base (1355)..(1355): a, t, c, g, unknown or other
  modified_base (1371)..(1371): a, t, c, g, unknown or other
  modified_base (1374)..(1374): a, t, c, g, unknown or other
  modified_base (1377)..(1377): a, t, c, g, unknown or other
  modified_base (1379)..(1379): a, t, c, g, unknown or other
  modified_base (1388)..(1388): a, t, c, g, unknown or other
  modified_base (1400)..(1401): a, t, c, g, unknown or other
  modified_base (1404)..(1404): a, t, c, g, unknown or other
  modified_base (1407)..(1408): a, t, c, g, unknown or other
  modified_base (1410)..(1412): a, t, c, g, unknown or other
  modified_base (1414)..(1414): a, t, c, g, unknown or other
  modified_base (1424)..(1424): a, t, c, g, unknown or other
  modified_base (1429)..(1429): a, t, c, g, unknown or other
  modified_base (1432)..(1432): a, t, c, g, unknown or other
  modified_base (1434)..(1434): a, t, c, g, unknown or other
  modified_base (1440)..(1443): a, t, c, g, unknown or other
  modified_base (1445)..(1445): a, t, c, g, unknown or other
  modified_base (1451)..(1452): a, t, c, g, unknown or other
  modified_base (1454)..(1454): a, t, c, g, unknown or other
  modified_base (1458)..(1458): a, t, c, g, unknown or other
  modified_base (1464)..(1467): a, t, c, g, unknown or other
  modified_base (1470)..(1470): a, t, c, g, unknown or other
  modified_base (1480)..(1480): a, t, c, g, unknown or other
  modified_base (1488)..(1488): a, t, c, g, unknown or other
  modified_base (1492)..(1493): a, t, c, g, unknown or other
  modified_base (1495)..(1495): a, t, c, g, unknown or other
  modified_base (1501)..(1501): a, t, c, g, unknown or other
  modified_base (1515)..(1515): a, t, c, g, unknown or other
  modified_base (1522)..(1522): a, t, c, g, unknown or other
  modified_base (1524)..(1527): a, t, c, g, unknown or other
  modified_base (1533)..(1534): a, t, c, g, unknown or other
  modified_base (1546)..(1547): a, t, c, g, unknown or other
  modified_base (1563)..(1563): a, t, c, g, unknown or other
  modified_base (1565)..(1568): a, t, c, g, unknown or other
  modified_base (1570)..(1570): a, t, c, g, unknown or other
  modified_base (1575)..(1575): a, t, c, g, unknown or other
  modified_base (1587)..(1588): a, t, c, g, unknown or other
  modified_base (1604)..(1604): a, t, c, g, unknown or other
  modified_base (1606)..(1609): a, t, c, g, unknown or other
  modified_base (1611)..(1611): a, t, c, g, unknown or other
  modified_base (1615)..(1617): a, t, c, g, unknown or other
  modified_base (1643)..(1643): a, t, c, g, unknown or other
  modified_base (1646)..(1647): a, t, c, g, unknown or other
  modified_base (1654)..(1655): a, t, c, g, unknown or other
  modified_base (1663)..(1664): a, t, c, g, unknown or other
  modified_base (1667)..(1668): a, t, c, g, unknown or other
  modified_base (1684)..(1685): a, t, c, g, unknown or other
  modified_base (1689)..(1689): a, t, c, g, unknown or other
  modified_base (1691)..(1691): a, t, c, g, unknown or other
  modified_base (1695)..(1696): a, t, c, g, unknown or other
  modified_base (1708)..(1709): a, t, c, g, unknown or other
  modified_base (1724)..(1724): a, t, c, g, unknown or other
  modified_base (1727)..(1727): a, t, c, g, unknown or other
  modified_base (1729)..(1730): a, t, c, g, unknown or other
  modified_base (1732)..(1732): a, t, c, g, unknown or other
  modified_base (1736)..(1737): a, t, c, g, unknown or other
  modified_base (1739)..(1739): a, t, c, g, unknown or other
  modified_base (1746)..(1746): a, t, c, g, unknown or other
  modified_base (1749)..(1753): a, t, c, g, unknown or other
  modified_base (1755)..(1765): a, t, c, g, unknown or other
  modified_base (1767)..(1767): a, t, c, g, unknown or other
  modified_base (1776)..(1781): a, t, c, g, unknown or other
  modified_base (1785)..(1785): a, t, c, g, unknown or other
  modified_base (1788)..(1789): a, t, c, g, unknown or other
  modified_base (1791)..(1792): a, t, c, g, unknown or other
  modified_base (1794)..(1794): a, t, c, g, unknown or other
  modified_base (1800)..(1800): a, t, c, g, unknown or other
  modified_base (1804)..(1805): a, t, c, g, unknown or other
  modified_base (1821)..(1823): a, t, c, g, unknown or other
  modified_base (1825)..(1829): a, t, c, g, unknown or other
  modified_base (1837)..(1839): a, t, c, g, unknown or other
  modified_base (1843)..(1844): a, t, c, g, unknown or other
  modified_base (1846)..(1846): a, t, c, g, unknown or other
  modified_base (1851)..(1853): a, t, c, g, unknown or other
  modified_base (1857)..(1858): a, t, c, g, unknown or other
  modified_base (1862)..(1862): a, t, c, g, unknown or other
  modified_base (1880)..(1881): a, t, c, g, unknown or other
  modified_base (1884)..(1889): a, t, c, g, unknown or other
  modified_base (1893)..(1894): a, t, c, g, unknown or other
  modified_base (1896)..(1896): a, t, c, g, unknown or other
  modified_base (1912)..(1912): a, t, c, g, unknown or other
  modified_base (1917)..(1920): a, t, c, g, unknown or other
  modified_base (1927)..(1927): a, t, c, g, unknown or other
  modified_base (1942)..(1942): a, t, c, g, unknown or other
  modified_base (1947)..(1947): a, t, c, g, unknown or other
  modified_base (1953)..(1956): a, t, c, g, unknown or other
  modified_base (1959)..(1959): a, t, c, g, unknown or other
  modified_base (1964)..(1965): a, t, c, g, unknown or other
  modified_base (1977)..(1977): a, t, c, g, unknown or other
  modified_base (1989)..(1990): a, t, c, g, unknown or other
  modified_base (1994)..(1995): a, t, c, g, unknown or other
  modified_base (2002)..(2004): a, t, c, g, unknown or other
  modified_base (2019)..(2019): a, t, c, g, unknown or other
  modified_base (2031)..(2031): a, t, c, g, unknown or other
  modified_base (2037)..(2037): a, t, c, g, unknown or other
  modified_base (2042)..(2042): a, t, c, g, unknown or other
  modified_base (2044)..(2044): a, t, c, g, unknown or other
  modified_base (2049)..(2049): a, t, c, g, unknown or other
  modified_base (2071)..(2072): a, t, c, g, unknown or other
  modified_base (2076)..(2076): a, t, c, g, unknown or other
  modified_base (2090)..(2091): a, t, c, g, unknown or other
  modified_base (2093)..(2093): a, t, c, g, unknown or other
  modified_base (2099)..(2101): a, t, c, g, unknown or other
  modified_base (2115)..(2115): a, t, c, g, unknown or other
  modified_base (2121)..(2121): a, t, c, g, unknown or other
  modified_base (2133)..(2134): a, t, c, g, unknown or other
  modified_base (2142)..(2143): a, t, c, g, unknown or other
  modified_base (2152)..(2152): a, t, c, g, unknown or other
  modified_base (2167)..(2168): a, t, c, g, unknown or other
  modified_base (2189)..(2190): a, t, c, g, unknown or other
  modified_base (2200)..(2201): a, t, c, g, unknown or other
  modified_base (2205)..(2206): a, t, c, g, unknown or other
  modified_base (2208)..(2208): a, t, c, g, unknown or other
  modified_base (2228)..(2229): a, t, c, g, unknown or other
  modified_base (2244)..(2244): a, t, c, g, unknown or other
  modified_base (2247)..(2247): a, t, c, g, unknown or other
  modified_base (2253)..(2253): a, t, c, g, unknown or other
  modified_base (2255)..(2255): a, t, c, g, unknown or other
  modified_base (2259)..(2259): a, t, c, g, unknown or other
  modified_base (2263)..(2264): a, t, c, g, unknown or other
  modified_base (2271)..(2271): a, t, c, g, unknown or other
  modified_base (2278)..(2280): a, t, c, g, unknown or other
  modified_base (2305)..(2308): a, t, c, g, unknown or other
  modified_base (2322)..(2322): a, t, c, g, unknown or other
  modified_base (2327)..(2327): a, t, c, g, unknown or other
  modified_base (2361)..(2361): a, t, c, g, unknown or other
  modified_base (2369)..(2370): a, t, c, g, unknown or other
  modified_base (2390)..(2390): a, t, c, g, unknown or other
  modified_base (2392)..(2392): a, t, c, g, unknown or other
  modified_base (2430)..(2529): a, t, c, g, unknown or other
  modified_base (2535)..(2537): a, t, c, g, unknown or other
  modified_base (2550)..(2551): a, t, c, g, unknown or other
  modified_base (2553)..(2553): a, t, c, g, unknown or other
  modified_base (2556)..(2559): a, t, c, g, unknown or other
  modified_base (2561)..(2566): a, t, c, g, unknown or other
  modified_base (2570)..(2572): a, t, c, g, unknown or other
  modified_base (2575)..(2575): a, t, c, g, unknown or other
  modified_base (2580)..(2581): a, t, c, g, unknown or other
  modified_base (2600)..(2600): a, t, c, g, unknown or other
  modified_base (2609)..(2609): a, t, c, g, unknown or other
  modified_base (2611)..(2613): a, t, c, g, unknown or other
  modified_base (2618)..(2624): a, t, c, g, unknown or other
  modified_base (2627)..(2627): a, t, c, g, unknown or other
  modified_base (2637)..(2639): a, t, c, g, unknown or other
  modified_base (2642)..(2642): a, t, c, g, unknown or other
  modified_base (2646)..(2647): a, t, c, g, unknown or other
  modified_base (2650)..(2650): a, t, c, g, unknown or other
  modified_base (2652)..(2658): a, t, c, g, unknown or other
  modified_base (2661)..(2668): a, t, c, g, unknown or other
  modified_base (2670)..(2670): a, t, c, g, unknown or other
  modified_base (2673)..(2673): a, t, c, g, unknown or other
  modified_base (2678)..(2679): a, t, c, g, unknown or other
  modified_base (2685)..(2688): a, t, c, g, unknown or other
  modified_base (2694)..(2695): a, t, c, g, unknown or other
  modified_base (2697)..(2702): a, t, c, g, unknown or other
  modified_base (2706)..(2711): a, t, c, g, unknown or other
  modified_base (2717)..(2720): a, t, c, g, unknown or other
  modified_base (2726)..(2729): a, t, c, g, unknown or other
  modified_base (2732)..(2732): a, t, c, g, unknown or other
  modified_base (2737)..(2737): a, t, c, g, unknown or other
  modified_base (2746)..(2747): a, t, c, g, unknown or other
  modified_base (2752)..(2780): a, t, c, g, unknown or other
  modified_base (2782)..(2784): a, t, c, g, unknown or other
  modified_base (2786)..(2786): a, t, c, g, unknown or other
  modified_base (2788)..(2790): a, t, c, g, unknown or other
  modified_base (2792)..(2795): a, t, c, g, unknown or other
  modified_base (2798)..(2799): a, t, c, g, unknown or other
  modified_base (2802)..(2803): a, t, c, g, unknown or other
  modified_base (2809)..(2822): a, t, c, g, unknown or other
  modified_base (2840)..(2847): a, t, c, g, unknown or other
  modified_base (2850)..(2859): a, t, c, g, unknown or other
  modified_base (2862)..(2863): a, t, c, g, unknown or other
  modified_base (2866)..(2867): a, t, c, g, unknown or other
  modified_base (2872)..(2873): a, t, c, g, unknown or other
  modified_base (2878)..(2879): a, t, c, g, unknown or other
  modified_base (2887)..(2890): a, t, c, g, unknown or other
  modified_base (2899)..(2899): a, t, c, g, unknown or other
  modified_base (2904)..(2905): a, t, c, g, unknown or other
  modified_base (2911)..(2911): a, t, c, g, unknown or other
  modified_base (2917)..(2918): a, t, c, g, unknown or other
  modified_base (2920)..(2920): a, t, c, g, unknown or other
  modified_base (2926)..(2929): a, t, c, g, unknown or other
  modified_base (2934)..(2935): a, t, c, g, unknown or other
  modified_base (2942)..(2946): a, t, c, g, unknown or other
  modified_base (2955)..(2955): a, t, c, g, unknown or other
  modified_base (2957)..(2957): a, t, c, g, unknown or other
  modified_base (2959)..(2960): a, t, c, g, unknown or other
  modified_base (2963)..(2963): a, t, c, g, unknown or other
  modified_base (2978)..(2979): a, t, c, g, unknown or other
  modified_base (2987)..(2990): a, t, c, g, unknown or other
  modified_base (2992)..(2995): a, t, c, g, unknown or other
  modified_base (2998)..(2999): a, t, c, g, unknown or other
  modified_base (3002)..(3002): a, t, c, g, unknown or other
  modified_base (3016)..(3018): a, t, c, g, unknown or other
  modified_base (3022)..(3022): a, t, c, g, unknown or other
  modified_base (3027)..(3028): a, t, c, g, unknown or other
  modified_base (3030)..(3030): a, t, c, g, unknown or other
  modified_base (3032)..(3034): a, t, c, g, unknown or other
  modified_base (3045)..(3046): a, t, c, g, unknown or other
  modified_base (3059)..(3061): a, t, c, g, unknown or other
  modified_base (3063)..(3064): a, t, c, g, unknown or other
  modified_base (3073)..(3073): a, t, c, g, unknown or other
  modified_base (3075)..(3075): a, t, c, g, unknown or other
  modified_base (3078)..(3079): a, t, c, g, unknown or other
  modified_base (3084)..(3085): a, t, c, g, unknown or other
  modified_base (3090)..(3093): a, t, c, g, unknown or other
  modified_base (3101)..(3103): a, t, c, g, unknown or other
  modified_base (3115)..(3115): a, t, c, g, unknown or other
  modified_base (3118)..(3118): a, t, c, g, unknown or other
  modified_base (3124)..(3127): a, t, c, g, unknown or other
  modified_base (3129)..(3129): a, t, c, g, unknown or other
  modified_base (3132)..(3133): a, t, c, g, unknown or other
  modified_base (3136)..(3139): a, t, c, g, unknown or other
  modified_base (3143)..(3144): a, t, c, g, unknown or other
  modified_base (3146)..(3147): a, t, c, g, unknown or other
  modified_base (3156)..(3156): a, t, c, g, unknown or other
  modified_base (3162)..(3162): a, t, c, g, unknown or other
  modified_base (3170)..(3170): a, t, c, g, unknown or other
  modified_base (3177)..(3179): a, t, c, g, unknown or other
  modified_base (3184)..(3184): a, t, c, g, unknown or other
  modified_base (3195)..(3962): a, t, c, g, unknown or other
  modified_base (3968)..(3972): a, t, c, g, unknown or other
  modified_base (3988)..(3992): a, t, c, g, unknown or other
  modified_base (3994)..(3996): a, t, c, g, unknown or other
  modified_base (3999)..(3999): a, t, c, g, unknown or other
  modified_base (4001)..(4001): a, t, c, g, unknown or other
  modified_base (4016)..(4017): a, t, c, g, unknown or other
  modified_base (4022)..(4022): a, t, c, g, unknown or other
  modified_base (4024)..(4025): a, t, c, g, unknown or other
  modified_base (4028)..(4028): a, t, c, g, unknown or other
  modified_base (4031)..(4033): a, t, c, g, unknown or other
  modified_base (4036)..(4036): a, t, c, g, unknown or other
  modified_base (4038)..(4038): a, t, c, g, unknown or other
  modified_base (4040)..(4041): a, t, c, g, unknown or other
  modified_base (4044)..(4045): a, t, c, g, unknown or other
  modified_base (4049)..(4049): a, t, c, g, unknown or other
  modified_base (4056)..(4056): a, t, c, g, unknown or other
  modified_base (4058)..(4058): a, t, c, g, unknown or other
  modified_base (4064)..(4064): a, t, c, g, unknown or other
  modified_base (4068)..(4069): a, t, c, g, unknown or other
  modified_base (4071)..(4075): a, t, c, g, unknown or other
  modified_base (4079)..(4079): a, t, c, g, unknown or other
  modified_base (4082)..(4084): a, t, c, g, unknown or other
  modified_base (4087)..(4091): a, t, c, g, unknown or other
  modified_base (4094)..(4095): a, t, c, g, unknown or other
  modified_base (4103)..(4103): a, t, c, g, unknown or other
  modified_base (4105)..(4105): a, t, c, g, unknown or other
  modified_base (4107)..(4109): a, t, c, g, unknown or other
  modified_base (4111)..(4113): a, t, c, g, unknown or other
  modified_base (4117)..(4117): a, t, c, g, unknown or other
  modified_base (4121)..(4125): a, t, c, g, unknown or other
  modified_base (4128)..(4134): a, t, c, g, unknown or other
  modified_base (4137)..(4137): a, t, c, g, unknown or other
  modified_base (4141)..(4142): a, t, c, g, unknown or other
  modified_base (4153)..(4156): a, t, c, g, unknown or other
  modified_base (4158)..(4159): a, t, c, g, unknown or other
  modified_base (4162)..(4162): a, t, c, g, unknown or other
  modified_base (4164)..(4164): a, t, c, g, unknown or other
  modified_base (4175)..(4182): a, t, c, g, unknown or other
  modified_base (4188)..(4193): a, t, c, g, unknown or other
  modified_base (4198)..(4203): a, t, c, g, unknown or other
  modified_base (4205)..(4210): a, t, c, g, unknown or other
  modified_base (4213)..(4220): a, t, c, g, unknown or other
  modified_base (4227)..(4228): a, t, c, g, unknown or other
  modified_base (4231)..(4232): a, t, c, g, unknown or other
  modified_base (4238)..(4238): a, t, c, g, unknown or other
  modified_base (4241)..(4244): a, t, c, g, unknown or other
  modified_base (4257)..(4260): a, t, c, g, unknown or other
  modified_base (4265)..(4268): a, t, c, g, unknown or other
  modified_base (4275)..(4276): a, t, c, g, unknown or other
  modified_base (4280)..(4280): a, t, c, g, unknown or other
  modified_base (4289)..(4290): a, t, c, g, unknown or other
  modified_base (4296)..(4296): a, t, c, g, unknown or other
  modified_base (4299)..(4299): a, t, c, g, unknown or other
  modified_base (4310)..(4310): a, t, c, g, unknown or other
  modified_base (4315)..(4316): a, t, c, g, unknown or other
  modified_base (4322)..(4322): a, t, c, g, unknown or other
  modified_base (4324)..(4327): a, t, c, g, unknown or other
  modified_base (4330)..(4332): a, t, c, g, unknown or other
  modified_base (4335)..(4340): a, t, c, g, unknown or other
  modified_base (4344)..(4344): a, t, c, g, unknown or other
  modified_base (4347)..(4347): a, t, c, g, unknown or other
  modified_base (4356)..(4356): a, t, c, g, unknown or other
  modified_base (4361)..(4372): a, t, c, g, unknown or other
  modified_base (4380)..(4382): a, t, c, g, unknown or other
  modified_base (4386)..(4386): a, t, c, g, unknown or other
  modified_base (4388)..(4389): a, t, c, g, unknown or other
  modified_base (4393)..(4396): a, t, c, g, unknown or other
  modified_base (4398)..(4398): a, t, c, g, unknown or other
  modified_base (4404)..(4405): a, t, c, g, unknown or other
  modified_base (4407)..(4408): a, t, c, g, unknown or other
  modified_base (4424)..(4424): a, t, c, g, unknown or other
  modified_base (4427)..(4432): a, t, c, g, unknown or other
  modified_base (4435)..(4435): a, t, c, g, unknown or other
  modified_base (4439)..(4442): a, t, c, g, unknown or other
  modified_base (4458)..(4461): a, t, c, g, unknown or other
  modified_base (4463)..(4464): a, t, c, g, unknown or other
  modified_base (4466)..(4468): a, t, c, g, unknown or other
  modified_base (4472)..(4472): a, t, c, g, unknown or other
  modified_base (4477)..(4477): a, t, c, g, unknown or other
  modified_base (4488)..(4488): a, t, c, g, unknown or other
  modified_base (4495)..(4495): a, t, c, g, unknown or other
  modified_base (4497)..(4498): a, t, c, g, unknown or other
  modified_base (4501)..(4502): a, t, c, g, unknown or other
  modified_base (4504)..(4506): a, t, c, g, unknown or other
  modified_base (4510)..(4511): a, t, c, g, unknown or other
  modified_base (4517)..(4521): a, t, c, g, unknown or other
  modified_base (4538)..(4538): a, t, c, g, unknown or other
  modified_base (4542)..(4542): a, t, c, g, unknown or other
  modified_base (4544)..(4548): a, t, c, g, unknown or other
  modified_base (4550)..(4551): a, t, c, g, unknown or other
  modified_base (4560)..(4560): a, t, c, g, unknown or other
  modified_base (4562)..(4564): a, t, c, g, unknown or other
  modified_base (4574)..(4574): a, t, c, g, unknown or other
  modified_base (4578)..(4582): a, t, c, g, unknown or other
  modified_base (4590)..(4592): a, t, c, g, unknown or other
  modified_base (4594)..(4594): a, t, c, g, unknown or other
  modified_base (4610)..(4612): a, t, c, g, unknown or other
  modified_base (4629)..(4631): a, t, c, g, unknown or other
  modified_base (4636)..(4637): a, t, c, g, unknown or other
  modified_base (4641)..(4642): a, t, c, g, unknown or other
  modified_base (4655)..(4656): a, t, c, g, unknown or other
  modified_base (4659)..(4660): a, t, c, g, unknown or other
  modified_base (4673)..(4673): a, t, c, g, unknown or other
  modified_base (4677)..(4677): a, t, c, g, unknown or other
  modified_base (4684)..(4684): a, t, c, g, unknown or other
  modified_base (4686)..(4686): a, t, c, g, unknown or other
  modified_base (4689)..(4691): a, t, c, g, unknown or other
  modified_base (4702)..(4703): a, t, c, g, unknown or other
  modified_base (4710)..(4711): a, t, c, g, unknown or other
  modified_base (4718)..(4718): a, t, c, g, unknown or other
  modified_base (4723)..(4723): a, t, c, g, unknown or other
  modified_base (4727)..(4729): a, t, c, g, unknown or other
  modified_base (4732)..(4734): a, t, c, g, unknown or other
  modified_base (4737)..(4739): a, t, c, g, unknown or other
  modified_base (4754)..(4754): a, t, c, g, unknown or other
  modified_base (4759)..(4760): a, t, c, g, unknown or other
  modified_base (4772)..(4772): a, t, c, g, unknown or other
  modified_base (4774)..(4777): a, t, c, g, unknown or other
  modified_base (4793)..(4795): a, t, c, g, unknown or other
  modified_base (4801)..(4803): a, t, c, g, unknown or other
  modified_base (4805)..(4805): a, t, c, g, unknown or other
  modified_base (4819)..(4819): a, t, c, g, unknown or other
  modified_base (4821)..(4821): a, t, c, g, unknown or other
  modified_base (4833)..(4836): a, t, c, g, unknown or other
  modified_base (4838)..(4838): a, t, c, g, unknown or other
  modified_base (4851)..(4852): a, t, c, g, unknown or other
  modified_base (4859)..(5211): a, t, c, g, unknown or other
  modified_base (5217)..(5222): a, t, c, g, unknown or other
  modified_base (5232)..(5232): a, t, c, g, unknown or other
  modified_base (5239)..(5241): a, t, c, g, unknown or other
  modified_base (5244)..(5245): a, t, c, g, unknown or other
  modified_base (5248)..(5248): a, t, c, g, unknown or other
  modified_base (5265)..(5265): a, t, c, g, unknown or other
  modified_base (5272)..(5273): a, t, c, g, unknown or other
  modified_base (5275)..(5275): a, t, c, g, unknown or other
  modified_base (5278)..(5281): a, t, c, g, unknown or other
  modified_base (5285)..(5285): a, t, c, g, unknown or other
  modified_base (5287)..(5288): a, t, c, g, unknown or other
  modified_base (5303)..(5303): a, t, c, g, unknown or other
  modified_base (5305)..(5305): a, t, c, g, unknown or other
  modified_base (5307)..(5307): a, t, c, g, unknown or other
  modified_base (5312)..(5312): a, t, c, g, unknown or other
  modified_base (5315)..(5318): a, t, c, g, unknown or other
  modified_base (5322)..(5322): a, t, c, g, unknown or other
  modified_base (5324)..(5325): a, t, c, g, unknown or other
  modified_base (5331)..(5332): a, t, c, g, unknown or other
  modified_base (5335)..(5335): a, t, c, g, unknown or other
  modified_base (5338)..(5338): a, t, c, g, unknown or other
  modified_base (5341)..(5353): a, t, c, g, unknown or other
  modified_base (5358)..(5363): a, t, c, g, unknown or other
  modified_base (5365)..(5369): a, t, c, g, unknown or other
  modified_base (5371)..(5371): a, t, c, g, unknown or other
  modified_base (5375)..(5376): a, t, c, g, unknown or other
  modified_base (5380)..(5383): a, t, c, g, unknown or other
  modified_base (5395)..(5399): a, t, c, g, unknown or other
  modified_base (5404)..(5406): a, t, c, g, unknown or other
  modified_base (5416)..(5427): a, t, c, g, unknown or other
  modified_base (5429)..(5434): a, t, c, g, unknown or other
  modified_base (5438)..(5452): a, t, c, g, unknown or other
nnnnnnnnnnnnnnnnnnnnnnnnnnnnnnnnnnnnnnnnnnnnnnnnnnnnnnnnnnnnnnnnnnnnnnnnnnnnnnnnnnnnnnnnnnnnnnnnnnnnnnnnnnnnnnnnnnnnnnnnnnnnnnnnnnnnnnnnnnnnggggnanngcgggggggggggnggnttntaanatatgaggcccgtttgnannnccnaantatgtatgccattgnaccnccnaagnngtnggnaannggccgaaagngnnnnnagannatannnannagaannnagnnggggannnaagggagaggnannnangaaangggggannaaaaaaagagagggagggnaaaanagangnnnnggnnggagngnaanggngnnannnnagnnnannggaannnnngnnnnnnaggnnnaagggaaaannnggggnnagnnnnnngagnagnngggaaaaaaggngnnggggannangnnnggnnannnnngggannnnnagnagaganagggnnnngnnaggggggnagggngggnnnngaannnnggannnnaggngannngnnngnnnnagnnnnnnaaagngnngggaaaanaggnangagnnanngagnnnggnnannnnngnaaannnaannagnnaagaagaggggangnaggannanggggaaagggnnnnngngagaaaaggaaaagaggagaaaggggagggannanagggaggggangggaanggngaaagaagggaanagggggaaaaaaggnnngggnnangnnnnaanggaagagnnagagaagaggangaggnnangggnnnnggaaannnaaaaaanaaaaaaanngggggnaaagaaaagaaaanggggggggggaaanngggnggagaaagggggnnnnnnaagggaaagggaaaaggggggnnggagggggannaaaagggggggggaagggggggaaaannngaaaagggggaggaaaggaanaaaaaaggggaggannnggggggaagggagaaaaaaaanngggnnnnnnngggggaaagggggggnaaaaggggaaagaggggaagggggaaaaaaaggggggggggagggggggggnaagaaaaaaaaaggggggaagggaaaaaaagggnnnnaaaaaaaaaaagaagggagggggaaaaaggaagaaggggggganaaggggaaaagggaaannggagaggggaaaaggnnannggggggaaaaannnaaaagggngngggggnnnnnnnnnnnnnnnnnnnnnnnnnnnnnnnnnnnnnnnnnnnnnnnnnnnnnnnnnnnnnnnnnnnnnnnnnnnnnnnnnnnnnnnnnnnnnnnnnnnnganaancgaggggggggnnngntttttaaaactgaagnccnttngnaggtctaanctgatgctttgnnacnccnngnnntngggaaagggncgggnggngngggggnnnngngttggnngnggangggggnnnnggngagagggggngcgggggngggnngnggaagnagggggggaggganaaagggnannnngggggnngaggaaggaggnngggagggagggagggnannnngngggangaggaagggggnngggagagagaggaggnannnngngggnnnaggaaggagggggggagagagggggnaannagagggnngaggaagnnggnngggagggagagagggnnaaangngggnngaggaaggaggnngggagggagagaggngananngngggnngnaggaaanaannnnngnnnnnnnnnnngngaaaaaaannnnnnaagnaanngnngnaaaaanaggnnaaggggagaaaaaaannnannnnnaaaagggnnnaaannanaaaannnaagnngaanggagaaaggaaaaggagnngannnnnnaaannanagaagaaaaaaagggnggggnnnnaaaaagnaaggggggggggggnaaaangggagnnnnagngaaanngggggggagggngggaagaagggnnaagnnaaggagnnnaaggaggaagggagnaaagaagggggnaagaanggaananaaggnggggggaaagggggggagaaannaaanaaaaaagaaggagnngnaaaggnnnaaaaaaaagggaanaaaggnaggaaaaaaggnnaagggaannagggggganaaaaaaaaaaaaggnnggggaaaaaaaggggggaagnnaaaaaagaanngggnnanaaaaagggaggggggggggnnggaaaaaggaaaaanganggggananaaanaggnngggaaangggaaannnaaaggggggggggaaaaaaagaaannnnaaaggaggaggggnaaaanaaaagggggggagaggaaaaaaaaaaaaaggggnaaaaaagnnaaaagagggggaggaaaggnanaaaaaggggggaaaaaagggaaaaaaaaaggggaagannnnnnnnnnnnnnnnnnnnnnnnnnnnnnnnnnnnnnnnnnnnnnnnnnnnnnnnnnnnnnnnnnnnnnnnnnnnnnnnnnnnnnnnnnnnnnnnnnnnaggggnnnccgccgcgggggnngnggnnnngnnnnnngggnnnggnggtgnnccacgagggcgcaccgatnaccccacgnannnccctnnnnnnnttngggggggggnnnggnaggnnttngnnnnnnnggnnnnnnnngnggnggggnngtgggnnnnggtggnngnnnnnngggnnnnnngggggnnnngggggnnnnggnggggnggggggggnnggggnnnnnnnnnnnnnnnnnnnnnnnnnnnnngnnngngnnngnnnnggnnggnngggggnnnnnnnnnnnnnngggggggggggggggggnnnnnnnnggnnnnnnnnnnggnnggnnggggnnggggnngggggggnnnnggggggggnggggnngggggngggggnngngggggnnnnggggnnggggggnnnnnggggggggngngnnggnggggggggggggggnngggggggnnnngnnnnggnnggngggggggggggggnnngggnggggnngngnnnggggggggggnnggggggggggggnnngnnggggggggngnggnnggggnnggggnnnngggggggnnngggggggggggnggngggggnnnngnggnnggnnnngggnngnnggggggggngggggngggggggnggggggnnnggggnggggggggggnnnnnnnnnnnnnnnnnnnnnnnnnnnnnnnnnnnnnnnnnnnnnnnnnnnnnnnnnnnnnnnnnnnnnnnnnnnnnnnnnnnnnnnnnnnnnnnnnnnnnnnnnnnnnnnnnnnnnnnnnnnnnnnnnnnnnnnnnnnnnnnnnnnnnnnnnnnnnnnnnnnnnnnnnnnnnnnnnnnnnnnnnnnnnnnnnnnnnnnnnnnnnnnnnnnnnnnnnnnnnnnnnnnnnnnnnnnnnnnnnnnnnnnnnnnnnnnnnnnnnnnnnnnnnnnnnnnnnnnnnnnnnnnnnnnnnnnnnnnnnnnnnnnnnnnnnnnnnnnnnnnnnnnnnnnnnnnnnnnnnnnnnnnnnnnnnnnnnnnnnnnnnnnnnnnnnnnnnnnnnnnnnnnnnnnnnnnnnnnnnnnnnnnnnnnnnnnnnnnnnnnnnnnnnnnnnnnnnnnnnnnnnnnnnnnnnnnnnnnnnnnnnnnnnnnnnnnnnnnnnnnnnnnnnnnnnnnnnnnnnnnnnnnnnnnnnnnnnnnnnnnnnnnnnnnnnnnnnnnnnnnnnnnnnnnnnnnnnnnnnnnnnnnnnnnnnnnnnnnnnnnnnnnnnnnnnnnnnnnnnnnnnnnnnnnnnnnnnnnnnnnnnnnnnnnnnnnnnnnnnnnnnnnnnnnnnnnnnnnnnnnnnnnnnnnnnnnnnnnnnnnnnnnnnnnnnnnnnnnnnnnnnnnnnnnnnnnnnnnnnnnnnnnnnnnnnnnnnnnnnnnnnnnnnnnnnnnnnnnnnnnnnnnnaggggnnnnntgagggggggagggannnnngnnnttntnaaaaaaattgaaagnnccccntnncgngannntcntnannaanngatngcaattngnaacccnccgnngnnnnntttnggnnnaannnnnccnngggggggngngnnngnnngggngggnnnnnggnnnnnnnggngggnnggggggggggnnnngnnggngnggggggggggnnnnnnnngggggnnnnnnggggnnnnnngnnnnnnggnnnnnnnnggggggnnggnngggggnggnnnnggggggggggggnnnnggggnnnnggggggnngggnggggggggnngggggnggnggggggggggnggggnngggggngnnnnggnnnggnnnnnngggnggnggggggggnggggnnnnnnnnnnnngggggggnnngggngnngggnnnngngggggnngnngggggggggggggggnggnnnnnnggngggnnnngggggggggggggggnnnngnngnnngggnggggnggggggggggnggggggngnnggnngnnngggnngggggnnnnnggggggggggggggggngggngnnnnngnnggggggggngnnngggggggggngggnnnnngggggggnnngngggggggggggggggnnnggggggggggggaaaannnggggnngggnnggggggggggggnnggnnggggggggggggngggnggggggngnggnnnggggggggggnnggggggnnggggggnggggngggnnnggnnnggnnnggggggggggggggnggggnngggggggggggngnnnngggggggggggggggnnngggggnnngngggggggggggggngngggggggggggnnnngnggggggggggggnnggggggnnnnnnnnnnnnnnnnnnnnnnnnnnnnnnnnnnnnnnnnnnnnnnnnnnnnnnnnnnnnnnnnnnnnnnnnnnnnnnnnnnnnnnnnnnnnnnnnnnnnnnnnnnnnnnnnnnnnnnnnnnnnnnnnnnnnnnnnnnnnnnnnnnnnnnnnnnnnnnnnnnnnnnnnnnnnnnnnnnnnnnnnnnnnnnnnnnnnnnnnnnnnnnnnnnnnnnnnnnnnnnnnnnnnnnnnnnnnnnnnnnnnnnnnnnnnnnnnnnnnnnnnnnnnnnnnnnnnnnnnnnnnnnnnnnnnnnnnnnnnnnnnnnnnnnnnnnnnnnnnnnnnnnnnnnnnnnnnnnnnnnnnnnnnnnnnnaggggnnnnnncgaggggggngagggannnggnnttnttaaacaaattgaaggnccccttnngnagnnnnctcnannttttgatggccattngnanccgcnggnnnntttngnnaaaggnnccnggnggnnnnnnnnnnnnnggttnnnnnngnnnnngngggnngggnnnngggggggggggnnnnnggggnnngggggggggnnnnnnnnnnnngnnnnnngggnnnnnnnnnnnnnnn

SEQ ID NO: 1190 - protein, 1683 aa, Homo sapiens
  MOD_RES (5)..(5): Variable amino acid
  MOD_RES (9)..(12): Variable amino acid
  MOD_RES (16)..(19): Variable amino acid
  MOD_RES (21)..(22): Variable amino acid
  MOD_RES (24)..(26): Variable amino acid
  MOD_RES (28)..(29): Variable amino acid
  MOD_RES (33)..(34): Variable amino acid
  MOD_RES (36)..(36): Variable amino acid
  MOD_RES (38)..(39): Variable amino acid
  MOD_RES (45)..(45): Variable amino acid
  MOD_RES (47)..(51): Variable amino acid
  MOD_RES (53)..(54): Variable amino acid
  MOD_RES (56)..(66): Variable amino acid
  MOD_RES (68)..(68): Variable amino acid
  MOD_RES (71)..(72): Variable amino acid
  MOD_RES (74)..(79): Variable amino acid
  MOD_RES (84)..(84): Variable amino acid
  MOD_RES (86)..(92): Variable amino acid
  MOD_RES (94)..(96): Variable amino acid
  MOD_RES (98)..(98): Variable amino acid
  MOD_RES (100)..(102): Variable amino acid
  MOD_RES (106)..(106): Variable amino acid
  MOD_RES (108)..(108): Variable amino acid
  MOD_RES (110)..(113): Variable amino acid
  MOD_RES (115)..(124): Variable amino acid
  MOD_RES (127)..(127): Variable amino acid
  MOD_RES (129)..(142): Variable amino acid
  MOD_RES (147)..(147): Variable amino acid
  MOD_RES (149)..(150): Variable amino acid
  MOD_RES (154)..(156): Variable amino acid
  MOD_RES (166)..(167): Variable amino acid
  MOD_RES (171)..(171): Variable amino acid
  MOD_RES (173)..(174): Variable amino acid
  MOD_RES (178)..(178): Variable amino acid
  MOD_RES (184)..(184): Variable amino acid
  MOD_RES (186)..(189): Variable amino acid
  MOD_RES (192)..(192): Variable amino acid
  MOD_RES (196)..(196): Variable amino acid
  MOD_RES (198)..(201): Variable amino acid
  MOD_RES (203)..(204): Variable amino acid
  MOD_RES (206)..(206): Variable amino acid
  MOD_RES (209)..(209): Variable amino acid
  MOD_RES (211)..(211): Variable amino acid
  MOD_RES (216)..(216): Variable amino acid
  MOD_RES (220)..(222): Variable amino acid
  MOD_RES (227)..(228): Variable amino acid
  MOD_RES (236)..(236): Variable amino acid
  MOD_RES (239)..(239): Variable amino acid
  MOD_RES (248)..(249): Variable amino acid
  MOD_RES (256)..(256): Variable amino acid
  MOD_RES (261)..(262): Variable amino acid
  MOD_RES (269)..(269): Variable amino acid
  MOD_RES (271)..(273): Variable amino acid
  MOD_RES (278)..(278): Variable amino acid
  MOD_RES (307)..(308): Variable amino acid
  MOD_RES (322)..(322): Variable amino acid
  MOD_RES (328)..(328): Variable amino acid
  MOD_RES (334)..(335): Variable amino acid
  MOD_RES (339)..(340): Variable amino acid
  MOD_RES (343)..(343): Variable amino acid
  MOD_RES (345)..(380): Variable amino acid
  MOD_RES (384)..(385): Variable amino acid
  MOD_RES (391)..(393): Variable amino acid
  MOD_RES (396)..(396): Variable amino acid
  MOD_RES (400)..(405): Variable amino acid
  MOD_RES (410)..(412): Variable amino acid
  MOD_RES (414)..(415): Variable amino acid
  MOD_RES (418)..(418): Variable amino acid
  MOD_RES (420)..(420): Variable amino acid
  MOD_RES (422)..(424): Variable amino acid
  MOD_RES (427)..(427): Variable amino acid
  MOD_RES (430)..(432): Variable amino acid
  MOD_RES (434)..(434): Variable amino acid
  MOD_RES (439)..(439): Variable amino acid
  MOD_RES (441)..(443): Variable amino acid
  MOD_RES (445)..(445): Variable amino acid
  MOD_RES (449)..(449): Variable amino acid
  MOD_RES (455)..(457): Variable amino acid
  MOD_RES (459)..(459): Variable amino acid
  MOD_RES (463)..(463): Variable amino acid
  MOD_RES (469)..(473): Variable amino acid
  MOD_RES (482)..(483): Variable amino acid
  MOD_RES (485)..(485): Variable amino acid
  MOD_RES (488)..(488): Variable amino acid
  MOD_RES (490)..(490): Variable amino acid
  MOD_RES (495)..(495): Variable amino acid
  MOD_RES (497)..(497): Variable amino acid
  MOD_RES (499)..(499): Variable amino acid
  MOD_RES (503)..(503): Variable amino acid
  MOD_RES (509)..(511): Variable amino acid
  MOD_RES (513)..(513): Variable amino acid
  MOD_RES (516)..(523): Variable amino acid
  MOD_RES (526)..(527): Variable amino acid
  MOD_RES (529)..(532): Variable amino acid
  MOD_RES (534)..(535): Variable amino acid
  MOD_RES (541)..(543): Variable amino acid
  MOD_RES (546)..(549): Variable amino acid
  MOD_RES (551)..(551): Variable amino acid
  MOD_RES (553)..(554): Variable amino acid
  MOD_RES (560)..(563): Variable amino acid
  MOD_RES (565)..(566): Variable amino acid
  MOD_RES (571)..(571): Variable amino acid
  MOD_RES (573)..(574): Variable amino acid
  MOD_RES (576)..(576): Variable amino acid
  MOD_RES (581)..(581): Variable amino acid
  MOD_RES (583)..(583): Variable amino acid
  MOD_RES (585)..(589): Variable amino acid
  MOD_RES (593)..(593): Variable amino acid
  MOD_RES (597)..(599): Variable amino acid
  MOD_RES (601)..(602): Variable amino acid
  MOD_RES (607)..(607): Variable amino acid
  MOD_RES (611)..(611): Variable amino acid
  MOD_RES (613)..(615): Variable amino acid
  MOD_RES (617)..(617): Variable amino acid
  MOD_RES (624)..(624): Variable amino acid
  MOD_RES (626)..(626): Variable amino acid
  MOD_RES (630)..(631): Variable amino acid
  MOD_RES (634)..(634): Variable amino acid
  MOD_RES (639)..(639): Variable amino acid
  MOD_RES (641)..(641): Variable amino acid
  MOD_RES (645)..(645): Variable amino acid
  MOD_RES (648)..(648): Variable amino acid
  MOD_RES (651)..(651): Variable amino acid
  MOD_RES (656)..(656): Variable amino acid
  MOD_RES (663)..(664): Variable amino acid
  MOD_RES (667)..(667): Variable amino acid
  MOD_RES (669)..(670): Variable amino acid
  MOD_RES (677)..(677): Variable amino acid
  MOD_RES (682)..(683): Variable amino acid
  MOD_RES (685)..(685): Variable amino acid
  MOD_RES (687)..(688): Variable amino acid
  MOD_RES (691)..(691): Variable amino acid
  MOD_RES (693)..(694): Variable amino acid
  MOD_RES (702)..(703): Variable amino acid
  MOD_RES (708)..(709): Variable amino acid
  MOD_RES (721)..(721): Variable amino acid
  MOD_RES (723)..(724): Variable amino acid
  MOD_RES (731)..(731): Variable amino acid
  MOD_RES (744)..(777): Variable amino acid
  MOD_RES (779)..(779): Variable amino acid
  MOD_RES (784)..(789): Variable amino acid
  MOD_RES (791)..(792): Variable amino acid
  MOD_RES (794)..(794): Variable amino acid
  MOD_RES (800)..(800): Variable amino acid
  MOD_RES (804)..(805): Variable amino acid
  MOD_RES (807)..(809): Variable amino acid
  MOD_RES (813)..(813): Variable amino acid
  MOD_RES (816)..(825): Variable amino acid
  MOD_RES (827)..(827): Variable amino acid
  MOD_RES (829)..(830): Variable amino acid
  MOD_RES (832)..(834): Variable amino acid
  MOD_RES (836)..(837): Variable amino acid
  MOD_RES (840)..(840): Variable amino acid
  MOD_RES (843)..(843): Variable amino acid
  MOD_RES (846)..(846): Variable amino acid
  MOD_RES (849)..(849): Variable amino acid
  MOD_RES (851)..(865): Variable amino acid
  MOD_RES (867)..(868): Variable amino acid
  MOD_RES (870)..(874): Variable amino acid
  MOD_RES (881)..(889): Variable amino acid
  MOD_RES (891)..(891): Variable amino acid
  MOD_RES (893)..(893): Variable amino acid
  MOD_RES (896)..(897): Variable amino acid
  MOD_RES (900)..(900): Variable amino acid
  MOD_RES (902)..(902): Variable amino acid
  MOD_RES (904)..(904): Variable amino acid
  MOD_RES (906)..(907): Variable amino acid
  MOD_RES (909)..(910): Variable amino acid
  MOD_RES (912)..(912): Variable amino acid
  MOD_RES (915)..(916): Variable amino acid
  MOD_RES (919)..(920): Variable amino acid
  MOD_RES (927)..(927): Variable amino acid
  MOD_RES (930)..(933): Variable amino acid
  MOD_RES (939)..(941): Variable amino acid
  MOD_RES (943)..(945): Variable amino acid
  MOD_RES (949)..(949): Variable amino acid
  MOD_RES (954)..(955): Variable amino acid
  MOD_RES (958)..(960): Variable amino acid
  MOD_RES (962)..(962): Variable amino acid
  MOD_RES (964)..(965): Variable amino acid
  MOD_RES (968)..(968): Variable amino acid
  MOD_RES (972)..(973): Variable amino acid
  MOD_RES (975)..(980): Variable amino acid
  MOD_RES (982)..(983): Variable amino acid
  MOD_RES (986)..(986): Variable amino acid
  MOD_RES (988)..(988): Variable amino acid
  MOD_RES (993)..(993): Variable amino acid
  MOD_RES (995)..(995): Variable amino acid
  MOD_RES (999)..(1254): Variable amino acid
  MOD_RES (1257)..(1258): Variable amino acid
  MOD_RES (1263)..(1267): Variable amino acid
  MOD_RES (1272)..(1273): Variable amino acid
  MOD_RES (1275)..(1275): Variable amino acid
  MOD_RES (1277)..(1283): Variable amino acid
  MOD_RES (1286)..(1286): Variable amino acid
  MOD_RES (1290)..(1293): Variable amino acid
  MOD_RES (1295)..(1297): Variable amino acid
  MOD_RES (1299)..(1299): Variable amino acid
  MOD_RES (1302)..(1306): Variable amino acid
  MOD_RES (1308)..(1314): Variable amino acid
  MOD_RES (1318)..(1322): Variable amino acid
  MOD_RES (1326)..(1328): Variable amino acid
  MOD_RES (1330)..(1331): Variable amino acid
  MOD_RES (1333)..(1340): Variable amino acid
  MOD_RES (1343)..(1344): Variable amino acid
  MOD_RES (1348)..(1348): Variable amino acid
  MOD_RES (1353)..(1354): Variable amino acid
  MOD_RES (1356)..(1356): Variable amino acid
  MOD_RES (1359)..(1359): Variable amino acid
  MOD_RES (1364)..(1364): Variable amino acid
  MOD_RES (1366)..(1367): Variable amino acid
  MOD_RES (1372)..(1372): Variable amino acid
  MOD_RES (1375)..(1380): Variable amino acid
  MOD_RES (1382)..(1383): Variable amino acid
  MOD_RES (1386)..(1386): Variable amino acid
  MOD_RES (1388)..(1391): Variable amino acid
  MOD_RES (1394)..(1394): Variable amino acid
  MOD_RES (1396)..(1400): Variable amino acid
  MOD_RES (1402)..(1403): Variable amino acid
  MOD_RES (1410)..(1412): Variable amino acid
  MOD_RES (1414)..(1414): Variable amino acid
  MOD_RES (1420)..(1423): Variable amino acid
  MOD_RES (1426)..(1426): Variable amino acid
  MOD_RES (1430)..(1430): Variable amino acid
  MOD_RES (1432)..(1437): Variable amino acid
  MOD_RES (1440)..(1441): Variable amino acid
  MOD_RES (1448)..(1451): Variable amino acid
  MOD_RES (1454)..(1455): Variable amino acid
  MOD_RES (1460)..(1461): Variable amino acid
  MOD_RES (1464)..(1465): Variable amino acid
  MOD_RES (1471)..(1471): Variable amino acid
  MOD_RES (1477)..(1477): Variable amino acid
  MOD_RES (1479)..(1479): Variable amino acid
  MOD_RES (1481)..(1481): Variable amino acid
  MOD_RES (1486)..(1487): Variable amino acid
  MOD_RES (1493)..(1493): Variable amino acid
  MOD_RES (1495)..(1497): Variable amino acid
  MOD_RES (1501)..(1501): Variable amino acid
  MOD_RES (1504)..(1504): Variable amino acid
  MOD_RES (1508)..(1508): Variable amino acid
  MOD_RES (1510)..(1513): Variable amino acid
  MOD_RES (1520)..(1520): Variable amino acid
  MOD_RES (1525)..(1526): Variable amino acid
  MOD_RES (1532)..(1532): Variable amino acid
  MOD_RES (1534)..(1535): Variable amino acid
  MOD_RES (1540)..(1541): Variable amino acid
  MOD_RES (1545)..(1546): Variable amino acid
  MOD_RES (1551)..(1551): Variable amino acid
  MOD_RES (1554)..(1671): Variable amino acid
  MOD_RES (1673)..(1674): Variable amino acid
  MOD_RES (1678)..(1678): Variable amino acid
  MOD_RES (1680)..(1683): Variable amino acid
MYAIXPPKXXXXGRKXXXXIXXRXXXGXXGRGXXEXGXXKKRGRXKXXXXXEXXGXXXXXXXXXXXGXREXXGXXXXXXGKKGXGXXXXXXXGXXXEXGXXXGGRXGXEXXXXGXXXXXXXXXXGKXGXXXXXXXXXXXXXXKKRGXRXXGKGXXXEKEKRRKGRXXREGXGXXKEGXRGKKGXGXXXXEEXEKRXRXXXXEXXKXKKXGXKKRKXGGGXXXEKGGXXREREKGGXRGXKRGGEGGEXXKRGRKGXKKGRXXGEGRKKXGXXXGKGGXKGERGEGGKKGGGEGGGKKKKGGKGKKGXXKKKEGRGKKEEGGXKGKREXGEGKRXXGGKXXKGXGXXXXXXXXXXXXXXXXXXXXXXXXXXXXXXXXXXXXEGGXXFLKLKXXXRSXLMLXXXXXXGKGRXXXGXXVGXGXGXXXEGXRGXXXEXGGEGXRXXXGXRKEXGREGGXXXGXGRGXGERGGXXXXXEGGGERGGXXRXEEXGXEGERXKXGXRKEXGRERGXXXGXRKXXXXXXXXKKXXKXXXXKXXKGRKKXXXKRXXXXKXKXXGERKRXXXXKXXKKKRXGXXKXRGGGXKXEXXXXXGGGXEEGXXXGXXGGREXRRGXEXXXRXGERGGEXKXKRRXXKGXKKREXRXEKRXREXGGXKKKKXGEKKGGXXKRXGXXKGRGGGXKKEKXXGXKXXGKXEXXRGGGKKEXXKEEGXXKRGGEEKKKKGXKXXKRGRKGXKRGEKREKKRGRXXXXXXXXXXXXXXXXXXXXXXXXXXXXXXXXXXGXPPRGXXXXXXGXXVXHEGAPXTPRXXLXXXGGGXGRXXXXXXXXXXGXGXXWXXXGXXGGXGGXGGXGGXGXXXXXXXXXXXXXXXGXXGXXXXXGGGGGGXXXXXXXXXGXGXGGXXGGXGXGXGXXGXXGXGGXXGGXXGGGGGGXGGXXXXGGGGGXXXGXXXGGGXGGGGXXGGXXXGXGXXGGXGGGXXGXXXXXXGXXGGXGXGGGGXGXGGGXXXXXXXXXXXXXXXXXXXXXXXXXXXXXXXXXXXXXXXXXXXXXXXXXXXXXXXXXXXXXXXXXXXXXXXXXXXXXXXXXXXXXXXXXXXXXXXXXXXXXXXXXXXXXXXXXXXXXXXXXXXXXXXXXXXXXXXXXXXXXXXXXXXXXXXXXXXXXXXXXXXXXXXXXXXXXXXXXXXXXXXXXXXXXXXXXXXXXXXXXXXXXXXXXXXXXXXXXXXXXXXXXXXXXXXXXXXXXXXXXXXXXXXXXXXXXXXXRGXXRGGGXXXXXKKIEXXPXRXXXXXXXAIXNPPXXXXGXXXPXGGXXXXXGXXXXXXXGGGXXXXXGGGXXXGXXGXXXXXXXXGGXXGGGXGGGGXXGXGGXGGGGXGXXGGGGXGGXXXXXXGXXGGXGXXXXGGXGXXXXXGXXGGGGGGXXXGXGGGGGXXXXGGXGGGXGXXXXXXGGXXGGGGGGXXXXGGXXGGGGXXGGXXGGGGGXGGGGKXGXGXGGGGXXGGGGGXGXXXGGGXGGXGGGXGXXXXGGGGGGXGGGGXXGGGGGXGXXGGGGXXGGGXXGGGGXGGXXXXXXXXXXXXXXXXXXXXXXXXXXXXXXXXXXXXXXXXXXXXXXXXXXXXXXXXXXXXXXXXXXXXXXXXXXXXXXXXXXXXXXXXXXXXXXXXXXXXXXXXXXXXXXXXXXXXXXGXXRGGXGXXXX

SEQ ID NO: 1191 - DNA, 3133 bp, Homo sapiens
  source
  (1)..(3133)
  CDS (201)..(2933)
  modified_base (1)..(118): a, t, c, g, unknown or other
  modified_base (124)..(129): a, t, c, g, unknown or other
  modified_base (139)..(139): a, t, c, g, unknown or other
  modified_base (146)..(148): a, t, c, g, unknown or other
  modified_base (151)..(152): a, t, c, g, unknown or other
  modified_base (155)..(155): a, t, c, g, unknown or other
  modified_base (172)..(172): a, t, c, g, unknown or other
  modified_base (179)..(180): a, t, c, g, unknown or other
  modified_base (182)..(182): a, t, c, g, unknown or other
  modified_base (185)..(188): a, t, c, g, unknown or other
  modified_base (192)..(192): a, t, c, g, unknown or other
  modified_base (194)..(195): a, t, c, g, unknown or other
  modified_base (210)..(210): a, t, c, g, unknown or other
  modified_base (212)..(212): a, t, c, g, unknown or other
  modified_base (214)..(214): a, t, c, g, unknown or other
  modified_base (219)..(219): a, t, c, g, unknown or other
  modified_base (222)..(225): a, t, c, g, unknown or other
  modified_base (229)..(229): a, t, c, g, unknown or other
  modified_base (231)..(232): a, t, c, g, unknown or other
  modified_base (238)..(239): a, t, c, g, unknown or other
  modified_base (242)..(242): a, t, c, g, unknown or other
  modified_base (245)..(245): a, t, c, g, unknown or other
  modified_base (248)..(260): a, t, c, g, unknown or other
  modified_base (265)..(270): a, t, c, g, unknown or other
  modified_base (272)..(276): a, t, c, g, unknown or other
  modified_base (278)..(278): a, t, c, g, unknown or other
  modified_base (282)..(283): a, t, c, g, unknown or other
  modified_base (287)..(290): a, t, c, g, unknown or other
  modified_base (302)..(306): a, t, c, g, unknown or other
  modified_base (311)..(313): a, t, c, g, unknown or other
  modified_base (323)..(334): a, t, c, g, unknown or other
  modified_base (336)..(341): a, t, c, g, unknown or other
  modified_base (345)..(363): a, t, c, g, unknown or other
  modified_base (365)..(368): a, t, c, g, unknown or other
  modified_base (370)..(370): a, t, c, g, unknown or other
  modified_base (374)..(375): a, t, c, g, unknown or other
  modified_base (379)..(385): a, t, c, g, unknown or other
  modified_base (387)..(388): a, t, c, g, unknown or other
  modified_base (390)..(393): a, t, c, g, unknown or other
  modified_base (395)..(395): a, t, c, g, unknown or other
  modified_base (397)..(397): a, t, c, g, unknown or other
  modified_base (400)..(402): a, t, c, g, unknown or other
  modified_base (409)..(409): a, t, c, g, unknown or other
  modified_base (411)..(411): a, t, c, g, unknown or other
  modified_base (423)..(424): a, t, c, g, unknown or other
  modified_base (432)..(432): a, t, c, g, unknown or other
  modified_base (445)..(448): a, t, c, g, unknown or other
  modified_base (450)..(452): a, t, c, g, unknown or other
  modified_base (455)..(455): a, t, c, g, unknown or other
  modified_base (460)..(460): a, t, c, g, unknown or other
  modified_base (462)..(463): a, t, c, g, unknown or other
  modified_base (473)..(473): a, t, c, g, unknown or other
  modified_base (478)..(478): a, t, c, g, unknown or other
  modified_base (483)..(484): a, t, c, g, unknown or other
  modified_base (489)..(492): a, t, c, g, unknown or other
  modified_base (496)..(497): a, t, c, g, unknown or other
  modified_base (501)..(501): a, t, c, g, unknown or other
  modified_base (505)..(506): a, t, c, g, unknown or other
  modified_base (520)..(523): a, t, c, g, unknown or other
  modified_base (533)..(533): a, t, c, g, unknown or other
  modified_base (536)..(536): a, t, c, g, unknown or other
  modified_base (542)..(542): a, t, c, g, unknown or other
  modified_base (548)..(552): a, t, c, g, unknown or other
  modified_base (564)..(567): a, t, c, g, unknown or other
  modified_base (572)..(572): a, t, c, g, unknown or other
  modified_base (576)..(578): a, t, c, g, unknown or other
  modified_base (591)..(592): a, t, c, g, unknown or other
  modified_base (594)..(595): a, t, c, g, unknown or other
  modified_base (602)..(603): a, t, c, g, unknown or other
  modified_base (615)..(615): a, t, c, g, unknown or other
  modified_base (617)..(617): a, t, c, g, unknown or other
  modified_base (620)..(622): a, t, c, g, unknown or other
  modified_base (635)..(636): a, t, c, g, unknown or other
  modified_base (643)..(643): a, t, c, g, unknown or other
  modified_base (648)..(652): a, t, c, g, unknown or other
  modified_base (655)..(655): a, t, c, g, unknown or other
  modified_base (668)..(669): a, t, c, g, unknown or other
  modified_base (678)..(681): a, t, c, g, unknown or other
  modified_base (697)..(698): a, t, c, g, unknown or other
  modified_base (704)..(704): a, t, c, g, unknown or other
  modified_base (706)..(706): a, t, c, g, unknown or other
  modified_base (709)..(709): a, t, c, g, unknown or other
  modified_base (723)..(724): a, t, c, g, unknown or other
  modified_base (727)..(731): a, t, c, g, unknown or other
  modified_base (736)..(736): a, t, c, g, unknown or other
  modified_base (743)..(744): a, t, c, g, unknown or other
  modified_base (746)..(746): a, t, c, g, unknown or other
  modified_base (760)..(762): a, t, c, g, unknown or other
  modified_base (765)..(765): a, t, c, g, unknown or other
  modified_base (775)..(777): a, t, c, g, unknown or other
  modified_base (784)..(784): a, t, c, g, unknown or other
  modified_base (786)..(786): a, t, c, g, unknown or other
  modified_base (793)..(793): a, t, c, g, unknown or other
  modified_base (808)..(813): a, t, c, g, unknown or other
  modified_base (829)..(832): a, t, c, g, unknown or other
  modified_base (843)..(844): a, t, c, g, unknown or other
  modified_base (846)..(846): a, t, c, g, unknown or other
  modified_base (854)..(855): a, t, c, g, unknown or other
  modified_base (863)..(867): a, t, c, g, unknown or other
  modified_base (879)..(879): a, t, c, g, unknown or other
  modified_base (883)..(883): a, t, c, g, unknown or other
  modified_base (885)..(885): a, t, c, g, unknown or other
  modified_base (897)..(900): a, t, c, g, unknown or other
  modified_base (916)..(916): a, t, c, g, unknown or other
  modified_base (918)..(918): a, t, c, g, unknown or other
  modified_base (920)..(920): a, t, c, g, unknown or other
  modified_base (925)..(925): a, t, c, g, unknown or other
  modified_base (927)..(928): a, t, c, g, unknown or other
  modified_base (942)..(943): a, t, c, g, unknown or other
  modified_base (947)..(949): a, t, c, g, unknown or other
  modified_base (955)..(955): a, t, c, g, unknown or other
  modified_base (962)..(962): a, t, c, g, unknown or other
  modified_base (969)..(969): a, t, c, g, unknown or other
  modified_base (978)..(978): a, t, c, g, unknown or other
  modified_base (980)..(982): a, t, c, g, unknown or other
  modified_base (984)..(984): a, t, c, g, unknown or other
  modified_base (986)..(986): a, t, c, g, unknown or other
  modified_base (1004)..(1460): a, t, c, g, unknown or other
  modified_base (1466)..(1472): a, t, c, g, unknown or other
  modified_base (1481)..(1481): a, t, c, g, unknown or other
  modified_base (1488)..(1492): a, t, c, g, unknown or other
  modified_base (1495)..(1497): a, t, c, g, unknown or other
  modified_base (1500)..(1500): a, t, c, g, unknown or other
  modified_base (1517)..(1518): a, t, c, g, unknown or other
  modified_base (1523)..(1523): a, t, c, g, unknown or other
  modified_base (1525)..(1526): a, t, c, g, unknown or other
  modified_base (1528)..(1529): a, t, c, g, unknown or other
  modified_base (1532)..(1534): a, t, c, g, unknown or other
  modified_base (1538)..(1539): a, t, c, g, unknown or other
  modified_base (1541)..(1542): a, t, c, g, unknown or other
  modified_base (1550)..(1550): a, t, c, g, unknown or other
  modified_base (1555)..(1555): a, t, c, g, unknown or other
  modified_base (1557)..(1557): a, t, c, g, unknown or other
  modified_base (1559)..(1560): a, t, c, g, unknown or other
  modified_base (1562)..(1562): a, t, c, g, unknown or other
  modified_base (1564)..(1565): a, t, c, g, unknown or other
  modified_base (1569)..(1576): a, t, c, g, unknown or other
  modified_base (1582)..(1583): a, t, c, g, unknown or other
  modified_base (1587)..(1590): a, t, c, g, unknown or other
  modified_base (1594)..(1594): a, t, c, g, unknown or other
  modified_base (1603)..(1614): a, t, c, g, unknown or other
  modified_base (1617)..(1617): a, t, c, g, unknown or other
  modified_base (1619)..(1653): a, t, c, g, unknown or other
  modified_base (1661)..(1667): a, t, c, g, unknown or other
  modified_base (1671)..(1671): a, t, c, g, unknown or other
  modified_base (1673)..(1676): a, t, c, g, unknown or other
  modified_base (1689)..(1704): a, t, c, g, unknown or other
  modified_base (1706)..(1708): a, t, c, g, unknown or other
  modified_base (1713)..(1799): a, t, c, g, unknown or other
  modified_base (1806)..(1825): a, t, c, g, unknown or other
  modified_base (1827)..(1827): a, t, c, g, unknown or other
  modified_base (1831)..(1833): a, t, c, g, unknown or other
  modified_base (1848)..(1848): a, t, c, g, unknown or other
  modified_base (1856)..(1856): a, t, c, g, unknown or other
  modified_base (1865)..(1865): a, t, c, g, unknown or other
  modified_base (1869)..(1869): a, t, c, g, unknown or other
  modified_base (1872)..(1873): a, t, c, g, unknown or other
  modified_base (1890)..(1892): a, t, c, g, unknown or other
  modified_base (1894)..(1894): a, t, c, g, unknown or other
  modified_base (1904)..(1904): a, t, c, g, unknown or other
  modified_base (1915)..(1915): a, t, c, g, unknown or other
  modified_base (1921)..(1921): a, t, c, g, unknown or other
  modified_base (1923)..(1923): a, t, c, g, unknown or other
  modified_base (1935)..(1935): a, t, c, g, unknown or other
  modified_base (1937)..(1939): a, t, c, g, unknown or other
  modified_base (1943)..(2881): a, t, c, g, unknown or other
  modified_base (2896)..(2896): a, t, c, g, unknown or other
  modified_base (2904)..(2907): a, t, c, g, unknown or other
  modified_base (2909)..(2909): a, t, c, g, unknown or other
  modified_base (2912)..(2912): a, t, c, g, unknown or other
  modified_base (2916)..(2916): a, t, c, g, unknown or other
  modified_base (2926)..(2926): a, t, c, g, unknown or other
  modified_base (2929)..(2929): a, t, c, g, unknown or other
  modified_base (2934)..(2934): a, t, c, g, unknown or other
  modified_base (2943)..(2943): a, t, c, g, unknown or other
  modified_base (2951)..(2951): a, t, c, g, unknown or other
  modified_base (2953)..(2954): a, t, c, g, unknown or other
  modified_base (2956)..(2959): a, t, c, g, unknown or other
  modified_base (2963)..(2963): a, t, c, g, unknown or other
  modified_base (2966)..(2967): a, t, c, g, unknown or other
  modified_base (2969)..(2970): a, t, c, g, unknown or other
  modified_base (2977)..(2977): a, t, c, g, unknown or other
  modified_base (2982)..(2984): a, t, c, g, unknown or other
  modified_base (2996)..(2998): a, t, c, g, unknown or other
  modified_base (3001)..(3002): a, t, c, g, unknown or other
  modified_base (3005)..(3006): a, t, c, g, unknown or other
  modified_base (3010)..(3011): a, t, c, g, unknown or other
  modified_base (3018)..(3018): a, t, c, g, unknown or other
  modified_base (3027)..(3027): a, t, c, g, unknown or other
  modified_base (3033)..(3033): a, t, c, g, unknown or other
  modified_base (3042)..(3042): a, t, c, g, unknown or other
  modified_base (3100)..(3100): a, t, c, g, unknown or other
  modified_base (3105)..(3105): a, t, c, g, unknown or other
  modified_base (3109)..(3109): a, t, c, g, unknown or other
  modified_base (3111)..(3111): a, t, c, g, unknown or other
  modified_base (3124)..(3124): a, t, c, g, unknown or other
  modified_base (3128)..(3128): a, t, c, g, unknown or other
nnnnnnnnnnnnnnnnnnnnnnnnnnnnnnnnnnnnnnnnnnnnnnnnnnnnnnnnnnnnnnnnnnnnnnnnnnnnnnnnnnnnnnnnnnnnnnnnnnnnnnnnnnnnnnnnnnnnnnaggggnnnnnncgaggggggngagggannnggnnttnttaaacaaattgaaggnccccttnngnagnnnnctcnannttttgatggccattngnanccgcnggnnnntttngnnaaaggnnccnggnggnnnnnnnnnnnnnggttnnnnnngnnnnngngggnngggnnnngggggggggggnnnnnggggnnngggggggggnnnnnnnnnnnngnnnnnngggnnnnnnnnnnnnnnnnnnngnnnngngggnngggnnnnnnngnngnnnngngnggnnnggggggngngggggggggggnngggggggnggggggggggggnnnngnnnggnggggngnngggggggggnggggnggggnnggggnnnngggnngggngggnngggggggggggggnnnngggggggggnggngggggngggggnnnnngggggggggggnnnnggggngggnnnggggggggggggnngnnggggggnngggggggggggngnggnnnggggggggggggnnggggggnggggnnnnnggnggggggggggggnnggggggggnnnngggggggggggggggnngggggngnggngggggggggggggnnggnnnnnggggnggggggnngngggggggggggggnnnggngggggggggnnnggggggngnggggggnggggggggggggggnnnnnngggggggggggggggnnnnggggggggggnngngggggggnngggggggnnnnngggggggggggngggngngggggggggggnnnngggggggggggggggngngnggggngnngggggggggggggnngggnnngggggnggggggnggggggnggggggggngnnngngngggggggggggggggggnnnnnnnnnnnnnnnnnnnnnnnnnnnnnnnnnnnnnnnnnnnnnnnnnnnnnnnnnnnnnnnnnnnnnnnnnnnnnnnnnnnnnnnnnnnnnnnnnnnnnnnnnnnnnnnnnnnnnnnnnnnnnnnnnnnnnnnnnnnnnnnnnnnnnnnnnnnnnnnnnnnnnnnnnnnnnnnnnnnnnnnnnnnnnnnnnnnnnnnnnnnnnnnnnnnnnnnnnnnnnnnnnnnnnnnnnnnnnnnnnnnnnnnnnnnnnnnnnnnnnnnnnnnnnnnnnnnnnnnnnnnnnnnnnnnnnnnnnnnnnnnnnnnnnnnnnnnnnnnnnnnnnnnnnnnnnnnnnnnnnnnnnnnnnnnnnnnnnnnnnnnnnnnnnnnnnnnnnnnnnnnnnnnnnnnnnnnnnnnnnnnnnnnnnnnnnnnnnnnnnnnnnnnnnnnnnnnnnnnnnnnnnnnnnnnnnnnnnaggggnnnnnnncacgggggngccgggnnnnnggnnnttnttaaaaaaaccgtaagnnccccntnngnnagnnntctnnannccccgatngccantngnnancnnccgnnnnnnnntttggnnaaannnncccnggggggggnnnnnnnnnnnnggntnnnnnnnnnnnnnnnnnnnnnnnnnnnnnnnnnnngggggggnnnnnnngggngnnnnggggggggggggnnnnnnnnnnnnnnnngnnnggggnnnnnnnnnnnnnnnnnnnnnnnnnnnnnnnnnnnnnnnnnnnnnnnnnnnnnnnnnnnnnnnnnnnnnnnnnnnnnnnnnnnnnnnggggggnnnnnnnnnnnnnnnnnnnngngggnnnggggggggggggggngggggggnggggggggngggnggnnggggggggggggggggnnngngggggggggnggggggggggngggggngngggggggggggngnnngggnnnnnnnnnnnnnnnnnnnnnnnnnnnnnnnnnnnnnnnnnnnnnnnnnnnnnnnnnnnnnnnnnnnnnnnnnnnnnnnnnnnnnnnnnnnnnnnnnnnnnnnnnnnnnnnnnnnnnnnnnnnnnnnnnnnnnnnnnnnnnnnnnnnnnnnnnnnnnnnnnnnnnnnnnnnnnnnnnnnnnnnnnnnnnnnnnnnnnnnnnnnnnnnnnnnnnnnnnnnnnnnnnnnnnnnnnnnnnnnnnnnnnnnnnnnnnnnnnnnnnnnnnnnnnnnnnnnnnnnnnnnnnnnnnnnnnnnnnnnnnnnnnnnnnnnnnnnnnnnnnnnnnnnnnnnnnnnnnnnnnnnnnnnnnnnnnnnnnnnnnnnnnnnnnnnnnnnnnnnnnnnnnnnnnnnnnnnnnnnnnnnnnnnnnnnnnnnnnnnnnnnnnnnnnnnnnnnnnnnnnnnnnnnnnnnnnnnnnnnnnnnnnnnnnnnnnnnnnnnnnnnnnnnnnnnnnnnnnnnnnnnnnnnnnnnnnnnnnnnnnnnnnnnnnnnnnnnnnnnnnnnnnnnnnnnnnnnnnnnnnnnnnnnnnnnnnnnnnnnnnnnnnnnnnnnnnnnnnnnnnnnnnnnnnnnnnnnnnnnnnnnnnnnnnnnnnnnnnnnnnnnnnnnnnnnnnnnnnnnnnnnnnnnnnnnnnnnnnnnnnnnnnnnnnnnnnnnnnnnnnnnnnnnnnnnnnnnnnnnnnnnnnnnnnnnnnnnnnnnnnnnnnnnnnnnnnnnnnnnnnnnnnnnnnnnnnnnnnnnnnnnnnnnnnnnnnnnnnnnnnnnnnnnnnnnnnnnnnnnnnnnnnnnnnnnnnnnnnnnnnnnnnnnnnnnnnnnnnnnnnnnnnnnnnnnnnnnnnnnnnnnnnnnnnnnnnnnnnnnnnnnnnnnnnnnnnnnnnnnnnnnnnnnnnnnnnnnnnnnggggaaaggagaggngggggggnnnntnttnaagnaccttgaggnccnttagnattttgacnaccccttngnnannnnccgnganncnntagaggngaggnnngcgggggggggnnnagnnggnngggnngaaaaangtttggggngagagnaggaagagngagaaggggggggggaaggagaggaggggggaggggggaggaaaaaagaggggtttanggganaagngnggggaagggaggnaggngaggg

SEQ ID NO: 1192 - protein, 910 aa, Homo sapiens
  MOD_RES (4)..(5): Variable amino acid
  MOD_RES (7)..(11): Variable amino acid
  MOD_RES (13)..(13): Variable amino acid
  MOD_RES (17)..(20): Variable amino acid
  MOD_RES (22)..(26): Variable amino acid
  MOD_RES (28)..(28): Variable amino acid
  MOD_RES (30)..(30): Variable amino acid
  MOD_RES (35)..(36): Variable amino acid
  MOD_RES (38)..(38): Variable amino acid
  MOD_RES (42)..(47): Variable amino acid
  MOD_RES (49)..(57): Variable amino acid
  MOD_RES (59)..(68): Variable amino acid
  MOD_RES (70)..(71): Variable amino acid
  MOD_RES (75)..(75): Variable amino acid
  MOD_RES (78)..(78): Variable amino acid
  MOD_RES (82)..(84): Variable amino acid
  MOD_RES (87)..(88): Variable amino acid
  MOD_RES (93)..(93): Variable amino acid
  MOD_RES (95)..(95): Variable amino acid
  MOD_RES (97)..(99): Variable amino acid
  MOD_RES (101)..(102): Variable amino acid
  MOD_RES (107)..(108): Variable amino acid
  MOD_RES (117)..(118): Variable amino acid
  MOD_RES (122)..(123): Variable amino acid
  MOD_RES (126)..(126): Variable amino acid
  MOD_RES (131)..(132): Variable amino acid
  MOD_RES (135)..(135): Variable amino acid
  MOD_RES (139)..(139): Variable amino acid
  MOD_RES (141)..(141): Variable amino acid
  MOD_RES (146)..(146): Variable amino acid
  MOD_RES (148)..(148): Variable amino acid
  MOD_RES (150)..(152): Variable amino acid
  MOD_RES (157)..(157): Variable amino acid
  MOD_RES (160)..(161): Variable amino acid
  MOD_RES (166)..(166): Variable amino acid
  MOD_RES (169)..(170): Variable amino acid
  MOD_RES (175)..(177): Variable amino acid
  MOD_RES (179)..(179): Variable amino acid
  MOD_RES (182)..(182): Variable amino acid
  MOD_RES (187)..(189): Variable amino acid
  MOD_RES (192)..(193): Variable amino acid
  MOD_RES (195)..(196): Variable amino acid
  MOD_RES (198)..(198): Variable amino acid
  MOD_RES (203)..(205): Variable amino acid
  MOD_RES (210)..(211): Variable amino acid
  MOD_RES (215)..(216): Variable amino acid
  MOD_RES (219)..(219): Variable amino acid
  MOD_RES (222)..(223): Variable amino acid
  MOD_RES (227)..(229): Variable amino acid
  MOD_RES (233)..(234): Variable amino acid
  MOD_RES (239)..(240): Variable amino acid
  MOD_RES (242)..(243): Variable amino acid
  MOD_RES (248)..(248): Variable amino acid
  MOD_RES (250)..(250): Variable amino acid
  MOD_RES (252)..(252): Variable amino acid
  MOD_RES (257)..(257): Variable amino acid
  MOD_RES (260)..(262): Variable amino acid
  MOD_RES (269)..(420): Variable amino acid
  MOD_RES (423)..(424): Variable amino acid
  MOD_RES (430)..(434): Variable amino acid
  MOD_RES (439)..(440): Variable amino acid
  MOD_RES (442)..(445): Variable amino acid
  MOD_RES (447)..(448): Variable amino acid
  MOD_RES (450)..(450): Variable amino acid
  MOD_RES (452)..(455): Variable amino acid
  MOD_RES (457)..(459): Variable amino acid
  MOD_RES (461)..(461): Variable amino acid
  MOD_RES (463)..(465): Variable amino acid
  MOD_RES (468)..(485): Variable amino acid
  MOD_RES (488)..(489): Variable amino acid
  MOD_RES (491)..(492): Variable amino acid
  MOD_RES (497)..(503): Variable amino acid
  MOD_RES (505)..(533): Variable amino acid
  MOD_RES (536)..(545): Variable amino acid
  MOD_RES (550)..(550): Variable amino acid
  MOD_RES (557)..(558): Variable amino acid
  MOD_RES (564)..(565): Variable amino acid
  MOD_RES (572)..(572): Variable amino acid
  MOD_RES (574)..(575): Variable amino acid
  MOD_RES (579)..(580): Variable amino acid
  MOD_RES (582)..(894): Variable amino acid
  MOD_RES (899)..(899): Variable amino acid
  MOD_RES (902)..(904): Variable amino acid
  MOD_RES (906)..(906): Variable amino acid
  MOD_RES (909)..(910): Variable amino acid
MAIXXRXXXXXKXPGGXXXXGXXXXXGXGXGGGGXXGXGGGXXXXXXGXXXXXXXXXGXXXXXXXXXXGXXGGGXGGXGGGXXXGGXXGGGGXGXGXXXGXXGGGGXXGGGGGGGGXXGGGXXGGXGGGGXXGGXGGGXGXGGGGXGXGXXXGGGGXGGXXGGGGXGGXXGGGGXXXGXGGXGGGGXXXGGXXGXXGXGGGGXXXGGGGXXGGGXXGGXGGXXGGGXXXGGGXXGGGGXXGXXGGGGXGXGXGGGGXGGXXXGGGGGGXXXXXXXXXXXXXXXXXXXXXXXXXXXXXXXXXXXXXXXXXXXXXXXXXXXXXXXXXXXXXXXXXXXXXXXXXXXXXXXXXXXXXXXXXXXXXXXXXXXXXXXXXXXXXXXXXXXXXXXXXXXXXXXXXXXXXXXXXXXXXXXXXXXXXXXXRGXXHGGAGXXXXXKKTVXXPXXXXLXXPXAXXXXPXXXLXKXXXGGXXXXXXXXXXXXXXXXXXGGXXGXXGGGGXXXXXXXGXXXXXXXXXXXXXXXXXXXXXXXXXXXXXGGXXXXXXXXXXGGGGXGGGGGGXXGGGGGXXGGGGGGXGXXGGGXXGXXXXXXXXXXXXXXXXXXXXXXXXXXXXXXXXXXXXXXXXXXXXXXXXXXXXXXXXXXXXXXXXXXXXXXXXXXXXXXXXXXXXXXXXXXXXXXXXXXXXXXXXXXXXXXXXXXXXXXXXXXXXXXXXXXXXXXXXXXXXXXXXXXXXXXXXXXXXXXXXXXXXXXXXXXXXXXXXXXXXXXXXXXXXXXXXXXXXXXXXXXXXXXXXXXXXXXXXXXXXXXXXXXXXXXXXXXXXXXXXXXXXXXXXXXXXXXXXXXXXXXXXXXXXXXXXXXXXXXXXXXXXXXXXXXXXXXXXXXXXXXXXXXXXXXXXXGKGEXGGXXXKXLEXX

SEQ ID NO: 1193 - DNA, 859 bp, Homo sapiens
  source
  (1)..(859)
  CDS (201)..(659)
gggaacacaattcatggagatcttgctccgttttgaaagaaaaatttgagcttcggattcctacattaattttcaaactagagttgatttaaactttgatcgacaatgtctatttgggggatataaaactagtttttgtgacctatttttgttttgtttgtttgtttgagacacagtcttactctattacccaggctggaatgcagtcgcgtgatcttggctcactgcaacctccacctcccaagttcaagcgattcttctgcctcagcctcccaagtagctgggattataggcacctgccaccaggcccagctaatattttggttgtgtgtgtgtgttttgagagggagtcttgctctgtcgccaggctggagtgcaatagcgagatctcagctcactgcaatctctcgcctcccaggttcaagcgattctcctgcctcagcctcccaagtagctgggattacaggcacccgccaccatgcctggctagtttctttctttctttttttgagacggagtttcactcttgttgcccaggctggagtgcaatggcacaatcttggctcactgcaacctctgcctcccaggttcaagcgattctcctgcctcagcctcctgagtacctgggattacaggcatgtaccaccacacccagctaatttgtattttttagtagagacagggtttctccatgttggtcaggctggtttcaaacccctgacctcaggtgatccacccacctcagcctcccaaagtgctgggattacaggcgtgagccaccaggcccggactaattttttttggtgtagacggggtttctccatgttggccaggctggtttcaaactcctgactcaagt

SEQ ID NO: 1194 - protein, 152 aa, Homo sapiens [sequence omitted]

SEQ ID NO: 1195 - DNA, 916 bp, Homo sapiens
  source
  (1)..(916)
  CDS (201)..(716)
agaggatttttttaatttcatgagcataattgagttggttccagtaacatatttgaaaacaaattcaacaaagaatccattcaaaataatacatttcttaatgctccctctgaaacactcagcaaatattgtgcatctttgacccacagctctgaccttcctgtcctagatgagggtttgtctttctctgccacaagagcatggaaggcaacaagacatggatcacagacatcaccctgctgggattccaggttggtccagcactggagattctcctctgtggactcttctctgtcttctatacactcaccctgctggggaatggggtcatctttgggattatctgcctggactgtaagcttcacacacccatgtacttcttcctctcacacctggccatcattgacatgtcctatgcttccaacaatgttcccaagatgttggcaaacctaatgaaccagaaaagaaccatctcctttgttccatgcataatgcagacttttttgtatttggcttttgctgttacagagtgcctgattttggtggtgatgtcctatgatcgctatgtggccatctgccaccccttacgttacaatgtcctcatgagctggagagagtgcactgtcctggctgtggcttcctgggtgttcagcttcctcctggctctggtccatttagttctcattctgaggctgcccttcagttgtttctcatgaaatcaaccactactgtgaaatcctgtctgtcctcaagttggcctgtgctgacacctggctcaaccaggtggtcatctttgcagcctgcatgttcatcctggtagggtgactctgcctggtgctggtctcttactatggcatcctggcggccatcctgaggatccagtctggcgagggccacagaaaggacttctctacct

SEQ ID NO: 1196 - protein, 171 aa, Homo sapiens
MEGNKTWITDITLLGFQVGPALEILLCGLFSVFYTLTLLGNGVIFGIICLDCKLHTPMYFFLSHLAIIDMSYASNNVPKMLANLMNQKRTISFVPCIMQTFLYLAFAVTECLILVVMSYDRYVAICHPLRYNVLMSWRECTVLAVASWVFSFLLALVHLVLILRLPFSCFS

SEQ ID NO: 1197 - DNA, 976 bp, Homo sapiens
  source
  (1)..(976)
  CDS (201)..(776)
  modified_base (651)..(750): a, t, c, g, unknown or other
  modified_base (757)..(757): a, t, c, g, unknown or other
  modified_base (771)..(771): a, t, c, g, unknown or other
ctggttggattccagctcagtgcagagatggagatctttctctcttgcatcttctccctgttatatctcttcagtctactgaggaatggcatgaacatgggactcatctgtctggatcccagactacacacccccatatacttcttcctgtcacacttggccgtcattgacatatactatgctttctcaatttgctcaacatgctggaaaacctagtgaaacacaaaaaaactatctcgttcatctcttgcattatgcagatggctttgtatttgacttttgctgctgcagtgtgcatgattttggtggtgatgtcctatgacagatttgtggcgatctgccatcccctgcattacactgtcatcatgaactggagagtgtgcacagtactggctattacttcctgggcatgtggattttccctggccctcataaatctaattctccttctaaggctgcccttctgtgggccccaggaggtgaaccacttcttcggtgaaattctgtctgtcctcaaactggcctgtgcagacacctggattaatgaaatttttgtctttgctggtggtgtgtttgtcttagtcgggcccctttccttgatgctgatctcctacatgcgcatcctcttggccatcctgaagatccagtcannnnnnnnnnnnnnnnnnnnnnnnnnnnnnnnnnnnnnnnnnnnnnnnnnnnnnnnnnnnnnnnnnnnnnnnnnnnnnnnnnnnnnnnnnnnnnnnnnnntccactntagaccctataggntctaaagttcagacactgcctggcatttttaagttgtcatggcactggtgggagtgtcttttcgcatgctaatgaattatgagtagcatataatgagcagtaaggatgaccagagaggtcactttcatcactgttttggatttggtgggttttggctggtgtctttactgtatcctgttttatcagcaaggtccttgtgacttgt

SEQ ID NO: 1198 - protein, 191 aa, Homo sapiens
  MOD_RES (151)..(184): Variable amino acid
  MOD_RES (186)..(186): Variable amino acid
  MOD_RES (191)..(191): Variable amino acid
MLENLVKHKKTISFISCIMQMALYLTFAAAVCMILVVMSYDRFVAICHPLHYTVIMNWRVCTVLAITSWACGFSLALINLILLLRLPFCGPQEVNHFFGEILSVLKLACADTWINEIFVFAGGVFVLVGPLSLMLISYMRILLAILKIQSXXXXXXXXXXXXXXXXXXXXXXXXXXXXXXXXXXHXRPYRX

SEQ ID NO: 1199 - DNA, 874 bp, Homo sapiens
  source
  (1)..(874)
  CDS (201)..(674)
gtaatgagataccacttcatacccgctaggatggctttaatcagcaagacaatgacgaatgttggcaaggatgtggagaaattgaatctgcatgcattgctggtaggagtatgaagtgatgcagtcatttttatttatttattttatttatttttttgagacagagtctcactctgtcagccaggctggagtgcaatggcatgatctcagctcactgcaacttctgcctcccgggctcaagcaattctcctgcctcagccccccgagtagctgggattacaggcatgtgccaccacgcccggctaatttttgcatttttagtagagacggggtttcaccatgttggccaggctggtcttgaactcctgacctcaggtaatctgcctgcctcgggctcccagagtgctgggattataggcgtgggccaccgcgcctggccgatgcagtcatttttaaaaccatgcttgtctttcttcaaaaagttttttttgtttgtttgttttttgtttttttttttgtcttttttgagatggagtctcactctgtcatcaggctggagtacagtggcacgatctcagctcaccgcaacctctgcctcccgggttcaagcaattctcctgcctcagcctcctgagtcactgagactacaggcatgcgccaccatgcccagctaatttttgtatttttagtagagaccgggtttcaccatgttggccaggatggtctcgatctcttgacctcgtgattcacctgcttcagacttccaaagtgctgggattacaggcataagccaccgcacccagcctcaaaaagttaaatatagagttaccacatgacccagcaatttcactactaggaatatacccaagagaaa

SEQ ID NO: 1200 - protein, 157 aa, Homo sapiens
MISAHCNFCLPGSSNSPASAPRVAGITGMCHHARLIFAFLVETGFHHVGQAGLELLTSGNLPASGSQSAGIIGVGHRAWPMQSFLKPCLSFFKKFFLFVCFLFFFLSFLRWSLTLSSGWSTVARSQLTATSASRVQAILLPQPPESLRLQACATMPS

SEQ ID NO: 1201 - DNA, 874 bp, Homo sapiens
  source
  (1)..(874)
  CDS (201)..(674)
attagaaacaaatttaattttataattggatttaagaaccacaaacccaaaacagtttggagctccttaatacaagttaaaaataccctagtggtattgaaagtagcacagaatacaatttatgttataatgatgttcctggtttattctaaaatttgaccatatttaatatttctgtttaaccacgagagaaacggtcaatgctaatgattcataccctgagaatcagtcacctattgatggaaatagccaacttgggagagagacagactagattttactttaaagtcagctatattttatatcagtgccctccaataaataatttatttttcttttccctgccttccccgccttctctgccttccctgccttccctttcttccttttctttctttccttctttttcttttctttttctttctttctttctctttctttctctctccccttccttccttccttccttccttccttccttccttccttcaaaaccatcctttctttctttcttccttccttccttctctttctttctttttctttctttcaactgggtctctttctgtcacccagcctggactgcagtggcacaatctcagctcactgcaacctccagctccagggttcaagcaattctcacgtgtcagcctcccaagcagctgggattataggcacctgccaccatgctgggctaatttttgtatttttagtagagacagggtttcaccatattgcctaggctagtcttggactcccggcctaagtgatcttcccacatcggcctcccaaagtgccaggattacaggtgtgagccaccatgcctggccatatacgtaatttataatagacacattaagtaaaatgaagtaag

SEQ ID NO: 1202 - protein, 157 aa, Homo sapiens
MLMIHTLRISHLLMEIANLGERQTRFYFKVSYILYQCPPINNLFFFSLPSPPSLPSLPSLSSFSFFPSFSFLFLSFFLFLSLSPSFLPSFLPSFLPSKPSFLSFFLPSFSFFLFLSFNWVSFCHPAWTAVAQSQLTATSSSRVQAILTCQPPKQLGL

SEQ ID NO: 1203 - DNA, 1015 bp, Homo sapiens
  source
  (1)..(1015)
  CDS (201)..(815)
tcatattttccctcctttctattgttgtgatttatcaaaataaatatatgtaggaattgagtcatgaaagtcacagtattgttgtttaagcaaaagtctaactgtttactactttataatatacatgataaagaattttggttgtttccaagaagaaacagcatgctccatttcatgtttcaattacctctgccatctccatgtcttccagactaatgaatatgtccagcatggaaacgattaattttgttagctactttatcctcatgggctttccctcaagcccagaaatgcagctcctctactttggtctcttctcattagcctatactctcaccctgatgggaaatgcatccattgtctgtgctgtgtggtgggaccagcaccttcacactcccatgtacaccctcttgggaaatttctctctcctggaaatatgttatgttattacaactgttcctaaactgctggccaacttcctctccacaagcaagtccatctcattcatgagttgttttgcacagttctacttcttcttatctttggggtatgatgagggcttcttcctttgcatcatggcctttgacaggtatcttgccatctgccgccctctacgttatccatgcattatgaataagcaagtatgcactggccttatcatctttgcatggtcatgtgtctttgtaatcttcctaattctgttgattctcatttcacagatatcctactgtggcccaaatattatcaaccattttgtttgtgatcctgtaccattggtgatgctgtcctgttctgcagacataatcatcacctagctcatttactccacattcaattctatcttcatgattggcacctttctctttatcctttgttcctatgctctggtgattctggctgtaatacagatgccttcagaggctggcaaacgaaaggctttctccacttgtgcctctcatttggcagttgtcaccttgttttatggctctatcatggtgatgtatgttagtcctgg

SEQ ID NO: 1204 - protein, 204 aa, Homo sapiens [sequence omitted]

SEQ ID NO: 1205 - DNA, 1583 bp, Homo sapiens
  source
  (1)..(1583)
  CDS (201)..(480)
  CDS (671)..(1058)
  CDS (1149)..(1383)
ctgaaagtgaggagttgaggggaggtgagcaggagagaggttgggtagaccttccctagagcactgaaaagcaactgccccatgtgggactcagaatatctcagaaccttagggcagaggaattgcctggtgcctccaccaaaaccatgccatgaaaactgtctgtgtcaatgagagagttggagaacaaaggtaaagaaatgcacctctttcctttatgggcacctaggtgcatggatacacacctggtgttgggcacagcatcaagaatacctgaacgaggtggagagagggatgggggcaagcaggagagggtaccctgcagtggaggatatgggatggatggatcacttgcaggagactcattcctctccttgactttgctctgtgagattcccaccaatcttgggaggcccagcaggaccctcttgggaagcccagcaggtcagaaggcaaccctgactctccttcctaggcctggtaagttaccaacctttgtctttgcagggtgtgcccaggcagccaaggcagcccaccatggcccagtttctctcagtgttctctgggaagctggattgggacaacaggacagagaccccaggacaagtgaacatgagtcatacgggaggcgagtggttggtgggcaaacaggtggttttcatcctgacagtgctggtggccttctgtgggctggtgggcaatggtgtggtgtgctggcttttctgcttccaggtcaggagcagcccctacatgacctatgtccttaacctggccgctgctgatatggtcaacctctcctgtgtaactgtgatcctgttggagaaaatcctcatgctgtatcaccaggtgacattgcaggtggccatgtttctggagcctgtgtcctatttctctgacacagtgagtctctgtctcctggtggccatgaatattgagagctttctgtgtgtcctctgtcccacctggtgctgccaccgcccaaagcacacctctgctgtgatgagcatcctgagctgggccctggccctttctttgcatgtggttagccaggtttgtgagtaatgggagaagggcctggcatgtgaccaatttcaggcaggctttataatatttcacatgcttatttgtcttgtggtgggcatttccagcctgactttgatcatcaggagcctgtactgcctgaagaactgttcacccatccggatctaccacattgtccgctttgtggccatcagcttcctcgtttggggcctgcccttagttgtccttgtgtacctgccaggaaaagaatacctgacctttgcctttgaccttctgttgctgctgtccatggtagtcagtatggctcaaccagccatctacttcttggctggctacctttgaaggaagaggcatagggagtccttaaagttgttctcccaagagctttgttgaatgagatggaaggtggaggaaacaaggggtttcaggcaagggaacagcaggttaccaggactgagctcctcccactccaggaagctgttccccaggactgaccatgatgccctgtattggtccattctcacactgctataaagaaatat

SEQ ID NO: 1206 - protein, 300 aa, Homo sapiens [sequence omitted]

SEQ ID NO: 1207 - DNA, 874 bp, Homo sapiens
  source
  (1)..(874)
  CDS (201)..(674)
ccaggagattcagctctccctctggagataaagagtgaggatccattattaatgttttctacacctgttcctacagatcacacccagcaagttaatggctgtggaaaatgactcttcagtgacaagagtttattcttttgggattaacagaccagcctgagatctaattgcccctgtttttcctgttcttggtgaactatatgaccaccatggtgggcaacttgagtttaattaatctaatttgcctgaattcacaccttcacactcccatgtattttttccttttcaatctgtccttcattgatctctgttattcatttgtctttacccccaaaatgctgatgagctttatttcagagaggaacatcatctcctttccaggatgcataactcagctctttttcttctgcttttttgtccactctgagtgctatgtactgacagccatggcctatgatcgctatgtggccatctgcaaaccccttctgtacatggtcaccacgtcccctcagatctgttctctactgatgcttggttcatatgtgatggggtttgctggggccatggtccacacagagtgtatgatgaagctcatcttttgtgactccaatgtcatcaaccattacatgtgtgacatcttcccactgctccagctctcctgcagcagcacctaggccaatgagctggtgatgtctgttattgtaggcacagttgttatagtaccaagcctcattatcttaatctcttatgctttgattcttttcaatatccttcacatgtcctcagccgagggttggttcaaagccatcggtacctgtggctcccacataataactgttggcctattctatgaatttgggctgatcactcatgt

SEQ ID NO: 1208 - protein, 157 aa, Homo sapiens [sequence omitted]

SEQ ID NO: 1209 - DNA, 1018 bp, Homo sapiens; identical to SEQ ID NO: 1081
  source
  (1)..(1018)
  CDS (201)..(818)

SEQ ID NO: 1210 - protein, 205 aa, Homo sapiens [sequence omitted]

SEQ ID NO: 1211 - DNA, 1017 bp, Homo sapiens
  source
  (1)..(1017)
  CDS (203)..(817)
gggaacattctcatcattgtcctggtacagttagattctggactgttcacgcccatgtacttatttatcagtgtcctctcctttgtagaggtgtggtatgtcagcaccacagtgcccatgctgctgcacaccttgctccaagggtgttcacccgtctcatcagctgtatgctttattcagctatgtctttcattccttagggatgactgagtgctacctgctgggtgtcatggcactggatagctaccttatcatctgccacccactccactaccacgcactcatgagcagacaggtacagttacgactagctggggccagttgggtggctggcttctcagctgcacttgtgccagccaccctcactgccactctgcccttctgcttgaaagaggtggcccattacttttgtgacttggcaccactaatgcggttggcatgtgtggacacaagctggcatgctagggcccatggcacagtgattggtgtggccactggttgcaactttgtgctcattttgggactctatggaggtatcctgaatgctgtgctgaagctaccctcagctgccagtagtgccaaggccttctctacctgttcctcccacgtaactgtggtggcactattctatgcttctgccttcacagtatatgtgggctcacctgggagtcgacctgagagcacagacaagcttgttgccttggtttatgcccttattacccctttcctcaatcctatcatctatagccttcgcaacaaggaggtgaagaaggctttaaggagagtcatggctgggcgcggtggctcacgcctgtaatcccagcactctgggaggccgaggcgggtggatcacgaggtcaggagatcgagaccacggtgaaaccccatctctactaaaaatacaaaaaaaattagccaggctcggtggcgggtgcctgtagtcccagctactcgggaggctgaggcaggagaatggcgtgaacccgggaggcggagcttgcagtgagtcgagatcgc

SEQ ID NO: 1212 - protein, 204 aa, Homo sapiens [sequence omitted]

SEQ ID NO: 1213 - DNA, 1038 bp, Homo sapiens
  source
  (1)..(1038)
  CDS (201)..(694)
  CDS (811)..(838)
tgttcaaccaatagccacaaaagtagtagcctcaggagactcattctcgcagtgaattgggcatgcaccaaattccaggcaagatgaggagacattgtggaagatgctctccttcttttaagccaaagagacgtcaataattgtggcatattattaattagtgccttattcctctacaatttttttcagagaggtcaggaatggttgaagaaaatcataccatgaaaaatgagtttatcctcacaggatttacagatcaccctgagctgaagactctgctgtttgtggtgttctttgccatctatctgatcaccgtggtggggaatattagtttggtggcactgatatttacacactgtcggcttcacacaccaatgtacatctttctgggaaatctggctcttgtggattcttgctgtgcctgtgctattacccccaaaatgttagagaacttcttttctgagggcaaaaggatttccctctatgaatgtgcagtacagttttattttctttgcactgtggaaactgcagactgctttcttctggcagcagtggcctatgaccgctatgtggccatctgcaacccactgcagtaccacatcatgatgtccaagaaactctgcattcagatgaccacaggcgccttcatagctggaaatctgcattccatgattcatgtagggcttgtatttaggttagttttctgtggattgaatcacatcaaccacttttactgtgatactcttcccttgtatagactctcctgtgttgaccctttcatcaatgaactggttctattcatcttctcaggttcagttcaagtctttaccataggtagtgtcttaatatcttatctctatattcttcttactattttcagaatgaaatccaaggagggaagggccaaagccttttctacttgtgcatcccacttttcatcagtttcattattctatggatctatttttttcctatacattagaccaaatttgcttgaagaaggaggtaatgatataccagctgctattttatttacaa

SEQ ID NO: 1214 - protein, 173 aa, Homo sapiens
MVEENHTMKNEFILTGFTDHPELKTLLFVVFFAIYLITVVGNISLVALIFTHCRLHTPMYIFLGNLALVDSCCACAITPKMLENFFSEGKRISLYECAVQFYFLCTVETADCFLLAAVAYDRYVAICNPLQYHIMMSKKLCIQMTTGAFIAGNLHSMIHVGLVFRFSSSLYHR

SEQ ID NO: 1215 - DNA, 982 bp, Homo sapiens
  source
  (1)..(982)
  CDS (201)..(782)
gctgttcccaacttcacactcccatgtacctgttcctcagccacttggcttttgtggacatagggcttgccacagtagtcacacctataatgcttatgggattcctaagacgtggaacagccctccctgtcactagctgtgaagcccagctctgttctgtagtcatgtttgggacgtctgaatgcttcctactggcgaccatggcctatgatcgctatgtggccatctgctcacccctggtgaactccacccacttgtcccccataatctgcatactcttagtgggggtttgctacctgggtggatgtgtgaatgcctcaacatttactagttgtttattgagtctgtctttctgtggaccaaatcagatagatcattttttctgtgatttctctcctttgttgaaactttcctgctcaaatatctccattcctgaaattatcccttccatctcttctggatctatcattgtggtcacagtatttgccatagccatctcctacatctacatcctcatcaccatcctgaagatgcgctccgccgaggggcgccacaaggccttctccacctgtacctcccacctcgctgcggttactctctactatggaacgattaccttcatttatgtgatgcccaaatccagttactcaactagccagaacagattgatatcgctgtcctacacagtggtaatccccatactgaacccctttatctatagtctgaggaacagagatgtaaaggaggcactaagaaaggcaactgtcagaatatattcttaggatcaatttgtagcatttcagacgacctataaagttttcattatcggtatcacgtttaggacctaccaaatactacttaactgattgcttaaaataaaattatatttatttgttctaactttcatttttaaatacttgtagaccaattgggagacctagatgtcagtaataatgatagtaataattattactattattaa

SEQ ID NO: 1216 - protein, 193 aa, Homo sapiens
MAYDRYVAICSPLVNSTHLSPIICILLVGVCYLGGCVNASTFTSCLLSLSFCGPNQIDHFFCDFSPLLKLSCSNISIPEIIPSISSGSIIVVTVFAIAISYIYILITILKMRSAEGRHKAFSTCTSHLAAVTLYYGTITFIYVMPKSSYSTSQNRLISLSYTVVIPILNPFIYSLRNRDVKEALRKATVRIYS

SEQ ID NO: 1217 - DNA, 1042 bp, Homo sapiens
  source
  (1)..(1042)
  CDS (201)..(842)
cctgactgggattccaggaatgccagagaaagacttatggatggccttgcccctctgtcttctttatagcaccacgatcttgggaaatgtcaccatccttgttgtcatcaaagttgagcaaagtctccatgagcccatgtatttttctagccatgttagctgccactgacctcagcctttcactgtcttccatgcctaccatggtcagtgttcactggttcaactggcgttcaataacttttaatggctgccttatccagatgttcttcatccacacatttgggggagtggaatcaggtgttctggtggccatggcctttgatcgctttgtggccatccgctttcctttgcactatgctacaattctcactcacagtgtcatcagcaagattgcagcagccatcctgctacggagtgtgggggctgtgctccctgtgccttttctcatcaaaaggttacctttctgtcactccaatgtcctctcccatgcatactgcctccatcaggatgccatgaggcttgcctgtgctgacactggtgtcaatagcatctatggcctgttggctgtgatcttcatcattgtactagatgccttaatacttttggcctcttacattctaatcctgcaggcagtattgagcattgcttcccaggaagacaggctcaaggctctcaacacctgtctctctcatatctgcagtgctgcttttctatgtgcctctcattggtatgaccctaattcatcgctatgggaagcatttgtcaccactaatacacacattcatggccaatatctacctgcttctccctcctgtgctcaatcccattgtgtacagtgttaggaccaagcagatctgatagcagattgtccaggccttttgtggggctagggttagcccttaatggcatctactatttccaagtaaatgcaatcaagttagagaagagtatcaaatacagcactatccaatagaaattcccacagaagtggatattttctatttctctgctgtttagtaactagtagctgtacatggctatt

SEQ ID NO: 1218 - protein, 213 aa, Homo sapiens
MVSVHWFNWRSITFNGCLIQMFFIHTFGGVESGVLVAMAFDRFVAIRFPLHYATILTHSVISKIAAAILLRSVGAVLPVPFLIKRLPFCHSNVLSHAYCLHQDAMRLACADTGVNSIYGLLAVIFIIVLDALILLASYILILQAVLSIASQEDRLKALNTCLSHICSAAFLCASHWYDPNSSLWEAFVTTNTHIHGQYLPASPSCAQSHCVQC

SEQ ID NO: 1219 - DNA, 1108 bp, Homo sapiens
  source
  (1)..(1108)
  CDS (201)..(462)
  CDS (700)..(908)
taggactaaccaatgactcagaactgcaggttcccctctttataacgttccccttcatctatattatcactctggttggaaacctgggaattattgtattgatattctgggattcctgtctccacaatcccatgtacttttttctcagtaacttgtctctagtggacttttgctactcttcagctgtcactcccatcgtcatggctggattccttatagaagacaaggtcatctcttacaatgcatgtgctgctcaaatgtatatctttgtagcttttgccactgtggaaaattacctcttggcctcaatggcctatgaccgctatgcagcagtgtgcaaacccctacattacaccacaaccatgacaacaactgtgtgtgctcgtctggccataggctcctacctctgtggtttcctgaatgcctccatccacactggggacacatttagtctctctttctgtaagtccaatgaagtccatcactttttctgtgatattccagcagtcatggttctctcttgctctgatagacatattagcgagcttgttcttatttatgttgtgagcttcaatatctttatagctctcctggttatcttgatatcctacacattcatttttatcaccatcctaaagatgcactcagcttcagtataccagaagcctttgtccacctgtgcctctcatttcattgcagtcggcatcttctatgggactattatcttcatgtacttacaacccagctccagtcactccatggacacagacaaaatggcacctgtgttctatacaatggtcatccccatgctgaaccctctggtctatagtctgaggaacaaggaagtgaagagtgcattcaagaaagttgttgagaaggcaaaattgtctgtaggatggtcagtttaacattgtgggatgcaccataacctagttttatttctctcggatcttctccatgttctgaatcacatttaaggtccacaataaagttaaattcctgaagtgattgccatgcctgtttaaaagtctattgtctaaataaaaggaaacattatgtccagaaacataacatctgaacaagaatggctaagacatcttgggacttc

SEQ ID NO: 1220 - protein, 156 aa, Homo sapiens
MAGFLIEDKVISYNACAAQMYIFVAFATVENYLLASMAYDRYAAVCKPLHYTTTMTTTVCARLAIGSYLCGFLNASIHTGDTFSLSFFGIFYGTIIFMYLQPSSSHSMDTDKMAPVFYTMVIPMLNPLVYSLRNKEVKSAFKKVVEKAKLSVGWSV

SEQ ID NO: 1221 - DNA, 6476 bp, Homo sapiens
  source
  (1)..(6476)
  CDS (201)..(708)
  CDS (6116)..(6276)
aattgcttgcatccaaaatatacacacagcattaagggctggtttttatcttttattttcccaatcctctttccttctcaaggtgtccaagacacacagagccactgaatctcacaggtgtctgagaattcctcctcctgggactctcagaggatccagaactgcagccggtcctcgctttgctctccctgtccctgtccatgtatctggtcacggtgctgaggaacctgctcagcatcctggctgtcagctctgactcccacctccacacccccatgtacttcttcctctccaacctgtgctgggctgacatcggttacacctcggccacggttcccaagatgattgtggacacgcagtcgcatggcagagtcatctctcatgctggctgcctgacacagatgtctttcttggtcctttttgcatgtatagaagacatgctcctgactgtgatggcctatgactgctttgtagccatctgttgccctctgcactacccagtcatcgtgaatcctcacctctgtgtcttcttcgttttggtgtcctttttccttagcctgttggattcccagctgcacagttggattgtgttacaattcaccatcatcaagaatgtggaaatctctaattttgtctgtgacccctctcaacttctcaaacttgcctgttctgacagcgtcatcaatagcatattcatatattttgatagtactatgtttggttttcttcccatttcagggatccttttgtcttactctaaaattgtcccctccgttctaaggatgtcatcgtcagatgggaagtataaagccttctccacctgtggctctcacctagcagttgtttgctgatttgatggaacaggcattggcatgtacctgacttcagctgtggcaccaccccccaggaatggtgtcgtggagtcagggatgtacgctgtggtcacccccatgctgaaccttttcatctacagcctgagaaacaggcacacacaaagtgccctgcggaggctgcgcacagaacagttgaatctcatgatctcttgcatcctttttcttgtgtgggtgaaaaagggaaaccacatcaaatctctacatctgcaaatcctgccccttggtcacattatttttgtggcttgacggcttttattcctttccgcatttcctttgtgaatattgctttcttcgttatgcctttcactggaatgggtgagtattctgggatcctttgttcagcagaaacctcatgacagaatcctctatacctaggcggcctcttttagtttctgagcaataaccctgtcatccaggtggaatcacaaccatctttttatatacatgaagtcctcacttcattttggaattccctgaaaactgactttatggaaacaatgtacaagaggtcctccaacaccattggttgttcaaagttgtgtagttatactgttgatgaaaaataagtggtttcactatacataactttgcttcaaggtgaagtttccaagagactttcaaagatgttaagtgaggacatactgtacatcaaattcataacctcttccacagttcatgtggaatttctttataaactgcttctagagaatctatttaggcaggttgtgtgtagagatccatgtcgccgttcctcaatcttggctttgagtcaaatcacctggggagcttacaaatgatgaggcctgggtctcgatacctgagattctgatttccttgcacctgtgtgagtatgtggatttttttttttttcctttaaagcaccagaggtggttccaatgacgaagtttttagaggcatcaagctccaatgagtaagaacagaaattaactgtaatatgatttcttcaaatattatcttcaaatgcgttgtccatcaacaccatacaatgtgtattatgctgtttttttcttaccatttcgcattttctatctctttcttttcctttttttttttgagtcagagtttcactcttgttgctcaggctggagttcaatggcacggtctcggctcattgcaacctctgcctcccgtattcaagcgattctcctgtctcagccttccaagtagctggtattacaggcatgcgctaccatgcctgtctaattttttttttttttttgtattgttagtagagacaatttctccattttggtcaggctggtcttgaactcccgacctcaggtggtccgcccgcttccacctcccaatgttttgggattacaggcgtgagcgaccgcgcccagccaccacttagcatttacattttacatttgttgaagttatagatttatacacacattgattgctgctttgttatacacttgcacatacataagatgggaaatagaaaagaataaaatgggcacagtatccctgaagtttcacattccgagacattttaaaaacattagctctttagaaatttgtttcgattaagaaactgtggtatacacacccaatgaagtattattcagcctaaaaaggaagaaaatcctctccgctgcagagaaaatggatgagattgcaggtctgtatattaaatgaaagaagccaggcacagaatgacaaatatttcatgtcctcacttctatgtaggaagaaaaaaggaaaccttggccaggtgcggtggctcaggcctgtaatcccagcactttgggaggccgagtcgcacggatcatttgaggccaggagttcgagacccgcctggccaacatggtgaaaccccgtctctacggaaaacacaaacaattagccgggcgtggtgacgcgtgcctgtagtctcagctactcggagggctgaggcccaagaagcgcttgaactcgggaggcggaggttgcagtgagcccggactgtgcctgtgtactccaacctgggcaacagaaagagactccatcacacacctacacacaaaaggaatctcaggaaggtggaaagtataaaggtggttagcagacgctaggaagaaaaaggggtgggatggggaatgaagagaagtggataattgggtcccaaaatacacaaagatggaataagtgagttccagtgtttgatagcacagtatggaaattttagttcacaagaatttcttgcatatttccagatgctttggtaagaagcttcctaatttcctaagagccagcgggggccgcggggagcgcctcgtcccctgggatgggggtcctaagagccagggggggaagcggggctggctcttactccccgcaccgctgagggcgcctcgcccccctgccatgaggatcgtcatatccagggtgggattggggggtgatattattccccgaatcgcggggggtgcctcacccccccgtccatgtggatcgtcatatccagggtgggagtggggcatgatattactcccagaatcgcggggggtgcctcacccccctgctatggggatcgtcatgtccagggtgggagtggaaggtgatattactccccgaatcgcggggcccccgcccccatgcgatgtgaatcgtaatatccatggggggagagggcggtgatattactccccgatttttcctaggatcctttctaaactgccaccctccgtttacaccctgcgacattatcttccatattgtagcaacatgcagctgctaaagtcgcagggggtgtacacccttcaatattattcgtaattttctaggggaaagttaaacctcatgtcacaggactctgtacactgtgatgtcatcccaatatcctagctttatcttaataataatgtcacattgtgtgtacaccttgtggtgttattcttattctcctaagtggaggttgttttattgttacaggggatattttccttttgatattattcgtaatgtcctagagggatgtcacccgttatgtcacagggtttgtacaccttgtcaaattactcgtattatcctcataagatgtcactcctcatatcacagagggtgtacattctgtgacattgtcgtcatattctagggaaatgtcacttttaatgtcacagaaggtgcacaccttctgaaattattcgttataattttgtggggtgttacccctaatgtcacacggcgtgtacacacagtgatgttacgtgcaatatgctgtggaaatgttgctcgtaattcacaggtcctgttcaccctttaatattatttgtactcttctaggaaaacgttactgctaatgtcacagggcgtgtagaccctgttataaaattcctaatatcccagcgggagttcactactaattgcacaatgcgtgtagaccctttgatattattcgtattgtcctgaagagatgttactactgacgtcccaatgcaggtacattctctgatcttattggttatatcctcggggggtgttacttctaatgtcacacagggtgtactccctgtgttctatttcgtaatatcctagggcaattttactccgaatgacacagggggtgtacacattgtgatattatttgtgatagtctagaaagatggtgctcctaatgtcacagggctgtacaccctgtgatagtattcataatgtcccaggggtctatactcctattggcacagacgataacaccctgtgactctattcgtaatattctagtgagataatacttctcatgtcacagagggtgtacaccccatgttattattcttactattctagggggatgttactcctaatgtcacagggatgtacaacctgtgatattattcatagtgtacctgagggatattagcactaatgtcacaatgtgtgtacaccttgtgatattatttgtcgtatcctaatgccacagggggtgtgttccgtgtgatattcttcctagcatcctagacggatattgctcctaacgtcacagggtgtgtacaccttgtcacatcattcacaatatcctaaaactactttattcctccggtcacagagggtgttcaccctgtgatatttttcatcatagctttgtgggatgttactcctaaagtcacacggggtgtacacagagtcacacagtgatatgagctgtaatattctatagacatgttaatcgtaaatcacaggggctgtacctcctgtgatattattcataatattctaggggaatgttgctactattgtcacgggggtgtacaccctgtgatgtgactcgtcatatcccagcgggatgttactactaatgtcacaatgcctgtataccctgtgatattatttgtaatatcctaaagagatgttactactaaggtcacaatgcatgtacaccctctgatatgattcgttatatcctcgggggatgttactcctaatgtcacatggggtgtactccctgtcatattattcgtaatatccaagggggaggttatttttaatgtcactgggggtgacattacacattaaaaatgcgtattcaacacctgtgatactatccctaatatcctaggggtatgctcttccgaatgtcacatggggtgtacaccatgtgtgtacacgtgctgtgatattattcgtaatatcctaggggaacgttactcctgatgacacaggcagtgtacaccatgtgtgtacccctcctgtgttattattcataatatcctagggggatgtttctttgaatgtcacaaagagtgtacaaaacgtcacaggaagtgtacacgttgtgacgttatctgtaataccctagaaggatgttactcctaatatgtcacaggggtgtacacgctttgatgttatttataatctcctagagagatattacttcaaatatcacagtggatgtacacacatagtgtataccctgtgatggtattcataatatcctagggagatacaacccctgatatcacagtgcgtgtaccccgtgtgtgtacacccttgatattagtcgtactatccagggtaaatattactcctcatatcacacagtgtgcacaccctgtgatatttttcatcctactttagggagatattgcttctaatatcacagtgggtgtaccccatgtgtgtatactctgtgacagtatattttatatcctagggaggtattactcctagtatcacagtgggtgttcaccctgtgatatcattcttatttcatcatgcagcctttttcgacccacactgcaaaaggaatggaacagataagaaggtattgagattagaacgtgctgccgtgcggccgccgcaggacacttttcatatccctgtttctcggactgtagatgaaggggttcatcatgggggtgaccactgcgtacatcactgaggccactgcagtctttctcggggaagatgacacatctgaactgaggtaccctccaacgcctgttccataaaatcaggaaacatctgacaggtgagacccataggtggagaaggctttatacttcccacctgatgatgaaaccctcagaatggaggaaacaattttatcgtaagagaaaagtgtccccgagatgggaagaa

SEQ ID NO: 1222 - protein, 222 aa, Homo sapiens
MYLVTVLRNLLSILAVSSDSHLHTPMYFFLSNLCWADIGYTSATVPKMIVDTQSHGRVISHAGCLTQMSFLVLFACIEDMLLTVMAYDCFVAICCPLHYPVIVNPHLCVFFVLVSFFLSLLDSQLHSWIVLQFTIIKNVEISNFVCDPSQLLKLACSDSVINSIFIYFDTFFDPHCKRNGTDKKVLRLERAAVRPPQDTFHIPVSRTVDEGVHHGGDHCVHH

SEQ ID NO: 1223 - DNA, 3572 bp, Homo sapiens
  source
  (1)..(3572)
  CDS (201)..(609)
  CDS (2651)..(3372)
taagtcataaaaaataatatgtaattgaatcatttgaaatatctaggaaggccattgggaaaaatttttggccactgtgagtctggaaaagagacaatagggaactatctgatggtaggctgccactaaattagtctgtgcaaaaatcccactttgagtttgattgctatattttttcctagttctcctcccaactggaaatgctagagtccttccagaaatcagagcaaatggcctggagcaatcagtctgcggtaaccgaattcatactacggggtctgtccagttctttagaactccagattttctacttcctgtttttctccatagtctatgcagccactgtgctggggaaccttcttattgtggtcaccattgcatcagagccacaccttcattcccctatgtactttctgctgggcaatctctccttcattgacatgtccctggcctcatttgccacccccaaaatgattgcagacttccttagagaacacaaagccatctcttttgaaggctgcatgacccagatgttcttcctacatctcttagggggtgctgagattgtactgctgatctccatgtcctttgataggtacgtggctatctgtaagcctctacattacctaacaatcatgagccgaagaatgtgtgttgggcttgtgatactttcctggattgtcggcatcttccatgctctgagtcagttagcatttacagtgaatctgcccttctgtggacccaatgaagtagacagtttcttttgtgacctccctttggtgattaaacttgcttgtgttgacacatatattctgggggtgttcatgatctcaaccagtggcatgattgcctggtgtgcttcatcctcttggtgatctcttacactatcatcctggtcaccgttcggcagcgttcctctggtggatcctccaaagccctctccacgtgcagtgcccactttactgttgtgacccttttctttggcccatgcactttcatttatgtgtggcctttcacaaatttcccaatagacaaagtactctcagtattttataccatatacactcccctcttgaatccagtgatctataccgttaggaataaagatgtcaagtattccatgaggaaactaagcagccatatctttaaatctaggaagactgatcatactccttaattttcctcataggaaaataaaatacctgttcagcatttatccccctcattcagttggtcaacatattgatgctattgcaagaactcaattagttcatggtagaactgtttctgtaatcagcctcagctgtcatgaagttctggtcatattaattgtttcttacacaacctaacatttactatagagcattataaaatgtatacttaacattttagtgtgaaaggacccacaatgtctaatatttatttttttcagatctatctgaatataatttcctttgagactttcacatgttttaagaaagagtagatttcctccctatctctagcaatagtctctaataaaaaagacaagtataaaagcagcagcacctagtatagtaccctatacactaaagtagcaatagaatgtttattgctgacaagaagctaatgaatgtgggttttttgtagctcaaaattcagaaggcaatagagggtttttggtaagtaaaaatatttgccatttaatatgtttgtaacccattgtgggtaagaataggaatgtatcttacttatctttagtccctacgttccctagagtggacttcatagttttaaaacagtataggaaactccatgcaaattcttatagtcatatctatatctatgtgtatctatcacatctagctatctgtctatctatctatctatctaaaagattaaaaggaacctagagtactatacaacaaatctcatccatagccctgttctacaaaagataaaaataagacccaatgatacactaggtttttcaaaatcatgctaattagagacaaaatctacatcattcacttaaaaatatagatatttatttcctaagcagtaacaaattgttttggtgtcatgatgtttactgtaccatttttttaaaaatttttttagtatttattgatcattcttgggtgtttctcggagagggggatttggcagggtcataggacaatagtggagggaaagtcagcagataaacatgtgaacaaaggtctctggttttcctaggaagagggccctgccgccttccgcagtgtttgtgtcgctgggtacttgagattagggagtggtgatgactcttaacgagcttgctgccttcaagcatctgtttaacaaagcacatcttgcacctcccttaatccatttaaccctgagtggacacagcacatgtttcagagagcacggggttgggggtaaggttatagattaacagcatcccaaggcagaagaatttttcttagtatagaacaaaatggagtctcctatgtctacttctttgtagcaaacacagtaacaatctgatctctctttcttttccccacatttctcccttttctatttgacaaaaccgccatcgtcatcatggcccgttctcaatgagctgttgggtgcacctcccagacggggcggcggccgggcagaggggctcctcacttttcagatggggcggccaggcagaggcgccccccacctcccggacggggcggctggccgggcgggggctgccccccacctcctggacggggcggctgccgggtggagacgctcctcacttcccagatagggcggctgccaggcggaggggctcctcacttcccagactgggcggctggtcagagacgctcctcacctcccagacggggtggcggcggggcagagacactcctcagttcccagacggggtcgcagccgggcaaaggtgctcctcacttcccagactgggcggccaggcagaggggctcctcacatccccgacgatgggcggcatggaagagacgctcctcacttcctagacggggtggcggctgggcagaggcgctcctcacttcccagactgggcggccaggcagaggggctcctcacatcccagacgatgggtggccaggcagagacgctcctcacttcctagacaggatggcggccgggaagaggcgctcctcacttcctagacgggatggctgccgggcagagatgctcctcacttcccagacgatgggcggccaggcagagacgctcctcacatcccagacggggtggcggccgggcagatgctgcaatctcggcactttgggaggccaaggcaggcggctgggaggtggaggttgtagcgagccgagatcacgccactgcactccagcctgggcaacattgagcactgagtgagtgagactccgtctgcaatcccggcacctcgggaggccgaggctggcagatcactcgcggtcaggatctggagaccagcccggccaacacggcgaaaccccgtctccaccaaaaaatacaaaaaccagtcaggcgtggcggcgtgcgcctgcaatcccaggcactcggcaggctgaggcaggagaatcaggcagggaggt

SEQ ID NO: 1224 - protein, 376 aa, Homo sapiens [sequence omitted]

SEQ ID NO: 1225 - DNA, 1081 bp, Homo sapiens
  source
  (1)..(1081)
  CDS (201)..(529)
  CDS (641)..(881)
cttagacccggagagtcactgaaacaagcatcaaacataagtctctggcacattaaaggccaatccaatgcaagggctaatagaagtgaattaagacattctctgtaactccaatattaaatggaaaccgggaaatagccagattcctctccaacctgtccttggctggcatcggtttcccctccaccatagtctccaagatgattgtggacatccagtctcacagcagagtcatctcctatgcgggctgcctgactcaggtatctctttttgccgtttttggatgcatggaagacatgcttctgagtgtgatggcttatgaccggtttgtggacatctgtcaccctctggattatccagtcatcatgaacccatgtttctgtggcttcctagttttgttgtctttttttctcagtcttttagactcccagctgcacaattggattgccttacaaattacctgcttcaaggatgtggaaattcccaatttcttctgtgacccttctcaactcccccacccttgcctgttgtgacaccttcaccaatgacatagtcatgtatttccttgctgccatatttggttttcttcccatttcggggaccttttctcttactataaaattgtttcctccattctgagggtttcatcatcaggtgggaagtataaagccttctccacctgtggctctcacctgtcagttgtttgcttattttatggaacaggctttggaggggacctcagttcagacatgtcctcttatcccagaaaaggtgcagtggcctcagtgatgtacacggtggttactcccatgctgaaccccttcatctacagcctaacagggaaattaaaagtgccctgcggcagctgcactgcagaatagtctaatctcattttcttattatctgttccattccttccgtagtgtgagttagaaaaggcagcaaggggccgggcgcagtggctcacacctgtaatcccagcactttgggaggccgaagtgggcggatcacgaggtcaggatgatcgagaccatcctggctaacacggtgaaaccctgtctctactaaaaatacaaaaaaa

SEQ ID NO: 1226 - protein, 189 aa, Homo sapiens
MIVDIQSHSRVISYAGCLTQVSLFAVFGCMEDMLLSVMAYDRFVDICHPLDYPVIMNPCFCGFLVLLSFFLSLLDSQLHNWIALQITCFKDVEIPNFFCDPSQLPHPCLLVSSSGGKYKAFSTCGSHLSVVCLFYGTGFGGDLSSDMSSYPRKGAVASVMYTVVTPMLNPFIYSLTGKLKVPCGSCTAE

SEQ ID NO: 1227 - DNA, 1015 bp, Homo sapiens
  source
  (1)..(1015)
  CDS (201)..(815)
  modified_base (1)..(7): a, t, c, g, unknown or other
  modified_base (50)..(50): a, t, c, g, unknown or other
  modified_base (52)..(52): a, t, c, g, unknown or other
  modified_base (65)..(65): a, t, c, g, unknown or other
  modified_base (94)..(94): a, t, c, g, unknown or other
  modified_base (865)..(964): a, t, c, g, unknown or other
nnnnnnngaagtaaccttcaatggccatgtattcttcctctcaatgctgncngtcatggacatcntgctgtctaccacactgtgcccaaggccntagcatcttttggcttcaagcacataacattgcttttgatgcctgtgtcacccaaggcttctttgtccatatgatgtttgtgggggagtcagctatcctgttagccatggcctttgatcgctttgtggccatttgtgccccactgagatatacaacagtgctaacatggcctgttgtggggaggattgctctggccgtcatcacccgaagcttctgcatcatcttcccagtcatattcttgctgaagcggctgcccttctgcctaaccaacattgttcctcactcctactgtgagcatattggagtggctcgtttagcctgtgctgacatcactgttaacatttggtatggcttctcagtgcccattgtcatggtcatcttggatgttatcctcatcgctgtgtcttactcactgatcctccgagcagtgtttcgtttgccctcccaggatgctcggcacaaggccctcagcacttgtggctcccacctctgtgtcatccttatgttttatgttccatccttctttaccttattgacccatcattttgggcgtaatattcctcaacatgtccatatcttgctggccaatctttatgtggcagtgccaccaatgctgaaccccattgtctatggtgtgaagactaagcagatacgtgagggtgtagcccaccggttctttgacatcaagacttggtgctgtacctcccctctgggctcatgaatcgggggtcttctagagtcgaccagataggggtgtcaagcccaagtatnnnnnnnnnnnnnnnnnnnnnnnnnnnnnnnnnnnnnnnnnnnnnnnnnnnnnnnnnnnnnnnnnnnnnnnnnnnnnnnnnnnnnnnnnnnnnnnnnnnnaaaatagccgggtgtggtggcacccacctgtaatcccagtacttgggaagg

SEQ ID NO: 1228 - protein, 204 aa, Homo sapiens
MAFDRFVAICAPLRYTTVLTWPVVGRIALAVITRSFCIIFPVIFLLKRLPFCLTNIVPHSYCEHIGVARLACADITVNIWYGFSVPIVMVILDVILIAVSYSLILRAVFRLPSQDARHKALSTCGSHLCVILMFYVPSFFTLLTHHFGRNIPQHVHILLANLYVAVPPMLNPIVYGVKTKQIREGVAHRFFDIKTWCCTSPLGS

SEQ ID NO: 1229 - DNA, 6943 bp, Homo sapiens
  source
  (1)..(6943)
  CDS (201)..(256)
  CDS (889)..(1414)
  CDS (5716)..(5875)
  CDS (6325)..(6743)
aatctgcgcctcacggtccgttcgggcccccgtagccggagttgacccttcttgacccccctgtagcctaaactgacttcgcctcactagagtcttcctctgtccatccctcccccgccccacccccattcctattcgggccgcacctacacagccgctcccgggcttggctctgagcactgaagcggacccaggcgtccatgacagccgcagcccaggctccgcggccctgctcccgccccacttcccgcccctagtcacgcctactgcgcgacccaacggtgcctcgcgagggacaaacagtatcagaaaagaaagcttggccctggaagcggaatttcaggacgcgaaactcgtgtcttttgagcctccatctgtgtattactgtgcgtgtctgcgtcacagcttccccttatcagacgacccctactccctagcacgcctccagcggcaccttcttctttaaatattcatgaccaagggcggggcctgcaggggccggggcggggcgagaaagcgccgcagtgatctccacgtcttggaggccgccggcataggtgtgcgcctggcagaacctcacaaatacacatgcacgcaggccccgactgaatccagggctgtaggggctaaagaggtctaggtcagtagaggcctgaagcccaggctggtctgtccaaggaaaaaggagcgtgattggtaccagatcttcgttccctgcagaaccttgacagttgaacaagtgacctcctccagaacagatggagagtctccagaagcagaggctttagtgaacgaaattcgcaataatcagctccagatcctgaaaaggagggcgaagaatcagtggccaaagctaaccgcttcatacccacacttcatcctcctcagtttctctccaggccaccatgtctgcaggcaacggcaccccttggggtcagcagcgggggaggaggtctgggctggatcaggagtggaggtggagggctcagagctgcccaccttctcggcagcagccaaggtccgagtgggagtgaccattgtgctgtttgtttcttcggctggagggaacctggcagtcctgtggtcagtgacacggcgggaacccagccagctccgcccctctccggtcaggagactcttcatccatttagcagccgccgacttactagtcacttttgtggttatgcccctagatgccacctggaatatcactgttcaatggctggctgtggacatcgcatgtcggacactgatgttcctgaaactaatggccacgtattctgcagctttcctgcctgtggtcattggattggaccgccaggcagcagtactcaacccgcttggatcccgttcaggtgtaaggaaacttctgggggcagcctggggacttagtttcctgcttgccttcccccaggtgagtgacctaggactcaggaccgggcaggacagggatttgggtccatagcatgagttaaagggtgcgcttgggggccattagccattaattctcagggagtaagcctctgcttgcttttttttttttttgccggctcactgcaacctccgcctcccgggttcaagcaattctcctccctcagcctcccgagaagctacaggcgcccgctaccatgcccggctaatttttgtatttttagtagaggcgaggtttcaccatgttggccaggtggtctccatctcttgacctcatgatccacctgtctcagcctcccaaagtgctgagattacaggcgtgagccaccgcaccctgctacctctgctctctcttctgtaagattatttgtatgttaatttacatctgttaagagcctgccttttcgattcctcagggatctagaactagaaataccatttgacccagccatcccattactgggtatatacccaaaggactataaatcatgctgctataaagacacatgcacacatgtttattgcggcactattcacaacagcaaagacttggaaccaacccaaatgtctaataatgatagactggattaagaaaatgtggcacatatacaccatggaatactatgcagccgtaaaaaatgatgagttcatgtcctttgtagggacatggatgaaattggaaatcatcattctcagtaaactattgcaaggacaaaaaaccaaacaccgcatgttctcactcatagatgggaattgaacaatgagaacacatggacacaggaaggggaacatcacactctggggactgttggggggtggggggaggggggagggatagcattaggagatatacctaatgctaaatgacgagttaatgggtgcagcacaccagcacggcacaggtatacatatgtaactaacctgcacattgtgcacatgtaccctaaaacttaaagtataataataataataataaaagagcctgccttgtaaaaacagtatcctctatctgtgcctcttccattacatctgttttattacacgtggtttctacctctttgcatcctcccaatttcacctccttcagattggggcagggaagaaaaacatacatggggatctattaagagagtgaagtcagtggtttgggtaaaactttgtggtacatttcatttatccattcaaaaagtaatatgcatctccagcgccactcaaattttgctaaggacagggcagcaaaatcctgccttcaagaaatgtatagactactgcaagaaacaaagaaattaggcaattacaatatagtgtattcaaaagtgttatgctaaaggagctaaagaagacaatgggggtggggagtggataggggtgtctgacacagccgtgcagtcaggaaaagctttccagatgttaaaatttgattcttcagagataggtgttagaccaattaaaataggagaaatgctagggaggatggaggatagaggatctcaatgctactaaagctgaggactagaaaatggtgagtaatgaactgagaggggaagagcaagccagatcacaaataataaaattgtactttattctgagtgcagtggagagacactaaagtaaaaagagagtgacataaccaaatttgtgttttttactgactttattgtcgaatgagtgttaaaattgcaaagaggcgagcatctgaacctgagtactaggttaatcaaatctcaaatccaatccaatactgaaaaggaactagaaatctagagggggaaaagctaaatacaaagcaattccttcaaggcaaaaaccactatcactatcatggggttggggggcaggatacaacagcatctctgagactgtaggattagaattatgtcagaaggaggccaagaagggtctaggatttatctctggaatgacaatgcattatactgatttaagatttgatccttacttacatcctcaattattagaaatataactactagaagttagtctgactatactcctaagaacaaagaaaggcctggtggctcaagcctgtaatcccagcattttggaaggccaaggtgggtggatcacttgaggtcaggagtttaagaccaacctggccaacatgacgaaaccccatctctactaaaaatacaaaaattagccgggtatagtggtgagcacctgtaatcccaactactcaggaggctgaggcacgagaattgcttgaacctgggaagtggaggctgcagtgagccaagactgcaccactgcactccggcgtgggcggcagagccagactctgttgggggtggggtgggggggaaagagaaaaataatacttctaatatgttgcaaacaagacctttaccaatccaagtgttaaaaagaagcctgttgctacagtgccatttacaattaggtttgtttatatgaagcaaattttacatgtggactgggaattagaagactttttgtttcagtctgcctgttttactttgtttttttctgagtctcggctctactgctaactagctatatgattttggctaaggcacttgaaatccatgggccacaagatgatgcaatgggaaatgaatttcatcctttcttacagcctgacaatctgacaatatttgcaacctctatttgtttcaatggcaaactggttgtgacatgatacatgtgcgaaaggtgattttttttgttccaaattagtatccttttaggtaaattctgtattgcccatatgctgtaattgtagttaaaatattagtgttaataaaataaaaaatttaataatgtcacgttagagtggtaagggcttaggggtagttataggtagtattaggagtagttagaaattacttatttttgtaggcttgtttccaagttatcagcagttgaaagggatgtttctacagtacgtggtaaatggcaataaaacaggataaaggaaagatcaaaacaaggctgtggaccaaactataaatccaagagctttgattattattttttttttttttggagacagtcttactctgtcgcccaggctggagtgcaatggcgcaatctctgctcactgcaagctccgcctcctgggttcaggtcattctcctgcctcagcctcccgagttcccaagtagctgggactacaggcacctaccaccacgcccggctagttttttgtatctttagtacagacagggtttcactgtgttagccaggatggtctccatctcctaacctcgtgatccgcccgcctcagcctcccaaagtgctgggattacaggcgtgagccaccgcgcccagccagctttgactatttttatactcctcacaattctcaagcacttcttaggcagagcacaaaaacaaaaaaaaaaaaaaaacttagaaatatatgaatgcaagagatgggaagaggaaagaccatttcccaactagctcagagtagcctgatcgtaactccaaacagttcacaaaattctcttaggctgaaactattcatctttcctaaatgtccctcatgtctgctaaaatcactttcccaaatgccttgtatctaggaatctgatgcctactgagcttaccttttatcaaattaatagtgactcaatctccattactggaaagcaggcactttaaccttgtagctctaaacagaaatagtttttactgattcagttggaaaacccagcaatttaacaaaaagggggaggggcagcccaatagcatttggaaaatgttaaattttattatttaacattctttaccattatagttactgcacataagactattactactaaaggtcacttcagagtccctgcaaaatggcctggaattttggcagcacccattttacacaatatttctttttccacaaaataacagacataccaggaaaatcatttcagctaaaaatatgagtgaggtggtagaaatatcatcccttataaagcgcaatgttagaatagtacttgagaaagcaggattgttttaagttccaagatttaacaaacttactgttcagcatcatattcaagcctaaaaggaagataggattttcaagatatatttccaacttctttaacatggcaccatggatgaactgtttctcagcactgtgctgcttcacttggaattaaggatgaattgggaggagacagtatgacataggtgggtaggttgggtggtgaggggaaccagttctaatagtcctcaactccactccagctgttcctgttccacacggtccactgagctggcccagtccctttcactcagtgtgtcaccaaaggcagcttcaaggctcaatggcaagagaccacctataacctcttcaccttctgctgcctctttctgctgccactgactgccatggccatctgctatagccgcattgtcctcagtgtgtccaggccccagacaaggaaggggagccatggtgagactccaattcccaggccttaatccttaaccctagacctgttgcctctagcatcatttatttatctacctacctaatagctatctaccagtcactaaaccatggtgagattctaaccatgtctagcacctgatgctagagataattttgttgaatcccttcaattataaacagctgagttagctggacaaggactagggaggcaatcagtattatttattcttgaacaccatcaagtctagacttggtggcttcatatttctatcataatccctgggggtaagaaatcatatagtcccaggttgggaaggggaaaacggtttgcaacattctcctccttgtaggaggtgagctctgtctcactagctatgcccctccatcaattcaccctatactcagatcagaagctgagtgtctgaattacagtatattttctaaattcctagcccctgctggtgaatttgccctcccccgctcctttgacaattgtccccgtgttcgtctccgggccctgagactggccctgcttatcttgctgaccttcatcctctgctggacaccttattacctactgggtatgtggtactggttctcccccaccatgctaactgaagtccctcccagcctgagccacatccttttcctcttgggcctcctcaatgctcctttggatcctctcctctatggggccttcacccttggctgccgaagagggcaccaagaacttagtatagactcttctaaagaagggtctgggagaatgctccaagaggagattcatgcctttagacagctggaagtacaaaaaactgtgacatcaagaagggcaggagaaacaaaaggcatttctataacatctatctgatcctaacagagtatgtaggaacagaatagtaagtctttagtgccataagatcttaacatctcacttctactcctgctctcctagttccccccaaaaaagaaatactgaccagtgtctctactttaaaccctacctgaaacttgagactatgtctaatatagaaactcacataactagcccaggtaacacagcaagacccc

SEQ ID NO: 1230 - protein, 386 aa, Homo sapiens
MTAAAQAPRPCSRPTSRPYFSPGHHVCRQRHPLGSAAGEEVWAGSGVEVEGSELPTFSAAAKVRVGVTIVLFVSSAGGNLAVLWSVTRREPSQLRPSPVRRLFIHLAAADLLVTFVVMPLDATWNITVQWLAVDIACRTLMFLKLMATYSAAFLPVVIGLDRQAAVLNPLGSRSGVRKLLGAAWGLSFLLAFPQCVTKGSFKAQWQETTYNLFTFCCLFLLPLTAMAICYSRIVLSVSRPQTRKGSHAPAGEFALPRSFDNCPRVRLRALRLALLILLTFILCWTPYYLLGMWYWFSPTMLTEVPPSLSHILFLLGLLNAPLDPLLYGAFTLGCRRGHQELSIDSSKEGSGRMLQEEIHAFRQLEVQKTVTSRRAGETKGISITSI

SEQ ID NO: 1231 - DNA, 19026 bp, Homo sapiens
  source
  (1)..(19026)
  CDS (201)..(339)
  CDS (4670)..(4729)
  CDS (8317)..(8466)
  CDS (9834)..(9956)
  CDS (17921)..(17969)
  CDS (18676)..(18826)
tttcatgtaggcagcttgatatttgtttgttactaaattgtaatctactgccaaggggaagtcagtccactactaagggcaagaatgccaagtgcttcgagcagtgctgtttaagtctgcaattagtgagagggctcactaatgagcataaggaatgctagaagtaagcttccctggtgggatgaatagtgtgttcacatatggttggccaggaaaatgaacagctccctctacccctgcttgacagagatataagaatctggcaagcccagcagtctcagaattcgggaatcatgcctgaggtctggaatccagcagccgcagctaatggcagatttggtgtgctgatgtaacatgaaggttagaagatcctgctgtcagggcctcgcggtgttggcttcatagtgaacctttcatgcaaggtgcctgtcagggtgtctgaaatactggagggcaggaacttgtgcgcatagtgcaggctgtatgtttggccagcttgctgatagctttgtatatgtggtagaattcagtctgggacttaccttcctggtaacgtatcgctagggaggggacatagtgcctactcacctgcaatcgtcagtttcccagtatttcctgcaaagagcctgacagccttgaatggctgaattggctctggccagttcaaagcagcatgatgctgtgtgtgtgtgtgtgaacgggagccctcccaggctgtgagacggctggcatgcggggatggggctccttcaccgatccatgcctcctcattacacagctctgcttcaacttcgtaagcctcctggatagtaataaggtgcagaagtaacccagtctgctgctgttgaactgtgacctcgtggctaattctgcccttggtgcctgagcttgccacagtgggagtgcttcacttcagaaggcacaaccagccatcctttatgtaatctgcaccatcctagaaaatcctccgatatccttgtccagaaagacaggtggtcgcatgtagacttgcttttgtcctgtggtgagtggttgttctgacttattacctccgtggaatgcgagtgtattcccagtcaggacacttattgttctgggtcactagaacatgccttgaagtgttaatgtatcgagacatgaggcttaaaataggaaattgcattaagcagatcacttcatgtgttatttggacttgggaagtgcgttagaggagaatgaggatgagcctttgtgattcagtgtgtgcagcgctgatatgatggtatatgacaccccaaacaagggtggttttggtgagacgtcgcacagtgactctccacagtaatttggagacgatttcacagagctctgtgattcactctggtccatggcaggatggctcccgctgtttctcaatttagagcccgtagagatagttttggctcatctctcattgagtaatcgtcgagtatgtagaaggcatttagcaaattggtaatgagactcttctcctctaagagcctggcctttataaaagggaaaaattggagaaacttagagttgttgaaaatatgtgaaaagtagccactctgaaaaaagtcaaaaaggaggcagcaatgacaagaatgatccaggattttcctattgagttagaaagtgatcctgtgaaaggaaatctctttccagagaagaggttgaccagatgttaaataataagaataatcattttctagcagatactgtggtatgttatgagagacagttattgccagttttcaataccactgaagaaagggttaaggacctggcttcaatttatagaaaagaagtttgtttttgttttttttttttttttttttttaaggcagagtcttgctctgtcgcccaggcaggagtacaatggcgcaatttcggctcactgcaacctccaccccctgggttcaagcaattctcctgcctcagcctcccggattgccggaattacaggcacatgctgcctggctaatttttgtatttttagtagagatggggtttcaccatgttggtcaggctggtctcgaactcctaacctcaggtgatctgcctgcctcagcctcccagagtgctggggttacaggcctgagccaccgtgcctggtcctagaagagaagatttaaattatacattaggaagaatttccaaactgcaaagaccgtggactattagctcagaaattgctagggtcttgtcccttaagaaagggtgttgtctagtctggcgtgtatgtgtaagccggcatggaggtggaggttgtgctagggaaccattccctccatcatcccagcagccctgaggtcctatttgtcaatagcttttcaggtagggctagagagaagagcctggtcacatagaagcttttccaaaacacagcttccccttgcgtaaatgttcccagggaggaacagagcttgaagaagatcccctgtgattttgctctgtcttcttgattgaaaactgctgctctgtgctctcgtgctttggcaatgcagtctaagtcactgagccctgcaatatgtacaatgtttccagacatctgtgctgggagtgtcctctgagagttgcagcacagaggcagtggacacaggaagccccttttttctcccatgttgcagcggcagctgatggatggagctgtgaagtccaaacgtgctgggtgcactcctcccccacagcctccccagctccagcttgcataacagcctgctttgggaggggctttgttccagaaccttctggcagtgcctggttcagtcctgagaccttgtgtcttaaacacgtcacagaacacgcacatatcagtataatctctaaaagttgaagagcatttggtttgggtatttgcctgggtacaggacaaactatgaggctgatgtgatcaagaatgcttgtcttgtgcaatgttgaccaataggccagtaggacatttgtctcaccaataaaggcctggctagactggacattgaaggtggacataggaggctttgactcccacatgtcaacgattcatatgaaagcgctggggaagagatttatgagggggagaagagctgtgtggtctcggccattatgagaaacatgtcttatttgttttaggtctaaaacatgtctaaatttgttttaggctaggggctgtggctcacgcctgtaatcccagcactttgggaggccctcctcatgcacatctcagggttttagaaatgccagaagtagctgtctacactctgagtatgaggttgacgtgggaaggaccttgtgtaactgttcatttcaacccatcagtggccacataaccagggggaatgacaggttagctcagtttcttgcctgggcccaccagccttacacaagtggtagccacagcctggcccccaaagcctggcggccatctgaggggcgtgttcccagagttagccaaattcatcaccatggctggggtgttggatgaatctctagttagtataatcatagctgggtgtctggaacattgttgggtgcttctctgacctccatccattttccgtaatctgcagaagaaccctcaagatgagtagtagtatacttatttaccaaagggagaactgaggctgagtagttggataacttgcccaagaccacacaagttaatagctaaaggaagcaggatttgaacctagctatgtccaactccaaagcctatgtttgtttgctccacgttaccccatgatggtggctgtagtattgtcatataaaaggacatcactctctttgttcatttacaatctcatgagtgaatgacttcccttttagtccattaagccctagataatattcaaaaattcacaattaagctgtaaattgttcaattttcctttgtaacagtaacagagaaagtaatattttcgaataatagcatatttaaatatactctcaagtttaggatttgaaagtatatttaatattcagagactctcagtattcagagtccagagatgtgtctctgtgtccttgtaacatgtatttggcaatctaatgggaaagactcgtgttcaggggccccaggctcagaaattaactctaggagaggtgggggaagcacacgtttccttaggagaaaggcatggggatcactctctccagttatgcacagacaaaaattgtatttaacactacttttgatacatagaaaatttattttaggctaggggcggtggctcacgcctgtaatcccagcactttgggaggccaaggcgggtggatcacgaggtcaggagtttgagaccagcctggccaacatgctgaaacctcatctctactaaaaatacaaaaattggccaggcgtggtggcacacacgtgtaatcccagctactggggaggctgaggcaggagaatcacttgaaccctggaggcagaggttgcagtgaaccgagattgcaccattgcactccagctctgggcgacagagcaagactccatctcggaaaaaaaaaaagaaaattttgttttaaaattgatctattcttaggtgacaatgctattttattatagtcagtaatgtttgaagagctttaaaaaaaagcctgcagtaaaaaaaaatttttgctgcagatattgatgaatgttcagaacaaccctcagtgtgtgggagccacacaatctgcaataatcacccaggaaccttccgctgcgagtgtgtggagggctaccagttttcagatgagggaacgtgtgtgggtaagttctccaggtaacttttcgaaacagtattcacatggtgtgcattagctcttatgcaaaagttctggtcccaggtaaaatgagtctggtcaagttggaaggtgctgggaagagcaatttataaagatgaatcagacttagcctctgccctccaactatctggagagtcacaagtgtaatgagtaagcaacattattgcctacactagtaataccatcgcctcacctgttgccagcttttgcattacatttgcctcttataaacttcttttaatcattttcattatgcttttaataactataagctattagacatgtttcttccagtaattagtagccttggggttcacattgagggagcaccttataggtacttttggatcattacctatcttagattgaattctactttagttacacctaaaattccaactggggtcattctatttatggattttaattttaccaaccacgagcagcagcataatttcttagccttatagaagtaagttgcggctattaattaggttaattatgctcttgctgaatgatgatttgggtgatgatgaggatgggtcagccacgaacagccagattgtttaaattcttcctctttttcctcctgctgcactttgacctggtcgttcaagattcttgttcccaggtctggagggtgccatgtcaaatgcgcatctgaactcaacatgtcttcccaatttaaaacagattcctcttgtaccatgtcagcaaaccatcttcttgcctcttcctcactgttcgctaaaccctagaatgttttctttttgctctgtctcaaagcttgggtaagcctgccaaggtcgtggggtgaggtggtgtcttgagggtgggagggaacaggcagttctcatattttgagtgtgacccaaacatctgtgagctcagggaggccagtcccctctgcacagttgagattttcactctgctgaagttacttcttttttttttttcctcagtagggaacatcagtttctgtgtatttgacctgatttctttctctgctttttgaggctaagcagattcaaacgtttaattttaatggccataccatttacattacacttcggctcaagcttgggcagtggatactttatcccttgggtgctgatgtgcacagtaactgagatccatcctgggacacctgtgtggagcatggtgacctgggtttctggatccagtcattcctgatgtccacactcactgaaggggcaggctgggatgcaagacaggtgctgggcaaatgtctgcttcagacatttacttttgaggaagacaacctctctggggctcagttcctcgtctgtaaaatgaagtgattagaccggatcattggtttcctgtgacccatggagctcttggaggtgcctcaggagctgtcaaggaggacacaggccagctgtgggcaggctcttgtcctctcccctgagctctagcctcccttttttttttttttttttttgagacagggttttgctattgtcacccaggctggagtgcaatggcgcgatcttggctcactgcaacctctgcctcctgggttcaagagattctcctgcctcagtctcccaagtagctggaattacaggcatgcaccaccactcccagctaagttttgtatttttagtagagacggggtttcaccatgttggccaggctggtcttgaactcctggcctcaggtgatttgcctgccttggcctcccaaaatgctgggattacaggtgtaagccaccacgcccggcctacatatttgagggagaacatcttcaccccttttaattggctcctttgagactcactgcgcagagagaaggctcactgtagaaccaagtctgcctacacgcattcaaagaaataactctggcttgtcactgagtaattgagtggtcattccatctctcttggaattccttgttgaaacagtgttctaggtcggaagcctgcactgggaaggttaccctgcaggtcagaatggggcaaggtgaagaaataaatggggcaaggtgtgctctgccaactgtgaggggctgggggctcaggcagggcctgtggactgaccaggaggaattctcttttcatgaggattggtatccattatcggggaagggatgtttgtggacttccatctttggcattttctgtaaactcataactctcttttccactgggaaccaacttttgcagttaattgaaatgtgcaaaacatgtttttgtgaaggaaaggtgggcctcagcttgcccataagtcagcttgatgtgaagatgtagatacccctctgaatggacatagccctgtgacactgggctggcatatggagtgtggtgaacttgaggtcctacttctcctcccctaggcatcttggtgcagggcatgatggcatgcatcagctcttctcttgagggaagaacagggcccaggcttaggcaaaaagctgtagcagttaacttccagtatgccaagcacagagaggccagtagatgggactgtgattctcttaagggtcctgatgatagaactcatggaaggagggctgaggaggaggtgagtgtcacagaggctagctgataatgccccatcttgtgctgttgcctcaagatggaaggcaaaggttgaggtctacagggtgattttcagctggttcagttactctggggttcctaaggcaccattgcattttgcttctgattttctaaaagaactcagagccaggacagagtcccatcctcacaatgtcagaacacaaatcattccctcccatcaggctttgtgtagttggattatcccagatgaaggaggactcatgtttttcctccatgagtcttcttaagattgatttcagtttgtcctaccttaagtgcagacagacagagaaagagagagagagagttgagggggtggggggaagaacataaggcaatttatctaaggccatgtggttgacccatggtacctggtatataccaaggctgcctactccaaaggctcacagtcttccaaccatagctgtctccctgccttagaaacatttatttgtccttccttggtggcaagtgggtgactgacttgggcatttgtagtgaatgttccacctgtacagggtgggccaaggctgaagacaccacatggaagtctcagctcctttcctccaagcagtctcaacagagttgccatcagaagtgtggcatctgcagatgtcccacccccatatccagatgaagggaaagttgggtcctggggacctgtgatggggatctagtttggagagtggcctgagacagacccccagagtgaaactgaggtcaagccaggtggaatgacaaaccacggtgtcagtcagccaagacccatcagaggcagaacccaggtgggaggaaacggtgaaagcagtagtaccagcccagtgaggagtggggtgcaggtgaagctgtggacatgcctagaggtctagggtccaggcatggtctctctttatagagctgggaggggcatgtggcctgctcaggggactttcttcctaagactgtgcatcaaccttttgttctgaagctgtcgtggaccagcgccccatcaactactgtgaaactggccttcataactgcgacataccccagcgggcccagtgtatctacacaggaggctcctcctacacctgttcctgcttgccaggcttttctggggatggccaagcctgccaaggtgtgtggttgctctgatcttcccctgtgtgtaacctgagaaagtttcctaggtggtacctgtcatgtgccaatcaccaactcactcccaaatagaagaaagaattcttctgtcatctccacagagtaaatgtgttgctttttatatctctctagtagtttgaactatgcattttcttttgggggctattctcattgatgactgttttgttctaggtgactagttcattcaggtgacaattagacacctgctctctgctaggaaccagggatattttctgtctttcacaaagagacaaactgtccttttacatggaggacatgcatggagattaaagtctatccttttatttaataagatgtattaacatgtagccattcaactggcttgttctaaccttctccttcaaaaaagcaaagttctctgattgaataaatgactgcggagtcaaagtataaatgactcaatagaatccttcagacttgagcttcttggctgccattgttctcttacaggtaattttaggtaagatagcccatcaatagagtaccctgagtttcttggtttgcacaattacttaatattataccatagagtatttctaaaaagtcccaactaagatagaatttctgagatactttctctttattactgaacatgtgaatattttcttttcactgagggttttctgcctagcagttaataatctgtcagtaaacactcagacagttttgaagctctcatttatgacaggagggagaattttataatacaaatagatcctatcttttcccctgttgtaaggttgatgaaaacattcttttctttctttttttttttttttttttttttgagatggcatttagctcttgttgcccaagctggagtgcaatggcacgatcttggctcactgcaacctccacctcccgggttcaagcaattctcctgcctcagcctccagaatagctgggattacaggcacgtgtcaccatgcccagctaattttttatatttttagtagaaacagggtttcaccgtgttggccaggctggtcttgaactcctgacctcaggtgatctgcctgcctcggcctcccaaggtgctaggattacaggcgtgagccacggtgcctggccaaaaacatttttcatgaaaacattgctgccaaagtgaaacacatttgcaagtacgacagatagatattggggagttagtgacttgatagttaatgtttagtgagttttggattactgttcccagatcagaagcaggttcccatagatttgagtaagtggcttaaattattgggtaaactacgaattccagaagaaatctcattgtccctgggcctggtggctgttttacagatgtagatgaatgccagccaagccgatgtcaccctgacgccttctgctacaacactccaggctctttcacgtgccagtgcaaacctggttatcagggagacggcttccgttgcgtgcccggaggtaaggtggtgggacatctggagtcggtagcccattgccctgtccatgaatgcagagcacatggcccattgccctgtccatgaatccagagcacatggcccgttgccctgtccatgaatccagagcacatggcccgttgccctgtccatgaatccagagcacatggcccattgcctgccctgtccatgaatccagagcacatggccctgggagagaaggtgaggcgggaaagtaggaggctccatggagagttctaagggttgttgaggtgggagatcagagcatggactgcaatgtagagcattctttgaaatggtagaacatcaggtgggaacattgcctataatcccaatactttaggaggccgaggtgggtggatcacttgaggtcaggagttcgagatcagcctggccaacatggcaaaaccccctctctactaaaaatacaaaaattagtcaggcgtagtggcttgtgcctgtaatcccagctactacggaggctgaggcatgagaatcacttgaacctgggaggcagaggttgcagtgagctgcaattgagccactgtagtccatcctgggtgacagagtgggactgcctcaaaaaaaaaaaaaaaagaaaaaaaaagaatatatttgacaccttagactggagttaaccagttgtgttatttatttttaattactgctgctgttgttggtcagatatattcatgccactataaatgttttcaattagagataagtaaacattttcatcccatcgctttttaagcagttaaaaactttaaataaccatccccttcactagcctgtgagcacattgaggacctgtgagctcattgaggacctgtgagctcattgagggtggtgcaggtacacttttttttttgtatgtttccagtacccagtggagtgtttggtatatggtggggctcacagctatttacagctgttgaagaaataaatgaatgcatcagctccattcctacaacagcatttgaaaatatttgtttatcttcactctcactaagactagtttttagagtagttgtctatcaaaaaagagaaaatatcagattaagatttaaattttgatgtatagtagcatatatcgttagtctaaattattttcttctgcttaaaatggggcttagcaaactatggcccatgggccaaatctggctgtctgtttttgtaaataaagttttattggaacacagccatgcttatgtatagtctatggctgctttcgtgttacaaaggccgagttcagtagttgtgacagagactgtaagctctgcacagcctaaaaagcataaataggctgggtgccatggctctcgcctgtaatcctagcattttgggagatcgaggtggacagattacttgagtccaggagtttgagagaccggcctgggcaacatagcgagaccctgtttctacaaaaaatagaaaaattagctgggtgtggtgtggcacacctgtagtcctagctcctcggggggctgaggtaggaagattgagccagggagatcaaggctgcagtgagccaagatcactctacaccccatcctgggtgacagagtgagattctgtctcaaaaaaaaaaaaaaaaaaaaaagtataaatagcctactatgtgggctcttgacagaaaaagttgctgactcctggcttcgataaacctaggcaaggcaaccttttgttcctgaaattatgggaacaaataccactactcatagattttaataggcaggttacatagagaagagtttatgatcatttgagtcaacacattccagctactattaacaatgactaatattcattatttcctcagtcttgcttcacatctccagtttaaagagaagcagatgtttccaattttgtttttttgtttttttaacctgactttttgtcccctcttgaaaactctgttgactaaacagaaacagatccaggcgtgtaggctggaatctaaagatgggacaaagttaaaaccaataagggctgcttgccaggattgtttagatattggatcttgttcccttaagaagtttaacatttggttatatactggagagagtgttcactagaaacgtgtaagaatgttcattgagttttgtttgtaatagaaaaaaatataaatgactgcaaacaagaggaacaaacagatgactgttggtataatccatacaatgaaatgacataaaacagttaaaatgaatgaactagagttcaggggtaagtctcaaaagcgtaatgttgagcaaaagaaattataaaaggatatgtatagcatggccccatgtgtataaaacataagcctatgtgaaaatatacctacatgtgttatgttatgtacatacataagaaagctacaacatgcatagtgaatgagaaatgaaaagttcagggcagaggttacctctataatgggagagagggaattgggactggggagggttacatggtgtgtcttagtctgtttggggctgctctggcaaaataccatagactgggagtttataaacaacagaaacttgtttctcatagttctgaaggctggaaagtctgagatcgacgtgctgagaagttgagtgtctggcgaaggctcacttcctagttcacagacggccagacatctttctgcaaagtccttatatggtagaaagggcaagaggtctctttggggacgctattataagggcaccactaaggccattcattagggcccccctttcatgacctagtcacctgctggtggcctcacccccaatgccatcaccttgggagttaggatttcagtacgtggatttgggagggacataaacattcacattgcagcacaagagctgcgtctgcgtttctaatgttttatttctcagtcggaatatgaatacacatattttcatcatattattctaaattgtatatgactaaaatactttatgaagactggacacagtggctcatgcctgtaatcccagcattttgggaggccaaggtgggtggatcacctgaggtggggagttcaagaccagcctgaccaacacggagaaaccccgtctctactaaaaatacaaaattagccaggtgtggtggtgcatgaatgtaatcccagctacttgggagcctgaagcaggagaatcacttgaacctggggggcagaggttgcggtgatccgagatcacgccgttgcattccagcctgggcaacaagagcaaaatcccgtctcaaaaaaaaaaaaaaaattagctgggcgtggtggtgcatgcctgtaatcccagttactcaggaggttgaggcaggagaatagcttgagcccaggaggcggaggtcacagtaagccaagattgcaccactgcactccagcctgggtgacagagaaagactccatctctaaataataaataaataaataaatactttatgaaacattacacagagaaaaataatgcatagtgtcatctggtctcctggtgcctatcatagtaaaggacagggatcatacagcacttatttggtacttactgtatacagaaggggctagtttccaaaagaaaactaaactggctttgaaggtgagccagtgaagatcatggctactgaaatgtcaactgatgacagacaaactacgagaaattgcgatttgttcctctttgtcttctgcacgctgctccacaccctgtgtatggattgtgaagttagtttagtggcttgctgttctcactttcttttaaatggcatgttgaaatagcaaacaataatctagaaaatatcagagtgaggagaatatatgtagtaggagtaagtattgtttcatgaagcaatacttgtatgtatgtttgtgtatgtgcatgggtgagtgcatgccagcatgtgtgcgtgtgtgtgtgcacatgtgtatgcgtgtctaagtgtgcatgggctggtgtactgggatgctgagtaaaatctgtttctttctatgggtcatggttagaagttagaaagccaccatattagttctctattgttgcataacaaatcatccccaaagttagccacttaaaacaatgaacatttattttctcacagtttctgtgcgtcaggagttcaggagcagctttcctgggtggtccctggacccagggactctcatgaggttgctgctgagacattagtcggggctgtggtcttctgtgatggcaaagaaggatccctgctgaaggacccgcatggttgtcagcaggcctcagttcctcgcgacatgggtctctctacagggatggctaagtgtcttcaagatctagcagctggccccctccacagcaagtcaaaggagagagagagagagagaaagagagactgaccaagatggaagccacagtcttttataaacgaatcttggaagtgacaagtatcgcttctgttgataccatcagtctcgggccatccctcttgcagtgtgacaggggtctgcccaagtatggaagaccaggcagtggggagaatgagggccatcttggaggtcggccaccatagccactgaccctgaccttgcctggacaacatctgagggaatgtaactggctaggtttttgtaacataggggagtttattagaggatcaaagagaggcattaaatgtcttgggctagaaatgtaaaacctggtccaggagtttaagaacaccctggacaacatagcaagaccccatctctatcaaaaaatttaaaacttctaggcatggcatttaaaaattagcacacacctgtagttccagctattcacaaggccgaggcaagagcatcacttgagcctgggagttcaaggctgcagtgagctatgatcgtgcccctgcactctagcctggggtgacagagctagaccctttctccaaaaaaatttaaaaataataaacaaaatgaagctttccctcaaccctgcatccctctctcactgccatcccctccccatccttccctttatagtttaactcttcatcaaggttgtctggaattgctgcctccacttcctcctctctcatcttccattttttttcctatctttatattgtaaaaataaaacatagatgcaagcaatatgtagttcaaggagttactctaaggtgagcctggttgtcactaccactcagatcttgaagtagagctttaccagcagccccaggagccccacctgccccaatcatagcctcctctctctcctcaaaagcaaccactaacctggcatctgtagttgtctcttccttgcatttctaatagctttatcacacttgagtgcattcctagtcattgtaggtttggtgctgctcatttttctatctatagttttcttctccatccctttcctttccttgcatttggtctgttgaagaacccatgcctttagatctgtagtttcccacagtctggatcttgctgattgcacactcattgtacagcactacacactcctttgtcctctaaattgtctgcagattgtcagatgcttgatcagacttaggttcaatccttttggcaagacaataggtggtggtgtgatctttcatcgggagtgtatgtctgcttgtctcactttttgtgatgttaggagctattgatgattactgcctagacccattaatttctagggagggtcaaatggtgatattctaatttcatcattactttctcatttattcattggaattcatgctcattattacctgggtccactcatttctaatgggggggagcaaaatggtgatagtctaattctattcactgcaatgaaataacagctaaaactgtatttgtaatttggaagtagagaggtagctttattcggtatatgggtggagaagcagaggacagtcagtctcccaagagaaaaataaagcaagtgagtgacaaggagacaggagctcttagttcctgacagttgtctatttctggttccagtcccttttctgattcacatgacataactatattttcataataaattcttcctttgggtttaggttaagtcagagtggttcctgttactttagttaaagaactttgacagtgagggcactgtgcacatttatgatgatattattactattagaaagtgcaggctggataattagctactatgctctgtacagaagttagttgatgtttatggatttttgttcattttaaaattcagataagctatgtttttgaccacttttcctttctgatgtgtcttcattaaagaatgcctccctaaaataatatgaatagatatctactacatcaaacagtagtttaaagaagtgaaatttttatctagtggaaggggtaatactaaagtaataatagctaacacttatatagcacataatttttgcccagtattgttttaaaaatagcaaaatgtaaggtaaattagaagaaatctttttagtaaaagaaattttctgtcaaagtgtatggcatatgaatcattttgcaatcagaaaaaacagacagttggttcaaatatcttgagagttgtgtcttacaaaattacgatcgtgtgttatttatgctttccaaaagcagttgtttaggttcttgtgtttagactgccagtaaatatgctttcagcagaacaaaacactcttgcatcttcaaaaataaaaaaaaaaagcattgcaatttgcttttgagatttcctggctctctccccaccccccgcctatatctgggccttctcttacctggtctctgcttacatttttttgtttgtttgcttttgttttcttgagatggtgttacccaggctggagtgcagtggtatgatctcagctcactgcaacctccaccacccaggttcaaacaattctcctgcctcagcctcccgagtagctgtgactcaggcgcacgccaccattcccagctaattttgtatttttagtagagatggggtttcaccgtgttggccaggctggtctcgaactcccaacctcactgatttgcccacctcagcctcccaaagtgttgggattacaggcgtgagccaccgtgccgggctccatcctgcttaagtttgatcccactctcagcactgtcttcccagtgtgatgccctgacagcccggtcaatttcctagggtctagctcttctagcccctttagtttttaactttttttttttttttttttttgagacagagtctcgctctgttgcccaggctggagtgcagtggcatgatctcggctcactgcaagctccgcctcccgggttcacaccattctcctgccttagcctcccgagtagctgggactacaggcgcccgccaccacgcctggctaattttttgtatttttagtagagacagggtttcaccgtgttagccaggatggtctctatctcctgacctcctgatccactcgccttggcttcccaaagtgctggaattataggcatgagccaccgcgcctggcttagtctttaacttaaaggaagaaaaaccctcccagttttgctgctgtttttacattggcctgcagtgccttctagagtgcctgttagcgctggggctttcctgttcccacactgtgagatgctctgcccctttcctctgctgtctgccacacaaagatgacaagttggtggtgtgtcccttcacccttccttatcaccgtgttgctttgtaaatgctacccatgggctatggattttgttacctagttaatccatctggaactggactctaaaaagtaagctcctgcattcttccagagtctctcattctctctctaaccactgcagtcagcttctttccccaccacaacacccaaactgctctcgtaaaagtcagcaacaaccctccctttgttagatctgaggcctcatttctttttcttttcttcttgtttttttttttttttttgagacagagtctcactctgtcattcaggctggagtgcagtggcgcaatctctgctcactgcaacatctgcctccagggttcaagcgattcttgtgccttggtctcctgagtagctgggattacaggtgtgtgccaccacgcttggctattgttgttgttgtttgggacaggatctcactctgttgcccaggctggagtgcagtggctgcatctcagctcactgcagcctccacctcccgggttcaagcaatcctcccacctcagcctcctgagtagctgggattacaggtgcttgccatcaagccaggctaatttttgtatttttagtagagacggggtttcaccatatttgccaggcttgtctcgaaatcctggcctcaagtgatctgcccacctctgcctcccaaagttctgggattacaggtgtgagccatcgtgcctggcctgaggcctcatttcttgatagcacttggcacaattggtctcgccctccttcctgaaacactttcttcatttggtatccaggacaacacacctcagggttttctgcatttctggctggtgcacgtcactgctggtacgattagccccattgaatgcatgaagatatgggggttagagagactagataatttgtccaaggcatccaactaactagtagcatagccaggaccaatagttaaatatttcttaagcatctcttgtgtgcctgtcactgtgcttgacacatgaacagtaaaacgtctccaccctggaggagtctgcactgtaactgggcaggaaaagggaatacttgaaattagtagtgaataactaccggtcgttcactaggagtgacaactaccagtcgttcactaggagtgacaactaccagtcgttcactaggagtgacaactaccagtcgttcactaggagtgacaactaccagtcgttcactaggagtgacaactaccactcgttcactaggagtgataaccagtgataactagcagcaggaagcagagatgcaggtgggctaaaaaagctggggagagtgagagagggaggatttgcactcagccttgaaggacaggtgagatttgaataggagacagggaggaataatgaggaggaggggcagtcaggcaaatgggggagttgatgttgaggagggtccaaaccaggccacccaaaggcttgaca

SEQ ID NO: 1232 - protein, 223 aa, Homo sapiens
MVGQENEQLPLPLLDRDIRIWQAQQSQNSGIMPEVWNPAAAANGRFGTFRCECVEGYQFSDEGTCVAVVDQRPINYCETGLHNCDIPQRAQCIYTGGSSYTCSCLPGFSGDGQACQDVDECQPSRCHPDAFCYNTPGSFTCQCKPGYQGDGFRCVPGGFKRFLCLGLLSSWDYRSDNYQSFTRSDNYQSFTRSDNYQSFTRSDNYQSFTRSDNYHSFTRSDNQ

SEQ ID NO: 1233 - DNA, 1336 bp, Homo sapiens
  source
  (1)..(1336)
  CDS (201)..(598)
  CDS (785)..(1136)
cagaagttttctactttaaaactcagaagatcagcagatcactgctctctcctggtgctctggggagccacgtggcctctctttgcaccaaaactccccatccaagtccagctccactctctctctgcctcagctgccctgcagccctttcctcttgctctttgatgttttgtaggcctgcagctcccaagcacagaggcatgagtggggagaatgtcaccaaggtcagcaccttcatcctggtgggcctccccacggccccagggctgcagtacctgctcttcctcctcttcctgctcacctacctctttgtcctggtggagaacctggccatcatcctcatcgtctggagcagcacctccctccacaggcccatgtactactttctgagctccatgtctttcctggagatctggtacgtgtctgacatcacccccaagatgctggagggcttcctcctccagcagaaacgcatctctttcgtcgggtgcatgacgcagctctacttcttcagctccctggtgtgcaccgagtgtgtgcttctgcctccatggcctacgaccgctacgtggccatctgccacccgctgcgctaccacgtccttgtgaccgccgggctgtgctccagctggtgggcttctcctttgtgagtgcttctccatctccatgatcaaggtctgttttatctccagcgtcacgttctgtggctccaacgtcttgaacccacttcttctgtgacatttcccccatcctcaagctggcctgcacggacttctccactgcagagctggtgatttcatcctggccttcatcatcctggtgtttccgctcctggccaccatactgtcatattggcacatcaccctggctgtcctgcgcatcccctcggccaccggctgctggagagccttctctacctgcgcctctcacctcaccgtggtcaccgtcttctatacagccttgcttttcatgtatgtccggccccaagccattgattcccagagctccaacaagctcatctctgccgtgtacactgttgtcacgccaataattaaccctttgatttactgcctgaggaacaaggaatttaaggacgccttgaaaaaggccttgggcttgggtcaaacttcacactaagacaactaaatgtcctagagtaaaatctgtagtgatgaaacaacattgtatgtggcactttgtgctctttaaattaatttttaagttaaatttaacaaacctacagaactaagtgaaatttaacaaacctacacaactgtgcacaagtaacaagccttcgtctgcatatgttttcacaaaaggactgtgctcatggaacc

SEQ ID NO: 1234 - protein, 249 aa, Homo sapiens
MSGENVTKVSTFILVGLPTAPGLQYLLFLLFLLTYLFVLVENLAIILIVWSSTSLHRPMYYFLSSMSFLEIWYVSDITPKMLEGFLLQQKRISFVGCMTQLYFFSSLVCTECVLLPPWPTTATWPSATRCATTAGDFILAFIILVFPLLATILSYWHITLAVLRIPSATGCWRAFSTCASHLTVVTVFYTALLFMYVRPQAIDSQSSNKLISAVYTVVTPIINPLIYCLRNKEFKDALKKALGLGQTSH

SEQ ID NO: 1235 - DNA, 4011 bp, Homo sapiens
  source
  (1)..(4011)
  CDS (201)..(369)
  CDS (1717)..(2215)
  CDS (3715)..(3811)
gatcgagaggtcaccaggtgggggtaggattggggttcccctctgaacggtgagaataaaggagaaaagacctctggacaatcatccttaatctcgtgacgccctcctctccacccccgaagcttctgtattctttgcttttaaacactactttgacccttcaggtagcatgcttgtaggggtacccctccaggagtggcatgcctctgcgacccacgggacctgcaaggagtggggcttgtcccgcctgggttccaagcctgcccccctccttcttttcagctgagttctgcctctcctccctgagtgggcagagggcaagggctgagccagacagaattgagagctcggaggaaggaaaaaatcagggtaaggagttaggacagagaggcagcaatggggctgagcctcactggggcgcagagggactttaaacttggccccaagaagacaggctccagatgttttgcctcggaggaatatggagagcaggctttcctgggggtggggaggtggggtcctgggcatcttcctcatcttcctttcccaggaaaactctggcttgcattcttccctctgttctcctgacatttgttttagggtgctctccagacctcagccctccttctacgtcccactccctggtctgatgtcttcagggtttgggagggactgcagggagagagcaggggacagggggactctggctgcctccctgtccccaccagggcagctgacacccccctagacccctcaccccagccccattatgtggtgtggtggagtccctgtatcaggatttcgctccccttccttgcagctgacagaggaggcctgagagcgcagtagtaactccttgcagttctagggtgtaacactctcctccagggagctccaggctgtgcagacattattgatctcctgcctggcagaagttgaacctctgagtgtttaagctatttacccctggacactcaaccagccaaggaaaaattttgctctagcgtccccattctcatcacttggttagtcacaggctgtgactttaccctacagcctctgtctggggacaggccttcataaatgctgttcccagcttctagggtcatagcaggttctaatgtgggaacaggaagtccagcaaatagtgaggaaggtggctgctctatggctctgtgattttagagccatgttctgccagaagagcaaggagagcagacaggcttgtctgaaagccctccctcttaaatagcatttaaagaaatttctttctcttcagcctccccacactcccaacttttgtccttgagaaaaggtgcaacacttctgagtcttcagtggaacagaaataaactgagccagtgcttgattgtctctatagcaatccacccttccctaattgagtatgtggttttcattcattttctctcattggttcctttatttccactccatcaccctatgttcactctgggcagggagctaataggtctgcttaggttacagggtggttttgaatttggccagctttactgcaacatatagccaactgtttgtatgtctttcaaaggtttagaatggagctcagataccataccccaaagatgctggcagagacattctgactcattaagggagagctggctgatagcagagaggggtgacatcagccttgcagacattgccctggggaattctgagcagtgttgctcacagcaccacctggccagatggagaccaccatggggttcatggatgacaatgccaccaacacttccaccagcttcctttctgtgctcaaccctcatggagcccatgccacttccttcccattcaacttcagctacagcgactatgatatgcctttggatgaagatgaggatgtgaccaattccaggacgttctttgctgccaagattgtcattgggatggccctggtgggcatcatgctggtctgcggcattggaaacttcatctttatcgctgccctggtccgctacaagaaactgcgcaacctcaccaacctgctcatcgccaacctggccatctctgacttcctggtggccattgtctgctgcccctttgagatggactactatgtggtgcgccagctctcctgggagcacggccacgtcctgtgcacctctgtcaactacctgcgcactgtctctctctatgtctccaccaatgccctgctggccatcgccattgacaggtgagtgcagcagcagtggggacaacaaaggcggtcagggaggaaggggcattggaattgccccctcctgtactgcagttgcagattgatgagaggtgtctctattccccctagatgtggttgcatgggggactcaaaagcttgcccattgactgacagtgagaagagttctccttttccagctttgttcagacagaagacagcagagccctctagagttgggtgatgggaagcttttgatctcccttgctatggatgttttcctagatattacacctttcaaggtctagagtagacaggtaagaggagatatcgagggaaactttaagcgtcaggcagttacctcttgagtcaatgtggaaatcttgaaggaggtttctatctcatcaagacttcctctactaaaatatgaccttctagcatcatctgtttttaaataagattcaaggatttatgactggctgtggtaaacagttcaagcctataatcccagcaatttgggaggccgagataggaggagcatttgaggccaggagttcgagaccagcatgggcaacatatccagacctcaccttttgaaaaaattaaaaaattagctgagcgtggtggtgtgtgcctgtagtcctagctagttgagaggctgaggcaggaggatcacttgagcccaggaattccaggctgcagtgagctatgttcatgccactgtgctccagcctgggtgacagagggagaccttgtctctaaaaaataaataaataaataaaaataaaaagattgagggatttgttttgaaaaaaaagggaacatatgtttatttactttttgttgttgcattaatcactttgcaccttttagtccatttgcacagatagtgcagaagacctgtttctggtgatcgcaaataaaatcagtaagagcagcctctgcatatctttcttcaacttagtctcttcctttagtgtaaacttgtgctaatgggccaggctggtctttgttcctcgggggacaatctttgctagctcctctgcccacagctggactgtcattacaaagcacctggttacagtctagagacaattatcctgaggatcaaatcaggcttctgtgtacttggatctgaacagcctgtctctctcctttaacccagagagcctgaggcatacatgctctccctgttctctggcctcaaggatctgagggggtttgacctggccctcacagtcaggacagtgttctagggaggagcacagctaagagagcttgttttctgagaccgtaggcagggcgaccaggggtgggatgaccgaaaaggataacctgaaaaaagggggttaccaaggaacctctgtctataaaaccgctgaggggtggaaactctgcctcccttctctagggaaggacatcaggaagttagcagcttacatagcccttggtctgtccccgtagatccttgcagagtgctacttcttcttggccaaattccctccactgaatcacagagccctgcagcttttcatttacctggaggccaaattccctccactgaatcaaagagccctgcagcttttcatttacctggacaaggaccccgcatgaacccactgaaggagcaggaggggagcagtcaagtagagtatctacttcgtaggttcctttcaaagctgccaaggaagagctccagggactttgtctctgaacttttttgaaagtagaagccgccaccttctctcttagcccatgaacaggacaaagcatacagagtcatttcctgaagtttcatactagcgagaaactac

SEQ ID NO: 1236 - protein, 254 aa, Homo sapiens
MPLRPTGPARSGACPAWVPSLPPSFFSAEFCLSSLSGQRARAEPDRIESSEEGKNQAPPGQMETTMGFMDDNATNTSTSFLSVLNPHGAHATSFPFNFSYSDYDMPLDEDEDVTNSRTFFAAKIVIGMALVGIMLVCGIGNFIFIAALVRYKKLRNLTNLLIANLAISDFLVAIVCCPFEMDYYVVRQLSWEHGHVLCTSVNYLRTVSLYVSTNALLAIAIDRALQLFIYLEAKFPPLNQRALQLFIYLDKDPA

SEQ ID NO: 1237 - DNA, 2901 bp, Homo sapiens
  source
  (1)..(2901)
  CDS (201)..(324)
  CDS (2268)..(2701)
tatcagtaagaatatcagagggctgtggaaaccccttgcggtactgggagtaataccatcgtctctccctctgaaaataggaggattttcacagggatgtgtacacaccctgcgatattgggagtaagatcatcctcttcacccaggaaatgactaacaaggtcaagggggggcgtactccccctgcgatattgggagtcatgtcgtcctccccaaacctggatgttaacaacgagatcacagagggggtgtacacaccctgcgacattggaagtaatatgatcctctccccacctggatactgggaaggataccacagcacgggtatacgttttctatgctgttgggagtaatatcattcttttcctttctggatattagcaagaatatcacaggggtgctgtacaattacttcgacattgggagtaatatcatatcatactctattttcctggatattgggcacaaaaacacaaaagggtgtacaacccctgcgatactgggagtaatagcatactcttcttccctagatgttagaaaacaatatcatcagggctgaacactcctcgcgataatgggagtcatatttactctttcacaggtcatttggaacaatatcacagggggtgtttacaaacagaggtggtgtacaccccctgtgatattggaagtaacatcattctctccacctactgacattaagaacaataccccagcgggaggtggtacacccccagtgatattgcgaataatgtcatgctctccttccctggatattaggaacaatatcacaggggggtgtacaccttctgtgatattggaaggaatatcatcctctcccccgctagatattagaaaaaaatatcactcacggtgtacacccactgtgatatgaggagtaatatcttcctagggtattacgaataatttcacagtccgtacacacgtgctgtacactcactgtgatattaggagtaatatctacctagtagataacaaataccatagcagggtgtacacccactttgatattagctgtaatatatttctaagttgttacaaatatcacagggtgtacaaacatggtgtacactcactgtgatatcaggagtcgtatctctgtaatatattatgaataatatcacagggtgtacacccactgtattattaggagtaatatctctgtaggatattacaattaagatcacaaggtgtagagccaccgtgatattaggagcaatatctttctaggatattacaaataatatcacagggtgtacgcccactctgctgtctggagcaatatctccctagcatatcaaaaatcctatcacagggtgtccaatctctgccttccaggttctaagggattctcctgcttcagcctcccgagtagctagggttaccagccaccacgcccggctaattttttttttttttttttcactggagatggggtttcaccatgttggccaggctggtctggaattcctgacctcaggtgatccatcagcctcggccgcccaaagtgctgggattacgggtgtgagccatgccgctgggccaagagttatatattcaattcatttggaaacacagctcccatctttgagcgtgcatgtacttttatgaagaaatgatgtcagaaaaccgaaggatgataataaatatgaaaagtaacaggcatgtgaaaaggtctcccgattgagaactataaggttcgatgtcgttttcagataatgtggtcctagctcttgtgtcgtccttttacatattctacatcaatagaagttgtagcacggtgtcagaataaagtagagtgtatttcacggcttcttaatttctttcaattacactgagatctttttcttcaagagagaaggacattgtcatggcattgtattttttctgaaaagagtaggctgtattttactgagattacggatttgttatatatgacgttttggtcttctaatattcttcagtggattttctctaaagtagtatgtacagaaagccttgtatagcaaaaaagtaaatcacgtaataattctgagatttttggaattgtcacaactgagaaacattgctggcggtgtatggaccgcaagtgtgaagatgttccttgtgaattgcttgcatccagcattaagggctggtttttatcttttatttttccaatcctctttccttctcaaggtgtccaagacacacagagccacggaatctcacaggtgtctgagaattcctcctcctgggactttcagaggatccagagctgcagtcggtcctcgctttgctgtccctgtccctgtccacgtatctggccacggtgctgaggaacgtgctcaacatcctggctgtcagctctgactcccccctccacacccccatgtacttcttcctctccaacctgtgctgggctgacatcggtttcacctcggccacggttcccaagatgattgtggacatgcagtcgtatagtagagtcatctctcatgagggctgcctcacacagatgtctttcttggtcctttttgcatgtatagaaggcatgatcctgactgtgatggcctatgactgctttgtagccatctgtcgccctctgcattacccagtcatcgtgaatcctcacctctgtgtctttttcgttttggtgtcctttttccttagcctgttggattcccagctgcacagttgaattgtgttacaattcaacatcatcaagaatgtggaaatctctaattttgtctgtgacccctctcaatttctcaaacttgcctgttctgacagcgtcatcaatagcatattcacgtatttccatagtactatgtttggttttcttcccatttcagggatccttttttcttaatttaaaatcgtcaccttcattctctggat

SEQ ID NO: 1238 - protein, 185 aa, Homo sapiens
MSSSPNLDVNNEITEGVYTPCDIGSNMILSPPGYWEGYHSTEDPELQSVLALLSLSLSTYLATVLRNVLNILAVSSDSPLHTPMYFFLSNLCWADIGFTSATVPKMIVDMQSYSRVISHEGCLTQMSFLVLFACIEGMILTVMAYDCFVAICRPLHYPVIVNPHLCVFFVLVSFFLSLLDSQLHS

SEQ ID NO: 1239 - DNA, 1054 bp, Homo sapiens
  source
  (1)..(1054)
  CDS (201)..(582)
  CDS (652)..(854)
  modified_base (69)..(168): a, t, c, g, unknown or other
cctcaagcacctgatcttggacctacttcttctaaattataaaaggactctccccaggtagagggaagnnnnnnnnnnnnnnnnnnnnnnnnnnnnnnnnnnnnnnnnnnnnnnnnnnnnnnnnnnnnnnnnnnnnnnnnnnnnnnnnnnnnnnnnnnnnnnnnnnnngccggactgcacgaggtcgcttcgccgcccatatggtgaggaaaggaaagagagacacgggtctggaggccgagagcgcaagaccggggggtgagcacccggcacgctgcgagggtaacaagctatcaggaatgcggggtccgtggcgggggagtgttgtgggcgcggttaggccgagtcctttagacgcccagctgcacaacgtgattgcctacagaaggacctgcttcaaggatgtggaaattccgaatttcgctgtgacccttctcaattccccgtcttgcatgtgtggcaccttcaccaataacataatcatgtatttccctgctgccatatttggttttcttcccatctcggggacccttttctcttacgataaaattgttttctccattctgagggtttcatcatcaggtgggaagcataaggccttctccaccagggggtctcacctgtcagttgtttgctgattttatggaacaggcattggaggctacctcagttcagatgtgtcatcttccccgagaaaggctgcagtggcctcagtgatgtacacggtggccatccccatgctgaaccccttcatctacagcctgagaaacagggatattaaaagtgtcctgcggcaccgcacggcagcacggtctcatctcaatatcttcttatctgttccattccttttgtagtgtgggttaaaaaaggcagcaaggtcaaataagaatgatgtcacagggtgaacacccactgtgatattaggagtaatacctccctaggatacagaatatactgtcacagagtatacacacatggggtacacctgctgtgatattagaagcaatatctccctaaagtacgatgaaaaatatcacagggtgtgcacactgtg

SEQ ID NO: 1240 - protein, 194 aa, Homo sapiens [sequence omitted]

SEQ ID NO: 1241 - DNA, 5066 bp, Homo sapiens
  source
  (1)..(5066)
  CDS (201)..(288)
  CDS (2561)..(2699)
  CDS (4494)..(4866)
ctgggggtagggcatggcggctgcccgaggcccagccacttaactgcagctgccactgcctccaggaattgaagcatgattgttctgggtcacagctggcaacacttgctgcatggctcctaaagtcacagtgagcacttctgtctgcagacgtgaacgagtgtgagctctacgggcaggaggggcgcccccggctctgcatgcacgcctgcgtgaacaccccgggctcttaccgttgcacctgccccggtggataccgaactctggctgacgggaagagctgtgagggtgagtgaggctacagagtgtcgtctgcacccagccacctgctgctgtgctgaacccccaggacctcacagtcgggagtgaggtggttaggagagtcacagtttcagatacattggatttttaaaaagccaccaaccaaagggcttctcaaaggtcaggccacattatcatctacataaataggaaaatgagttccttaaacatcttggcaactagtcttttccgactttatttgagtaaatgggttttttgttttcttcaaggtctggtcaattctacccactcaacaattccttcagctagggctgggcctaaaggcagagtggccaggtggtcacccatgtcatgtaatctggaggaacccatgagactccatgaccctgtgtccacctgtaagtccacctctgaaaggggcagcaccttacaggcacttatgtcttagtgaggtcgggcgctacagcaccagccttgtctgatggtagctgaggacaacaagggaggcggagcacccagggagggacaagagtcgggggcatcactacccctggcttgtgaggtacaggaagtgagggggcttatcagagcctgaaagattgtggctctgatcaaggacacagcctccatcagaaccacatccaggcaggtcaggactcctcaggctgggtcactgtcatttgccaaccccagctaaaaaccagtcagcctctcaggtgcagagagtgggttggggggcagcggcgcagatggaaaataactggctcaggtttcaccccagtgctgaatcctgtccatcagcagtggtttcctggagggccgggttgaggtttctgaggctgattcctggcagagtgggaaagaacatcttaagttgacaaggaatgtctgcagcagggatgggaggcacctaagagattaggaaggatgtgtgcagagtgggttggttgtagaacagagaggctgagaaccctcgcaacagtcaccatcatcactacaggacaagtcccagggacactgggtgcctaacaggaagcctcctgtgtttccccacctccacttagggaaaatacagatgtcagttgatgtagacatgctgaatctccacatgagctgagtcagagcacacatctcaggcctgaagcccaagtgggatcatcctgacccttggcccttaaaccaccatgctgcagtgggcctttcggggggctggttctgctcctgcaggcatacctcacactaggagggtggacaggcccacctccccagctggacttcccccatggaaacaggacacagaggggagccccgctggctccagataacagctctgacccaccaagggagaacgggagaagagagggcagagggctcctccatgggctgacgtgggaatgtgaggggagaggtggctccccggtgacatcccattggggccccgctgcagggctctgaggagtgggtgacctggggctggagcaggagaaggcatccagatagccacccacactccctccctcccacagtgctcacgaaggcccacctggggttgcttggggttgggagggacggcctccagctggggagactctctggatgtctgcaaagggagcagagaactcatacaaatcatgatattgaggtgtctgcactcgcatggggtgaggctggcagggaagactttctagaagattctaatttaaaaaaagtgtgtgtatatatagtatatataggtatatggtatatatatgctgtatatggtgtatatatggtatatatatgaatatggtatatgtatatatatgtatatggtatatatatatacacacaccatatataccatatatacgtatatatggtgtgtgtatatatataccatatatacatatatatatataccatatacatatatatacacacacacatatatatatatgaagaataacagccatggagggtaatggggcacttgggctgagaagcagacaggtctaagagaagcattgtgaccagtaacactcacctggtgctttccaccatccttgccacctgtcataccccagggaaagaggacaggatcccagggaggggcactccctggcatttcctcagggccctgattccacacagttaaggaaggcaggctttctgctttaagaataagtgccaggagcagggagcaccacattacaggacctgcagggcctctcatgtggttctgtctgcaatggagggaaggtcagggcgattctcacctgttgtatgtcctgtatctcagatgtggatgaatgtgtgggcctgcagccggtgtgcccccaggggaccacatgcatcaacaccggtggaagcttccagtgtgtcagccctgagtgccccgagggcagcggcaatgtgagctacgtgaagacgtctccattgtgagtatctccaggggaggcacaccctcacccaggcctccaagtgtggctgggctggatgcttcctagaggttcttgggagaaggtacagttataccatagaaagatgagaggcaggaggctgggaggctggtgtctctgaatttccatttccgcttagtggttgcatttaatgcgttgctgctctggagaaataagaaccccattccccatgggagtaatatactaagtgcacccccactacatagaggttgatggggttgctgccaccccaggatggcaaagccagggcaggcactgaagggaagaagctgttggtgacattaccctgataaacccatagcagcccaggagacaggtatagatcacatggatttgggaggtgacagcattcacatagccaggaactatagactcccttgagttacactgcatatcccgtgcaccctgcattatatcactctgcttttccaatagtactagaaggttctacatctagtaactgcaactcttaaacagcaagtagagcttttttttttttttttaaagttgggagatgggcctttaaggggaatgactacaactatcacaaagcacatacattttcctctcaaaaagagatcacaagagccctagcgttgtctttaaaatgaagtaacagccatggagggtaacttaattatttgaattgctgttgagttaaagcagattagaagcagcaagaaacttagtggcactgaagcatggcagtttttagagagagtgaagacatcagaaccttcctcatgaagtcactcggtgaagggatagggaacgggtctatgacggcctctggggcattcgaccaacagctggatgtgacagttgactgcataatcatgatgctacagaatcgccaaatatactagattgcatttgtcttttaacaacatagagaaatatcgaaagcatttccacaagaccctctttccaaatgattaaggaaaacagggcttcctgcgttgagaatacacgtgatggccaggcacagtggcttatgcttataattcgagcactctgggaggccgaggagggcggatcccttgagatcaggagttcgagaccagcctggccagcatggtgaaaccccgtctctactaaaaatacaaaaattagctgggcgtggtggtgggcacctgtaatcccagctacccaggaggctgagacaggagaatcacttgagcctgggaggtggaggttgcagagagcctagatcatgccattgcactccagcctgggcgacagagtgagactctgtctaaaaataaataaataaaatacatgctgctgtgtttaggaagttcaccgtacaccgtgtgggaagcactgcattacaggatgttgctggctaactgctgaggtcctgccattactgggcgaggtcgcagcacatggagaaagggcacctggtttgaatatcagcattgccattgttatttaatattcccaggctatatttttctgtaaaaatgatagtaatagcataaataaatgtatgtgcacacacatacacacgtacacaggtgggcagggagcacccttgagcaggaacagaagcagcagcccttcctttgccatgcctgacaccagctacattcactcgtccacagctccatagctcctgggtgaaggacccgtggctgggaaaggtcatctaggtggcctctgcaagagggcaggtgggcagccgggtcagagcagctcttcatgagactccccaaggctgactgcctccattttgcctctccgctccagccagtgtgagcggaacccctgccccatggacagcaggccctgccgccatctgcccaagaccatctccttccattacctctctctgccttccaacctgaagacgcccatcacgctcttccgcatggccacagcctctgcccccggccgagctgggcccaacagcctgcggtttgggatcgtgggtgggaacagccgcggccactttgtgatgcagcgttcagaccggcagactggggatctgatccttgtgcagaacctggaggggcctcagacgctggaggtggacgtcgacatgtcggaatacctggaccgctccttccaggccaaccacgtgtccaaggtcaccatctttgtatccccctatgacttctgagggtacacaggggcactggggtgtggagagctgacctcatttctcttccccgaaggctcagcttcgggcaccgactgcgtggagcctcccgcctgttcccgccctctcaccagtgcacccaggcttctagggcagcgttgcacggcgccccatggaatagcacggaagagcagccacaaaactcaactgctgccatcact

SEQ ID NO: 1242 - protein, 199 aa, Homo sapiens
MHACVNTPGSYRCTCPGGYRTLADGKSCEDVDECVGLQPVCPQGTTCINTGGSFQCVSPECPEGSGNVSYVKTSPFQCERNPCPMDSRPCRHLPKTISFHYLSLPSNLKTPITLFRMATASAPGRAGPNSLRFGIVGGNSRGHFVMQRSDRQTGDLILVQNLEGPQTLEVDVDMSEYLDRSFQANHVSKVTIFVSPYDF

SEQ ID NO: 1243 - DNA, 43981 bp, Homo sapiens
  source
  (1)..(43981)
  CDS (201)..(470)
  CDS (12636)..(12748)
  CDS (24946)..(25088)
  CDS (32801)..(32997)
  CDS (41097)..(41379)
  CDS (43585)..(43781)
  modified_base (2811)..(2910): a, t, c, g, unknown or other
  modified_base (6914)..(6914): a, t, c, g, unknown or other
  modified_base (6923)..(6923): a, t, c, g, unknown or other
  modified_base (6932)..(6932): a, t, c, g, unknown or other
  modified_base (6956)..(6956): a, t, c, g, unknown or other
  modified_base (6959)..(6960): a, t, c, g, unknown or other
  modified_base (6964)..(6964): a, t, c, g, unknown or other
  modified_base (7905)..(7905): a, t, c, g, unknown or other
tttatctgttttgttcattgctctatctccaactctcacaacagtgcctactatatagaaaatgctcaataaatatttgctgatgcaataaataaaaaaatgtaactaagcaaccaagccccaaagagtctgattttattaatattgttttctgtctcctcacaggaagccccttggcatcacgcacctccctctgggctatggcatctctgagccagctgagtagccacctgaactacacctgtggggcagagaactccacaggtgccagccaggcccgcccacatgcctactatgccctctcctactgcgcgctcatcctggccatcgtcttcggcaatggcctggtgtgcatggctgtgctgaaggagcgggccctgcagactaccaccaactacttagtagtgagcctggctgtggcagacttgctggtggccaccttggtgatgccctgggtggtatacctggaggtgagtagacttcaggtgcatgttgtctctatgactgtgctagtacttgtcttccctgagttctggcctttggggctcaaaagactccccagacagtcaggaactgaggaaggaaggagagctctcattctccctgtaatgagagagttaaagctctggaaaacagtcaccatcctgtccctcatccacatcagaaccaaggagctgagaatgattctgttcatgggtctccagtgttcaggtgactggatttgagtgacgggactcttcctaatatggcctagagtttattccctgtgccagacatgtctcaatgacatggtgggctgggtgaagcagtccagaagacctcttcaccagtgtttaatgtatatgagggtgagggtgtgcaggagggatgtgaggccaggaggaaaaaggaattatagaaaaaaaaaattagtgaatgtaagggaagatagaaagaatgaccagcgaacagatcagacttctttcgatggctcagtccctctttgctctttcctcctgggtaccagttctccatagactctgctaccaaaggaacagacaaaaccctcaaatgtatattttccatgtgtccatgaatagtacagagcctttgccagagagatagtgcagcagatcctggtgaattcttttggggagaaacatttattaaatttgaaagtattttcaattgggagtgcaaaacagagccagggggtggtcaagacaaaacacccatttgctaacaaagaaatcagggtgaccatatctgttcaagaaacagatattcttaccaggaaaacatgcaattacttaagatatgtttttttaaaaaaacctgagtatactattaatatttctcctctgcactgtgtgtcattttaaagaggtatccaatgaaggatcaaaatgatgctatgattaagagaaattaagattcatcaaattaatatctcagttaatattgatagtaaaagtgacagttaattaagtatgacatatcacgggagagcaaaaaccttgtacatagactgcctgtgctaatacctttgttaaagaatggctgggaactaaaattagacttatgatctcaagggggagacataaagagagaaaaaaagaaaacagagaaataaaaggaaaagaagaaaaacaactaggctgtgtagatctaaaggctaagggaatacttgaggaaaaaatatgcatttattcttcccagttaggataatcctagttgggagggtgaagggtcttataattatcttgatttttctgtcaacccaattagtctgagtcaaccttgaagtcagagactagatctttactcttcatctcctgtagcctaaacatactacctggcacaaaatacatgctaactgctataacatttgatatatgaatgatgaaatgaatcttctctgtaatgtatgcattatatgggctattcctgctaataccatctgcctctctatctattgttacactcagactttttggggagaggacttttggggacgagctatttgttattttacatccaacaataatgagcctgaaaaaatttcgaagcatgtgatatttctgttcaagaatgaggcgctttaggtgcaaccagccaatatgaattggtcaataactcatagcactgtcatcatcttcctaaaatgtttttgtccatttctatgtgttccaaggaatgttaagtcctccagaaggatgaatggcaggaagaaatgtaggcagtggaccttcactctaatgagcatttttattccctctaagataaaaccaggcttttggtgtctgtaacaaagccactcaggggcatttgttggctatgtatttgtgattatttctaggactctggttggaccatactggaaaacatctgtatgtactggtttaggagatagacattgtgacttttccacactagaaatccatggcaccccttctagccataccttctgatatactggtgctcctattctactactgagcatagaagggcaggtgagactatagaaaatgacaggaaatcttgccaaaggccttaaagaaatcactgtagtagtacatataggttttcttccatgagaacagctctgatgaagtttttggtttctccccataaaaaccataatactatgccctctgtccaacaggttatttcatgtaggtattcagtgatcaagatcataatttttacatttgatcttaaccaaaaggctgagaagcaataagagcatgatggggattgaagcgagttggtaagaccaaaaagaggcccggggatcctactagagtcgagctgcgagcatgcaagtagtcnnnnnnnnnnnnnnnnnnnnnnnnnnnnnnnnnnnnnnnnnnnnnnnnnnnnnnnnnnnnnnnnnnnnnnnnnnnnnnnnnnnnnnnnnnnnnnnnnnnnatcccctcccaatttgcttcaaaacccagtcaatgtcttgaagcgagttggtaagaccaaaaaaggccctaaagccagtgaagaatacagaggaccaagtctctccatcttacatcagtctatacttttcttaatctcaaatgttttcctatctttccttagaggcaaatgaggcaccttaatgaaagaaaagagcactttgagcccttaaaatatgggctatgaatacataaatccatgttcctcaagaagaagcaaagtattattctcactaacttgtcctaatgatagtacagtttgagtagctactctactaattacttaattatacctaagagctccctttggaaaagaaaagggtgcaatgttgaccaccgagactgctgtaggcttgagggcccccaggaagataagatgtacatgagaagaacaccactttgggatccaaaagattcaccagattcatagccgcatgtgctttgatttgaacacatccaccttcttcgaaggaaaattggctcattttgccagacaccagtatttatgaggtaggaatgttttggctgtaaatattggaaaccttgattagttgtggtttaactgcatttaatgtttttcaaataaccagaattctggaggaaaagaattattgtgttggttcagctgccccatggtgtcatcacagaccagacttttccatccttcctcttcaccatccttggcaagctggcttagttctttatcttgccatagcccccagcaccatggcagtattcaaaaataggatgggtagggacagcaggaaatgagagagagagagagagagagagcatgcactttccctgtagtagcttaaagcatgtttctaagaggtttcacataagcttaattggccagaacttagtcatgaggccacctttagctgcaaaggaagccaaaaaagaaaaaatgaaaacgtgtgttttatttataaaagatgtaggggtggggaattgctctgacgtaggcaataaagtatcacatttcctttattggaattcactgggatgaatgtcatttcaacacagtgtcatgctgtgagaaaaagactcagaacttggagtcagaagacatggatttaagtgcataaaatggaggtgacaacaacattttccaccctgagctgatgttagactcagctgtcatcaactgatagagtattttgataaccaaaacttttgatctataaatatctcacttaagacacttttaattataagtttaaaacagcttaactccaattggcttaaatgaaaaaacagaatgcattggctgtcataccaggaactttataaagtcctctggtagggtgggctgcaggcacagttccatcagggcaccagctccatttccctacagttctctcagctctgcctttttccatatactgaccttacctgcaggcaacaggctaagctataggtctcacatgtccacaccacaccattcacagcaagagagaaaatccttttcttagaatttctagtagaagtatcaagatgtgctctgattggactggcttgtggcacatgagttccagcttgaaaaattgatttaacataggttatatgtttcttctttggatactgcccagcgatctcatagattcacagtggcatctagggactatttattgaaaagatagaagaggatagtcagtaagtgggaaccacagtcagctttcattggtatcattctcatctttaagacacacaggagccttcacttgggcatatataagggggcccacagggaccagtcactgacgtgcttcagtattctctgtcctcaagcctggcagataagttcaggacaaaaaccaagcaggtgacctcacagaagattatatttcagagggcttctggcttggctatctgcttaattcagtttgcagcattttctcaacttttctgtaccatcccaaatagttctgtctcagatttcctctcaagattttaatttcctgctttaccgtctgcactccagagcttcctctccaagcacaaacttctcattttgttccactcagtgaagcaccttttgtgatgtttaaaacacttttatcaggatagaaaggcagtataagcggccaggggaacatttggaatactaaactcagactacttgggtcccagtgtagacaggaggaaaaacttgaggattaagaaaggtagtcaagcaagatagaataggatgagttcaggcaaggaaacgcaccacagaaaaagcgatcgaggtcggactgtgatgaaagaaaagaatagcaaaattttgggaagggaagaatctttgagttttgtaatgatattgattattaaaaataaagaagtgggtttttttaaaggaaagttttaccacagctcaaaaaaccccaaatgataatttaagacctccctactggaaaacaaagacaggagattctcacgatctcgtcaccaaactctggattttgataaaagtcatagaatattaaagctggaagggcttggagattatttttgccatcatttccacagtgtgatccaaccacaggaaattcctggccatattctactgacatggtttctctgaggatgagtcttggagtctcatatccaaatgagctcctccatacttcttatgcacctaaactttgagcagctctgagctaaacgttcattagggggtgtgttaatccattttgtgcagctacaacagaatacatgaggctgtataatttacaaagaacggatttatttcttacagttctggaggcttggaagtctaagatcaagaggcctccatctgggaagggccttcgtgctgtcatcccatggtggaaggtgggagggcagaagagaggcaaaaggggaatgaacttgtccttttataaggaacccactctcacaaaaacaacattaatccactcatgagggcagagtcctcaaggataatcacctctcgttagaccccatctcccaacactgttgcactggggattgagtttccaacacatgccttttgggggacacaatttatagcataagggaaggagagactgcttgttaaaaatacaaactgttggccgggtacggtggctcacgcctgtaatccccacactttgggaggccgaggtgggtggaccacctgaggtcaggagtttgagaccagcctggccaacacggtaaaaccccgtctctactgaaaatacaaaaattagccaggcatagtggcaggtacctgtaatcccagatacttgggaggctaaggcagaagaatcgcttgaacccgggaggcagaggttgcagtgagccgagattgtgccactgcactccagctagggcaacagagactctgtctcaaaaaaaaaaaaaaaaaaaatacaaactgttgggtctacctcgggtctaccaaaccagcatttccagggcagccctggaagtctagagtaagccccaggccccactcccaccttatgtgacttgtgcaaccagctagtcatctgctacgacatttgggaaccaataagctacaaaccccctatttcatagatggagaaatgaagatgcagagaagtgaaaaatccttatttattattctgttttgccccacagcaaccctcccaccaagaaatactccaaatgtggcaaacaaaaatggactgaagaggctaattagagaagtacttctatctttgcctcttagatatttccaaataactaaaaattcatccctttagagttggagttcttaatctggggagttcatcaacttggatgtaaataaaactactcctttattttccctgagatgaaatttagaatttcctttaattccaaatgtaggtatcaacccacagcagaagaaatctttagtgtcaccagtagaaatcacagatttttttcttaacttttttaactttctttttttttcttttgaaatggagtctcactctgttgcccaggctggagtgcagtggcgcaatntcagctcantgcaacctnccaccttccgggttcaagcgattntcnntgcntccagctctcccccaaatttgtttaactttttaaccctccttcctgagcactgatgatatttatattttcaaaccacattatgattgttgcggacatcttgaaacatcacttatactcatcatttctttgaaattataggaattttggacctgccactagatcttgttatttaatgaattattaaagaaacacatatattttaaatactttgacaattatatttcaataaaactgatatcctttatgaaccactgtatttatttcatgctttaaaaacattcttctggcaaggcgcagtggctcatacctgtaatctcagcacttcgggaggccgaggtgggtggatcacctgaggtcatgagtccaacaccagcctgcccaatgtggtgaaaccccgcctctactaaaaatacaaaaattagctgggcctgctggcatgaccctataatccagctacttgggaagctgaagcaggagaatcacttgaacccgggcatgtggagattgcaataaacccaaattgagccactgctctccaaccggacgacactgcgtgactccatctcaaaaaagaaaacagaaattcaaacataataaaagcgttcttctgacaacgggatcatgaacctaccgaaatccccaggataaataatgcttaagataacctgcttcaagaacatcaatttctcccgatcattttatgctccccttaaccccataccaatgtttgccaaaccaaaacaataataatcactaaaaggacccaccactctaatctaggactaaaaatgattacagctaacaacaatgacacgataaaaaagaaatgcttacctatcctactggaactattccaaagcatacccagggattcctcccctaaatcatcccatgactttatccataccatagagacactttccctggataattaacttcntatacatatccctgaatgagggacttattactctgagcgaggcctaagaatcattttgtttaacaagagtgtctggagatttgggaaatgctgccttataatcagtaaatttggggaatgctgccctaggctgtgtctattgaaaatcaatagacaatttcagtacctgaagacactttcctgcttactcaacttctgtattgccacagggagttacttacattcattagcaagtaagagtaacaccacctggttgctgtataattctaaagtgagttattcattagaatgcaggagaaagaatcatgtctctaaaaagcctcaagtcaatttgatttttttcacttttttttttttttttttttttttttttttttgagactgaggctcgctctatcacccaggctggagtgcagtggtgagatttcggctcactgtaacctccgcctcccgggttcaagcaattctcgtgcctcagcttcccaagtaggtaggataacaggcgcccaccaccacacccagctaatttttgtatttttagtagagacagggtttcaccacgttggccaggctggtctcgaactcctgacctcaagttatccacctgcctcccaaagtgctgggattacaggtgggagccaccacaccaggccttttttcacttttatctgttttaatttcaaaaatcattttgcctttcataatcttccaacactttgtacctatctcacctttggtgcctatcacattgcctcatagctgttttttaagtacttatctcccgggccctcagttcacccatacccattcacacatcacttctggtaataggcacacattgtattctgagatcctgggaacaaaaacaggtttgtttcaatacacccgcccaagcaaagtatcagacatatcttgggcactcattagaccatggctataggggtaatggatggacacacaccaactcttctacctcctatgatattagaatagagttaaattgtacacatctctgaagaggcaagccactatactttgagaggcaggaagagtaatggtaatataaaggggtcaaaatcctagctccttttacaagctatgtgtccttaggcaaattactcaacccttccaggtctccatttggcaaattactcaacccttccaggtctccatttctttacctataagttaaaaatcacatttacctcttcaggttgtgatgagaaaatgtgtgagaattaccagcatattcttggcacctagatgcactttattgatcccttactatttgttgcttgatatggaggatgtcaatagaaaaaaaaaaattcattacaagtcccaccaattagagactcattttaatgagtaagctccagggaaggctaagtgatggcaccttagtgggaattattttaatcagctaatcagattgttttcttcttgactcttagctgaaatcaaggagagaatgagaattttcatggcagaatcaggagacaagaaaagaggatagccagaatgggatgacaggccattgggggcctggaagccagagaacagcttgagggctttgtcctttgggggctaagcaggaggggtattaaataaaactgtctgtgtactttcaccaaccccaaaggcagcacttaccactgtctcttgcactattctttgaaccctgggatagaggcaatcaggagagtgtctctttccctagaaaggagatgatatggtctgtcacacaaaaatccctgaggaacacctggttttcttctttcccctagtatctacccacttccatcccttttccaacaactatccctcctcacctaacacttccctatagcagggtgtgtaacaacctacattccaatgctctgtctccctgtactagccctgtgaccttggacaaagtgcttattctttctaagcttttagattcttcctctgcaatgaagataataatcctctgtcatagaattataatcggcaatagaggccacgtatgtaaagtgctttgcagaacaccaggcacttagtaagcgttcaataaatgttagctattattatgacagattatgtcagaggtcatttattatttcagaatatattttcatggttgggccctgctctgggagctgggggtgcagcagcaaacaagtaaatcttcctgctcctgttggtgttggttaagtaacaataactccatcccctatcaagtaaatgtataacttgtcttcaaaaagctttaagaacacatacaataaaaacaaattcagttttcaaagtctgaagtttcaaagttatagaaattcctggaatgggtcatgtgggttggtaacacatgtacagtgaattctcaataaatgttaattcctattaacaatattaggatatcatgatgatctctagtattttattgatgaatgccttacttctccagttatcttgtaaattctttaaggataggccctgtagtacattttgtaaaacctctcaacacacatgacatacactgctgcaaaccaagtactaagagcttcacaagtatttgctctacaagtgcatgaatgaatgaatatccagcaaacactgaagtttgctgttatcctaactatcctttctcacctactctagcccaaaacacaaacaaacatgtgctcacaattatgccaaaaagtgtttttttacccaatttaaaacattaactgcagagtagatataatattgaaataaaatttagtatacaaaatcagcttttgcaagacgcttttacagtatgcaactgtcctatgtaatgaagaaaaccttcttttattctcttggttcccctaaatcattgtgttattatgactctttagatcggaattcttatgtctcaatcttttaaaagctttttattctcagaattcctataaattcatattcagcctttatttatatagagccaattggtcaaactaaaagagagacagtaaatccataactggatttgacttcttcactagttttaattttcattgttgcttttaaacaaaaaatcattggtcagggtttctcaaaacagtctggagatgaccaagcacaggaataaaatgagatgcaaaaaaagaaataaatccaatgggaagaagttatcagggacagggaaggaaagacggccttttaggaccttattttattgggataaaacagaaatgaacactaaagtgacctggtcatataagaagatccttggatgagaaaatccagatgaaggaatagcactatctttatgcacagtcatttggtcagtatctgttttcttattgggaagctacttcagaggctactgtaccatttttcactctttcttcctcttaaatggccattgggcctgttcaggagcggtattgtgaatactcagctacagccagaggcacaaagcctggcaggtttctccccgagaactagggtccccaagaatgacagcccacccccccaggaaagaagctggtaactgcacaaagcctcgcggtccatgagtggcctttggtggacattttaaaagtgtcaatctccctgacacatcttcctgattcaattagggtatgtaaaggtttcaaaaataaatagaaatatactagagtataaatgatattatataaattcctgactgtaagcattactcagaggatgttatggagcttgaaatacatgtatagatagatgcatgaggttgaaaccatcctcatgaattctgagtagtggagagaatccagcccttttccccacttttggtttttgggatgtgggtggggagggagagtgttgaaggcagtcacattggcacagacttattttacatagattcccataaatgttgtttcagaatgtttccaagctttacaagctgaagccagatagatttttactttggaggtaaattttatgaaaaatgtgttcttagcttatttcttgagtgcatgatgagctctctactgggtgaaggacttcagagagacagttttggcacaatgtacacatcgggtagtcaccgaagtccttttaccaccagctgagcatctatgaggaagttatcacttaaccacaaggagcattagttgcctcctgagtttgaatttcaacagtgattctcaaaccttggtatgtataggagtgtttatttaaaaatgaagattttagcccagcttggtggcgcatgcctgtattcccaactacttgggaggctgaggcaggagaatcacttgaactggggaggtggaggttgtggtgagccgagatcgcaccattgcactccaacctgggcaacaagagcaaaactccatctcaaaaaataaaataaatttaaaaaaaataaaaaagaagatttacagaccaaagagccaaagattctgactcagtaggtataggaaggattcagaaatctacatctttaataaacaccccactgtggaccacactttgagaatcactggactaactgacttggaagatcacttccagcattagcattctaacattctgtgaacttgtcctttctttaggcaaccagttttggatagcctggcactcccttgatgtccatctgccctgtgggaacaacggtacacagggagtaggagtgccaacatctacactaggcagcaaagcaaagaaaatagggccaactgggttgtcgttccttcactggggtaaacactaacatccttgtctctgatacccaggtgacaggtggagtctggaatttcagccgcatttgctgtgatgtttttgtcaccctggatgtcatgatgtgtacagccagcatccttaatctctgtgccatcagcatagacaggtagggctgcaattccccttccaggtggcccaaaagctggggaagtggggagagacagattgtgcacttgagggtactggggtcacctccaagtagaacttgacactggaacattttctttcctctctttttcttttaaagtatggtttgcaggtgagaagaaacccctgcgacaggtgggaaataacgaccctataagctttcctggcctttcttctcctccagctccctgaagaggattctggttttgcttttccaccatcctttggggttttttttttcttcctaataggaaggaaagcttcccattagggagggggagaaggaggaaaggtgagctgactggggttggtaggaaattctgttgttgttttgtttgtttttgttgaagggagagatggagagaaggtgggagagagaaagagaaagaaagaggggcaggtgtagggataatttttgagggggagagaggagagaagtgggggagaaaggcaattttagaaagcatggctgtgatctatatgtttctctcatagagcttagagaagcaagtatagtatgttttttaaaattacattttggttgctggggtgaattgctgtgattttgactcctctctctgtgtgttctgcctgagtaacattgctttctatccctgagagcacctggactcaccacccttgctctgggtccctctgtttctcccttcccctctccttttgtcttcctctcttctttcccctttcctctgcctgagcctgagatttgcctggctcccctgggacatcaccagcctcactgagagccctgggggaaaggaggtcactttcaagcctatggcccttgctgccagtcaaaagcctcctcccattcctgctctgagttctctccctcccactttccattccgcttcttctccttctcccagtaatatcatccatccacctcatagctccaacaggtgaccccaaataagatctgccatttattgagaatttatcacattgtgctaagctttgacacacattaactcatttcatcttcacaattcttaggtactgttattatcttatgtattatcttaggtactgttattttatggtataaacattggctaccttcaaacagggaccactgaattcagctgaatactctttgttcaagactctgtaatgggcacagcagggaaggtcacaggtgatcaggagctaggtcttgtagaagagtttggggtaatgataataaagcaaaccagctgcagtcctctatgtctgcaaataatgcactcctgaaaatgtgtactaaatgtctagaaattacacaaaagacttagatattagagctaaaaatattctaaaatccccaactcttcactttttaaaacagctttatgaagatataactcacataccacacaattcatccactcaaagtgtgtaattcaatgttatattggtatgtttacagacttatgcaattatattcctttttttttttttcttttttgcagagatgaggtcctgctatgttgtccaggctggtctcaaactcctggactcaagcaaccctcccatcttagcctcccaagtagctgggattactggcacatactactgcatctggacccctctttttttcttttttctttttttgagatggagtttcacttttgttgtccaggctggagtgcaatggcacgatcttggctcactgtaacctccacctcccgggttcaagtgattcttctgcctcagcctcccaaatagctgggattacaggcatgagccaccacatctggctaattttgcatttttagtagagatgaggtttctccatgttggtcaggctggtctcgaactcccaacctcaggtgatccacccgcctcaaactcccaaagtgctgggattacacgtgtgagccactgtgcctggcctacccctcttttttaaacacactctttaatggtattattttcagcattgtggacatgttctttagctttcttctcagttggctagccaaccaagtgatataaataaaaaatcatccaattagctgattggtttgcaggatcaccagagcaaagtgtgttcatattcatttttttggttattgttcaaaattcccacttcagcatgtaaaaggaaatgtgaggctgttgctacagagggcacaacactgggccaattgagggggcctgtgctatgacctctagaaaaagcaggctggagatgccacaacatagtgacagagaaagcattgtgaagttcaagggtgactgaatcagactgtgggaatgtgaaagggctttatggaaaagaggatcattgtgatagactttggagcatgagaagggtatggggcaacctgggaagagatgaaattgaaaagggggattgaggccaggcacggtggcttactcctgtaatcccagcaatttgggaggccgaggcaagaggatcgtttgaggtcaggagttcgagaccaggctggccaatatgatgaaaacccatctctactaaaaatgcaaaaattagccggacatggtggtgggtgcctgtaattccagctactcaggaggcagaggctggagaaccgcttgaacccgggaggtggagtttgcagtgagctgagactgcaccattgcactccagcctgggcaacagagcaagagtctgactcaaaacaacaagaaagaaagaaaaaaaaaggagagaaagaaaaaaagaaagaaagaaagaaagagagagagagagagaaagaaaggaagaaagaaagaaggaaggaaggaaggaaagaagaaaggaagaaagaaagaaagagaaggaaggaaggaaggaaagaaggaaggaagaaaagagaagaaaagaaagagaaagaaaaagaaagaaaggaagaaagaaagaaaagaaagaaaggaaagaaagaaagaaaaaagaaagaaaaagaaaagagaaagaaagaaagaaagaaagaaagaaagaaagaaagaaagaaagaaagaaagaaaaagaaagaaagaaagaaagaaagaaagacaggcaagccatattgtggaaaacattgaatgccaggcagtggaggtaattctaacttttattcaataggccaaggaggcactgagggattttgagtaaggctttacttctaagggaatgattttgatagtgctatgaaggaccagttagaaagtgcagcagaatttcaggtaagggatcataggatcctaaaataaataggaggaaacaagaaaggaaaagtaggggaaattttgaaaaaaaaaacggcaaaaggtctgtaaacaccaacctcttgaatatgaaagattaggaagagaaaggagtcaaacagaacacaagattccaggagaaagatgctgtcaagaagagatcaccatgtcgagacgatttggtgctttaatggtttggtttttaacatctggcataataggaacaagtggactatccaggaagtaatgtgatctggaactcaggggagaaggcagggatgtagttggagatttagggaggttagcacaaagtttaagattactaacttggagtcaaatagacatgaattctaatcctggcaccgcccagtactaatggtgtggctttggcaaattccttaaatactctaagaagttggaaattgaagataacaacagtacctaagaattgtgaagatgaaatgagttaatgtgtgtcaaagcttagcacaatgtgataaattctcaataaatggcagatcttatttgggtcacctgctggagctatgagatggatggatgatattattgggagaaggagaagaggcggaaggggaagtgggagggagagaactccaaggaggaaagggaggaggcttttgacttttgggaggaggctttcggaaaggacgtcagagaatgggagagggttcgctttgtgaagagggagaactgtgtaaagagagccccctcagccctcgtagttcctgagcctcctctcttccctcttgagagtgtgcctatacactccacccacctatattcttatgcacttagggctgtgggtgaggttgtgcaggttgttccctgcgcaagggtgtggaaatgaaattcagctatcactcccttttccaagcctagagttggccagaagagggtgcttttctacgatttgccagccaggagagggcgcctttctttaatttgcacaagagcaccattttgcggccagcagccatgcctaaaacacacctctagtttttaccacttaaaacgcaaccaacaagagtaactttgaattggcttctgtcccatataggaaaactccgagaatacacagcacttacctacctgaagggaccagccatgccttagatcccaagcgaaaacgaagctcccttcttggctcatagttctatatgggccaatgaattctcaccaagcctcaaaatggagccccctcctattctagaaatgaaaacaggccttggaaaagctgggttcattattcttcacagcagtttgcattacattctgttcatgtgatgacaaatagctggtcaattcattaaaaatgcagtcattcacgcagacctttggtcttcacacaatgccagtcaccaatctgacaaacttaaccaaatggattcagtattttttggtcatgaagccctgatctataataatgctgtggaaagagatatgaaagaaaaggaaatgataaaagggtttttgaaagcaagtaatactattgtcattagattcttaggcatagctctgatgcttggattaatgctgccatttcgtttttaaaaagcagagtgggaagtcctcggagcacaagcccccactcctttagctccttgcctccccagggagccagccctcctcccatcacatcctgggtccaaactaactcagggagagggctgagaatgtgtcagaagaggaggacacgaccaagtggtgagaattagagtcctccgagaggagcccaggaataatgcagccaaattcattcaccagggagttctttaagtggctctcaaatggcacccatcacacaggcaagcctccgcgtctttgcagcgagcacaataggtaccagatgagtcacaggcaccttggatttttagtttgcatctaaataagcactttatatttgcaaaaggctttccagtcatttgcaaaaagctttctccttcaacaactccaggaggggagtccacagaactaaagatatattgagccccctgtctgaccaaataaaagatggtgaaaagcagccctcacagaactctggggctcattaaacccaggcggggagttagagtcaggccttcccacccaggctggcctctttcctcctggactgctagcttcctaaagagcaacccttgtcagcacacacacacacatacacacacacacacacacacatctcccaccctgggacagggctctgagattgaaatcaaattctgcaaggtactgagaccttcagtaagtgaccaaccatatagatcctgctcataggaccggaagtcagaaggggcaacatcctgctcatagaaccagaagtcagaaggggcatcacagttatctcatttaagtggaaatgctaaatgcttgcatgaagtgctgcagcctcttagcacaggtgtgggactagaaatggaatctcctgactttccaccagcactctattacaataagtgacaccttcattggtgaaggtgaggatggggcacctatgtcttcaatgccctggctacctctatgctaatgctaacttacatgagtctggaagcaacaataataaaaatagttaacatttatttagcatgtactatgtgccagacactaagaactcttcattcattattgctaaccttcacgacaacccagagagagagatgtaataccctcactatataaataaaggtgctgagactagaatgggtaggtgagcttgccgagatcacacaactgggtggtgcaagagtaaggattcaggcagcctctgtctattacagcacactcccttactcagagatgctgaggtgcgagtctggctctgggctccctagctatagagtcacactgcctggctaaaaatccaggctctacagtttaatagcaatgtgaccttgggcaagtcaattaacctgtcagagcctcagttctcttatctgtttagtggagataataacaactacctcaaagggttgttaggaggattaaatgaattaatattcgtaaagcacttcaaatagtgcctgtcacatagaaagtgtcatgtacatttttggtggataaataaacaaatttaatattacctgatatcaggaggaaggggaagacaaccataaactcactgatatgaacaatcactgatcccttgagctagcacaataattatgacaacaataacaataataataccgtcttttgaatgtttagtattaatcactgggcactgtgacttaaaaaaaaaaaaggtttacagagaaaatatcattcaatattcattacagccttttcgggcagaaattattatccccattgtacagatgagaaaattggatcttagaaaaaacaaaccactggcccatggctacacagttcagtggcagagccgggattcagagctgatcagtccgtttctcatgcccgcggacttaatcaccaagcacactgccagtgctggggtcagcggagtcatccacaccagaaacggcccagggagctaagagctcagacacaaggggagggtccctggctcagggtctgcaggggcggcgcgcacagtgcgaggctggcaggtccggacctgggaataccgccgcgagcgcagcggccagatgttcagaggtggccctgggccaagcctctctctcccggccaagcccagcccagccctccgggtgctttggcgcggccctcgcctgcagtcggtcacgtgcaatcgctccgagaggaagtcagaggctaagcggtcggcctgggtgggaatgcagggtccctgcagggttccaggaagcagggcgccgggctttccctctctgcctccccacagagcctggagagcccccaggtgagcagtgaacttctcaccccagccgtgctggcagagttcttgctgcattatagtgccctccgatggccaattccggtacagcctccctgtcgcagtcggcttatgacaagcgggggcctcatttattctaacagtttaatcatgtttaaaaaagagcaagaaaaaaattactgtaacagtgttaaattgtagtcttgtctcttacttcttatccaagtgaacaaaaatctttgtcacagaagttttccctaatgcagactttctcaaaacctgtctaatcataagatgcacttgcttgttaaaaatacacatttctgttctcactgatatgtgggagctaagctatgaggatgcaaaggcataagaatgatacaatggacttttgggacttgggggaagaatccccaaggagggggattcgagagaggacttgcatcagatgaaggggagtggggtgagggataaaagactacaaatatggtacagtgtatactgcttgggtgatgggtgcaccaggatctcgcgaatcaccacgaagaacttatgtaaccaaatactacctgtaccccaataacttatcgaaaaataaaataatttcaaaaaagaagaaacaaaaatgcacatttctgggttccacttcagaagtactaaatcaaaatctccagaaactaagcctgatattctgcattttaacaggacccccaggcaattaacagaatcgagcgaattgaggaaactcagttgtgggcgcacgcagtgctctgcaagcggtaaccacccttgccatgctgacttcactgaggaagcccttgtcccccacaagaactcagagagctgtcgatgccctcgagagggaggagggcactcaggagaaacacacctcagaggtgggagacatggctctgccacaatttgctgcagaaccttgggctcataactgacatccttgcatctctgcttcctcctttatgggatagagccagggttccctacacttgttggcccacttcattaatggagcctccagggagttgctgaacattatagcatatttaggaaagtatataactctcagtggtctgctgaagccggcttatcatggctagcgagagctgattggcaaaattttagaaactttttgcatcagttattaaagctttggtggtagcttaaaataggccatggtgggagtattgacaccacagaaattggcaaataatacaaattagggctttttgtaaactacagagcctgttgttagccatttaccagcacaccactgaatacacagaagggtcaggctcttttacatcaaaggacattatgcaagtggaaggcctggagaaagtgagttacagtattccttcccctcgctgttcagtcatggcagcagcaggactcaaggctcagcccctcctccaaggtgcctcatagttaccactaacagcgaggcccttgtagacatattgtactagaagcccccggcagagtctaaagctctgaggagagtcagaggcctagagaaacaccagctgctacttgacctgctcttgtataaaccaaggaggggatttaagagaggacttgcatcagatgaagggaactaggttgttgtagcctcccaagaagtgggtagcaggatcttaatttgactttatcaaatttttcccttttgagaaagaagccacctttgtcatacagcatggtgtcaaggccaagtcctgcacagtttaccttcatctcagaactcacagctaactgtaatctgcccttctgggaatgcaaatgttactactctacaacaagatgcacaagaggcagattcgggcagtgctggcgcataggagcaggggaaacacacaggaggagcctcaggaagccttgcccgatcccttcgagcccagcatctgtccttcctttccttaatcccaggccttgaggtgcacaacaagggttaaggaggctccaggttccttggaaactgacaagacaaaaaatgttgagccattggtagatccagcttataccttagatccctgagcctggccaggattagaagggaaggaagccttcccctcttacaggaaaggaggccttcgtgacccatgaggcagacagttaacagtttcttattactttctttgtacaaggacctatggaaaatatcaaggttgtaagaagatttgatcctgaagtaactaaaattatatggagctctctctctccagccacgaggcaaattcagtcatgaggcaagacagctgcatgcaggagggcattgtaattgatttgcatagaagtgctaagagttcatagttagaagtctctgtacatgatggaaagaagtgggaaggtggctggaaagttcatctgagattaatggagggcaagattgagttgcccagggaggaagaaggaatgattaattgaacaaagacaccagtctctgactattgaagagtactcattaccaggccagtgtggctggagctgtgagtgtcaggatcagtgggaggtcagattggcaacgtaagttgaggtcatgttggagaaggctgagcttggtttataggtgaaagaggagccatcaacagtgtattcattttctattgctgtggaacaaattatcacatatttagaggcttgaactgtacccatttttatcttgcagagtctgtaagtcagcactgtgtacacagtgtaggtaggttctcttctcaggatctcacagggctgaaatcaaggtgtagactgggttgtgttctcatctggagcctgaggtcctcatccacactcactcaggttgttaggagtattcagttccttgcagttgcaggactgaggtctctactttctagctgactgtcaaccagtgctgttctcagctcctgtaagccttttgccatctcctaaaaaatgaccctctccaaaacatagcagtttgctccttcaaggccaaaaggataatttctcagtcccctttaagggctcacctaattaggtcaggcccactcaagataatctcccttttgattaacttaacctcaactgatcagtaatctgatcacaggagtgatattgcattatagtcacaggttcagcctacactcaacggaggggattatacgtggcagaaatcttggggccatcctagagtcctgcctatctcagataattttcaggtggggagatggggagacgtgatgaaatttatttttggaacctggcagcaggagaccaacgaggaggctgtagccatcatagaaatcaggtagcaggaaagggataggtggataaataaatggggaagatattgcaatggataaatttacaggacctggaatgttcctcccccgtctgacctcatggctggctccctctcgtatcactcacttccctgctcactctgtgttagttttacctcctccctggttctctaacacatcacccagtgtatttctttcatggtactcttcattttatattaacatatttgtttccttttttattgttcattcactccacttaactctaagctcaaagagaacagggacaatgtgccttttgcacacctctgaatacctggaatgaggcctggcgtatagttgggactcaataaatattgaataaagattaaatgaataaatgaccaaggctgagcacagtgcctcacacctataatcctagcactttgggaggccgaggcaggtggattgcctgagttcaggagttcgagaccagcctgggcaacatgatgaaaccccatctctgctaaaatacaaaaaattagccaggcatgttggcaggcgcctgtagtcccagctactcgggaggctgaggcaggagaattgcttgaacctgggagacagaggttgcagtgagttgagatcgcgccactgcactccagcctgggcgacagactgagattccatctcaaaataaataaataaataagcaagcaagcaacttatatgaaagggtccagggagagtcaaaaggtctaagtactgggtctggatgtcttcaagaaaggcagtcagtgaaaccagattgagaggtttggggagttggggagatcagttttagacatcttgagtttgagttgactgtggaacatttgtccagctaagtcctacgggcagctggaaatgctggtgaagaattgtcacaaaaaaaacacaaagatgtccaataatagtaaggaactgggctttggttatgtaaaagaatgaaaactggattttaaaataagccttcactggacattcctcatttctatttttaaaacatctactacttagaggagctgtcacaatgaaggttataatttatattaggatacaagcaggaggtaaatatcctctttaggtatgttctatcattgtctgaaaacctgcaggagacggtaaaggcacacagaccagcacccagagtgttcagagtgaagggtgtgtgacagtaaggccggttatgctgggtgatcaggtagaaccgataaagaagctctccagcaatccagtgatcctgtgttaacttttttattcttccctttctgagttcatctccctcagtaagttcttcatttatcttatctcaacctttctgctatttttgacctttctgcttttctctcttcctctaactaaattatatttctcatgctatatgtatcaacctgattatttctctacgaacttctttcatctggtcttttgaaaagttcccctcactggacttggtggctcacgcctgtaatcccaacactttgggaggctgaggccagagacttgcttgaagccagagagttgcttgagcccaagactttgagactagcctgggcaacaaagtaagaccccatctctacaaaaaaataaaataattaggcaggcgtggtggcggcacaggcatatcctagatactcaggaagctgaggtaggaggatctgatcccaggagttgaactgcagtgaacagtaatcatgccactgcacttctgcctgggtgacagagtgagaccctgtctccaaaaacaacaacaacaacaacgcagaaagaaaagtaccccattccatctcaccatgcctatcccctctccccttgctttttcaggtacactgcagtggtcatgcccgttcactaccagcatggcacgggacagagctcctgtcggcgcgtggccctcatgatcacggccgtctgggtactggcctttgctgtgtcctgccctcttctgtttggctttaataccacaggtaacagtgatggcttcatttctagcatccatgtgattcacagcacagctgaatgactggctgtgagttgtgctcagccctgcaatttctgacccccggtcagtgtactttgcaattaaatgagaatgccacagaatgcaaagctttggcctttgtgggttataaataaaatataaagcaaaacctcatcaattattggcacagggggtaaagttctgccccaattaatgaaaagtctggctcatctttattttgaaagaaatgtcattgtattcatttgcagaaatgtaccagttaaaaaaaccaagatatatattaataattcaggcaaggtttgctaataaaaagataacaattcataacagacctacaatgcaaaataacacattgtaaaagtcttatagtaggatatatacttctaactttttactcaataagaataatttccaattcttcagaactaaccagtatagattcccaaattcctggagagtatattttctatttttaatataaaaattctgggtatgatggttggcacatggtacatctcctgggtggatggatggatggacaatatatatgtctgaaatgctcgggattttaagcatgacaccaatacctcagatgaatcagtgccttctgtgtttgtaccatgtccatcttttagcctcactaattttttttctttttctttttcttttttttttttttttgagaccaagtctcattctgtcacccaggctggagtccaatggcacaatctaggctcactgcaacttctgcctcctgggttcaagcaattctcctgcctcagactcccaagtagctgggattacaggcacccaccaccacgccccactaattttatattttaccctgttggccaggctggtctcaaactcctgacctcaagtgatcagcccgcctcggcctcccaaaatgctgggattacaagtgtgagccaccgcgttcggccagcctcagtaatttaacgtgtcgaatgaaaggtattaaaccacatagtaacatgatgggtattgacaatatacactgcgtgctaaggaaaagctgcttgattagtgttccagtggtcatctggatttcttattttgtccatttgaattgattcattcaatgcctatattccaggtttgtaaatgtctagtatatatgtaccagtcacatagccatgtgcttgtgtgtatgcagatattatatgtaacatattacatataaatacaggcaaattctaactttaagtaatcttccaagtgtcatttgctggacaatgatttagaaatcaaaatatattttggaagataggtataggctctggagtaagtaaaatctaagtccaaactccaaatcaaagtccagacttactagctgtctctccttaaacaagttacttaacttctctgagttcctcattggtaaatgtgggataaaattacagtggagcatacacttgagtgaattaaaataagtaaacttgatctacatatttagttaagacatttttaatatttatttttatatatgaccccctacaaatgagcccagcaatttcatctctaaaattatatgttccataggaactctacaatatatgatatattactatatgtaccatacaacttattactctgcagggttataataaaaccatgtatatctttacatgtgattcagattttcaaggcaaatttggagtctatataattttcactttatttattgactttagaatctaagactacatataactccactccaacttcttcagagagatttttgccattaaatgaggattaaattgggataacatatgtaaatatgccaagcacgtaccgcctactcaaggctggcttgtttctctgccacagtaaagggtaactagccaacttatcaacaaatatttgcctgttcaacccaggctattctcaaaatatggtgatgttatctttgcgttactgtttacctttcattactttgttattttaactgaatgacactttatacacacaaacatgcacacattgcccagtacaaagcaacatcccttaacacagctacagaggctgactctgtggcactaaaatatcatttttcgtgaatgctaaatgtgctttatgagttagtctgataactaagtcaccttctgtaaccttgtttctatatgaaaatgcattcttagttggaaattctagtgtgggaaactcaccactgctagaccaaggcacttcttaccctctagccaaaagcaaatccctgccaacatctgctgggctgactgtggttcccctgactcattcttggtggaggcggtcttattcactctcacagacacaccacactggaaacagttgaaacaatctcaaaagctgacattagactgagttctcggttaatgtcgacatccagagtgaagaagaatgatgaatttgcagtgttgttgcccccagtgagatcattattgttccagaaacaaaattcaggaaagttttttccaaaaggatttttaagtatagaattgagaaggcagaaaaggcctgtgacttagtatgtgcgctctcacttctctctcgtctctcacaatcgctctgtcttttacatttaagtttattaatagcactctagcaagccttccaattattcatatattgtgttaaagtgtcaggttccattgtaagagctcagtagatattagctggtgttatggttgttattatttattggaaaagtttatacatcaaaatgtaactatacatctgcagtcgtaagagttctgctgatggttttagagatcagtcgccccttcctagaacacagttaggggatttagtaagtgaagctcaggcccagctgtcctcctctgcctcaagctgaccttcactgtacagcttcattatcttgatagatgtgggttcctgcagcaattctctcatctataaggaagttcccaacttcatttgaaagcccaatataaaggactcttctcagtcattttttctacaccttctgtggaaaatcaagggggagagggcaggatcctgccaataacacctgatattggaagcagctggactttcactaataagtgcaacacaaaaaaagaactttctggcagagctcttcttttaatgccatgggctgccacacgaaattgtgaattattagagaacataagatacagaaaagttgaacttcagtctcttccaacttggagttgctcctgttctcagatgaaaggtcaatatgaggcagggttttgggtgagagagttccgaggcaggggcctggctggccagggttgccttaactcccagcagaggcccagcagtctaggcaaatatcacatcatcaacagaccctgatacagcagagcatggtgtgctggtgccaaaggaaactctgaagatgcctgaatgagcagcccaaccctttcattgcatagataagaaaaataactagtatttaaattcctgctaaatcagaaagctattgtgttatttttaaaaatctagaatgaataagcaaagagtgaataagctgatgataagagtttaagaaatcttcaagggaggagaaacttaaagttaagaaaactctatcagctggcttgattttcctttgaaagaaggaaatggaggagtgctatttatttgatttcatcaatagaacatctcacctagttttcagagcactggagctaggttgggggagggggagcttagttgcacaaaaagttaagagaatagtagaagcacaaaattaaaagaataacaggcccatcctaaaatcagattcattggcaccgcatgtctttggaatcaagctggggtcaaatccatcaatgaatttgaagttcatgaatctttcaagtaaacctgctctgagccaagctgtccacatcatggtgggtctcagtttcccaagacagcctgcaaaagcctcatagatgcctttgtctttttcacccagcacagtgctttaaacatagtacgtactccacaaaatttgtagaatgagtaaatagatgactcttcatcatcatcctttcttcctgaaatgttgagattagttgggataagcatctctaatctcagaggaggagtaacctcccctcccccggcacaggccttctccattatcctctggtcagtgagtgctcatgtgtttatataaaatgctcatttggaacagtgggcgcatttaattgagtagttatgcggcttggtcaggaactattggggcgtaacaaacaacgcctcttgggggttaaatcggcgaaacggggggcctcattcgctggggaaatggccacttccgggggggaattaccgcttttccttggtacacagcagagaaggtttcagaactgctgctgtgtggtgcatcactctgccctgccaacaggacacacacccagggccaggcctgctgggggctggggcaggccctactcattggccacccacctccagtgtcactctgcctgcaatggggacattctggaagaggctgcaatgcttgatctaagaaagggaagctgtttgcttagataggggaggaaggaagagatggcaatgcaggttctgtgattatatgtgagagccttcgttgactagggaccctgaaatagctatatgccctctcaactctctcaatatttttaatggagaaataaatgcttgcacataaaacattcataaggtgcccatgagatacatacatacttatatgtaggtctcccttctaccccagattactacattctcccatctccctccctagaaacaaacattaatattcttgcaagataatgcttgcaacagtgtgcatgtccatacacaaatatgtttatgtatgtgtatgtgtattcattattacacaaatagaagcataccatacccctatctgaccctgactttttaaaagaagtagctcatatataaaatttagaggtcagcctcccagaacccagagtgggtaggaaaaggtagaaagttaggtggagggaccaacagggaatatccgggacaccaaggatggcaacaagatgggcagtgccaccccactggcctcttctcacacgtgagacatgtgaaacgcctccttatcacaggcaggttttaaaaccatagtcagatgctgacaacagaaaagctgacttcagagaaggagcagatcaccaccaacgtggctccctagagattctgaaagaccacgcactgccaccctatccctctccccaactccatcacccccaaataccagcagatgccaatttggtgaactacacagagcctatgagccattttcttttcttttctttttttttttttttttttttttgagagagagtctcgctctatcgcccaggctggagtgcaatggcgcgatctcagctcactgcaactctgcctcctgggttcaagcggttctcctgcctcagcctcctgagtagctgggattacaggtgtgtgctaccacaccggctaacttttgtatttttagtagagacgtggtttcaccatgttggtcaggctcgtctcgaactcctgaccttgtgatccacctgcctcggcctctcaaagtgctgggattacaggcgtgagccaccatgcctggcccctataagccattttctaaaggatgatgacataggctttggtgaaacaacatgaaatttacctgaattttacctcctcttcagagaaccagagaatttaggagtagcttgtaaagattctagtggcaaagatgtcagtaaaatgcatcactggtcactgagcacactcttttcgttttagttcttagctgttatttccttccttctcccacaaatattgctccctataagtctgtctccaaattcccatttcagatgttaccttccctttcagttcaaaaggctcaggggagagaaataataaataataaataaataaatattaagaatagctaccatttattctcattaattctcacaactactatacaatatttctaggctttttcttttaacaggtaataaaactgaagctttgcatatttaagaaatgtgtcagctgggtgcagtggttcacgcctgtaatcccagcactttgggaggccaaggagggtggatcacctgaggtggggagtttgagaccagcctgaccatcatggagaaaccccttctctactaaaaatacaaaaaaattagctgggcatggcggcccatgcctgtaatcccagctacttgggaggctgaggcaggagaatcgcttgaacctgggagatggaggttgcggtgagccgagatcgagccattggattccagcctgggcaacaagggcaaaattccgtctcaaaaaataaataaattaattaattgattaattaaagaaacgtgtccaagatcacacagttaataaatagcagacctgaatctcacactgaaggctctctggcttccacctacctcagaagaccaagaagcagaataagggtcctacatgggcactgtcctctccccaccaagcaacacctgaagctttatcttccaaggccaactttgaggttggagaatccccaaccctttatgaagactggccgggtgtaccaacagttgttgctcacagtgctggatgaagcacagatgttccatgtcacaatggtaaagagggatggggagttaaaattatagaaagaacattggcttgggcataaaactggctgcaagaacatatttttcaggtgcagccttgggctacttactgaacctctctgagctttaatctgctcatccgaaaagagagacagtaataatggcacctgtctcatataacgttgccataattattaggtgggataaggggtacaaagctcttggctcatcgcctggcagatattagtttgcttttcttttctttttcaagatggggcacgtttcaggcccatcttgggccttggaggaatctcagcatctgctatgaagaaggcaaagctagagggacctcccaaggagaaatggcaggaacatttcaggatataaagcagggacaaggacccttctaagtgcacattctccatgtcacaatatcattacctgcctttttcccatcccacctctgacaagtgctgggattccctgaaaaatcaaatctctgtcttgtattcagccgccatctgccctccatcccagattcaaaattggagaactggcattctcagcaaataaggcttcttcctttcattgcattcaaacaattctccaatgcctccgcaccagcaggcccttttctgagggctgcatccctcctgggagcctctgccctgttgccctgtaatgctctccccagcctcccaggctgcatgtctctgtgtgacacttgtgacatcctatgaaagggatcatctgtctatctagactgtttgctcccttgagagaagacatggtgtctcattcatctttgtagccccagtgtctggcgtatgattgttggtaactttttattttaagcaagctgtaagaaactcaaagatgaattagaccttctaccctcaaggacctgacagtatacgtatctgagactgcatccttcccaccccctgtgcagcagaaagtgcaggcaccacacgtgacatggagccgtgttttatgctccttactgagttctgatacttgctaactgctttaccttcccccttctcatccacaggggaccccactgtctgctccatctccaaccctgattttgtcatctactcttcagtggtgtccttctacctgccctttggagtgactgtccttgtctatgccagaatctatgtggtgctgaaacaaaggagacggaaaaggatcctcactcgacagaacagtcagtgcaacagtgtcaggcctggcttcccccaacaagtaagtaccctggagggggtagagggaagacaacacccaatctcctgacttcccagcctgtgtccagcagtgcatgattttgccgtttagctaaattggagacacaaatctgacaccgactttggaatctgctaattttggctgcactttgaaggtaggaaatccaatctcaagaaaacattgatagttgcctctagagcctgccttacctggcaaagtgattggagagctcctgggcttgttctgcttcccttcaaagtctttcattttccccaaatgggcagcagctcagatgtcccacaggttttgaagtttaagtgcagcagttgtaccttgcactgctggtgggttcccagaactgactttttgtctaaaccactcatgccaagaatcactggggtccatcaaagccttttttccttactggatctgtccgtgtgtcaaggaactgacaagctggtgggatagggtgctgataaagcattttattggatctttctaggctctgaaaagaaatgtcattgcctctgcaatgatcttctaattgctagggctttaatttctccttaccccattgcctggcacttagtagttttcccacgatgtacttgaagcatgaatggatatataccgatcacttgaaatctactagggaagggacagtggtaacattaaacagcatctgccttcatggagcttagaatctagaaaagcaaataaagcacccctccactcaatgttaatgaagatcccagagctgaataggatgtttgccaaatgtgaggtgaagacaattaagcactcaattatgaagtgctctggaggttatagaagagaaaacccaatatgctcagtgatatggtttggctgtgtccccacccaaatctcatcttgaattgtagctcccacaattcccatgtgtcatgggagggacccagtgggaggtaactgaatgatgggggtgggtctttcccttgctgttctcatgatagtgaataagtctcacgagatctgatggttttatgagggggagtttccctgcacaaattttctcttgtctgctgccatgcaagacgtgcctttcaccttccaccatgattgtgaggcctccccagccacatggaactgtgaatccattaaacttctttttctttataaattacccagtctcaggtatgtctttattagcagcatgaaaacaggctaatacactcaggaaagggctccatagacagagtaagaattgagtttgatcttgaagacagatccaatttgggtgtctagattaatctttgatgacctagataatcttttttttttttttttttttgagacagagtctcactctgtcacccagactggagtgcagtgacatgatctcagctcactgcagcctgtacctcctgggttcaagcgattctcgtgcctctgcctcccgaatagctgggattacaggtgcccacctacacatctggctaattttttttttttttttttttttgaaacggagtctcgctctgtggcccaggcgggagtgcagtggcgcaatctcagctcactgcaagctccgcctcccgggttcacgccattctcctgcctcaacctcccgagtagctgggactacaggcgcccaccatcacacccgggtaattttttttttttttggatttttaataaaaacgggggttcactgggttaaccaagatgggctcgatctcctgacctcgggatccgcacgcttcggcctcccaaagggctgggattacaagcgggagccaccgggcccgggcacatttgggtaatttttggatttttaataaaaacaggggttttccttggtggctagggtgggctataatgcctggcctcaaatgatctgcccacctcaacctctccaagtgctgggattacaggcataagtgcccaacctgatgacctacattatctctgatgacctgttaagggctttgatgatgtcaaaagtatgaatgaagggcagactcttaagttgaagtcccaaggcttgagtgaaacaagactattaatccccatgaaagaggagatcaagacccaaggctgaggatatgaaagtattgcattcaaaatattatcatgtcccatggctatcaatgacatggctagacccacaactaactgttccttcttctacaccccctgcccagtcttcttgtctgcacctgcaccccattcagcagttgtcagtaagggcctgatttccatcacatgccacaggaaaaatggtaagtgggccatgtctgatcatagagaaagaataagagaccttttcccacaatactggcttatcttgattctactctcaccccagaatgaaaccttaccctgattcccacacatatatctataagacaagatctgaaattcttcctaatttaagcttcagaatagaattcatcagaagatattgagaaagcatatgactattggacttgaccttagtgactggagccaatgactcttgcacacggtgtgacaatgccatccaaggccacctgcattagaggaaacagacgtcaagggaacacacatggacagagcaaaaaccaggcagagaaaggaaaatttcaagtgccatatttaccactgaatgtgggaaaaaccaagacaacttcatggtcaccattagccttgttcttccaattcaagccaggcctgcctcgcccagctagcagagtgcagagtggagtctggaggtgttagatatgagaacagtattcctctctgaattccacattagaaataaaacttcaaaaatttgtaataattaaggtctgagctttgttcaatctcagtatagttaatgactttctacacaggcctggtgtggtaattggagataatcattttaaacgataatagctatgcagctcaaagttgcctatggctgatccaaggtctaaggaggcttcaaggccaagaggaggaaaaatattgaatacaaaagagagatcagacagccaagagactggcatttccaagagtgtggagaattaggttctgtcctgccatctgggagtggagggctctgccagccagacccagaggaatccagtgtttcctcatgtcagtcatggaagtagtgatcaggttttgcagacagagctgaaaaatacactcaccaatatataatcttggaagaatcattttcctactataggactgaatttccatatctgtaaaatggaaacagggtatactagatcaatgttttcaaatatgaggtttttttgtttttgtttttgtttttgagacagagtctcactctgttccccaggctggagtgcagtggtgtgatcacagctcatggcagccttgaactcttgggctgcacccagctaatatgagatttcttaggcaatcccaagaatttgtttcccatcccctagttttagaaataatgcgttagaagtcaaatattgtcactttaagaagatcagtaggtgccagtttaattgtaaacataatcttggggccgcgtgtggtggctcacgcctgtaatcccagcaatttgagaggccaggatgggcagatcaccaggtcaggagttcgagaccagcctgaccaacatggtgaaaccccatctctacttaaaaaaatacaaaaattagccgggcatggtggcatgcacctataatcccagctactcaggaggctgaggcacaagaatcactctaacccaggaagcaaaggttgcagtgagcagagatttcaccactacactccagcctgggcgacagagggaaactccatctcaaaaacaaacaaacaacaacaaaaaaaaacaaacaaaaaaacacaccataatctctgttgtaaataggcattcagataaaatgaaatatgcttattttaattattagaaaatgccatcaaactaaaaaccaaaaaatgttaaatatgtattctcttaacttgacgtcatgttaagtgaaataagccagacatagtaagacaaatatcggccgggcgcggtggctcacgcctgtaatcccagcactttgggaggccgaggcgggtggatcatgaggtcaagagatcgagaccatcctggctaacaaggtgaaaccccgtctctactaaaaatacaaaaaattagccgggcgcggtggcgggcgcctgtagtcccagctactcgggaggctgaggcaggagaatggcgcgaacccgggaagcggagcttgcagtgagccgagattgcgccactgcagtccgcagtccggcccgggcgacagagcgagactccgtctcaaaaaaaaaaaaaaaaaaaaaaaaaaaagacaaatatcacatgttctcaatcacatatggaagctaaaaaagtggttatcgtgaaaatagagagtaggttcatggttaccagaggctaggaaggagatgggggagggggcgagaaagagaggtggattcaggggtacaaacatacaattaaatagaaggaacaagttctagtgtctaatagcacagtagggtgactacgcttaacaacagtttttatatatttcagaatacctagaagaaaagatttgaaatgctcccaacacaaagaaatgataattgtttgaagtgatgactagcctgatttgatcattacacattgtatgcatgtatcaaaatattgcatttgccccacaaatatgtaaaattattatatatgaatttttaaaatcttcaagaaaaaaatgtatattattctagaattcctaagaatacctctgtggaccaccatttaaaaaaaactctaggccagatgctgtggctcatgcttgtaatcccagcactttgggaggctgaggtaggtggatcacttggggtcaggagttcgagaccagcctggccaaaatagtgaaaccccatcactattaaaaatacaaaaattagccaggtgtgatggtgggcgcctgtaatcccagctactcaggagtctgaggcaggaaaattgcttgaacctgggaggcagaggttgcaatgagccgagatcatgccacttcactccagcctggtgacagagtgagactttgtcttaaagaataaataaataaataaaaattttaaaaacttaaattggctgggcatgttggctcacacctgtaatcccaacacttttggaggccaagacaggaggatcacttgagcccaggaatttgagaccagcctggccaacatagcaagacctcatttctactaaaaataataaataaataaataacactaaatagtcttgaagaccgcttgcattcattcattcattctgagtatgtacaatgtgccagttctgtgtacctagaagactgcttccttgaactaaggaaaccaaagcgaggggtttttgttgctgacactgaataacttacgtagaaaacaaatttactggaaagctgtcaggtggctcacaggctcaatgagaaggctgaagaacagcttcagaaagatgctattcatgcctaagaaataatctagttagaaaacctaacacactggacattgaatgccaccactactagaggagttctgaagtctccctgcttcacaagttccagttcaaagtctcaggtgtgaatctgcaattgactgggcttggtgcatgtgcctgagctctagctgcatgggaatggaggtatgaagtgaatatctggcttttatgccatcagtaatgggagttgaagagttgagttctgcctcctgttcaagactgacacaatagtctgattcttcaaacatgaaaagaagttcaagttgggcacacacacacctccccctccataccagaaaagttaacatatttcagtattccattctcagaggctactcatcccaaacccatttttccctatttcttttctgttttacaaaggaagctcagagatattaaattaacttgcctaaagatacatctactaagtaagagagctgagaagaaaatcctgggttttctttttttttttttaatttctattatggaagttttcaaaaataaaaaagtagacaaatataacaaccccccagtagccatcaggcagcctcagtcgtgatcaattcgtggtcagtcttatttcatctacaatcccacctacgttcacacatccccactggattgctatgaagcaaatactaaacaccgtattatttcaacccaaaatatttctgcaagatcctctaaagaatacagactgttggccaggcacggtggctcacgcctgtaatcccagcactttgggaggccaaggtgggcagatcacatgaggtcaggagtttgcgaccagcctgaccaacatggagaaacccatctctactaaaaatacaaaattaggcaggcgtggtggcacatgcctgtaatcccagctacttgggaggctgaggcaggagaatctcttgaacccgggaggcagaggttgcagtgaaccgagatcacaccactgcactccagcctgggcaacaagagcgaaagtctgtctcaaaaaaaaaaaagaatacggactgttttataagacacataaccacaataccacatcacactaaaaaattaatagttttctaatatcattaaatgtccaattgatgttcaaatttccccaattgtcttgtaaattattttacagttggtttgtttgaatcaaaattcaaataaggcacatattttgcaactggtaagtattgtcattgttgttgttaaaatttatttgttgaagaaactgagtcatttgtcttgtggagtttcccacactccacatttcggggcttatgtcatagtggtgtcacttaatgtgtttctctgtatcaccaggtcattctaactcaaaaaggccagactacaattctgtgctaccctgctcaagaggttgttgtgattatcaaatgttctatatgtggtgggtgctgctttttttttttttttactttaagttctggggtacgtgtgctgaacgtgcaggtttgttacataggtatacatgtgccattgtggtttgctgaatctatcaacctatcatctaggttttaagctctgcatggattaggtatttgtcctaatgctcttcctccccttgccccccatcccttgacaggccctggtgtgtgatgttcccctccctttgtccatgtgttctcaccgttcagctcccacttatgagtgagaacatgtggtgtttggttttctcttcctatgttagtttgctgaggatgatggtttccagcttcatccatgtccctgcaaaagatatgaactcattcttttttatggctgcatagtattctatagtgtatatgtgtcacattttctttatacagtctatcattgatgggcatttcacttggttccaagtctttgctattgtaaatattgctgcagtaaacatacatgtgtatgtgtctttacagtagaatgatttataatcttttggatatatacccagtaatgggattgctgggtcaaatggtatttctggttctagatccatgaggaatcgccacagtcttccacaatggttgaactaacttacactcccaccaacagtgtaaaagcgtgcctattctcatcctcaccaacatctgttgttttccagactttttaatgattgccattctaactggcctgagatgttatctcattgtcattttgattgcatttctctaatgaccagtgatgacaagctttcttttatatgtttgttggctgcataaatgtcttcttttgagaagtgtctattcatatcctttgcccactttttaatggggttattttcttgtaaatttgtttaagtttcttgtagattctggatattagacctttgtcagatggatagattgcaaaaattttctcccattctgtaggctgcctgttcactctgatgatatggtgggtgctttttagttgtaaagtctaaagcaaatttcatttcccttaacttctcatggtcccaccactccctcagatgttccctttgtaggtttcccacaactgtgttgccgtcttccttctttgaattctctggccctttcaggaacattcagaagataaacaatacccccagaaatgtcaagattccctcttgtcacacctgcagaccctctctcctgacccggcacatctggagctgaagcgttactacagcatctgccaggacactgccttgggtggaccaggcttccaagaaagaggaggagagttgaaaagagaggagaagactcggaattccctgagtcccaccatagcgcccaagctcagcttagaagttcgaaaactcagcaatggcagattatcgacatctttgaagctggggcccctgcaacctcggggagtgccacttcgggagaagaaggcaacccaaatggtggccattgtgcttggtaagtttgggttggcttgagctgtgttgggttgggttaggttgtgttaagttaagtggagctggtagaagatgctatcggaaatttgatgacagtaatacttatcaaatgttcacaatataattgaaaagtatttgtgtataaatgctaactctggtggaaattcaaaagacctaggctgaaatttatgaagctgaacaagccacttaactgcgctgtccattatatggagctacaacacataaatcaaacaataagtaagataatgattcaataaaactgtctggtacatattggatatttaacaaatgcttagttatttaaaatattaagtgataaaaataagaatgcaaaacactattgtgatatggtatgataaaatctagattactttaggccgggcatgatggctcaagcctgtaattccagcactttgggaggccgaggtgggcagatcacgaggtcaggagatcgagaccatcctggctaacacggtaaaccccgtctctactaaaaatgcaaaaaattagccaggcgtggtggtgggcgcctgtagtcccagctactcaggaggctgaggcaggagaatggcctgaacctgggaggcagagcttgcagtgagccaagatcacgccactgcactccagcctgggcgacagagcaagactccatctcaaaaaaaaaaaaaaaatctagattattttaaatacagagtaaaaaagactggaaagaaattcaccaatatatcaaaagtgattgtctttgagtggtgggtgcttattccttttttcctacttgtctgtatttaccaagctttccataatgcatacaatcaagattttttgttttttgtttttttgagacatggtctgactctgttgcctaggctggagtgcagtggcacaatcatagctcactgcagccttgaactcctgggctcaagcaatcctcctgcctgagcctcccgagtagctagaactacaggcgtatgcccccatgaccagctaatttttttaatttttatttgttttttgtagtgacagggtctcattacgttgcccaggctggtctcaaactcatggcatcaagcaatcctcccatctcagcctcctgagttctgggttctctgcctcctgggttcaagtgattctcctgcctcagcctcccaagtagctgagattacaggcatgcgctaccacacccggctaatttttgtatttttagtaaagacaaggtttcgccatgttagtcaggctggtcttgaattcctgacctcaggtgatccacccaccttggcctcccaaactgctgggattacaggtgtgagccactgtgcccagcctgaactttatttaaataaagaaattaaaaatgaataaatcacaggtatgctatagagttagtgaaggcagttcatcctgttcagtgtcactgacaaaccccaactctctcctgtatcagggagtttactagaactcctagatgtaatctcctcaacagcaggaacgatgtcagtcacatctttaaggtcttcatacctatcagtgcctaggatcatgttttgcataggtaggcattaaataaacgtctgaattgaattgaaaaagaaaaagactagtaaagaactacctagagacccaactagaaaactgatttagtaacaaaggccaaagtgaatgaaagacattagcatgcagttttctcacctaaaaaagtttggctaatcacacctatttcatagggttgggttttttttgttttgttttgttttttttgagatggagtattactctgtcacccaggccggagtgcaatggcgcaatcttggctcaccacaacctctgcctcccgggctcaagcaactctcctgccccagcttcccgagtagctgggcttataggcacgcaccaccacgcccagctaatttttgtatttttagtagacatagggtttcaccttgttgcccagactggtcttgtactcctgacctcaggtgatccacccgcctcggcctcccaaagtgttgagattacaagcgtgagccaccacacccggcctagggttgttataaaaaaaagtaagtgggtatgcaaaacttccagcttagtggctggcataaagtagacaaccgtgagtcattctcatgttataacaaaaggagtaagcaaatcccttacccagtttctctcttatttggcaacttaggggccttcattgtctgctggctgcccttcttcttgacccatgttctcaatacccactgccagacatgccacgtgtccccagagctttacagtgccacgacatggctgggctacgtgaatagcgccctcaaccctgtgatctataccaccttcaatatcgagttccggaaagccttcctcaagatcctgtcttgctgagggagcagaagagggaacactctttgtacccatttctagctgccaggctgttggcccactcagaaagactgtgcagtgtcctccggcatgcagtaggaagaagattcctggagccaggatgtccctgcttgtcaggtataaccagatgtgtcctccaaaacagaatattctacctccccagctaaaatctgacttcattc

SEQ ID NO: 1244 - protein, 400 aa, Homo sapiens
MASLSQLSSHLNYTCGAENSTGASQARPHAYYALSYCALILAIVFGNGLVCMAVLKERALQTTTNYLVVSLAVADLLVATLVMPWVVYLEVTGGVWNFSRICCDVFVTLDVMMCTASILNLCAISIDRYTAVVMPVHYQHGTGQSSCRRVALMITAVWVLAFAVSCPLLFGFNTTGDPTVCSISNPDFVIYSSVVSFYLPFGVTVLVYARIYVVLKQRRRKRILTRQNSQCNSVRPGFPQQTLSPDPAHLELKRYYSICQDTALGGPGFQERGGELKREEKTRNSLSPTIAPKLSLEVRKLSNGRLSTSLKLGPLQPRGVPLREKKATQMVAIVLGAFIVCWLPFFLTHVLNTHCQTCHVSPELYSATTWLGYVNSALNPVIYTTFNIEFRKAFLKILSC

SEQ ID NO: 1245 - DNA, 14739 bp, Homo sapiens
  source
  (1)..(14739)
  CDS (201)..(276)
  CDS (3889)..(3986)
  CDS (4568)..(6309)
  CDS (13998)..(14374)
  CDS (14460)..(14539)
gcagagctccaagggcccttggacgtctttactgaaggggaaactgaggcctggagaatttccctaagctcacacttcaacttagtgtcaaccagagtagaacgctggtcttccaggctccctccaaaagttatgctctgtgtcattaaaataaggaggagtctccttccaggaaacctcgtgttcagggaatgtgaacgatggtattaaaccaaaaacgtcccaacccaccaacaaacaaagcccagggcttcgaggctaattatgcgtttgctcgtgagtcacggtgcttctgctgagacccaaagccgagagccctggttcgtgcacttctgctcacggggagggaatgcatcagagcgcccaggagagctgtcaggctgtccttcggtttgtctgctcggcttgctgacttcatgggccagtgatagacgccaggctattcccccttcccaggagctggacaggggctggactgagtcactgaagtgattgacgacgctctcggctgcctgggggagaagttataattagggcagctttgtggccctttaactgccatctgtcagagctgccaagcagcaccaggcagcgtgggctattaggcctccaggtgctgggctcctagaggctgtggccactgcaggagctggcatcacatgctgagaatccaagggcccagctgtcagtcctggttctgtggcccctccctcccctgcgggctttgcagccgggtttcaggggagccctttggaggccctgtggagccctggccgccagccacagcagtggaaagtgctggaaaacaggaaactgctgcatgtggtgctgggatgggctttgcagatgtgaggatttatacagaggaaaatctgcaaattcttgcaatatttgtcatgctgagtgtggcccattttagacagtggtggccctgttcccatagggaattatctgtgcagtcctctcaggtcaaggggcaccttccctggcacaagcccttcctgggctggcttgatgcccctccccagctggggagtgcagactcgtagaaagccacataaagatgggtcctcagagggtgcctcatcctacactgtccttcatagatggggaaactcaagattgccctgggctggccaggtgacatgcacttaatttagtctctgacacttgggctgtgacaccgttttgaagcacgctgggtatatgagtgtacattaaatataagtgccagccagcttgtctccaggagcaattcaagctccaccttttgcacgtcagcccaggcagtaaatatctcacgtacacttacaccaaagagatgggcaaatacccacactgtccacgcagacccctaagagtacaggcaccgttgtcttggtggacagattgttttctcatgccctgaaactcagccttagaatcctaaggtcttaggaatggacaggacaccagttgtcttccagtccaataccctaccaggcgtgggagtcttctctacagcttgcttgccaagtgattgctttagcctctgcttgattgcttccagtgacagtgagcttactccctctgtgaggttgcccattttcagtgtgaactgaaatctgctactctataacttctgcacccgcttgacctctgaagccacactgagctaggttctttctgtatcccgtggcagcccttcagggatgctaggaaagtgattgtagactcctcacagcatctcctcctctggttatttattcatccacagctccttcattttaattttaatttaatttttttctcaccatgtcttagggtgctgacacagttccttcaatggatgctcagatgttctgttttctagacccccttgccatcctctagaattctttaggaagtcagtttgccattagcctttttgaagttcagagtggaactgagcccagcattacaggtgtggccacgtcagggcagtgcagggtgagaccatcacctccttttttccacatgtgatacttcttctattaatccagtctcagaccacactagcttttgtgggcagcctccttcctttgttatcgttagtaaaaagtcctaagtcttctcctagggtgaatattgagccactttttttggtgtattctgtttaggcagcttgttttctgttgctgggttctggacctgacatttgtctatataagtttttactttttttcagatgtgtccctagcataacctggccccattcctttgcatctagatgcctttggacaaggtattctttttcctttcttgtttccattgttctatatgcttagtcaagttcttaatgtaaaagtatagcaggtcagggcttccatgggctgtgaacaagtaaaaaaatcaaggtcttggccgggcacggtggctcatgcctgtaatcccagcactttgggagaccgaggtgggcagatcacgaggtcaggagatcaagaccagcctgaccaacatggtgaaaccctgtctttactaaaaatacaaaagttagccaggcatggtggcatgcgccttaattccagctactcgggaggctgaggcaggagaatcccttgaacctgggaggtggagtttacagtgagcagagatcatgccactgcactccagcctgggggacagagcgagactccatctcaaaaaaaaaaaaaaaaaaaatcaaggtctgtgtggttggggaatgggcttaggtttttatctcagagtaagcttgttgagggggcagggaaggggtgcatggggctgaggccaaattaggaagcctgggttactctgagacgtgggccaggctccagaccccgtgagttcagagccacagacagagaccagagaaataccttctttacccaaccattgatggcttctgtgccatcatttgaaattctttcctctgactcaggatttttgctcatggaaagggagacacagcattaacactcaaagtacttcctcaggggtctggagacctgggctttaagctcagaagcctttccttgcttcttgcatctccaaaaagtgatgggaatgagtgaccggcagtgattgctgcatcttccaggagtttggacctttgaacctttggtggaagttgcggatactctcacatatacacagaaattcttagttccttgactacgaataccaagaccagaagcactttgaagccttcctgacttgaggagtctatagggtccatgctgtggataagcatggaacaaggcacgcatttgcacagcgctggccgggatgaccctgcatcctttccgcattcgctcctcacaacagccccaagagcggggcgggagttaccatcccctcttcacacacgagggagctgaagcttgcaggcctcaagcttcatgcaaggtgaaactgttagtgatccttaaatattcatatagggaccagcacccatgtcccatatctctacattttacacacacacacacacacatacacacacacagttatatatgtcattgtcatcagtgatttcaaacaccaacatttccatgaacttgcctccattttcagaacattgccacacctgacctaccatcttttagctcaaagtacatctcagtaggtttcctggaacttactcaaggactccccagtgtttcttgtggaaactgggacttatacccacaaggctggcttcgggcaccagctaagccacagcagcctctcccagcgaggcaggacatggtgcagacacgtcattgccttttcctgggagggtggtttgaattcgagctagatgaagcgcaggtgaaagggctagcagatggctaagtgatggttggtggtgatgggctgggcagggcaggcccaggcgagggtgaggaagagctgcttccactgtagtcattcaggcagatcccagctctgtggtcctaactctgccgccgctgctgcacctcccggcaggctaccgtgtttgtggcctcaccatcttcccccaggttcagccctatttatttgttcccattgcctttgtgttcctcctgacagggctgtgtttaaccagcacattcagatgatgtgagggatacagagatggataagatacagttcccgccctaaggaaactgtagggatgaaagatggactccctgtccgtggaaagcttattgactggggaaggagacagacaggggacacagtgaatgacatccaaggccaccatggccaatgatggagactggaaagacgacttcatggaagggtaactgattgactcatggaatctgggaagtgtcctaaaggttattgcactggagttggacgtggaagcatgggaaaattttgtataaggacaagggacattccaggtagggagaattgcctgggcaaaggcatggaaacagaaaggcagggcaaaggtgcagaggcttcctgttcagagcagagagagcatgcgttcagtatgtgatgatggggttcaaagccaagccagcattggcactggagttgatgttggcttaaaacttgccagtgtcaggtagaggaccctgactaacgtgtgctctctccccttgcacaggctatgccactgaagcattatctccttttgctggtgggctgccaagcctggggtgcagggttggcctaccatggctgccctagcgagtgtacctgctccagggcctcccaggtggagtgcaccggggcacgcattgtggcggtgcccacccctctgccctggaacgccatgagcctgcagatcctcaacacgcacatcactgaactcaatgagtccccgttcctcaatatttcagccctcatcgccctgaggattgagaagaatgagctgtcgcgcatcacgcctggggccttccgaaacctgggctcgctgcgctatctcagcctcgccaacaacaagctgcaggttctgcccatcggcctcttccagggcctggacagccttgagtctctccttctgtccagtaaccagctgttgcagatccagccggcccacttctcccagtgcagcaacctcaaggagctgcagttgcacggcaaccacctggaatacatccctgacggagccttcgaccacctggtaggactcacgaagctcaatctgggcaagaatagcctcacccacatctcacccagggtcttccagcacctgggcaatctccaggtcctccggctgtatgagaacaggctcacggatatccccatgggcacttttgatgggcttgttaacctgcaggaactggctctacagcagaaccagattggactgctctcccctggtctcttccacaacaaccacaacctccagagactctacctgtccaacaaccacatctcccagctgccacccagcatcttcatgcagctgccccagctcaaccgtcttactctctttgggaattccctgaaggagctctctctggggatcttcgggcccatgcccaacctgcgggagctttggctctatgacaaccacatctcttctctacccgacaatgtcttcagcaacctccgccagttgcaggtcctgattcttagccgcaatcagatcagcttcatctccccgggtgccttcaacgggctaacggagcttcgggagctgtccctccacaccaacgcactgcaggacctggacgggaatgtcttccgcatgttggccaacctgcagaacatctccctgcagaacaatcgcctcagacagctcccagggaatatcttcgccaacgtcaatggcctcatggccatccagctgcagaacaaccagctggagaacttgcccctcggcatcttcgatcacctggggaaactgtgtgagctgcggctgtatgacaatccctggaggtgtgactcagacatccttccgctccgcaactggctcctgctcaaccagcctaggttagggacggacactgtacctgtgtgtttcagcccagccaatgtccgaggccagtccctcattatcatcaatgtcaacgttgctgttccaagcgtccatgtacctgaggtgcctagttacccagaaacaccatggtacccagacacacccagttaccctgacaccacatccgtctcttctaccactgagctaaccagccctgtggaagactacactgatctgactaccattcaggtcactgatgaccgcagcgtttggggcatgacccatgcccatagcgggctggccattgccgccattgtaattggcattgtcgccctggcctgctccctggctgcctgcgtcggctgttgctgctgcaagaagaggagccaagctgtcctgatgcagatgaaggcacccaatgagtgttaaagaggcaggctggagcagggctggggaatgatgggactggaggacctgggaatttcatctttctgcctccacccctgggtccatggagctttcccgtgattgctctttctggccctagataaaggtgtgcctacctcttcctgacttgcctgattctcccgtagagaagcaggtcgtgccggaccttcctacaatcaggaagatagatccaactggccatggcaaaagccctggggatttccgattcatacccctgggcttccttcgagagggctcttcctccaaatcctccccacctgtcctccaagaacagccttccctgcgcccaggccccctccgggcctctgtagactcagttagtccacagcctgctcacttcgtgggaatagttctccgctgagatagcccctctcgcctaagtattatgtaagttgatttcccttcttttgtttctcttgtttgtgctatggcttgacccagcatgtcccctcaaatgaaagttctccccttgattttctgctcctgaaggcagggtgagttctctcctcaaagaagacttcaaaccatttaactggtttcttaagagccgtcaatcagcctggttttggggatgctatgaaagagagaaggaaaatcatgccgctcagttcctggagacagaagagccgtcatcagtgtctcacttgtgatttttatctggaaaaggaagaaacaccccagcacagcaagctcagccttttagagaaggatatttccaaactgcaaactttgctttgaaaagtttagccctttaaggaatgaaatcatgtagaattttggacttctaaaaacattaaaatcagcttattaatacgggatagagaaagaaatctggtgcctgggggtccctgtgttcacccctagagtttgttttaaaatttttaattgaagcatgtgaagtgtacctgcagaaaagtgggaacatgatagtgtatggcttggtggattttcacaaactgaacatacctgtgtaatcagcatctagacccagacccagagcgtcacaaatatcccccatcctgggcttttcccagaggagatgggggcttctgaagatggacttacctgggacctgccccccatgagccaggacggtccccccacagtcagcctgtgcaaaggccccgtggccaggggtggaggagaatatgtgggtgtggacaggatgggagactgtggcctgaacaggagattttattatatctggagaccctgagagaccctgagacctggggcaccctggctggccaggtcagaagcatcctgactgcagaggtccgtgcagccacaccctcttccctgccagcaagctgtctgcggctcatcggaggcccctccgcctggagccttctatggacgtgatatgcctgtatctgtttttaattttcattcttcacttaggggaagtgaaatcgctcagagatgagatcctttaattgaaaacgaagtgtaacggaatctagtgtctttctaatgtggtaaaattctccatcaacatcacagtcagctggcagctgaacttcagaatctcacttacagcaggcgacacgggggtacaccgatgggtcacactgggtctgggggctccctggagctcctcctgcgtgtggtctggttaggagttgagttgtttgctccagggttattctcctcctcgagtcacagtcacacgaatacctgccttctctggctttcctgctatacacatattcacatggcgctcaagaagttaggctcatggcaacgtgtgtctttctctggacaactggcccagtttacagtgaaatggagaatttcaggtctccacgtctgcccaggaaagaacttcagctgactccacggggatctggaaatccacgaccaatcccgatcggctcttattagctccccgctccacaagacacctgtgctttggaaatccaccaccaatcccgatcggctcttattagctccccgctccacaagacacctgtgatctggaaatctaccaccaatcccgatcggctcttattagctccccgctccacaagacacctgtgacatcctccagggccacaggagcacgtgctgaccagttttcccttccagttcctgcacaaaaagtgtccagagggctgtttgcaaacactagtgcactttgtagcttttcaccctctgtcccagggaatctaggagagatgaggcccgtcagagtcaagagatgtcatccccccagggtctccaaggcatttccacactattggtggcacctggaggacatgcaccaaggcttgccagagccaacaggaagtgagcccagagcatggcacatgagcatcacccgctgatggtggcctgctgtgcctggtgccaacaggggcatcccggcccatacccctccagacaggaagcatgggtttgcccacagacctgtcgggtgctcctgtgagtggcctccagatgtctttgtgcataggcacaagtgggccagggctggagggaggtgggaaacctcatcatccggtgggccctgccaatcttaacccagaacccttaggtattcctggcagtagccatgacattggagcaccttcctctccagccagaggctgacctgagggccactgtcctcagatgacaccacccaggagcaccctaggtgaggggtgagggcccccttatgtgaacctcttgcctcttcctttctcccatcagagtggttggatggagccattggcctccttttcttcagcgggcccttcaacctctctgcaccatgttgtctggctgaggagctactagaaaagctgagtggagtctcctttccaacaggatgatgcatttgctcaattctcagggctggaatgagccggctggtcccccagaaagctggagtggggtacagagttcagttttcctctctgtttacagctccttgacagtcccacgcccatctggagtgggagctgggagtcagtgttggagaagaaacaacaaaagccaattagaaccactatttttaaaaagtgcttactgtgcacagatactcttcaagcactggacgtggattctctctctagccctcagcacccctgcggtaggagtgccgcctctacccacttgtgatggggtacagaggcacttgctcttctgcatggtgttcaataggctgggagttttatttatctcttcaaactttgtacaagagctcatggcttgtcttgggctttcgtcattaaaccaaaggaaatggaagccattcccctgttgctctccttagtcttggtcatcagaacctcacttggtaccatatagatcaaaagctttgtaaccacaggaaaaaataaactcttccatcccttaaagaatagaatagtttgtccctctcatgggaattgggctgtatgtatattgttcttcctccttagaatttagagatacaagagttctacttagaacttttcatggacacaatttccacaacctttcagatgctgatgtagagctattgggaaagaacttccaaactcaggaagtttgcagagagcagacagctagagataactcgggacccagagttggtcgacagatgttagatgtatcctagcttttagctataaaccactcaaagattcagcccccagatcccacagtcagaactgaatctgcgttgttgggaagccagcagtggccttgggaaggaagccatggctgtggttcagagagggtgggctggcaagccacttccggggaaaactccttccgccccaggtttcttcttctcttaaggagagattattctcaccaacccgctgccttcatgctgccttcaaagctagatcatgtttgccttgcttagagaattactgcaaatcagccccagtgcttggcgatgcatttacagatttctaggccctcagggttttgtagagtgtgagccctggtgggcagggttggggggtctgtcttctgctggatgctgcttgtaatccatttggtgtacagaatcaacaataaataatatacatgtatacatgggctgtgtgtgctctctatggaagtcttgggtaggtggtctcacacctgtggattctgctcttctatgtttgtgcaaggttgaactggacagatccttacagaaagcagattttgggctgagaataggcctttggaaagtgagtgggaggccgggtgcggtggcccacacctgtaaccccagcacgttgagaggccgaggtgggtggatcacctgagctcaggagttcaagaccagcctggccaacatggcaaaaacccatctctactaaaaatacaaaaattagccaggcatggtggtgtgtgcctgtaatcccagctactcgggaggctgaggcaggagaatctcttgaacccaggaggcagaggttgcagtgagccaaggttgtgccactgcccctccagcctgggcaacagagtgagactccatctcaaaaaaaaaaaaaaaaaaaaagaaaagaaagaaaagaaaataagtggggacccaaaagaaaataacaaatggtatctataggccaccgtggctggaaaagacctgaaggataagttcaatccattttatagatgaggaaaaggagctcaagacaggaaatgaatgtccaatagtcaccagtaagccagtggctgagccagcccggcaacccaggccttcaggctcccaggctggttcttttatgccaccaggaagccactgacgttctgtcagcatttgttcaaagcacacgtgtgtatgcacacacacacatgcatgcaggcaggtggcaggactatgttacacacctctggactcctctaagtacttagcaccaggctcaggaagtcccaggctctcaggcaacactgtctgaaggaaggtgactccctccaagtgtccaggtgtctccagaactccctcaggcctttgggttctgggggtgccacagctgctggtgcaggtccagcagttaagagaggggtgatctgctgtccctgtccctttatcccatgattatacacaggaaaagggcttccaatcatatttacctggactcttctagtgtcttagatcccttctgccaggtgtaagcctgtcccaggagattaagcccaacaggggtcagtcatgttcatcatattacagggctggacccctcccatgagcaaggcagggccttgttgcccttccctagccactgaaccttagtacagtcaaacagctttctggaattttggataatggggaaaggagttagaatctccatcccttctctttcagaagatccttgaaatttttttgtttgtttgtttgaggcaaagtctcattctgtcacccaggctggagtgcagtggcgcgatctcggctcactgcaacctccatctcccgggttcaagcgattctcctgcctcagcctccctagttgctgggactacgggcacatgccaccacacccagctaatttttgtatttttagtagagatgaggtttcaccatattggccaggatggtctcgatctcctgatctcatgttccacccacctcggcctcccaaagtgctgggattacaggcgtgagccacctcgcttggctgatccttggaatttttaatgcaagtccccttccacagatgtttcaccctacacacacactctctctctctgtctcctacctccccaggccttctgccacacccattccacagacgagaatgcagagacttgtagagattaaatcacttgtctaaggactgactagttagttgaagagtcagaattcaaacctagatctgtccaatgccaagtttctcttgttcaccaggccacgttgaccaatgaacaaacggtgttgctggaggcgagtgtggatggcttgagaaccttgagtacagggcggtgccaggctcttcccagaactgcttgtgagtgcccccacgcaagccatttttcccagccactgtcccacccttgccagcccgggggccgctgagggggagctgggcacactgttcaccgcctgtctccatcccagaggctcccgctgtcctctgccagagtgcatttgtggcatatcgccactgaaacacacttccttgccacactccattagacctttgcagtttggctgatgcaatcagctcacgtgcaaaagaaacattaatttgtactcataaaaagcgtagataaaaatcaataccatgcaatgagtgaaaaagccatcagtctactttaaatggtagactcctggcattgaaacgatcttagactgctcgtccaggtcaccccttcaccctgctcgcctccacacacccactcctacgctctcaccacacacccacatacatcctcacactcacactcactcagtgcacactcacacatacccactcaccacacaccacacacacacataccccaacacactcacacctactgcacacacgcacacccacccattcaccacacacaccacacacccacacactgcacacacacacccactcaccacacacatacacccacacacccactcactgcacactcacacccacttaccacacattttctcacacactctcattctacacacacgagacatactcatgcatatacacacccacttataccacacacacccctacacccacttacacacacccactcacacatacacccacttacacacactgcacacctacacacacgcactcaccacacacacccctacacccattcacacatatacccactcacaccccccacacccacacgcacgcactcaccaaacactcccctacacccacttacatacccattcacacatacacccacttacacacgcactcaccacacacaccgctacacccattcacacatatacccatttacacacacaccccccacacccacacgcacgcactcaccactcccctacacccacttacacacgcactcaccacacacacctttacacccactcacacatacacccacttacacacacatcacacatgtgctctcaccacacacactcctacactcacatacacacgcccactcacatatacaccctctttacataccacacccccacacacgcactcaccacacgcacccctacacccactcacacatacacccacacacgcacccacacacgcactcaccacacacacaccctacccacgtgcgcacacacccactcacacatacacccacttacacacacacacaacacacccccacacatgcactcaccacacaccccctacagccactcacatttacacccacttacatgcacacccccagacgcacgcactcagcacacacacactccgtgtgtcttgcagccctggttccacacctccggagatgggaaaatccctcccttccaaagcagcatctttcgtcctcggccagccctgagtgtctgagcgctcctctccatattgggccccaattcatctccctatagcttttcccccttctaattcaggaagggtttagaaagttcgttcattaaacaagcaaacaaacacaacaagacaaaacaacaaatccacagccctcttgaaatgcctccgggcgctgagagcccagcaggggcctgaggctgaaggcaggctcccagtccctctgcctctgctcacaggtatgggtgtgagcgtggaccccatcccaggcctcaccaacccagccgcctgcgggaatctctagagctttctgagtgtcctcggggtcctgaaggtgccaaccctgcaacctcggtgggattttggccccggcagggctctgtacatgggaggagttcagggtcattttgtaatcttcagaggccttgccaaggccctctcccgtcctgtgaccctggtgacattctgggacgctggggccacgtgaggggaggaaccactgcctggaactttgatcagcgctggggctggattgagctgaccacaggccacaccagactcctctctgctcctgaggaagacagggcagcccggcgccacccgctcggccctcacggtaggctcccggggtcgctcaagggctccagggtctgcagggacgtgggggcaggaacgggaacttgcgatctcccccgtttcagagcattccgcagctccaggcaggctgcggttctggggggcccctgccccgggaggagaagtccctgaggtgctcagctagggcgctgctgggaagaggcaggaggaaggtggggcgggggtttgtgagatgaagatctgccagtcctggcctacaaggctggtagtgagtagaggataagcagggtgaccagatgtccaggttggcctggttctgcctagtttatacttgtcatcttggcataataataataaatagtattactaattacttattaatac

SEQ ID NO: 1246 - protein, 790 aa, Homo sapiens
MVLNQKRPNPPTNKAQGFEANYAFALIQADPSSVVLTLPPLLHLPAGYRVCGLTIFPQAMPLKHYLLLLVGCQAWGAGLAYHGCPSECTCSRASQVECTGARIVAVPTPLPWNAMSLQILNTHITELNESPFLNISALIALRIEKNELSRITPGAFRNLGSLRYLSLANNKLQVLPIGLFQGLDSLESLLLSSNQLLQIQPAHFSQCSNLKELQLHGNHLEYIPDGAFDHLVGLTKLNLGKNSLTHISPRVFQHLGNLQVLRLYENRLTDIPMGTFDGLVNLQELALQQNQIGLLSPGLFHNNHNLQRLYLSNNHISQLPPSIFMQLPQLNRLTLFGNSLKELSLGIFGPMPNLRELWLYDNHISSLPDNVFSNLRQLQVLILSRNQISFISPGAFNGLTELRELSLHTNALQDLDGNVFRMLANLQNISLQNNRLRQLPGNIFANVNGLMAIQLQNNQLENLPLGIFDHLGKLCELRLYDNPWRCDSDILPLRNWLLLNQPRLGTDTVPVCFSPANVRGQSLIIINVNVAVPSVHVPEVPSYPETPWYPDTPSYPDTTSVSSTTELTSPVEDYTDLTTIQVTDDRSVWGMTHAHSGLAIAAIVIGIVALACSLAACVGCCCCKKRSQAVLMQMKAPNEYGCERGPHPRPHQPSRLRESLELSECPRGPEGANPATSVGFWPRQGSVHGRSSGSFCNLQRPCQGPLPSCDPGDILGRWGHVRGGTTAWNFDQRWGWIELTTGHTRLLSAPEEDRAARRHPLGPHEHSAAPGRLRFWGAPAPGGEVPEVLS

(The sequence listing continues in the following parts.)
